United States Patent Application Publication US 2013/0332133 A1 - sequence listing, part 35

SEQ ID NO: 252291 - DNA, 421 bp, Unknown
  Bacterial polypeptide expressing nucleotide sequence isolated from the Sargasso Sea
tatgagtaatatccaacatacactgtcaatcattaaaccagatgctgttgaaagaaatttacaagatgaaatcaaacaagaattaataaataaaggatttgaaataaaaaaagaaaaaaaaattcatatttctaaacaagaggctgaacaattttataaagttcatgaaacaaaacctttctacaatgaattatgctcatatctttcttcaggccctatagtcgttatggaattaattagagaaaacgccgttttagagaacagaaagttaatgggtggcacaaatccaaaagatgctgaagaaggaacgcttagaaaaaagtacggtatttcaatagataaaaactcagttcatggctctgatagtccagagaatgctagaatagagttagactttttttttaaagatagacatttttaa

SEQ ID NO: 252292 - DNA, 412 bp, Unknown
  Bacterial polypeptide expressing nucleotide sequence isolated from the Sargasso Sea
atgagtaatattgagcaaactttatcaattattaaaccagatgcagtagaaagaaatctagacaatgaaataaaacaaatgtttatagaaaatggtttcaacatatctcaagaaaaaaagattcagatagaaaagtcagaggcagaaaaattttataaagttcatgaaacaaaacctttttatgatgatttatgctcatatctttcatcaggcccaataattgcaatgattcttgagaaagagaatgctgtagctgataatagaaaattaatgggagcaactaaccctaatgatgctacggaaggaacgatcaggaaaaaatatggaatttcaatagataaaaattcagtacatggttcagatagtgttgaaaatgcaaaaattgaaattgattttttctttaaagattagc

SEQ ID NO: 252293 - DNA, 271 bp, Unknown
  Bacterial polypeptide expressing nucleotide sequence isolated from the Sargasso Sea
cagtgaacgtcctttcttcaatgaactaacccaattcatgagctctggaccggtagtggtatcaattcttgaaggagaaaacgcagtttcacatcacagagaaataatgggagcaaccaatcctgccgaagcagttgaaggtaccattagaagtgattatgctgagagtcttggggaaaatacagtccatggatcagacagtcttgaaaacgcggccattgaaattgcttacttcttttcacagacagaaatagtaaattctacttcataa

SEQ ID NO: 252294 - DNA, 396 bp, Unknown
  Bacterial polypeptide expressing nucleotide sequence isolated from the Sargasso Sea
tatgagtaatattgaacaaactttatcaattataaaaccagatgcagttgaaagaaatttgcaagaagaaattaaaaatgaatttaaaaaaaatggtttcttaattgtaaaagaaaaaaaaatccatatttcaaaattagaagcagaacaattttataaggttcaccaaacaaaaccattttataatgatttatgcgcttatttatcttcaggaccaattgtggttatggctcttgaaaaaggcaatgcagtcttggataatagacaattaatgggagccactaatccaaaagaagctgaagaaggaacattaagaaaaaaatacggtatatctattgataaaaactctgttcatggatcagacagtgttgagaacgcaaagatagaaattgattt

SEQ ID NO: 252295 - DNA, 412 bp, Unknown
  Bacterial polypeptide expressing nucleotide sequence isolated from the Sargasso Sea
atgagtaatattgaaaaaactttatcaattatcaaaccagatgcagtagaaagaaaccttgataatgaaattaaacaaatgtttataaaaaacggtttcaatatctctaaagaaaaaaaaatccagatagaaaaatctgaggctgaaaagttttataaagttcatgagacaaaaccattttatgatgatttatgttcatatctctcatctggtccaatagttgcaatgatacttgaaaaagcaaatgctgtagctgataacagaaagttaatgggtgcaactaatcctatagacgcagaagatggtactatcaggaaaaaatatggaatttcaatagacaaaaattcagtacacggttcagatagtgttgataatgcaaaaattgaaatcgattttttttttagggattagc

SEQ ID NO: 252296 - DNA, 214 bp, Unknown
  Bacterial polypeptide expressing nucleotide sequence isolated from the Sargasso Sea
tatgcaaaaaacattttcaattattaaacccgatgcagtaaaaagaaatctaataggccacattaatcaaatgattgaaagctcagatttaaaaatattagcttcaaagaaaatatatcttactaaaaatcaagctgaaatattttatgaagtacataaagatagaccattttttagtagtttagttgaatacatgacttctggccccgttcaa

SEQ ID NO: 252297 - DNA, 430 bp, Unknown
  Bacterial polypeptide expressing nucleotide sequence isolated from the Sargasso Sea
aatggcaaacgaacgcacatttagcattgtgaagccaaatgcagttcacgataacaatattggtaatattctttctcgctttgaagcagaaggtctaagattggcggcttctaagtttgccagcctatccaaagaaaaagctgaaggattttatattgagcacaaggaaagacccttttttggatcccttgtcaactttatgacttctggcccagttcttctcattgttcttgaaggagaggatgctgtagcgagatgtagagaaattatgggagcaaccaatcctgctgaagcagctgagggaactctaagaaagctttatgcgaaatcaattgaagaaaatgcagttcatggttctgattcaaaagcttctgctgagagagaaatctcttacttctttgaagctcatgagattagtccacgtttctaa

SEQ ID NO: 252298 - DNA, 259 bp, Unknown
  Bacterial polypeptide expressing nucleotide sequence isolated from the Sargasso Sea
taaaccattttatgataatttggtatcttatatgatatcaggtcctgttgtagtacaagtattaaaaggagaaaatgctatagatttaaatagaaaaattatgggagcaacaaatccagaagatgcagaggaaggtacaataagaaaagaatttgcaataaatattgaagaaaattctgtccatggttcagactcgttagaaaatgctaaaaaagagataagttttttcttttcagattgtgaaatttttgaaaattaa

SEQ ID NO: 252299 - DNA, 412 bp, Unknown
  Bacterial polypeptide expressing nucleotide sequence isolated from the Sargasso Sea
atgagtaacattgaacaaacactttcaattatcaagccagatgcggtcgaaagaaatttggataatgatattaaggcaatgtttaaaaataaaggattttcaattcataaagaaaaaaaaatacagatagaaaaatctgaggctgagaaattttataaagttcatgagactaaaccattttataatgatctttgttcatacctttcatcaggaccaatagttgtgatggttttagaaaaagaaaacgcagtattagctaatagagaattaatgggagcaacaaatcctaatgacgcagaagaaggcactattagaaaaaagtatggaatttcaatagataaaaattctgttcatggatcagatagtgttgaaaatgcaaaaatagaaatagattttttctttaaagactaaa

SEQ ID NO: 252300 - DNA, 418 bp, Unknown
  Bacterial polypeptide expressing nucleotide sequence isolated from the Sargasso Sea
aatggatagaacattttcaattattaaacctgatgctactaaaagaaatattacaggggaaataaatagtataattgaaaaaaacggccttagaattatagctcaaaaaagaattatcttgtctcaagaaaatgcaaaagaattttattcaattcacaaagacaaaccattttttaatgatttaattaaatatatgacttctcatcctgtagttctgcaagttcttcaatcaaatgatgcagttaacaagtatagagaagtaatgggttcaactaaccctaaagaagcaaaagagggaaccattagaagtaaatttggacttaatattcaagagaactcagtgcacggatctgactctaaagaaaatgcagatattgaaattagttttttctttaatgaaaatgaaattgttggataa

SEQ ID NO: 252301 - DNA, 289 bp, Unknown
  Bacterial polypeptide expressing nucleotide sequence isolated from the Sargasso Sea
ccgttcttcgccggtttggtggacttcatcacctctggccctgtggtggcgatggtttgggaaggcgatggggtgatcgccagtgcccgcaagctgatcggtgcgaccaaacccctggaggctgagccaggcaccatccgtggagatcttgccgtcaacatcggccgcaacgtgatccatggatcggatgcgccggaaaccgcagagtttgaaattggtctctggttcggtgcctcagaactcaatgattggtcaccttctgatcagagctggcgcgttgagggttgat

SEQ ID NO: 252302 - DNA, 412 bp, Unknown
  Bacterial polypeptide expressing nucleotide sequence isolated from the Sargasso Sea
atgagtaatttagagcaaaccttatcaataatcaaacctgatgctgtagaaagaaatttaactgataaaatcaaattaattttcacaaaaaataatttacatattacagacaataaaaagattcatatttcaaaggaggaagctgctgaattttataaggttcatcaatcaaagcctttttataacgatttatgtgaatacctttcctctggtccgattgttgtgatgattctagaaggcaaggacgctgtagttaaaaatagaaaaatcatgggagcaactgatccaaaaaatgcagatgaaaatactattaggaaattgtatggaatttcaattgacaaaaactctgttcacggatcagactctgtcgataatgcaaaaaaagagatagagtttttctttaaaaattaga

SEQ ID NO: 252303 - DNA, 238 bp, Unknown
  Bacterial polypeptide expressing nucleotide sequence isolated from the Sargasso Sea
cttgtgtgattttatgtgttctgggccaattgtagttcaggttctcgaaggggaagatgctgtaaaaagaaatagagaaattatgggagctactaaccctgaagaggccgctgatggcacaataagaaaaaaatatgcaatatcactagaaaaaaactccgttcatggctctgacagtcttgaaaatgcaaaaattgagatgagtcactttttttcagaagaagacattatttcctaa

SEQ ID NO: 252304 - DNA, 412 bp, Unknown
  Bacterial polypeptide expressing nucleotide sequence isolated from the Sargasso Sea
atgagtaacgcggaaagaacgctttcaattattaaacctgatgcagtagagagaaatttgtcagaaaaaattaaatcaatttttttaaaaaataacctattagttaaagataccaaaaaacttcatatatcaaaggacgaagcagctgaattttataaagtacatcagtctaaaccattttacgatcaactttgtaattatttatcatctggaccgatagaagttatgattttagagggtgaaaatgctgttttaaagaatagggaattgatgggtgccaccgacccaaaaaatgcaaaagacgggaccataaggaagctttttggcgtttcaattgataaaaattctgtccatggctcagactcagtagataacgcaaaaaatgaaataaatttttttttcaataaataaa

SEQ ID NO: 252305 - DNA, 421 bp, Unknown
  Bacterial polypeptide expressing nucleotide sequence isolated from the Sargasso Sea
atgtctatagaaagaactctttcaattataaagcctgatgcaactaaaagaaatattaccggaaagataatatcttgctttgaagaatctggtttaaatattattgctcaaaagaaaattttattaacgaaagaacaagcggaaggcttttattccgttcactccgaaaaacctttttttcaagatttggttacttttatgacctcagcaccaataattgttcaagttttagaaggcgagaatgcaattctaaaaaatagagaaatcatgggagctacaaatcctgatgatgctgaagagggaacaattagaaaacagtttgctctatcaatagaggcaaattctgtacacggctctgattcctctgagacagcaattgaagaaataaaatacttctttgatgagtctgagattatataaa

SEQ ID NO: 252306 - DNA, 412 bp, Unknown
  Bacterial polypeptide expressing nucleotide sequence isolated from the Sargasso Sea
tatgagtaataaagaacaaacgctttcaattattaaaccagatgcagttgaaagaaatcttgacaatgaaatcaaagagatatttaaaaataatggttttcaaattgtcaaagaaaaaaaaattcagatagaaaaattagaagctgaaaaattttataaagttcatgaaacaaagcctttttataacgatttatgtacatatttatcttctggaccaattattgttatgatcctagaaaaagaaaatgcagttttagcgaatcgagaactaatgggagcaactaatcccaaagaggctaaagaaggaacgataagaaaaaaatatggcatatcaattgataaaaattctgtccatggatctgatagcactgaaaatgcgaaaattgaaattaattttttttttaaagattga

SEQ ID NO: 252307 - DNA, 395 bp, Unknown
  Bacterial polypeptide expressing nucleotide sequence isolated from the Sargasso Sea
aaactttatcaattttaaaccagatgctgtagaaagaaatttacaggatgaaattaaagaggaattcaaaaaaaatggattttcaattgtaaaagaaaaaaaaattcacataaataaatctgaagcagaacaattttacaaggtacaccaaacaaaacccttttataatgatttgtgtgcctatctatcatcagggccaatagtagtaatggcactcgaaaaagataatgcaattctagataataggcaattaatgggcgccaccaatccaaaagaagccaatgagggtacattaaggaaaaaatacggcatatcgatcgataaaaattctgttcatggctcagacagcgttgaaaacgcaaaaatagagattgattttttctttaaagactagt

SEQ ID NO: 252308 - DNA, 196 bp, Unknown
  Bacterial polypeptide expressing nucleotide sequence isolated from the Sargasso Sea
tattgttgtaatggttattgaaaaagttaatgcggtgattggaaatagagaactcatgggggccactaacccaaatgatgctgaggacggaactatcagaaaaagatatggtatatcaatagataaaaattcagtgcatggttctgacagtgtggagaatgctagaattgaaatagatttcttttttaaagactaa

SEQ ID NO: 252309 - DNA, 424 bp, Unknown
  Bacterial polypeptide expressing nucleotide sequence isolated from the Sargasso Sea
aatgccaatacaaagaaccttttcaataattaaaccggacgcgactaagcgaaatttaactggcgcgataaacgcaaggcttgaatccgccggtttgtcaataatagcccaaaagaaaattcatttaacaaagcaacaagcagaatcattttatgcagtgcatagagaacggccgttctatgaggagttatgcgaatttatggcctcttacccaattgtggtacaagtgctggaaggagaaaatgctattaaaaaaaatagagaagtaatgggagctaccaatccggtggatgcggctgaaggtactatcaggaaagaatttgctttgtcaatgagtgagaattccgttcatggttcagatgccgaagaaactgcgagagaggaaatctcttattttttctcaggtcttgagttagtaggataa

SEQ ID NO: 252310 - DNA, 412 bp, Unknown
  Bacterial polypeptide expressing nucleotide sequence isolated from the Sargasso Sea
atgagtaatattgagcaaactttatcaataattaaaccagatgcagttgagagaaatcttgaaaatgaaatcaaagaaatttttaaaagtaatggtttttcgattttggaagaaaaaaaaattcagattgaaaaatctgaagctgaaaatttttatagagttcatgaaacaaagccattttataatgatttgtgtgaatacctatcttcaggtccaatagttgtaatggtactttcaaaagaaaacgcagttttagcaaatagagaattgatgggtgcaacaaatcctaaagatgcggaagaaggcacaattagaaagaaatatgggatttcaattgataaaaactctgtacatggatctgacagtattgaaaatgctaaaattgaaattgatttcttttttaaagactaaa

SEQ ID NO: 252311 - DNA, 424 bp, Unknown
  Bacterial polypeptide expressing nucleotide sequence isolated from the Sargasso Sea
atgggtttggaacgaacattcagtattattaaacctgatgcaacacgccgcaatcttacaggaaaaataaatgcaaagtttgaagaggcaggtcttagggttgttgcccagaagcgtattcatatgacaaaggagcaggccggaaaattttatgaagtccattctgaacgtccattttatgacgaattgtgtgattttatgtcatctgaacccgtcatagtacaggtacttgagggcgaaagcgccatctctaagaatagagaagttatgggcgcaacaaaccccgcagatgcggccccaggcactattagggcagaatttgcggaaagtatgggcgaaaattcagtgcatggttctgatgcccctgaaaccgctgctattgaaatcgcttatttcttttctggaatagaattagttgggtagt

SEQ ID NO: 252312 - DNA, 460 bp, Unknown
  Bacterial polypeptide expressing nucleotide sequence isolated from the Sargasso Sea
atgaccaaagagagaacctttattgcaattaaaccagatggagttcaaagaggatatgtttctgagattattggcagatttgaaaaaaaaggatttaaattggttggattaaagcaattaattccttcaaaagaacttgctcaaaatcattatggagtacatagagaaagacccttttttggtgatttagtagactttatttcaagtggtcctgttgtagcaatggtgtgggaaggcgaaggagttattttgagtgctagaaaactaataggtgcaacaaaacctctggaagcagagcctggaacaattagaggtgatttagctattgatattgggaggaatattattcatggttctgatggagaagatacagcaaaatttgaaattgatctatggtttaacgaagaggaattatgtgagtgggaaacttctgatgcgaaatggcgatctgaaaattaaa

SEQ ID NO: 252313 - DNA, 424 bp, Unknown
  Bacterial polypeptide expressing nucleotide sequence isolated from the Sargasso Sea
atgacaaaagagagaacattttccataattaagcctgatgctacgagacgtaatttaattggaaaaataattacaaagctagaggatggcgggctgcgtgttattgcgcaaaaaaagattcatttaacaaaagagcaggcagagcagttctactccgtgcataaagaaagacctttttacaatgacttggttcaatttatgacatctggccccgtggtcgttcaagtgcttgaaggtgataacgcggtattgaggaatagagaattaatgggcgcaaccaatcctgcagaggcagaaccaggtaccataaggagagaatacgcagaaagtctggaagctaattctgttcatggctccgacagtcttgaaaatgcaaaaatcgaaattgattttttctttggtgctgacgaaatagttggctagc

SEQ ID NO: 252314 - DNA, 370 bp, Unknown
  Bacterial polypeptide expressing nucleotide sequence isolated from the Sargasso Sea
aaaaatttacgaacgttttgagtcagggggcctgcggattctggcggcacggatgattcacttgacccgcgcccaggcgcaggagttctacgcagtacaccgcgaacggcctttctacaacgatcttgttgaatatatgatctccggccccgtcatggttcaggtcctcgaaggggagaacgcgattgcctgcaatcgggagatcatgggcgcgaccaatcctgctgacgcggcgccaggtacgatccgtgcagattttgcggaatccgtcgaggccaatgctgtccatggctcggatgggccagatacggcacgggaggagattgccttcttcttcgacgacgctgacctttgtccgagggctgactga

SEQ ID NO: 252315 - DNA, 433 bp, Unknown
  Bacterial polypeptide expressing nucleotide sequence isolated from the Sargasso Sea
tatggcgatcgaacgcacattttctatcattaagcctgatgctgttgctaaaaaccacatcggtgcaatctacaaccgttttgaaactgctggtctgaagatcgttgcagctaaaatgttacacctgactaaagaacaagctgaaggtttctatgctgagcatagcgagcgtggcttcttcggtgctctggttgctttcatgacttctggcccaatcatggttcaagtattagaaggcgaaaacgctgttttagctcaccgcgaaattttaggtgcaactaacccagctcaagcggctcctggtactatccgtgctgatttcgctcaaagcatcgacgaaaacgcagctcacggttcagattctttagcatctgcagaacgtgaaattgcttacttcttcagtgctgaagaactgtgtccacgtactcgttaa

SEQ ID NO: 252316 - DNA, 400 bp, Unknown
  Bacterial polypeptide expressing nucleotide sequence isolated from the Sargasso Sea
catgaaaactttttttatggttaagccagacggagtaaaaagaaatatagtaggtcaagtcattgatagagttgaacaagaaggttttaaaatctcgaagatgaaaatgatgacaataagtagtgaattagctgaagaacattacggagagcataaagacaaacctttctttcaagatttagtgtcatttattacaagtggtcctgttgtagccatggaggttgaaggggaagatgtagtcagtgaagtaagaaggattatgggtgcaacaaatccttcagatgcagaccctggaacaattagagcagattttgctaccaaattagaagaaaatgttgttcatggttcagattctgaagaaagtgctgaaagagaattaggccttttcttcaacaattaa

SEQ ID NO: 252317 - DNA, 421 bp, Unknown
  Bacterial polypeptide expressing nucleotide sequence isolated from the Sargasso Sea
aatgtctatagaaagaactctttcaattataaagcctgatgcaactaaaagaaatattaccggaaagataatatcttgctttgaagaatctggtttaaatattattgctcaaaagaaaattttattaacgaaagaacaagcggaaggcttttattccgttcactccgaaaaacctttttttcaagatttggttacttttatgacctcagcaccaataattgttcaagttttagaaggcgagaatgcaattctaaaaaatagagaaatcatgggagctacaaatcctgatgatgctgaagagggaacaattagaaaacagtttgctctatcaatagaggcaaattctgtacacggctctgattcctctgagacagcaattgaagaaataaaatacttctttgatgagtctgagattatataa

SEQ ID NO: 252318 - DNA, 397 bp, Unknown
  Bacterial polypeptide expressing nucleotide sequence isolated from the Sargasso Sea
aatgaaaacgttttttatgattaagccagatggcgtaaaacgaaatctcattggtgaaataatatcgcgagttgaagaaaaaggttttaaaataacaaaaataaaaatgatgacaattagtcaagatttagctgaggaacactacggagaacacaaagataaaccattttttggggatcttgtgagttttataacaagtggccctgttgtagctatgcaagttgagggcgaaaatgtagtagcacaaataagaaatcttatgggcgctactaacccttcagatgcaactccaggttcaatcagaggagatttatcaacagaacttgataaaaatgtagtacatgggtcagattctgatgaaagtgccgagagagaactaaatttattcttttcgtaa

SEQ ID NO: 252319 - DNA, 427 bp, Unknown
  Bacterial polypeptide expressing nucleotide sequence isolated from the Sargasso Sea
atggcaatcgagcgcaccctgtcgatcatcaagccggatgcggtggcaaagaacgtgatcggtcagatctacagccgtttcgaaggcgccggcctgaagatcgtcgcatcgcgcatggcacacctgtcgcgtgcagacgcagagaagttctacgcggttcacgcagcgcgtccgttcttcaaggacctcgtcgatttcatgatctcgggcccggtgatgatccaggttctggaaggtgaaggcgcgatcctgaagaaccgcgacctgatgggcgcaacggatccgaagaaggcagaaaagggcacgatccgcgccgacttcgccgacagcatcgacgcgaacgccgtgcacggctcggacgctgctgagacggcagcggtcgaaatcgcgttcttcttcccggaaatgaacgtttactcgcgctaag

SEQ ID NO: 252320 - DNA, 433 bp, Unknown
  Bacterial polypeptide expressing nucleotide sequence isolated from the Sargasso Sea
aatggcacttgaacatactttatcaatcatcaagcctgacggagtaaggcggaaccttgtgggaaaaataatcagtagatttgaagaaaacaacctacgtattgttgctaccaaaatgattcacatgactatatcggagtcagagggattttacgcggttcactgcgaacgtcctttcttcagtgaactaacccaattcatgagctctggaccggtagttgtatcaatacttgaaggagagaacgcagtttcacatcacagagaaataatgggagcaaccaatcctgccgaagcagttgaaggtagcattagaagtgattatgctgaaagtcttggtgaaaatacagtccatggatcagacagtcttgaaaacgcagccattgaaattgcttacttcttttcacagacagaaatagtaaattctacttcatga

SEQ ID NO: 252321 - DNA, 433 bp, Unknown
  Bacterial polypeptide expressing nucleotide sequence isolated from the Sargasso Sea
tatggcattggaacaaaccctatccatcatcaaacctgacggggttaagcgaaatctggtcggagaaattctgggacgttttgaacaaaagggcctcaggattgtagccactcgcatgcttcacctttccaaacgtgaagctgaaggattttatgcggtccaccgtgaacgtccattttttgaggaactgacgaatttcatgtgttccgggccggtcgtggtcagtgtacttgagggagaaaacgctgttgcttatcaccgtgaaatcatgggagccaccaatcctgctgaagcggcagaaggaaccatccgcaaggattttgctcaaagcattggggagaacacggttcatgggtctgacagtctggaaaacgctgcaatcgaaatagcctattttttcgctcagactgaattggtcaacgggaaggcttga

SEQ ID NO: 252322 - DNA, 142 bp, Unknown
  Bacterial polypeptide expressing nucleotide sequence isolated from the Sargasso Sea
aatgggtgcaacaaatccaaaagatgctgaagaaggtacaataagaaaaaaatatggaatttcaattgataaaaattctgttcacggctcagacagtgttgaaaatgcaaaaaaagaaattaatttttttttcaaagattaa

SEQ ID NO: 252323 - DNA, 412 bp, Unknown
  Bacterial polypeptide expressing nucleotide sequence isolated from the Sargasso Sea
tatggccattgagcgaactctatcaataattaaaccagatgccgttgctaaaaacgttattggtgaaattatatctagatttgaaaaaaataatttaaagattattgctgccaaacttgttactttgtcagcttctgatgctggtggtttttatgctgagcataagggaaagcctttctatgacgatttaattaaatttatgacttcaggaccggtttttattcaagttttggagggtgaagatgcaattagtaaaaatagagagcttatgggaaacactgatccatcaaaagcagatccaggaacgataagggcagactttgcactaacgattgatgcaaatgctgttcatggatccgattcagaaaaaagtgctgagagagaaatagctttcttttttagtgatttataa

SEQ ID NO: 252324 - DNA, 427 bp, Unknown
  Bacterial polypeptide expressing nucleotide sequence isolated from the Sargasso Sea
tatgagcattgaaaaaacattgtcaataattaaacctgacgcagttagcaagaatattattggaaaaattataaccaggtttgaagataacggattatatctcgtagctggtaagctcttacatctttccgatgatgatgcaggtggtttttatcaagagcataaaggtaaacctttttatgaagatcttattaaatttatgacatcaggaccggtttttatccaagttttggagggcgaggatgcaattagaaaaaacagagaattaatgggtgatactgatcctaaaaaggcaaaaaaaggaacaattagggctgattttgcaaatagcattgatgcaaatgcagtccatgggtctgattctcaaacaagtgctatcagggagattgagtacttctttaaagctgaagaagtattgaataaataa

SEQ ID NO: 252325 - DNA, 430 bp, Unknown
  Bacterial polypeptide expressing nucleotide sequence isolated from the Sargasso Sea
aatggccatcgaacgtaccttctccatcatcaagccggatgccgtcagcaagaacctgatcggtgccatctacaaccgtttcgagagcgctggcctgaaagtcatcgccgccaagatgctgcacatgagcagcgagcaagccgccggtttctatgccgagcaccagggcaagcctttctatgacggcctggtcagcttcatgacctccggccctgtcatgatccaggtgctggaaggcgaagaggcgatccgtcgccaccgtgaaatcatgggcgccaccaacccgaaagaggccctggccggcaccctgcgcgcctgcttcgccgagagcatcgaccgcaacgccgtgcacggctccgatgcaccggcctccgctgcccgtgaaatcgcctacttcttctccgacgccgagatctgcccgcgcggctga

SEQ ID NO: 252326 - DNA, 424 bp, Unknown
  Bacterial polypeptide expressing nucleotide sequence isolated from the Sargasso Sea
atgggtattgaaagaacgttttctataataaagcctgatgcaacccttgcaaataaaacaggagccattaacgcgctcatcgagcaaagtggtttacgaataatagcgcagcggcgaattagaatgactaaagcgcaagcacagcagttttacgcggttcattcagaacgacccttttacgatgagttggtggaattcatgatgtcaggacccgttgtcgttcaggtcctagaaggagagaacgcgataacaaaataccgcgaagtaatgggtgctaccaatcctgcagaggctgcggaaggtacaattagaaaactttacgcaaaaagcgttggtgagaactcagttcacggttctgatgctgcagcaaccgctgcagaggaaatcccgcagtttttctctgaggacgatatcgtcggctgaa

SEQ ID NO: 252327 - DNA, 448 bp, Unknown
  Bacterial polypeptide expressing nucleotide sequence isolated from the Sargasso Sea
catggagactacatacatcatggtaaaacccgacggagttcaacgcggactcgttggagagattattggacgatttgaacaaaaaggactgcagttagtcggattgaagcaagtagtgcctagtgaagagatcgctaaagagcactatgcggttcacgcagagcgcccatttttcccagggctgatcaagttcgtaaccagcggacccgttgtttgcatggcttggactggtagagatgcaatcagtgtcgcacgtaatttaatcggtcctacaaatggtcgcgaagcagcgccggggacaatccgaggcgattttggaatggatataggattcaatatgattcacggttctgatgctgctgaaaccgcggaattcgagctaggattgtggttcccagaaggtctcaatgaatggaccttagattcacaaaattgggtatatgagtga

SEQ ID NO: 252328 - DNA, 448 bp, Unknown
  Bacterial polypeptide expressing nucleotide sequence isolated from the Sargasso Sea
atgcagacgaccttcgtgatgatcaagcctgacggtgttcaaaggggcctggtagccgaaataatcggtagattcgagaacaagggtctacgactagtaggactgaggcaattgacccctcctatggagctagcagaggctcactatgaggttcacaacgagaggcccttctacagtggcctaatcgagttcatcacatctggcccagtagtggctatggcatggaccggagtcgacgcgattagcgtggctcgaaacataatcggacctactgacggtcgaactgccgctcctggtaccatcagaggggacttcgctatggatatcggccacaatgttatccacggctctgatggtgaggacacggcctccttcgagttggggctttggttcccagacggtctagtcgaatgggcccgtgatgcagaagcgcacatctacgaatgag

SEQ ID NO: 252329 - DNA, 424 bp, Unknown
  Bacterial polypeptide expressing nucleotide sequence isolated from the Sargasso Sea
aatggcaatagagagaactttttcaattatcaaacccgatgcagttgagcgaaataaaattggtgaaattacagccatgcttgagtctgccggcttaagaattgttgcttctaaaaggattctattagaccaaaataaagcagcctctttttatggggtgcattctgacaagccatttttccaaagtttgtgtgattttatgtgttcaggaccgatcgtagttcaggtccttgagggagaaaatgcaattcaaaggaatagagaagtaatgggagcaactaatccagaggaagctgatgagggaacgattagaaaaaaattcgctttatctctagaaaaaaattctgtacatggatcagacagtcctgaaaatgctgaaatcgaaataaatcatttttttgatgaagcagatatcatttcgtaa

SEQ ID NO: 252330 - DNA, 412 bp, Unknown
  Bacterial polypeptide expressing nucleotide sequence isolated from the Sargasso Sea
tatgagtaatatagaacaaacactttcaataataaaaccagatgcagtcgaaagaaatttaattgatgaaataaagtctattttcactaaaaataatttaaaaataaaagaagataaaaaaattcatattaccaaagaggaggcagcagaattttataaagttcatcaaacaaagcctttctatgatgatctttgttcttatttatcatctggaccaattgtggtgatggttttagagggtgaaaatgctgtgttattcaacaggcaactaatgggagcaactgatcccaaacaagcaaaagagaatactattagaaaactttatggattatctatagataaaaattctgtgcatggatctgactctgttgataacgcaaaaaaagaaatagcttttttttttaaaaattaa

SEQ ID NO: 252331 - DNA, 421 bp, Unknown
  Bacterial polypeptide expressing nucleotide sequence isolated from the Sargasso Sea
atggaaaagacattatcaatcataaagcctgatgcagtatcaaaaaatgttttaggcaagattttagatagatttgaaagttcaggcttgaaaatagttgctataaaaatgcttcatctagatcaagatatggcagaaggattttatgcagaacataaaggcaagccatttttcgacaaacttattactttcatgacttctggtccagttattgtgcaggttttgtctggagaaaatgctataaaaaccaatagagagcttatggggaatacaaatccagaagaagctgcttcaggaacaatcagatcagattttgctgaatcaattgatgctaatgcagttcatgggtcggactcttcagaaagtgcagaacgcgaaatttcttatttctttacagaatctgaaatttttggcagctaaa

SEQ ID NO: 252332 - DNA, 388 bp, Unknown
  Bacterial polypeptide expressing nucleotide sequence isolated from the Sargasso Sea
gatgcaacttctagaaatattcatcggaaagataataagcagatttgaagacaataacttaaaagttgttgctgcaaaactaattcagttagatcaagcgaaagcaggtggcttttatgcagagcatgatggaaaaccattttttcagaacctaattgaatatatgacatcggctcctgttctcgttcaagttttagagggtgaatcagctatagccaaaaatagagagttgatgggagcaaccaatcctcaagatgcggctcctggaacaattagagcagattttgcagaatccatagatgctaatgctgtgcatggatcagactctgaatctagtgcattacgggagataaattatttcttcgagcccgaagaaattgttagttga

SEQ ID NO: 252333 - DNA, 326 bp, Unknown
  Bacterial polypeptide expressing nucleotide sequence isolated from the Sargasso Sea
aatgtctatagagagaactctttcaattataaagcctgatgcaactaaaagaaatataaccggaaagataatatcttgctttgaagaatctggtttaaatattattgctcaaaagaaaattttattaacgaaagaacaagcggaaggcttttattccgttcactccgaaaaacctttttttcaagatttggttacttttatgacctcagcaccaataattgttcaagttttagaaggcgagaatgcaattctaaaaaatagagaaatcatgggagctacaaatcctgatgatgctgaagagggaacaattagaaaaccagttgctc

SEQ ID NO: 252334 - DNA, 412 bp, Unknown
  Bacterial polypeptide expressing nucleotide sequence isolated from the Sargasso Sea
tatgagtaacatagaacaaactctttcaataattaaacccgatgcagctgaaaggaaactatctgaaaaaataaaatcaatttttttaaaaaacaaccttaaaatattagaaacaaaaaaacttcatatttcaaaagatgaagcagctgaattttacaaagtacatcaatcaaaaccattttacgatcaactttgtagttacttatcgtctggacccatagaagttatgattttggagggcgataacgctgtgcttaaaaatagagagttaatgggtgccactgacccaaagaacgctaaagatggaactataaggaagctttatggtatttcaattgataaaaattcagtacatggttcagactctgttgaaaatgcacaaattgaaataaattttttctttaaaaaataa

SEQ ID NO: 252335 - DNA, 415 bp, Unknown
  Bacterial polypeptide expressing nucleotide sequence isolated from the Sargasso Sea
catggaaaaaacattatcgattattaaaccagatgcgatatccaaaaatgttattggaaaaatagtgcaaagatttgaggatgcagatcttaaagtagtggcaatgaagatgattcatctatctgatgaagatgcgaaaggattttacaaagagcatgaaggaaaaccattttttaatcctttggtagaattcatgacatcaggaccggtagtagttcaagtgctgagaggagaaaatgcaattttaaaaaaccgtgaacttatgggcaataccaatccccaagaagccgaacctggtacgattcgatcagattttgcacaatcaatagatgcaaatgcagtgcacggctctgattcagtggagagcgctaagagagaaatagcatatttctttaatgattctgaaattttctag

SEQ ID NO: 252336 - DNA, 412 bp, Unknown
  Bacterial polypeptide expressing nucleotide sequence isolated from the Sargasso Sea
tatgagtaatattgaacaaacattatcgataataaagcctgatgctgttgaaagaaatcttgacgaccaaataaaaaaaatatttcaaaataatggttttaaaataattaaagagaaaaaattgaaacttgaaaagtcagaagcagaacaattttataaagttcatgaaactaaaccgttctataatgatttatgtaattatttgtcatcaggcactatagtcgcaatggttttagaaaaagaaaatgcaattaagtctaatagagatttaatgggtgctactgaccctgctaaagcagaggagggaacattaagaaaattatttggtaaatctatagataaaaactcagttcatggatccgatagtcctgctaccgcaaaattagaaatagaattctttttcaaggattaa

SEQ ID NO: 252337 - DNA, 427 bp, Unknown
  Bacterial polypeptide expressing nucleotide sequence isolated from the Sargasso Sea
atgtcaatcgagagaacactttcaattattaaaccagatgcagtaggtaaaaatgtaattggaaaaataatatcaagatttgaagaaaataatctttatcttgtcgcgggtaaattagttcatttgtcagatgaaatggcatcgggattttatgctgaacatgaaggcaaaccattttttaatgatctaaaaaaattcatgacttcaggaccagtttttgttcaagtattagaaggtgaaaatgcagttcaaaaaaatagagacttgatgggtagcactaaccctaaagaagctgctccaggaacaattagagcagattttgctaatagcattgatgcaaacgctgttcatggatcagactctgttgaaagtgctaaaagggagattgagtatttctttaatacagaagaaatattgaataaataag

SEQ ID NO: 252338 - DNA, 424 bp, Unknown
  Bacterial polypeptide expressing nucleotide sequence isolated from the Sargasso Sea
tatgagtattgaacaaacactatctataataaaacctgatgcaaccaaacgtaaccttactggaaaaattaattcaaaattagaagactcaggattaaaaatcattgctcaaaaaagaattcttttatcaaaaacccaagctgaagatttctataaagttcatcaagagaagccattttataatgatttagtaaaatttatgatttctggaccagtagttgttcaagttttagagggtgaaaatgctgtgtctaaaaacagagaagtaatgggcgctactaatcctgatgaagcagaggatggaacaataagaaaagaatttgcagtaagtttagaagcaaattctgttcatgggtcagattcattagagaatgctaaaattgaaatttcttttttcttttcgcaaattgaattagttaattaa

SEQ ID NO: 252339 - DNA, 412 bp, Unknown
  Bacterial polypeptide expressing nucleotide sequence isolated from the Sargasso Sea
atgagtaatttggaacaaactctatcaattattaaaccagatgctgtagagagaaatctagaagttaaaattaaaacaatgtttaaaaatgagggttttaaaattgttaaagaaaagaaaattaaacttgaaaaaatagatgctgaaaaattttacaaagtacacgaaacaaagccattttataatgatctatgtgaatatctatcctcaggaccaatagttgtgatgatattagaaaaaaatggagcagtgttagaaaatagaagattaatgggcgctactgatccaaaaaatgcagaagatggaacaattagaaaagaatttggtttatctatagataaaaattcagtacatggttcagacagtatagataacgcaaaagtcgagatcaatttcttttttaataactaat

SEQ ID NO: 252340 - DNA, 427 bp, Unknown
  Bacterial polypeptide expressing nucleotide sequence isolated from the Sargasso Sea
tatgacaaccgagagaacactttcaattattaaaccagatgcagttggtaaaaatgttattggaaaaataatatcaagatttgaagacaataatctttatcttgttgcgggtaaactagttcatttgtcagatgaaatggcatcaggattttatgctgaacacgaaggcaaaccattttttaacgacctaaaaaaattcatgacttcaggaccagtttttgttcaagtattagaaggtgaaaatgcggtccaaaaaaatagagacttgatgggtagcactaatcctaaagaagccgctccaggaacaattagagcagattttgctaatagcattgatgcaaacgctgttcatggatcagactctgttgagagtgctaaaagggagattgagtatttctttaatacagaagaaatattgaataaataa

SEQ ID NO: 252341 - DNA, 412 bp, Unknown
  Bacterial polypeptide expressing nucleotide sequence isolated from the Sargasso Sea
tatgagtaatttagaacaaaccttatcaattataaaaccagatgcagtggaaagaaatctagaaaacgaaattaaagaaatgtttcaatctaatggttttacaattttaaaagaaaaaaaaatacaaattgaaaaatcagaggctgaaaagttttataaagttcatgaaacaaagccattttataatgatttatgtgaatatctgtcatcaggcccaattgtagttatgattcttgaaaaagagaatgcagttttagtaaatagagaattaatgggtgctacaaatccagaagatgcagaaaagggcaccattagaaaaaaatacggtatttcaatagacaaaaactctgtccacggatcagatagtgttgaaaacgctaaaattgaaatagattttttctttaaagattaa

SEQ ID NO: 252342 - DNA, 407 bp, Unknown
  Bacterial polypeptide expressing nucleotide sequence isolated from the Sargasso Sea
tttcgataataaaaccagatgccgtttgagcgaaataaaatttggcgaaattacagccatgcttgagtctgctggcctaagaattgttgcgtctaaaaggattctattagaccaaaataaagcagcctctttttatggagtgcattccgacaaaccttttttccaaagcttgtgtgattttatgtgttcaggtccaatcgtggtacaggtccttgagggagaaaatgcaattctaaggaatagagaagtaatgggagcaactaatccagaagaagctgatgagggtacaattagaaaaaaattcgctttgtctctagaaaaaaattctgtacatggatcagacagtcctgaaaatgctgaaatcgaaataaatcactttttcgatgaagcagatattatttcgtaag

SEQ ID NO: 252343 - DNA, 412 bp, Unknown
  Bacterial polypeptide expressing nucleotide sequence isolated from the Sargasso Sea
atgagtgatatagagcaaacactttcaattattaaaccagatgctgttgagaggagtttagaaaaggaaattaaagaaatttttataaaaaacggattttcaattattcaagaaaaaaaaattcaaatagaaaagaatgaggccgaaaaattctataaagttcatgagacaaaacctttttataacgacctttgttcttatttatcttcaggcccaatcgttgttatgattttggaaaaaattaatgcagttaaaagtaatagagaattaatgggctcaacaaatccaaaagatgcaaaagaaggatccattagaaaaaaatatgggatttcaatagataaaaattctgtccatggatcagatagtatcgaaaatgcaaagttagaaatagatttcttctttaaagattagt

SEQ ID NO: 252344 - DNA, 412 bp, Unknown
  Bacterial polypeptide expressing nucleotide sequence isolated from the Sargasso Sea
atgagtaatttagagcaaactttatcaataattaaacctgatgctgttgaaagaaatcttgaaaacgtgattaaagaaatgtttaaaagtaatggcttttcaattctaaaagaaaaaaaaattcaaattgaaaaaactgaagcagaacaattctataaagttcatgaaactaagccattttataacgatttatgcgaatatctttcttcaggtccaatagttgttatggttcttgaaaaggagaacgcagtattaggaaatagagatttaatgggttctacgaacccaaaagatgcagaagagggcactattagaaaaaaatatggaatttcaattgataaaaattcagtccatggatcagatagtgttgagaatgcaaaaattgaaatagattttttctttaaagattaaa

SEQ ID NO: 252345 - DNA, 415 bp, Unknown
  Bacterial polypeptide expressing nucleotide sequence isolated from the Sargasso Sea
atggaaaagacattatcaatcataaagcccgatgcggtatcaaaaaatgttttaggtaagattttagatagatttgaaagttcaggcttgaaaatagttgctataaaaatgcttcatttagatcaagatatggcagaaggattttatgcagaacataaaggcaagccatttttcgataaacttattaactttatgacttctggtccagtggttgtacaggttttatctggagaaaatgctataaaagctaatagagagcttatggggaatacaaatccagaagaagctgcttcaggaacaatcagatcagattttgctgaatcaattgatgctaatgcagttcatgggtcggattcttcagaaagtgcagaacgcgaaatttcttatttctttacagaatctgaaattttttaaa

SEQ ID NO: 252346 - DNA, 406 bp, Unknown
  Bacterial polypeptide expressing nucleotide sequence isolated from the Sargasso Sea
atggctttagaacagactctttcgataatcaaacctgatgcggttgcaaaagggcatgtagatgaaatctgcagaagactcgaggaatcaggactttcaatagtcgataagcaaagtttacatcttgatgagcaaaaagcagagggtttctatgccgaacataaaggcaagccattttttgaagatctaattaagtttatgacttctggtcccattcaggtacaaatccttgaaggagaaaacgcaatccttaggtatagagaagtcatgggtagtaccaatcctcaagaagctgcaccaggaactataagggctgattttgctgattcaattgatgctaatgcagttcatggttctgattcacccgagtccgctaagagagaaataagttatttctttggttaaa

SEQ ID NO: 252347 - DNA, 421 bp, Unknown
  Bacterial polypeptide expressing nucleotide sequence isolated from the Sargasso Sea
atgtctacagaaagaactctctcaataataaagcctgatgctaccaagagaaatattaccgggaaaataatatcctgctttgaagagtctggattaaatattatagcgcaaaagaaaattttattaactaaggaacgagcagaaggtttttactctgtacattctgataaacctttttttgccgatttagttaattttatgacatcagcaccgattattgttcaagttttagaaggagaaaatgccattttaaaaaatagagaaattatgggcgctaccaatcctgaagaagcagaagaaggcacaataagaaagcaatttgctctatcaattgaagcgaattcagtgcacggatctgactcagccgaaacagctattgaagaaataaactatttttttgatgagtctgaaattctctaat

SEQ ID NO: 252348 - DNA, 400 bp, Unknown
  Bacterial polypeptide expressing nucleotide sequence isolated from the Sargasso Sea
catggaagaaacactttctattataaaaccagatggagttagtaagaaaattataggaaccatatttaaaagatttgaagatgccggattagaaatagtgaatatcaaaagattaacactaacaactgaaaaagctggagaattttactatatgcacaaagataggcctttttatcctgaattagtcaaatttatgacttctggaccttgtgttcctttcgttataaaaggtgagaatgcaatattaaaagtaagagaattaatgggtgccactgaccccagtgaagctgatgccggaacaataagggctgattttgcagattcaattgataaaaatattatccacggttctgattctaaagaatctgctgaaagagaagtttcttttttctttgactag

SEQ ID NO: 252349 - DNA, 412 bp, Unknown
  Bacterial polypeptide expressing nucleotide sequence isolated from the Sargasso Sea
tatgagtaatatagaacaaactttatcaattattaaaccagatgcagttgagagaaatcttgagaatgaaattaaagaaatgtttaaaaataacggatttttaattttaaaagaaaaaaaaatccaaattgaaaaatccgaagcagaaaaattttataaagtacatgaaacaaagccattttataatgatttatgtgcatacctttcatctggtccaattgttgtgatggttcttgaaaaagaaaatgcagttttaggaaatagagagttaatgggcgccacaaatccaaaagatgcagaagagggcactattagaaaaaaatatggaatttcaattgataaaaattcagtacatggatcagatagtgttgaaaactctaaaattgaaatagattttttctttaaagattaa

SEQ ID NO: 252350 - DNA, 433 bp, Unknown
  Bacterial polypeptide expressing nucleotide sequence isolated from the Sargasso Sea
tatggcattggaacaaaccctatccatcatcaaacctgacggggttaagcgcaatctagtcggagaaattctgggacgttttgaacaaaagggcctcaggattgtagctactcgcatgcttcacctttccaaacgtgaagccgaaggattttatgcggtccaccgtgaacgtccattttttgaggaactcacaactttcatgtgttccggaccggttgtggtcagtgtacttgagggagaaaacgcggttgcttatcaccgtgaaatcatgggagcgaccaatcccgctgaagcggcagaaggaaccatccgcaaggattttgctcaaagcattggggaaaacacggttcatgggtctgacagtttggaaaacgctgcagtcgaaatcgcctattttttcgctcagaccgaattggtcaacgggaaggcttga

SEQ ID NO: 252351 - DNA, 412 bp, Unknown
  Bacterial polypeptide expressing nucleotide sequence isolated from the Sargasso Sea
atgagtggtatcgaacaaactttatcaataattaaaccagatgcagtggaaagaaacttagataatgaaattaaaaacatatttttaaaaaaaggttttaaaataattaaagaaaaaaaaattaagatagaaaaattagaagcagaaaaattttataaggttcatgaaactaaacctttttataatgatttatgctcatacctttcatctggaccaatagtggttatgatacttgaaaaaaataatgctgttttggctaatagggaattgatgggggcaacaaatcctaaagatgcattagagggaactatcagaaaaaaatatggcatttcaatagacaaaaactctgttcatggatctgatagtgttgaaaatgcaaaaatagaaattgatttttttttcaaagattaag

SEQ ID NO: 252352 - DNA, 427 bp, Unknown
  Bacterial polypeptide expressing nucleotide sequence isolated from the Sargasso Sea
aatggaaagaacgctttcgataataaaaccagatgctgtttcaaaaaatgtaattggtgaaatttatactttttttgaaaaaaataatcttaaaataattgcagctaaaatgatgcatctatctgaagaagaagcaggagggttttactcaattcataaagagaaacctttcttcaaaaacttagtttcatttatgacttcggggcctattttagtacaggtactagaaggagacgatgccgtaaaaaaaaatagagaaataatgggtgctacaaacccagaagatgcctctgataatacaattagaaaattatatgcaactagtatcgatgaaaatgctgttcatggatctgatagcattgataatgcaaaaattgagattgattatttttttcaagaaaatgaaatatgttcaagaacaagataa

SEQ ID NO: 252353 - DNA, 397 bp, Unknown
  Bacterial polypeptide expressing nucleotide sequence isolated from the Sargasso Sea
atggagcagactttgtcgattataaaaccagatgcagttgaaagaaatttagaaaatgaaattaaggagatgtttaaaaataagggttttacaatatttaaagaaaaaaaaattcaaattgaaaagtctgaagctgaaaagttttataaagttcatgaaaccaaacctttttacaatgatttatgtgcatatctctcctcaggacctattgttgtaatggttcttgaaaaagataatgcagttcttggaaatagagagctaatgggagctactaatccaaaagatgctgaagaaggcactattagaaaaaaatatgggatttcaatagataaaaattcagtacatgggtctgatagtgttgaaaatgcaaaaattgaaatagatttctttttttaaa

SEQ ID NO: 252354 - DNA, 412 bp, Unknown
  Bacterial polypeptide expressing nucleotide sequence isolated from the Sargasso Sea
tatgagtaatttagaacaaactttatcaattataaaaccagacgcggtagaaagaaatctagaaaatgaaattaaagaaatgtttaagaataaaggtttttcaatcttaaaagaaaaaaaaatccaaattgaaaaatctgaagctgaaaaattttataaggtgcacgaaacaaagcctttttacaatgatttatgtgcatatctctcttcaggacctattgttgtaatggtcattgaaaaagttaatgcagtctttggaaatagagagcttatgggagccactaaccctaatgacgctgaagagggtactatcagaaaaaaatatggaatatcaatagataaaaattcagtgcatggttcggacagtgttgagaatgctaaaattgaaatagatttcttttttaaagattaa

SEQ ID NO: 252355 - DNA, 412 bp, Unknown
  Bacterial polypeptide expressing nucleotide sequence isolated from the Sargasso Sea
tatgaataatattgaacaaacattatcaataataaaaccagatgctgtagagagaaatttacaggatgagattaaaaacgagtttaagaagaatggatttgaaatcataagggagaaaaaaattcatattacaaaagcagaggctgaaaagttttataaaattcatgagtctaaaccattttataatgacttatgtgcttatttatcttctggaccaattgttgtaatgaatcttcaaagagacaatgcggtttcagaaaacagaaaattgatgggagccaccaacccagatgatgccgaagagggaacacttagaaaaaaatatggtatttctattgataaaaactcagttcatggatctgacagcatagaaaacgctaagatagaactagattttttttttaaagattag

SEQ ID NO: 252356 - DNA, 412 bp, Unknown
  Bacterial polypeptide expressing nucleotide sequence isolated from the Sargasso Sea
atgagtaatattgaacaaactttatcaataataaaaccagacgctgtagatagaaatctatcagacgaaattaaaaaaatatttgaaaaaaatgatttgattgttaaagaaagtaaaaaaattcatattaccaaagaagaagcatcagaattttataaagtacatcaatcaaaacctttttataatgatttatgtgcatatttatcttctggacctatagttgtaatgattttagaaggtaaaaacgctgtgctagcaaatagaaaattaatgggtgcaactaatccaaaagaagctgaggaaaatacgattagaagattatatggaatttcaatagacaaaaattcagtgcatggttctgactctgtagaaaacgctaaaaaagagatagattttttttttaataactaat

SEQ ID NO: 252357 - DNA, 460 bp, Unknown
  Bacterial polypeptide expressing nucleotide sequence isolated from the Sargasso Sea
atgatcaaagagagaacgtttcttgcaattaaaccagatggagttcagagaggatatgtttcagagattattggaaggtttgaaaaaaaaggttttaaattggtaggtttaaaacaattaattccatcaaagcaacttgctcaagaccattatggggtacatagagatagacctttttttaaggatttagtcgactttatatcaagtggtcctgtggttgcgatgatttgggaaggagaaggggtgatcttaagcgcaagaaaattaattggggctacaaaaccacttgaggctgaacctggcactataagaggtgatttagctattgatataggtagaaatataattcatggttcagatggagaagaaactgcaaaatttgagataaatttatggtttgatcaagacgaaatatgtgattgggagacttctgattctgaatggcgagcagaaaattaaa

SEQ ID NO: 252358 - DNA, 406 bp, Unknown
  Bacterial polypeptide expressing nucleotide sequence isolated from the Sargasso Sea
atggctttagaacgcactctttcgataataaaaccggatgctgttgcaaaagggcatgtagatgaaatctgtaagagactagaagatgccggtctatcaattactgagaaaaaaagtattcatatggatgatgctttagcagagggattttatattgaacataaaggaaagcctttctttgaagatctgatcaaattcatgacttcagggcccattcaggttcaagttctagaaggcgaaaatgctattttcaattatagagaagtcatgggtagcactaatcctaaagaagcgacacctgggactattagagcagactttgctgaatcaatagatgctaatgcagttcatggttctgactctccagaatctgccaaaagagaaatcgactatttctttggctaaa

SEQ ID NO: 252359 - DNA, 451 bp, Unknown
  Bacterial polypeptide expressing nucleotide sequence isolated from the Sargasso Sea
attgtcaatgaaacaggagaaccggatggcactagaacgcactttttcaattattaagcccgatgcagtaaaacggaatctgattggcgagatctattcgaggtttgaaaaagctggtcttgctatagtgggagcaagaatgttgaagttgactggtgagcaagctggaggcttctacgcggaacatgacggcaaaccgttttatgaagacctatgttcctacatgatgtcggggcccgtaattgtgcaggttttagagggcgaagatgctattagtgtaaatcgaaggataatgggtgcaacggatcccaaagaggctgctcccggaactataagagcggattttgcggaaagtatagatgcgaacgctgtccatggatcagattctccagattctgcaaaacgcgaaatcgcttttttcttcgatgacgaagagttgttgactagataa

SEQ ID NO: 252360 - DNA, 400 bp, Unknown
  Bacterial polypeptide expressing nucleotide sequence isolated from the Sargasso Sea
aatggaaagaacattatcgattatcaaaccagatggcgttgaaaagaatatcattggcaagatttattctcgttttgagaaagcaggcctaaaaatcgtcgaagcaaaaatgttgcatctgagtcgagaacaagcagaaggattttatgccgttcataaagaaagacctttctttaacgacttggttgattatatgacttctggaccggttatggtgcaagtacttgaaggtgaagatgcaatcaaccttaaccgcaagctaatgggtgcaacaaatccagaagatgcagaagaaggaaccattcgaaaagatttcgctgaaagcatagaaaggaatgcagttcatggttcagatgggccagacacggcagctgtcgagatcgaatatttctttggttag

SEQ ID NO: 252361 - DNA, 427 bp, Unknown
  Bacterial polypeptide expressing nucleotide sequence isolated from the Sargasso Sea
atggccatagaacaaacactatcaatcattaaacccgatgcagtaaaaaaaaatgtaattggaaaaattataactagatttgaagaaaatggtttgcatctagttgctggaaagttaatacacttaacagacgaattggcatcagggttttacgcagaacacgacggaaaaccattttttaatgatcttaaaaattttatgacatcaggcccagtgtttattcaagtgcttgaaggtgacaatgcaattcaaaaaaatagagagcttatgggtgcaacaaatccgcaagaggctgccgagggaacaataagagcagattttgctaaaagtatagatgcaaatgccgttcacggatcagattcactcgttagtgcaaaaagggagattgagtatttcttttcaactaaagaaatattgaataagtaaa

SEQ ID NO: 252362 - DNA, 412 bp, Unknown
  Bacterial polypeptide expressing nucleotide sequence isolated from the Sargasso Sea
atgagtgatttagagcaaacactctcaataattaaacctgatgccgtagaaaggaatcttaccgaaaaaattaaagagatatttatttcaaaaaacttaaaaattaaagatacaaaaaaaattcaaatttcaaaagatgaggcagcagaattttacaaagtgcatcagtctaaacccttctataacgatctatgttcttatttatcttctggtcctatagtagctatgatactggagggtgaaaacgccatagccaataacagaaaaattatgggggccacggatcctaagaaagctgaaaaaaatacaatcagacagctctttggcatctcaattgataaaaattctgtacatgggtcagattcaaaggagaatgcacttaaagaaatcaattttttttttaaaaattaac

SEQ ID NO: 252363 - DNA, 412 bp, Unknown
  Bacterial polypeptide expressing nucleotide sequence isolated from the Sargasso Sea
atggccattcagcgaacactatcaataattaaaccagatgccgttgctaaaaatgttattggtgaaattatatctagatttgaaaaaaataatctaaaaattattgctgccaaattaattactttgtcagcttctgacgctggtggtttttatgctgagcataagggtaagcctttttatgatgatttaattgaatttatgacatcaggacctgtttttattcaagttttggagggtgaagatgcaattagcaaaaatagagagctaatgggaaacactgatccatctaaagcagatcctggaacaataagagcagactttgctcagacgattgatgcaaatgccgttcatggatcagattcagaaataagtgctgagagagaaatagctttcttctttagtgatttataaa

SEQ ID NO: 252364 - DNA, 412 bp, Unknown
  Bacterial polypeptide expressing nucleotide sequence isolated from the Sargasso Sea
tatgagtgatgttgaacacactttatcaataattaaaccagatgcagtagaaagaaatctagaaaaaaatattaaaaagatgttttttgataagggttttaaaattgtaaatgaaaaaaaaattcaaatcgaaaaaaatgaagctgaaagattttataaagttcatgagacaaaaccattttataatgatttgtgttcatatttatcttcaggcccgattattgtaatggtgctagagaaaaaaaacgctgttctagataatagaaaactaatgggagccacaaatccgaaggatgctgacgaggggacaattcgagcaaaatacggtatttcgatagataaaaactctgttcatggctcagatagtgttgaaaatgcgaaaattgaaatagatttcttttttaaagattaa

SEQ ID NO: 252365 - DNA, 421 bp, Unknown
  Bacterial polypeptide expressing nucleotide sequence isolated from the Sargasso Sea
atggaaaatacattatcaattgttaagcctgatgctgtatcaaaaaatgttcttggtaaaattctggatagatttgaaagttcaggtttaaaaataatagctataaaaatgcttcatctagataaaggtatggcagagggattttatgcagaacataaaggtaagccattttttgaaaaacttattaactttatgacgtctggtccagtcgttgttcaagtattatctggagaaaatgcaataaaaaccaatagagagcttatgggaaatacaaatcccgaagaagctgcttcaggtacaataaggtcagattttgctgaatcaattgatgcaaatgctgttcatggatcagattctccagaaagtgctgaacgtgaaatttcttatttctttacagaatctgaaatttttaaaagctaaa

SEQ ID NO: 252366 - DNA, 370 bp, Unknown
  Bacterial polypeptide expressing nucleotide sequence isolated from the Sargasso Sea
cttaaccgggcaaaataatgctagatttgaaacagcggttttgcggattgttgctcagcgcagattgcaactaactcttcagcaagctgaaggtttttatgaagttcatagggaaagatcattttttgctgatttatgttcatttatgatatcagggccggtggttgtccaagtcctggagggtgaaaatgcagtaagtttaaaccgtgaacttatgggtgccacaaatccagcaaatgcagatgaaggtacaataaggaaagattttgcagaaagtatagaagccaattctgttcatggatctgatagcccagaaaatgcttccatcgagatatcatatttttttaataaactggacatagtgggttag

SEQ ID NO: 252367 - DNA, 424 bp, Unknown
  Bacterial polypeptide expressing nucleotide sequence isolated from the Sargasso Sea
tatgagtattgaacaaacactgtctataataaaacctgatgcaaccaaacgtaaccttactggaaaaattaattcaaaattagaagactcaggattaaaaatcattgctcaaaaaagaattcttttatcaaaaacccaagctgaagatttctataaagttcatcaagagaggccattttataatgatttagtaaaatttatgatttctggtccagttgttgttcaagttttagagggtgaaaatgctgtttctaaaaacagagaaataatgggcgctaccaatcctgatgaagcagaggatgggacaataagaaaagaatttgcagtaagtttagaagccaactctgttcatgggtcagattcattagtgaatgctaaaattgaaatttcttttttcttttcgcaaattgaattagttaattaa

SEQ ID NO: 252368 - DNA, 245 bp, Unknown
  Bacterial polypeptide expressing nucleotide sequence isolated from the Sargasso Sea
aatggaaagaacattatcgattatcaaaccagatggcgttgaaaagaatatcattggcaagatttattctcgttttgagaaagcaggcctaaaaatcgtcgaagcaaaaatgttgcatctgagtcgagaaaaagcagaaggattttatgccgttcataaagaaagacctttctttaatgacttggttgattatatgacttctggaccggttatggtgcaagtacttgaaggtgaagatgcaatca

SEQ ID NO: 252369 - DNA, 406 bp, Unknown
  Bacterial polypeptide expressing nucleotide sequence isolated from the Sargasso Sea
tatggaaaatactttatgcataattaaacccgatgctgtaaagaatggcttcattgaagagataaatgaaaagataaaagaatcgggaataaaaattactaaatctaaacgccttactttggatagagaaatagcagaaaacttttatgcagagcattctgaaagacctttttatggagagcttgttgattttatgacatccggtgattgcgtcattcagatcttagaaggtgatgacgttgtttctaagtaccgagaattgatgggagcaactaacccagctgaagcagatgaaggaacactaagaaaatcatttgccacttctttgggagagaacgctgtgcatggctctgattctttgcagtcagctgaaagagagattgctatcatgaatgatcttttctag

SEQ ID NO: 252370 - DNA, 374 bp, Unknown
  Bacterial polypeptide expressing nucleotide sequence isolated from the Sargasso Sea
tatgagtaatatagaacagactttgtcaattataaaacctgatgcggttgaaagaaatctagaaaatgaaattaaagagatgtttagacataaaggtttttcaatattaaaagaaaaaaaaattcaaattgataaatctgaagctgaaaaattttataaagttcacgaaaccaaacctttttacaatgatttatgtgcatatctctcttctggacctattgttgtgatggttcttgaaaaagataacgcagttcttgggaatagagagctaatgggtgctaccaatccaaaagatgctgaagagggtactattagaaaaaaatatgggatatcaatagataaaaattcagtacatggttctgatagtgttgaaa

SEQ ID NO: 252371 - DNA, 412 bp, Unknown
  Bacterial polypeptide expressing nucleotide sequence isolated from the Sargasso Sea
tatggccattcagcgaacactatcaataattaagccagatgccgttgctaaaaatgttattggtgaaattatatctagatttgaaaaaaataatctaaaaattattgctgccaaactaattactttgtcagcttctgatgctggtggtttttatgctgagcatgagggcaagcctttttataatgatttaattgaatttatgacttcaggaccggtttttattcaagttttggagggtgaagatgcaattagtaaaaatagagagctaatgggaaacactgatccatctaaagcagatccaggaacaataagagcagactttgcacagacgattgatgcaaacgccgttcatggatcagattcagaaaaaagtgcccagagagaaatagctttcttctttagtgatttataa

SEQ ID NO: 252372 - DNA, 460 bp, Unknown
  Bacterial polypeptide expressing nucleotide sequence isolated from the Sargasso Sea
atgaccaaagagagaacctttattgcaattaaaccagatggagttcaaagaggatatgttgctgagattattggcagatttgaaaaaaaaggatttaaattggttggattaaagcaattaatcccttcaaaagatcttgctcaaaatcattatggcgtacatagagaaagacccttttttgctgatttagtagactttatttcaagtggtcctgttgtagcaatggtgtgggaaggcgaaggagttattttgagtgctagaaaactaataggtgcaacaaaacctcttgaagcagagcctggaacaattagaggtgatttagctattgatatagggaggaatattattcatggttctgatggagaagatactgcaaaatttgaaattgatctatggtttaacgatgaggaattatgtgagtgggaaactgctgattcgaaatggcgatatgaaaattaaa

SEQ ID NO: 252373 - DNA, 412 bp, Unknown
  Bacterial polypeptide expressing nucleotide sequence isolated from the Sargasso Sea
tatgagtaatttggaacaaactttatcaataattaaaccagatgcagttgaaagaaatctaattgaagaaataaaacaagagtttaaaaaaaataattttacaattttaaaagaaaaaaaaattaagcttgaaaaacatgaggcagaaaaattttataaagttcaccaaactaaaccattttataatgatttatgctcttatttatcgtcaggtccaattgttgtaatggtgctggaaagtgaaaatgcagtactaaaaaacagagaattaatgggggcaactgacccaactaaagcagaagaaggaacattaaggaaaaaatttggcttatctatagacaaaaattcagttcatgggtctgacagtttagaaaacgcaaaaattgaaatagattttttttttaaagactag

SEQ ID NO: 252374 - DNA, 427 bp, Unknown
  Bacterial polypeptide expressing nucleotide sequence isolated from the Sargasso Sea
atgactatagaaaaaaccttatcaattattaaaccagatgctgttggtaagaatgtaataggaaaaattatttctcgttttgaggagaatggcctctatcttgttgcaggcaaattactttatttatcagatgaaatggcatcaggattttatgcagagcacgatggaaagcctttttttgaagatttgaagaaatttatgacatcaggcccagtatttgttcaagttttagaaggagaaaatgcaattcaaaaaaatagagagcttatgggaaatacaaaccctcaagaagctttgcctggaactataagagcagactttgctgatagtattgatgcgaatgctgtccatgggtctgattcaacagttagcgctaagagggagattgaatattttttttcagaagaagaaatattaaataagtaaa

SEQ ID NO: 252375 - DNA, 412 bp, Unknown
  Bacterial polypeptide expressing nucleotide sequence isolated from the Sargasso Sea
tatgagtaatttagaacaaacattgtcaataattaaacctgatgcagttgaaagaaatcttgctgaagaaataaaaaatgaattcaaaaaaaatggctttgaaattaaaaatgaaaaaaaaattcaactgacaaaagcagatgctgaacaattttacaaggttcatgaaactaaaccattttataaagatttatgtgaatatttatcatctggccctgtagtagtaatgatattagagaaagataatgcaattgctgcaaatagagaattaatgggtgctacagatccaaaaaaagcaaatgagggaactattagaaaaaagtatggtatttcaatagacaaaaactctgttcatggatctgatagcattgaaaacgcaaaaattgagatagattttttttttaaatcttaa

SEQ ID NO: 252376 - DNA, 412 bp, Unknown
  Bacterial polypeptide expressing nucleotide sequence isolated from the Sargasso Sea
atgagtaataaagaacaaacgttgtcaattataaaaccagatgcagttgaaagaaatcttgaaaatgaaattaaagaaatttttaagagtaaaggtttttcaattttaaaagaaaaaaaaattcaaattgaaaagtctgaggctgaaaaattttataaaatccacgaaacaaagccattttacaatgatttatgtgcgtatctttcatctggaccaattgttgtaatgattcttgaaaaagaaaatgcggtattaggtaatagagaattaatgggttctacaaatccagaagaagcagaagagggaactattagaaaaaaatatggaatttcaatagataaaaattctgtccatggatctgacagtgttgataatgctaaaattgagattgattttttttttaaagtctaaa

SEQ ID NO: 252377 - DNA, 397 bp, Unknown
  Bacterial polypeptide expressing nucleotide sequence isolated from the Sargasso Sea
caacactttttcattataaaacccgatgctatttctaaaggttttgctgaacagatttgtgagaggcttgaagatgcaggcttaaaaattatttctaagaaatcgttacacttgagtgaaaaagaggcagaaggtttttatatagaacataaaggaaagccattttttcctgatttgataacttttatgacttcaggaccaattcaagtacaaatacttgaaggtgatgatgcaatttctaagtatagagaggttatgggtaatacaaaccctaaggaagcttctccgggaactttaagggctgatttcgctgactcaatagatgcaaatgctgtccatggttcagactcagaggtatctgcagcaagagaaataagttatttcttttccgattaaa

SEQ ID NO: 252378 - DNA, 259 bp, Unknown
  Bacterial polypeptide expressing nucleotide sequence isolated from the Sargasso Sea
atgcaaaaaacattttcgataattaaacctgatgcagtaaaaagaaatttgattggtcatattaatcaaatgattgaaagtgcagatttgaaaattttagcttcaaaaaaaatatatttgaccaaaaatcaagcacaaatcttttatgaagttcacaaagaaagacctttttttaatagtttagtcgattatatgacatccggccctgttcaagtgcaagttttagagggagaggacgctgtaataaaatatcgtaaaa

SEQ ID NO: 252379 - DNA, 340 bp, Unknown
  Bacterial polypeptide expressing nucleotide sequence isolated from the Sargasso Sea
tatggaaaaaacattatcaattatcaaacctgatgcagtccgcaagggccacattgatgagatatgtaaaaggatagaagattcggggctaaatatattagaaaaaaagaaaatggacctaacccaagaagaagctgaaggattctatatagaacataaggggaagccttttttcgacgccttaattgaatttatgacttctgggacaattcaggttcaggtcttagagggagaggatgccattattagatatagagaccttatgggaagcactaatcctaaagaggcagaagaaggaactcttaggagagattttgctgaatccatagatggcaaatgc

SEQ ID NO: 252380 - DNA, 400 bp, Unknown
  Bacterial polypeptide expressing nucleotide sequence isolated from the Sargasso Sea
atgaaaactttctttatggtaaaaccagatggtgtaaaaagaaatattgttggtcaagtgattgaccgtgttgagcaagagggatttaagataacaaaaatgaaaatgatgactataactacagaccttgctgagcaacactatggtgaacacaaagataaaccattcttccaagatttagtttcctttataacaagtggtccagttgtagccatggaagttgaaggagaaaatgctgtcagcgaagttcgtagaataatgggtgctacaaatccagctgatgcagacccaggcacaataagagcagattttgcaaccaaactagaagaaaatgtagtgcatggttctgattcagaagagagtgctgagagagaattaggccttttctttaacaattaaa

SEQ ID NO: 252381 - DNA, 307 bp, Unknown
  Bacterial polypeptide expressing nucleotide sequence isolated from the Sargasso Sea
tatgactactcagcgaacactttcaataattaaaccggacgccgttgctaaaaatgtcataggtcaaataatatcgagatttgaggagaacaatttaaaagtagttgctgcaaaacttattactttgtcagcttctgatgctggtggtttttatgctgagcataagggtaagcctttttatgatgacttaattaaatttatgacttcaggcccagttttcatccaagttttggaaggcgaggatgcaattagcaaaaacagagagctaatgggaaatactgatccatccaaagcagatcctggaaca

SEQ ID NO: 252382 - DNA, 460 bp, Unknown
  Bacterial polypeptide expressing nucleotide sequence isolated from the Sargasso Sea
atggctgccgaacgcacttttatcgctatcaagcccgatggtgtgcagcgtgggctggtgggtgagatcctcggccgcttcgagcgcaaggggttcaagctcgtcggcttgaagcaaatcacccccagccgtgaattggctgaacagcactacggcgtgcataaagagcgtccgttcttcgctggcttggtggatttcatcacctccggccctgtggtggccatggtttgggaaggagatggcgtgatcgccagcgcccgcaagttgatcggagccaccaagcccctcgaggccgagcctggcacgattcgcggtgatctggctgtgaacattggtcgcaacgtgatccacggatccgatgcagaagaaacggcggcctttgagatcggcttgtggttccagccctctgagctgaacgactggagcccctccgatcagagctggcgcgtggaaggctgag

SEQ ID NO: 252383 - DNA, 340 bp, Unknown
  Bacterial polypeptide expressing nucleotide sequence isolated from the Sargasso Sea
aatggaaagaacattatcgatcattaaaccagacggtgtagaaaagaatatcataggcaagatttattctcgttttgaaaaagcaggtcttcgaatcgttgaggcaaagatgttgcatctgagccaagaacaagcagaaggattttatgccgtgcacaaagaaaggcctttttttaatgacttggttgactatatgacttccggaccagttatggttcaggtgcttgaaggccaagacgcaatcaatcttaatcgcaagctcatgggtgcaacgaaccctgaagaagccgatgaagggaccattcgaaaagattttgctgacagcatagaaagaaatact

SEQ ID NO: 252384 - DNA, 421 bp, Unknown
  Bacterial polypeptide expressing nucleotide sequence isolated from the Sargasso Sea
attgacagaacgtactctttctataataaagccggacgcggtttctaaaagcgtgattggtgaaatctacagccgttttgaaaaagctggtctaaaaattgttgctgcgaaaatggtgcaacttgatgaggattcagctggtggattttacgctgaacatcaaggtaagggcttttattcagatttaattaagtttatgacctccgggccagtcatgttacaagtgcttgagggcaccaacgctattatgttgaatcgagaacttatgggagctactaaccccgctgaagcagcgtcagggacgataagggcagattttgcctcatcgattgatgcaaatgccgttcacggttctgactccccaaaatcagcctcacgagagatcgagtattttttcaccgacaatgagatctgttcttaa

SEQ ID NO: 252385 - DNA, 295 bp, Unknown
  Bacterial polypeptide expressing nucleotide sequence isolated from the Sargasso Sea
atgacaatccaacgtacattatcgatcataaaacccgatgcaacgtcaagaaatattattggcaaaattattgatagatttgagagtaacggcctcaaggttgttgcaggaaagttaattcatatggaccaagacaaagctgcgggattctacgctgagcatgatggaaagcccttttttacaaatcttgttgaatatatgacatcagctccggtttttgttcaagtccttgagggagagaacgctattttaaaaaatagagatttaatgggagccactaatccaagtgaggcag

SEQ ID NO: 252386 - DNA, 331 bp, Unknown
  Bacterial polypeptide expressing nucleotide sequence isolated from the Sargasso Sea
cggtttaaatattattgctcaaaagaaaattttattaacgaaagaacaggcagaagacttttattccgttcattccgaaaaacctttctttcaagatttggttgcttttatgacctcagcaccaataattgttcaggttttagaaggtgagaatgcaattctaaaaaatagagaaatcatgggagctacaaatcctgatgatgctgacgagggaacaattagaaaacagtttgctctatcaatagaggcaaattctgtacacggctctgactcctctgaaacagcaattgaagaaataaactacttctttgacgagtctgagattatataa

SEQ ID NO: 252387 - DNA, 412 bp, Unknown
  Bacterial polypeptide expressing nucleotide sequence isolated from the Sargasso Sea
atgagtaatatagagcaaacactatcaataattaaacctgatgctgtagaaagaaatttaaacgaggatattaaacaagaatttaaaaaaaatggatttacgatttctaaagaaaaaaaaataaaacttgaaaaagcagaagctgaaaatttttatcaagttcatcaatctaaacctttttataacgatttatgtacatacttatcatcaggcccaattattgtaatggtattagagaaggaaaatgctatttcagaaaatagaaaattaatgggagcgactgacccaacaaaggcagacgagggtacgattaggaaaaaatatggaatttcaatagataaaaactcagttcatggctcagatagtccagaaaatgcaaaaattgaaattgacttcttttttaaagattaaa

SEQ ID NO: 252388 - DNA, 364 bp, Unknown
  Bacterial polypeptide expressing nucleotide sequence isolated from the Sargasso Sea
atgcccaatgaaaaaacacttattctagttaagccagatggagtccagagaggcctaataggagatgtaataggaagactagaaaaaacaggattgaaaatcataggaattaagtttattcaaataagtgaggaacttgcaggtaaacattacgctgaacataaagataagccttttttttcaggactggttaaatttataacttcatctcctgttgttgcgttggtcttagaaggaaataacgcgatttcaataacaagaaaaactatgggagcaactaacccagtagattcaccacctggaacaataagaggagattttgcaatagacttaggtcgaaatattattcacgggtcagctaaga

SEQ ID NO: 252389 - DNA, 451 bp, Unknown
  Bacterial polypeptide expressing nucleotide sequence isolated from the Sargasso Sea
attggaaacaactttaatattgataaaaccagatggagttcaaagatcattatcaggtgagatattatctagattagaaaaatcaggacttaagatttgtggtttaaaattacttcatgttgatgaaaaacttgcaaaacaacattatgctgaacatgaagggaaaccatttttcaatgatttagttgaatatatatgttccgctccaataatagctctggccctaactggtccgaatgcagttcaaaaatcaaggagtcttataggaaaaacaaatccccttgagtctgagccaggcactattagaggagattttggcctagagatatcaagaaacttaattcacggttctgcttcaattgaagatgctgaaagagaagtgaacattttcttcgctaaagatgaaataatcaattattctaaagcaacagattcttgggttgtggaataa

SEQ ID NO: 252390 - DNA, 400 bp, Unknown
  Bacterial polypeptide expressing nucleotide sequence isolated from the Sargasso Sea
atggaaagaacattatcgatcattaaaccagacggtgtagaaaagaatatcataggcaagatttattctcgttttgaaaaagcaggtcttcgaatcgttgaggcaaagatgttgcatctgagccaagaacaagcagaaggattttatgccgtgcacaaagaaaggcctttttttaatgacttggttgactatatgacttccggaccagttatggttcaggtgcttgaaggccaagacgcaatcaatcttaatcgcaagctcatgggtgcaacgaaccctgaagaagccgatgaagggaccattcgaaaagattttgctgacagcatagaaagaaatacggttcacggttcagatgggccagacacggcagctgtcgagatcgaatatttcttcggttgat

SEQ ID NO: 252391 - DNA, 427 bp, Unknown
  Bacterial polypeptide expressing nucleotide sequence isolated from the Sargasso Sea
tatggcaattgaaaaaacactatcaattattaaaccagatgcagtagcaaaaaacgtaattggaaagattatcgctagatttgaagaaaatggtttgcaccttgttgcaggcaaattaattcaacttaatgatgaaatagcttctggcttctacgcagaacatgacggaaaacctttttttaatgatttaaagaaatttatgacgtcaggccctgtatttgttcaggttcttgaaggagaaaatgcagttcagttgaatagagatcttatgggaagtactaatcctcaagaagcatcgccaggtacgataagagctgattttgcaaatagcattgatgctaatgcagttcatggttctgattcaattaatagtgcaaaaagggagattgaatattttttctcaccagaagagatattgaataaataa

SEQ ID NO: 252392 - DNA, 418 bp, Unknown
  Bacterial polypeptide expressing nucleotide sequence isolated from the Sargasso Sea
aatgggtactaaaacatttgcaattatcaagcccgatgccgtaaagaacggttatacgggaaaaatttatgatagaattttacaagctggttttaatattctttcagcaaaactattaaaaatgacaaatgaacaggctgaagggttttataatgttcacagagagcgtccattttttaatgatcttgtagaatttatgacctcggggccttgtatggtattagctctagaaaaatcaaatgctgtagcagcttggagagaaaccataggttctacaaacccaaatgaagctaaagaaaatacaattcgtaaggattttgcatctaatgttcaggaaaatgcagttcatggttcggacagcgatgaaaatgcagaaaaagaaattgcctttttcttcacagatgcggaacttctgacc

SEQ ID NO: 252393 - DNA, 412 bp, Unknown
  Bacterial polypeptide expressing nucleotide sequence isolated from the Sargasso Sea
tatgaataacgttgagcaaactctttcaattataaaacctgatgctgttgaacgaaatcttgataatgagataaaacaaatgtttataagcaaaggttttaagatagttcaagaaaaaaaaattcaaattgaaaaatctgaagctgaaaaattttacaaagttcatgaaactaagcctttttataatgatttatgctcctatttatcctcaggaccaatagttgctatgattttagaaaaagagaacgcagtcttggctaacagagatttaatgggagcaacaaacccaaaagatgcagcagaaggaactatcagaaaaaaatatggaatatctattgataaaaattcagtgcatggttccgatagccttgaaaatgctagaatagaaattgaatttttttttaaagattaa

SEQ ID NO: 252394 - DNA, 427 bp, Unknown
  Bacterial polypeptide expressing nucleotide sequence isolated from the Sargasso Sea
atgggaatagaaaaaactttgtcaataataaagcctgacgccacaaaaagaaatataacagggaaaattaactcaaaactggaagattctggattagaaattattgggcaaaaaagaatacttttgacaaaacaaagagctgaggaattttattttgttcacagagaaagacctttttacaatagtcttgtaaattatatgatttcaggaccagtagttgtacaagttttaatgggtgagaatgctgtcactcaaaaccgagaaattatgggagcaacagatccaaaagaagcaaaagttggaactataagaaaggaatttgctaaaagtatcgaggaaaattctgttcatggttcagattctctggaaaatgcaaaaaaagaaatagagtttttttttaccaacgaggaaattattgaaaattaaa

SEQ ID NO: 252395 - DNA, 412 bp, Unknown
  Bacterial polypeptide expressing nucleotide sequence isolated from the Sargasso Sea
tatgagtaatatagagcaaacactttcaataattaaaccagacgcggtagaaagaaacctaatagatgaaattaaagcaatttttattaaaaataatttaaatattaaggaagataaaaaaattcatttaacaaaagaagaagcagcagaattttataaagttcatcagtcaaagccattttacgatgatttatgctcttacttgtcttcaggtccaatagttgcgatgattcttgaaggcaaaaatgctgttttatttaaccgacaattaatgggagcaacagatcctaagaaagctgaagataaaactataagaaaactctacggtatatcaattgataaaaactctgttcatggttcagactcaatagaaaatgcaaaaaaagaaatagacttcttttttaagaattaa

SEQ ID NO: 252396 - DNA, 433 bp, Unknown
  Bacterial polypeptide expressing nucleotide sequence isolated from the Sargasso Sea
atggcgatcgaacgcacattttctatcattaagcctgatgctgttgctaaaaaccacatcggtgcaatctacaaccgttttgaaactgctggtctgaagatcgttgcagctaaaatgttacacctgactaaagaacaagctgaaggtttctatgctgagcatagcgagcgtggcttcttcggtgctctggttgctttcatgacttctggcccaatcatggttcaagttttagaaggcgaaaacgctgttttagctcaccgcgaaattttaggtgcaactaacccagctcaagcggctccaggtactatccgtgctgatttcgctgaaagcatcgacgaaaacgctgctcacggttctgacgctttagaatctgctgcacgtgaaattgcttacttcttcagtgctgaagaactgtgtccacgtactcgttaat

SEQ ID NO: 252397 - DNA, 427 bp, Unknown
  Bacterial polypeptide expressing nucleotide sequence isolated from the Sargasso Sea
catggctattgaaaaaactttatcaataatcaaaccagacgctgtgggaaaaaatctcattggcaagattatttcaagatttgaagataatggactttgtgtagttgctgcaaagttaattcatttatcagatgatatggcatctggattttatgctgaacatgaaggaaaacctttttttgatgatttaaagaaatttatgacatctggaccggtttttgttcaggttcttgaaggagaaaatgcagttcaaaagaatcgtgaattaatgggaagtactaatcctcaagaggctgaatctggaacaataagagctgattttgctaatagtattgatgctaatgctgttcatggttctgattctatctcaagtgcaaaaagggagatcgaatattttttcaatactgaagagatattgattaagtag

SEQ ID NO: 252398 - DNA, 250 bp, Unknown
  Bacterial polypeptide expressing nucleotide sequence isolated from the Sargasso Sea
cttgaaaataaaatctaaaattttaattattgctggctcagattcttctgggggtgcaggcatacaagcagatattaaaactgttacatcgcttggttcatatgccatgactgctataactgccataacatcacaaaatacaacaggcgttaaatcaattattcctttgaatagtaaagaaatttctagtcaaattgaatttacagcaaaagatataaaaccagacgctgttaaaataggaatgctccac

SEQ ID NO: 252399 - DNA, 493 bp, Unknown
  Bacterial polypeptide expressing nucleotide sequence isolated from the Sargasso Sea
attgaaacctaaatccaaagtattgattattgcaggatcagattcttctggtggagctggaatacaggcagatataaaaactgtgactgcacttggatcttacgcgatgacagctattactgcagttacatcacaaaatactacgggagtaatttctatagcctcaatatcagaaaaggaggtatcaaaacaaattgagtttacatcaaaagatataaaacctgatgccgttaaaataggaatgctacattcaactaaaattattaactctgttttaaaatctttaaaaaaaataaaattaaaaaaaataatattagatcctgtcatggttgcgaaaggtggcacaaagcttataaataatcattcaattaaaattttaaaatttaaattaatgaaaattgtaagtcttattacaccaaatatacctgaagcagaaattttaactaatataaaaattaaaactgttgaagatatgatttatgcatcaaagatt

SEQ ID NO: 252400 - DNA, 589 bp, Unknown
  Bacterial polypeptide expressing nucleotide sequence isolated from the Sargasso Sea
gatgaaaaaaaatattccgattgttcttagtattgctggttcagactcttcagggggagctgggattcaagcagacatcaaaacacttaatacaatgaatgtttttgccgctactgctgtcacttgtgtaacagcacaaaatacgcaggaagttagcagtataacgaaaataccaccctctttagttgaggcacagattttatcagtaaaaaaagactttaaaatctcggctattaagctaggcatgttgtacgacaaagaaataatggcaattgttgtaaaatctcttaagtctttaagtaaagtgccaataatagttgatccagtaatggtatctaagtctggagataaattattgaaatcaaacgctatagaatttttcaaaaatgagattattcctattgcttacattttgacaccaaaccttgacgaagcgctaaaattgactggtatgcgagaaattaatagcaaagaagatataaataagtgctgcgttaagcttagaaacctaggtgctaaaaatatattgctcaaaggagggcatatccaaaatcctaaaaaatcaattgattacctactttataacaaa

SEQ ID NO: 252401 - DNA, 322 bp, Unknown
  Bacterial polypeptide expressing nucleotide sequence isolated from the Sargasso Sea
ttgaaaattaaatctaaaatattaattattgcaggatcagattcatctggtggagctggcattcaggcagatataaagtctgtcacatcgctcggttcttatgctatgactgcaattacagcagttacagctcagaatacattgggtgttaagtctattatgccaatacctgtaaaagaaatttctaatcaaatcgaatttacttcaaaagatattaagccagattcagtaaagattggaatgttgcattctactcaagttataaattcagttttaaaatcaataaaaaaatcaaaattaaaaaaaataatattagatcctg

SEQ ID NO: 252402 - DNA, 568 bp, Unknown
  Bacterial polypeptide expressing nucleotide sequence isolated from the Sargasso Sea
cttgaaaataaaatctaaaattttaattattgctggctcagactcttctggaggcgcgggcatacaagcagatattaaaactattacatcgcttggttcatatgctatgactgctataactgctataacatcacaaaatacaacaggtgttaaatcaatcattccaatgaatagcaaagaaatttctaatcaaattgaatttacagcaaaagatataaaaccagacgcagttaaaataggaatgcttcattcaaaagaagttataaattcagtaataaaatcattaaaaaagataaacgcaaaaaaaataatattagatcctgttatggtggcaaagggtgggaaaaaattaattaatgatccagctattaaaattttaaaaaataaacttttatctaaagcagatttaattacaccaaacattcctgaagctgaagttttaaccaattttaaaatttcaactatacaggatgtaattttagcaggtaaatatttaataaaattaggtgcaaaaaatgtccttataaaaggaggtcatttaaattataaaaatattcaagacgtattt

SEQ ID NO: 252403 - DNA, 781 bp, Unknown
  Bacterial polypeptide expressing nucleotide sequence isolated from the Sargasso Sea
ggatcagattcttctggaggtgcaggtatacaagcagacattaaaactgtcacatcccttggttcatatgccatgactgctataactgctataacttcacaaaatacgacaggtgttaaatcaattattccagtgaatggtaaagaaatttcaaatcaaattgaatttactgcaaaagatataaaaccagacgctgtcaaaataggaatgcttcattcaaaagaagttataaattcagtaataaaatcattaaaaaagattaaagcaaaaaaaataatattagatccagtgatggtggcaaagggtggaaaaaagttaattaatgacccagctattaaaattttaaaatatcaacttttgtctgaagcagatttaattacaccaaatatacctgaagctgaagttttaacaaatttgaaaatatcaactatcgaggatgtaattttagcaggcaaatatctaatagaattgggtgcaaaaaatgtcctaattaaaggtggtcatttaaattataaaaatattcaagatgtatttattaataaaaaagaattcttaatctttaaaaataagaaaataaatacaaaaaatagccatggcactggttgtactctttctagcgctataactacttacttttcatgtggaaaaactttaaagaaatcttgtgaaatggcaattaaatatgtaaatcattcattaagaacacaaccaaacttggggaaaggtcacggtcctgtaaaccacttaaatagtatacaaattaaaaaaaattttagatgaa

SEQ ID NO: 252404 - DNA, 508 bp, Unknown
  Bacterial polypeptide expressing nucleotide sequence isolated from the Sargasso Sea
atgaaacctgatggaaaaattttaccaatttgcatgactattgctggctctgattctggaggaggagctggcattcaagctgacttaaagacatttgcttcattaaattgttatggtgtttctgcaattacttcagtcactgctcagaacacattgggggttaatgatattcatgtgataccaaattcagttttaaaaaatcaaatagattctataaagaatgacattggttttaattctgtcaagacaggcatgcttccggaagaatcttctgtaattagtattgctaattccttaaaaaaaacttctaagcttagattagttattgatcccgtaatagttgctacatctggggatgtcttgatttcatcaaaagctatagaagcgttgaagaaaaaactctttcctttagcaagtattattactccaaatttatctgaagctgaggagctaactaaaatgaaaattacagataaagatgatgtttacgaagcttgtaaaatataaa

SEQ ID NO: 252405 - DNA, 643 bp, Unknown
  Bacterial polypeptide expressing nucleotide sequence isolated from the Sargasso Sea
tttgataattgcaggatcagactcttctggaggagcgggaattcaagctgatattaaaacagtcacagcattaggaggatatgcaatgaccgctgttactgctatcactgcacagaatacaactggtgttaagtctgttattcctataaagccaaaagagatagaaaaacaaattatatttacatcaaaagatataaaacctgatgccgttaagattggcatgttgcattcatctaaagtaattttttctgttttaaaatctttaagaaagattaaaactaaaaaaattattttagatcctgttatgatagctaaagggggatttaaattgataaatgaaaaagcaattaagactttaagagaaaaattaattataaaagctcacttaataacgccaaacattccagaagcagaagttttaacaaaaacaaaaattaaaactcttaaagatatggtaaatgcagctaaaattttgattaaattaggagctaaaaatgttttagtaaaaggtggacatagaaatacaaaaactatgaacgatgtatttataagtaaaaaaaaaataaaaatctttaaaaataaaaaaataaaaactaaaaatactcatggaactgggtgcactttatcaacagctataacaact

SEQ ID NO: 252406 - DNA, 229 bp, Unknown
  Bacterial polypeptide expressing nucleotide sequence isolated from the Sargasso Sea
ttgaaacctaaatcaaaaatattaataattgctggctcagactcttcaggtggagcgggtattcaggcagacataaaaactgttacaagccttggttcatatgctttgacagctattactgctgtaacaatacaaaatactttgggtgtaaagtcagttatttcattacctctaaatgatgtaaaagatcaaataatatatacaacaaaagatataagcctgatgccat

SEQ ID NO: 252407 - DNA, 451 bp, Unknown
  Bacterial polypeptide expressing nucleotide sequence isolated from the Sargasso Sea
attgaaacccaaatctaaaatattaataattgctggctcggactcatctggcggagcaggcatccaagcagatataaaaacagttactgcactaggcggatatgctatgacagccattacagcagttacctctcaaaatacaacaggcgtaaattcagttattgcaatcccaccaaaagaaatcgaaaaacaaattttatttacttcaaaagatataaagcccgatgcagtaaagattggtatgcttcattcaagtgatataattttatcagttagtaaaagtttaaaaaaacttcaaacaaaaaagataattttagatcctgtaatggttgctaaaggaggatttaaattaataaataataaagctattaaagttttaaaagagagactcataaaaaaagcatttttaattactccaaatattccccgaagccaaggaggttttaactaa

SEQ ID NO: 252408 - DNA, 412 bp, Unknown
  Bacterial polypeptide expressing nucleotide sequence isolated from the Sargasso Sea
ttgaaacttaaatcaaaaattttaattatagcaggatctgactcatcaggaggagcaggtatacaggcagatattaaaactgccacttgtctaggtgtttattcgatgacagcagttacagctgttacagttcaaaatacaaaaagagtaaaatcagttatatctattccagcaaatgaaatttataatcagataatttatacaacgaaagatataaagcctgatgctgtaaaaattggaatgttacattctacccaagtaataaataaagtctttaaatcattaaataaaattaaagtaaaaaaaattatcttagatcctgtaatgatagctaaaggaggttctaaacttattacagatgaagctattcaattaatgaaaaaaaaattgctaaaaaaaatttctttaatta

SEQ ID NO: 252409 - DNA, 325 bp, Unknown
  Bacterial polypeptide expressing nucleotide sequence isolated from the Sargasso Sea
tttgaaaattaaatcaaaaattttaattattgccggttccgactcgtcgggaggagcaggaattcaggcagatattaaaacagcaacttctttgggtgtctatgcaatgactgcagtaactgctgtaacagttcaaaatactaaaggcgtacaatcagttgtgcctattcctgcaaatgaaacttataatcaaatagtttatacaattaatgacattaagcctgatgctgtaaaaattggaatgttacattctacacaagtaataaataaagtttataaatctttgaataaatttaaaattgaaaaagttattttagatcctgtg

SEQ ID NO: 252410 - DNA, 840 bp, Unknown
  Bacterial polypeptide expressing nucleotide sequence isolated from the Sargasso Sea
attgcggggtctgacagtggtggcggggcgggtattcaagcagatttgttgacaatgaaagatttagattgtcatggctgtagtgtgattacgagtattacagcacaaaattcagtggcggttgagctagttgaacctgtgtcagagcacatgttaatcagtcaacttgatgcgctatggagcgacttaccgccgcgagccattaaaattgggctcttagtgagtcaacagcaagtcaattgtgttgccaagtggctgactcatttggctcagcaagacctgctaccttttgtggtactcgatcctgtcatggtggcgagtagcggtcatgggtttggccaatgttcaatcgactttaagccaatggcggggttaatgagtttattgacaccaaatcaacacgaactcagccatttatgtgcaaacttgttgttgagccgccagcaagatacgtcgccggtaaatgatgaacacaccatggccagtgcggcaacatggctggcaaatgaatatcagtgtcatgtggttgccaaaggtggcgatgcgagttggcaacagcaagatgcaatagacatgtatgtcactcaaaaggtcgccaatgccagtgatattcataatcatcgtgtctttaagctatctagcccaagagtgaatacccaagataatcatggtagtggctgcacattttctgccgccattgcgtgctttattgcgcatcaatttgtccttcatgacgcgatagtgatggccaaagcgtatgttaacaatggattaaccaatagttatcaagtcggtcaaggccctggtgtgttagctcgtactggctggccagacacctta

SEQ ID NO: 252411 - DNA, 724 bp, Unknown
  Bacterial polypeptide expressing nucleotide sequence isolated from the Sargasso Sea
tttgaaaataaaatctaaagtattaataattgcagggtcagactcctctggaggagcaggtatacaagcagatattaaaacagtaactacattaggatcatatgctatgacagcagtaacagcagtcacgacacaaaacacaactggtgtccaatcaatagtttcaataccaccatcagaaatatcaaaacagattgaatttgtttcaaaagatattagaccagatgctataaagattggcatgttaaataatgaaaaagttattaatgcggtaattaaatcgttaaaaaaaataaaagttcaaaaaattatactcgaccctgttatgattgcaaagagtggaacaagattaattaataataaatcaattaaaaatttaaaacaaaaaatgataaaaaaagttactttaattactccaaatatacctgaggcagaagtcttagcaggtcgcaaaatatattctaaaaatgatatgataatcgcaggaaaaaaattattaaagctaggagcaaaaaatgttttaataaaaggtggacatcttaaatcaagcttatcttacgatattttattagaaaaaaataaaatatttatttataaaaataaaaaaattaaatcaaaacatacgcatggtacaggttgtacattatcatcagctatagcaacatattattcatgtggaaaatcattaaacaaatcttgtgaaaatgccattaaatatgtaaac

SEQ ID NO: 252412 - DNA, 814 bp, Unknown
  Bacterial polypeptide expressing nucleotide sequence isolated from the Sargasso Sea
ttgaaaataaaatctaaaattttaattattgctggctcagactcttctggaggtgcaggcatacaagcagacattaaaactattacatcgcttggttcatacgctatgaccgctataactgctataacatctcaaaatacaacaggagttaaatcaattattccaattaatagtaaagaaatttctaatcaaattgaatttacagcaaaagatataaagccagacgctgttaaaataggaatgcttcattcaaaagaagttataaattcagtaatgaaatcattaaaaaagataaaagcaaaaaaaataatattagatcctgtgatggtggcaaagggtggaaaaaagttaattaatgagcccgctattaaaattttgaaaaataaacttttatctaaatcagatttaattacaccaaatatacctgaagctgaagttttaaccaattcaaaaatatcaactattcaggatgtgattttagcagggaaatgtctaataaaattaggtgctaaaaatgtccttattaaaggaggtcatttaaataataaaaatattcaagatgtatttattaataaaaaagaaattacaatctttaaaaataagaaaataaatacaaaaaatagtcatggcactggttgtactctttctagtgcaataactacctacttttcatgtggaaaaactttaaagaaatcttgtgaaatggcaattaaatatgtaaatcattcattaagaacacaaccaaacttagggaaaggtcacggtcctgtaaaccatttaaatagtatacaaattaaaaaaaattttagatgaa

SEQ ID NO: 252413 - DNA, 814 bp, Unknown
  Bacterial polypeptide expressing nucleotide sequence isolated from the Sargasso Sea
ttgaaacttaattcaaaaattttaattattgcaggatctgactcatccggtggtgcaggaattcaagcagacattaaaacggttacagcactaggcggttatgctatgactgcagttacagcaataactgctcaaaataccacaggtgttagttctgtagtcccaatacccccaaaagaaatagaaaaacaaattctttttacatcaaaagatataaagccagatgctgtcaaaattggtatgctacactcttctgaagtaatactttcagttatcaatgctttaaataaactaaaaactaaaaaaattattttggatcctgttatggtcgcaaaaggtgggtttaaattaataaacgataaagcaattaaaactttaagagaaaagcttataagaaaggcttatttactgacccctaatattcctgaagcagaagttttaactaaaataaaaataaaaacagcagaagatatgatccaggctgccaatattctgcttaaatttggagttaaaaatattttggtaaaaggtggtcatagaaattcaaatataatgaatgatatatttctaaatagcaaaaaattaataatatttaaaaataaaaaaattaagacaaaaaatacacacggaactggatgcactttatcaagtgcgatcacaactttttttgggtgtggaaaaactctaaataaatcttgtgagcttggaattaaatatgttaatcagtctattagatccaatcttaattacggaaagggtaacggaccaattaatcatttaagctccatcaaaatagataggaaatttaattaat

SEQ ID NO: 252414 - DNA, 521 bp, Unknown
  Bacterial polypeptide expressing nucleotide sequence isolated from the Sargasso Sea
cttgaaaataaaatctaaaattttaattattgctggctcagattcttctggaggtgcaggcatacaagcagatattaaaactattacttctcttggttcatatgccatgactgctataactgctataacttcacaaaatacaacaggtgttaaatcaattatttcagtgaatagtaaagaaatttctgatcaaattgaatttacagcaaaggatataaaaccagacgcggttaaaataggaatgcttcattcaaaagaagttataaattcagtaataaaatcattaaaaaagataaaagcaaaaaaaataatattagatcctgtgatggtcgcaaaaggtggaaaaaaattaattaatgacccagcaattaaaattttaaaaaataaacttttatctaaagtagatttaattacaccaaacatacctgaggctgaagttttaaccaatttaaaaatatcaactattcaagatgtaattttagcaggaaactatctaataaaattaggtgcaaaaaaatgtc

SEQ ID NO: 252415 - DNA, 770 bp, Unknown
  Bacterial polypeptide expressing nucleotide sequence isolated from the Sargasso Sea
ggctcagatccctcaggaggagctggtattcaagcagatattaaaactgttactagtcttggttcttatgctctaactgctataacagctttaactgttcaaaataccttgggagtgcactcagttattccagtactacctaacaatataaaaaagcagataatttattcatctagtgatattagaccagacgccattaagattggtatgctacattctaaagatgtaatcaaaaaagttttggagtcattagaaacacttaaagttaaaaaaatagtgttagaccctgttatggttgcaaaaggtggagcaagattaatagatgaggatgctataatgattttgaaaaaagatttaatcaataaagtagacttagtaactcctaatataccagaagccgaggttttaacaggtataaaaataaaaaataaagaagacatgattttagcaggaaatgaattaataaaatttggagttaaaaatgttttaattaaaggaggacatttaaaatcaaaaaaagttgaggatattttcttaaacaaaacagattttcaaattttcactagttctagatataaaacaaaaaatactcacggcactggatgtacattatcaagtgcaatcacgaccttttattcatgtggaaaaagtattaagaaagcttgtggccttggaattaaatatgtaaattctgcaatattaacaaatccaaattatggaaaaggcaaaggtccaatcaaccacttaaaactcaatgaaatatataaaga

SEQ ID NO: 252416 - DNA, 667 bp, Unknown
  Bacterial polypeptide expressing nucleotide sequence isolated from the Sargasso Sea
ttgaaaataaaatctaaaattttaattattgctggctcagattcttctggaggtgcaggtatacaagcagatattaaaacaattacatctcttggttcatatgccatgactgctataactgccataacatcacaaaatacaacaggcgttaaatcaattattccagtgaatagtaaagaaatttctaatcaaattgaatttacagcaaaagatataaaaccagatgcagttaaaataggaatgcttcattcaaaagaagttataaattcagtaataaaatcattaaaaaagataaaagcaaaaaaaataatattagatcctgtgatggttgcaaagggtggaaaaaaattaattaatgactcagctattaaaattttaaaaaataaacttttatctaaagcagacttaattacaccaaacatacctgaggcagaagtattaactaattcgaaaatatcaactattcaggatgtaattttagcaggaaactttctaataaaattaggtgcaaaaaatgtccttattaaaggaggtcacttaaattataaaaatattcaagacgtttttattaataaaaaagaaatcacaatatttaaaaataagaaaattaatacaaaaaatagccatggcactggttgcactctttctagcgctataactacttatt

SEQ ID NO: 252417 - DNA, 495 bp, Unknown
  Bacterial polypeptide expressing nucleotide sequence isolated from the Sargasso Sea
tatgaccgggcgcgttctgattattgccggttccgattccggcggtggggcgggtattcaggctgatctgaaaaccgtaatggctctcaaaggctatgccgccaccgcgataaccgccctgaccgcgcaaaacaccttgggcgtccgcaatgttctgtcggtcgagaccggattcattcaggagcagatgcaggtcgtgttaaaggatatcggtgcagattgcctgaagacaggtatgctgcatagcgcagaggttatagattctatctgtgccgtgatcgagaaggaggcacccgatatacctcttgttgtcgacccggttatggtcgcaaaaggcggcgcgtcgcttttggatattgattccgtcggggcccttcgcgaacgactgctgccgcttgcgcggattattacgccaaatattccggaagccgaaacactgctcggtagcacaatttcgtctttagacgatatgcagaggtctgctgaaatgctgat

SEQ ID NO: 252418 - DNA, 576 bp, Unknown
  Bacterial polypeptide expressing nucleotide sequence isolated from the Sargasso Sea
cttgaaaataaaatctaaaattttaattattgctgggtctgactcttcaggtggtgcaggcatacaagcagacattaaaactgtcacatcgcttggttcatatgccatgactgctataactgctataacatctcaaaatacaacaggtgttaaatcaattattccattgaatagtaaggaaatttctaatcaaattgaatttacagcaaaagatataaaaccagatgctgttaaaataggaatgcttcattcaaaagaagttataaattcagtaataaaatcgttaaaaaatataaaagcaaaaaaaataatattagatcctgtgatggttgcaaagggtggaaaaaaattaattaatgatcctgctattaaaattttaaaaaataaacttttatctgaagcagatttaataacaccaaatatacccgaagctgaagtcttaactaattcaaaaatatcaactatacaggatgtaatttttgcaggtaacaatttaatagaattaggtgcaaaaaatgtccttattaaaggggggcatttaaattataataatattcaagacatattcatgaataa

SEQ ID NO: 252419 - DNA, 814 bp, Unknown
  Bacterial polypeptide expressing nucleotide sequence isolated from the Sargasso Sea
ttgaaaataaaatctaaaattttaattattgctggctcagactcttctgggggtgcaggcatacaagcagacattaaaactgtcacatcgcttggttcatatgccatgactgctataactgctataacatcacaaaatacaacaggtgttaaatcgattattccagtaaatagtaaagaaatttctaatcaaattgaatttacagcaaaagatataaaaccagacgccgttaaaataggaatgcttcattcaaaagaggttataaattcagtaataagatcgttaaaaaaaataaaagcaaaaaaaataatattagatcctgtgatggtagcaaagggtggaaaaaaattaataaatgacccagctattaaaattttaaaaaaaaaacttttatctgaagcagatttaattacgccaaatattcccgaggcagaagttttaactaattcaaaaatatcaactattcaggatgtaattttagcaggtaaccatttaatagaattgggtgcaaataatgtccttattaaaggaggtcatttaaattataaaaatattcaagacgtatttattaataaaaaagaaatgataatctttaaaaataagaaaataaatacaaaaaatagtcatggcactggttgcactctttctagtgctataactaccttcttttcatgtggaaaaacgataaagaaatcttgtgaaatggcaattaaatatgtaaatcattcattaagaacacaaccaaatttagggaaaggtcacggtcctgtaaaccatttaaatagtatacaaattaaaaaaaaatttagatgaa

SEQ ID NO: 252420 - DNA, 814 bp, Unknown
  Bacterial polypeptide expressing nucleotide sequence isolated from the Sargasso Sea
cttgaaaataaaatctaaaattttaattatcgctggctcagactcttctggaggtgcaggcatacaagcagacattaaaactattacatcgcttggttcatatgccatgactgctgtaactgctataacatcacaaaatacaacaggtgttaaatcaattattccagtaaatagtaaagaaatttctaatcaaattgaatttacagcaaaagatataaaaccagacgctgttaaaataggaatgcttcattcaaaagaagttataaattcagttataaaatcattaaaaaagataaaagcaaaaaaaataatattagaccctgttatggtggcaaaaggtggaaaaaaattaattaatgacccagctattaaaattttaaaaaataaacttttatctaaagcagatttaattacgccaaacatacctgaagctgaagttttaactaattcaaaaatatcaactatacaggatgtaattttagcaggtaatcatttaattgaattgggtgcaaaaaatatccttattaaaggaggtcatttaaattataaaaatattctagatgtatttattagtaaaaaagaaatcacaatctttaaaaataagaaaataaatacaaaaaatagccatggtactggctgcactctttcaagcgctgtaactacctactattcatgtggaaaaactttaaagaaatcttgtgaaatggcaataaaatatgtaaatcattcattaagaacacaaccaaatttagggaaaggtcacggtcctgtaaaccatttaaatagtatacaaattaaaaaaatttttagatga

SEQ ID NO: 252421 - DNA, 802 bp, Unknown
  Bacterial polypeptide expressing nucleotide sequence isolated from the Sargasso Sea
tatgaaaccagatgcaaaaccacttcctatttgtatgaccattgcaggttctgattctggaggtggcgcaggtattcaagctgaccttaaaacctttggatcattagattgttatggagtttctgcagttacttctgtaacagctcaaaatactgtaggggtcagtgacattcatataattcctaacactgttttgaagaatcaaataaattcaatcataaaagatataggatttgatgcagttaagacagggatgcttcctgaagagtctacagtaattgatattgcaaatttgttaggtgaatcgtctaatcttcgattagttattgatccggtaatagttgctacatcaggggatgtcctgatttccttaaaggctataaaagcattaaagcaaaaactatttccattagctactattatcactccaaatttatcagaagctgaagagttgactgaaatgaaaataaaaactaaagaagatatttataaagcgtgtaaaatcttaaaaaattatggcccaaaatctgtagtaatcaagggaggacatttttttaaatcagatgtgtctgaagatgtattttatgatggaaataaatttgaatcattcagtgtaaaaagaatagatacaacttcaactcatggaactggttgtactttttcagcagcaataacagcatttcttgctaggggagaagatctaaaagattcagtaaaattatcaaaagaatatgttactaaagctattaataaagcatataaaataggcaaggggaatggcccattaaatcattttttttaa

SEQ ID NO: 252422 - DNA, 802 bp, Unknown
  Bacterial polypeptide expressing nucleotide sequence isolated from the Sargasso Sea
catgaaacggattaacgcattaacgatcgccggaaccgatccaagcggtggcgcgggtattcaggccgatttaaaaaccttctcggcgctgggcgtatacggctgttccgttattacggcgttggtggcgcaaaatacgcgcggggtgcagtcggtgtatcgtattgaacctgactttgtcgctgcgcagctggactctgtgttgagtgatgtgcgtatcgacaccacaaaaattggtatgttggcggagacggatattgttgaagcggtcgccgaacgtttgcgtcgccatcgggtacaaaatgtggtgctggacacggtgatgttggcgaaaagtggcgatccgttgctgtcaccctcggcggtagaaacgctgcgtacccgtttgctgccacaggtttcgattatcacccctaatttacccgaagcagctgcactgctcggggcatcgcatgcgcagactgagcaggagatgttagagcagggaagagcgctacgggcgctgggttgcgaggcggtgttgatgaagggcggtcatctggatgacgcgcaaagcccggactggctctttactcgcgaaggcgagcagcgttttaccgcgccgagggtgatgaccaaaaatacccatggcaccggttgtacgctatcggcggcgttggcagccctgcgtccgcgccataacaactgggccgataccgtacaggaagccaaactgtggctttcagcggcgctggcacaggcagacacgctggaagttggcgagggaattggtccggtgcatcattttcacgcgtggtggtaa

SEQ ID NO: 252423 - DNA, 814 bp, Unknown
  Bacterial polypeptide expressing nucleotide sequence isolated from the Sargasso Sea
attgaaaattaaatctaaaatattaattattgcaggatcagactcctccggaggagcgggtatccaggcagatataaaatctgttacgtctctaggttcttacgctatgactgcaattacagcagtgacagttcagaatacaacaggtgttaagtcaattataccaatacctattaaagaaatttctaatcaaatcgagtttacatcaaaagatattaagccagatgcagtaaaaattggaatgctacattctactaaagttataaattcagttttaaaatcaataaaaaaatcaaaattaaaaaaaataatattagatcctgttatggtagccaaaggtggtgcaaagcttattgataataaagctattttagttcttaaaaaaaaactgataaaaaaagttgatttaataacaccaaatattcctgaagcagaaatactaactaaaataaaaattaaatctaaaatggatatgaaaaatgctgctaaaatattattagatttaggtgctaaaaatgttttaattaaaggtggccatttaagttctaaaactttgaaagatatttttgtaaataaaaaagagactgcaatatttacaaataaaaaaattaaaacaaaaaatacacatggaaccggatgtacattatcaactgcgattgcaacatattatggatgtggaaaaactctaaagaaatcttgtgagttaggtattagatatgtaaacaatgccattaggacaaggccgaactttggaaaaggaaatggaccaattaaccatttaaatagttttataatagaaaagaaatttagatga

SEQ ID NO: 252424 - DNA, 388 bp, Unknown
  Bacterial polypeptide expressing nucleotide sequence isolated from the Sargasso Sea
aatgattaagccagtttgtgataagtttattccaaatgctttaacaattgctggttccgatccgtcaggtggagctggcattcaggcagatttaaaatccttttctgcaaatagagtctatggaatgtcgatattgactgccctgactgctcaaaatacacttggtgtttcgggcattcacaaagttccaaaaaaatttatcgaaaaccagttaaacaccatctttcaagatataaaagtggatgcgatcaagattggcatgattgtaaattcaggtattgcaacagtcatttttaacaatttagaaaatcgggatatagatcatatcgttatagatccagttatggttgcaaaagggggtgcaaaacttcttgagaacgaggcaatc

SEQ ID NO: 252425 - DNA, 298 bp, Unknown
  Bacterial polypeptide expressing nucleotide sequence isolated from the Sargasso Sea
aatgaaacaaaaaaagatccctacaattctgataattgctggttcagattctgggggaggagccggtatacaagcagatattaaagcagcttcttattttaaagtctttgctactacagcagttaccgctgtaactgcacagaatactttaggggttcaaagtatatttccaataccagaaatagagattcaaaaacaattaagatcagttattagtgatcttgcacctgatctaataaaaattggaatgctcggcacaaaagaagttgtagattgcgtgcacaggaaattctaccca

SEQ ID NO: 252426 - DNA, 505 bp, Unknown
  Bacterial polypeptide expressing nucleotide sequence isolated from the Sargasso Sea
cttgaaaataaaatctaaaattttaattattgctggctcagactcttctggaggtgcaggcatacaagcagacattaaaactattacatcgcttggctcatatgctatgactgctataactgctataacatcacaaaataccacaggtgttaaatcaattgttccagtaacaagtaaagaaatctctaatcaaattgaatttacagcacaagatataaaaccggacgctgttaaaataggaatgcttcattcaaaagaagttataaattcagtaataaaatcattaaaaaagataaaagcaaaaaaaataatattggatcctgtgatggtggcaaagggtggaaaaaaattaattaatgaccaagctattaaaatattaaaaaataaacttttatctaaagcagatttaattacaccaaacatacctgaagctgaagttttaaccaattcaaaaatatcaactattcaggatgtaattttagcaggaaattttctaataaattag

SEQ ID NO: 252427 - DNA, 814 bp, Unknown
  Bacterial polypeptide expressing nucleotide sequence isolated from the Sargasso Sea
ttgaaacttaaatctaaaatattagttattgcgggctcagactcttccggaggcgcaggtattcaagcagatattaaaaccataacaagtcttggctcttatgcaatgacagctattactgcaataacttcacaaaatacaacaggagttttgtcgatttcaaaagttccaatcaatgaaattaaaaggcaaattgaattcacctcaaaagatatcaggcctgatgctataaagattggaatgttacactcaaaaaaagttattgaaacagtaataaattctttaaagaaaattaaagtaaaaaaaattattctagatccagtgatggtagcgaaaggtggcacaaaattagttgatgataaatcaatagaaataataaaaactaaattaatgaatagagtatctttaattacaccaaatataccagaggcagaaatacttgctaaaataaaaattaaaacaacagatgatatgattatagctggaaaaaaattattaagtttcggagcaaaaaatgttttaataaaagggggtcatttaaaagcaaaatatgtatatgatctttatttgaataaaggtgaaaaagaattttttaaaagtaaaaaaatcaaaacaaaaaatacacatggtacaggatgtactttatctagtgcgatagcgacttatttttcgtgtggaaaaacattaaagaaatcttgtaagatggcaattgattatgttaaccattcaatcggatcagggcctaattttggaaaaggccatgggccaataaaccatataagcgtgtttaatattaagaataaatttaaatgaa

SEQ ID NO: 252428 - DNA, 208 bp, Unknown
  Bacterial polypeptide expressing nucleotide sequence isolated from the Sargasso Sea
gttgaatgatttaaaaaaaggagagttaattgtctttgcagcaccttcaggtgccggaaagtcgtctcttataaaagaaatcattactaataatgagaacatagaattatcagtatctgcgacaacaagatcaccaagagagggagaaactcatggcaaagattatttttttataactgataatgagtttaatgatcttaagaaaaaa

SEQ ID NO: 252429 - DNA, 421 bp, Unknown
  Bacterial polypeptide expressing nucleotide sequence isolated from the Sargasso Sea
tttggagtatgcaaaagtttttaataattattatggaacaacaagaacaccaatcatagataatttaaataaagggaaaaatgtattgtttgatattgattggcaaggtgctgaccaaataaaaaacaaaaaattagattataaattaattacattttttattttacctcctagcaaaaaaattttatttgatagactttctaacagagatatgaaagataaacttatagctgaagaaagaatgcaacaatttgagagagatgtacttcattggataaattatgattatgtagtaattaatgatgatcttgaaaaatgttattttaagataaaaaacttaataaatgcagaaataaatgatggatcaaaagattatgatttagattttataagaaatcacgtagaaaaactaacttcttaa

SEQ ID NO: 252430 - DNA, 571 bp, Unknown
  Bacterial polypeptide expressing nucleotide sequence isolated from the Sargasso Sea
aatgaaagtaagttacaataaaagaattatcattgtaatttcgtctccatcaggagctggaaaaacctcagtttgtcaaaagctaattgaaagagataaaagtatagctctctcaatatcagatacaacaagatcacctagagataatgaaatcgatggtgtagattataactttattaaagaggaagaatttaagaataaaattataaataaatcttatgttgaacatgctaatgtatttggaaatttttatgggtcacagtataaaaatgtaattaatcattttaaaaatggaagagatgttttatttgatattgattggcaaggagccaagcaattaaaaagttcatcattcaaaaatatcgtatcaatatttattattcctccttcaaaagatgcaatctatcaaagacttaaatctcgggctataaaatctggcgataatgaagatgcaattgagagtagaatgaataagtacgaaacagagatgaggcacagaaatgattatgatcatatagtaattaatgacaagttagaaacttgtgtagatgagctagagagaattataaat

SEQ ID NO: 252431 - DNA, 346 bp, Unknown
  Bacterial polypeptide expressing nucleotide sequence isolated from the Sargasso Sea
atggataaacaaaatataaacatctttgttatttcgagtccctctgggggaggaaaaacaagtctaataaaaaagctcctggaagatccaagatcagaaggaacagttttaagcatttcccacacaacaagagaaaagaggttgaacgaaaaagatggagttgactacttctttactgataaaaaaaattttgaagataaaataaaaaaaaatgattttttagagtatgcaacggtatttgataattattatggtacttctcaggaaacagttaacacattactcagtcaagataagacggttattcttgaactggattggcaaggtgcgaagcaggtcaaaagca

SEQ ID NO: 252432 - DNA, 625 bp, Unknown
  Bacterial polypeptide expressing nucleotide sequence isolated from the Sargasso Sea
ttgaaagaaataactggaaaattaattgtcatatccgccccatctggaaccggaaaaacaacagtcgtaaaaaaactattgcaacaaagcaccaacttggaggcatcggtttcattcacaaccagaaaaatgcgtgaaaatgaaaaagaaggccttgattatttctttgtaagcgaaaaaacctttacaagcatgattcaaaatcatgattttttggagcatgcaactgtcttcggaaatttttatggcacagagaaaaaaagcgtttcggaaaacctaaaaaaaggggtaaatctaatcttagaaatcgattggcaaggtgcgctacaaatcaaaagcagcatgccttcatgcgtgatgatttttctgattccgccttcaaaggaagttttgctggccagattaaaaaatagaggcactgactctgatcaagaaatagcatatcgtttcaatcaagcggttttagacctggaacagtcaaataagtttgatcatgttttggtcaatgatcagcttgagaaggttgttacagagattgctctctgtattgagggtaaggccaataaaataaatcaatcaaagaaagttgctgaatctcttaaaagtttctttgaaacaaattgac

SEQ ID NO: 252433 - DNA, 347 bp, Unknown
  Bacterial polypeptide expressing nucleotide sequence isolated from the Sargasso Sea
aaatgttatttttgatatagactggcagggaactcagcagattaaaaatattaaattaaaatataaaataataactatttttattcttccaccatctaaagaagaattatttaacagattattaaaaagagataaaaaagatcaacgaattgcaagtgagcggatgaaacaatttaagacagatatcactcattggaaagattatgattatacagtaatcaatgataaaattgaaaaatgttataaacaaataataagttttatagcaaaccaatcaaagaataaaaaaaaattaaaatataatatgcgacctataaaaaatcatataaaaaaattattaaattaaa

SEQ ID NO: 252434 - DNA, 318 bp, Unknown
  Bacterial polypeptide expressing nucleotide sequence isolated from the Sargasso Sea
ggcaaggtactcaacaactgtatcagtcaaaaccaagtaatctagtttcaatatttatattgccaccatctaaagatgaaatagagaatagattaagacaaagaaaagttgattcaggtgatgatgaatcgatcattaataaaagaatgtctaaatttaaagatgagataagtcattgggttgagtatgattatgtggttattaacaataagctaaaaacatgtgtagatgagattttaaatataatacatgttgagcgaaaaaaacgtcgtaggcaattaaatttagttaataaagtaagagagctcacttcataag

SEQ ID NO: 252435 - DNA, 251 bp, Unknown
  Bacterial polypeptide expressing nucleotide sequence isolated from the Sargasso Sea
tatgaaaaatcaaaaaaaacttattgtacttactggacccagcggggtgggtaaaggaactgttgttaaagaaatattaggtaaagaaaaaaatttttggctttcaatatctgcaactactcgagaacctagagagggagagaaggaaggagaaaattactactttttaaatcaagacaagtttaaagaaatgattgaacaaaacctgttccttgagtgggctcaattcgctggtaactactatggaacgc

SEQ ID NO: 252436 - DNA, 625 bp, Unknown
  Bacterial polypeptide expressing nucleotide sequence isolated from the Sargasso Sea
cttgaaagacataactggaaaattaattgtcatatccgccccatctggtaccggaaaaacaacggtcgtaaaaaaactactgcaacaaagtgccaacttggaggcatcggtttcattcacaaccagaaaaatacgtgaaaatgaaaaagaaggccttgattatttctttgtatgcgaaaaaacctttacaaacatgattcaaaatgatgattttttggagcacgcaactgtcttcggaaatttttatggcacagagaaaaaaagtgtttcggaaaacctaaaaaaaggggtaaatgtaatcttagaaatcgattggcaaggtgcgctacaaataaaaagtggaatgcctgaatgcgttatgatttttcttattccgccatcaaaggaagttctgctggccagattaaaaaatagaggtactgactctgatcaagaaatagcatatcgtttcaatcaagcggttttagacctagaacagtcaaacaagtttgatcatgttttggtcaatgatcggcttgacaaggttgttacagagattgctctttgtattgagggtaaggccaatagaataaatcaatcaaagaaagttgctgaatctcttaaaagtttctttgaaacaaattga

SEQ ID NO: 252437 - DNA, 304 bp, Unknown
  Bacterial polypeptide expressing nucleotide sequence isolated from the Sargasso Sea
aataaaacaaaaaaatttaaagtacaaaataattacaatatttatacttcctccatctagagaagaactgttcaatagacttttaaatagagatttaaatgatgaaaaaaacgcaaaagaaagaatgaaacaatttgataaagatgtaatgcactggaaaaattatgatttagttgtgataaatgataattttaacaaatgttataataacataataaaatttattaatttagaaataaaaaatatcgcagagatttataacaggaatgatattgaaaatcatgttttaggtcttcttaaataa

SEQ ID NO: 252438 - DNA, 262 bp, Unknown
  Bacterial polypeptide expressing nucleotide sequence isolated from the Sargasso Sea
catgtccgtaaatcatgaagggataatagtaatactatcatctccatcgggcgcaggaaaaacttcacttgtaaaagaaatttgtttaaaaaataattattctatttctatttctcacactacacgtaaaccaagagctaaagaaattaatggcattgattatttttttgttaatcaagaggaatttaaaaaattaatttctaaaaataaatttttagaatatgcaaaagtatttaataacttttatggttcatctaaagat

SEQ ID NO: 252439 - DNA, 509 bp, Unknown
  Bacterial polypeptide expressing nucleotide sequence isolated from the Sargasso Sea
atcaagaaatatgagattaaatgaagttaatggtaaagattattattttgttactaaaaaaagatttattcaattagaaaaaaataactactttattgaaacatcatcaaactttaacaatctatacggatccccaattaaaaatatcagaaaatctaattcagtaaataaaaatatactttttgatatagattggaagggggcaagaaaaattagaaaaaattttaggaagaaagatgttattgatatttttattttaccaccatcagttaaagaactaaggaaaagattaatcaaaagaggaagagacagtaaaaacgaaatcaaacttcgtttatcatatgcccttgaagaaattaaacattataatgaatataattatgttttaattaatcaaaatattcacaatacagcaaatgatatcataaaaataattaagtatcatgatttaattaaaaacaatgataaaatattaaataaaaatttaaaaaaaattgtaaatttttaat

SEQ ID NO: 252440 - DNA, 425 bp, Unknown
  Bacterial polypeptide expressing nucleotide sequence isolated from the Sargasso Sea
gatgaacagaaataagcttattgttttttcagctccatcaggagcaggaaaaactacgcttgtgaaacatattttatctcaatttagtaatacaagtttttcaatatctgctacatccagatctcctagaggaaatgaaaaagatggagttgattatcattttttatctaaaagcgagttcaaaaagaaaattaataacaatgaatttattgagtttgaagaagtttatggaggagttcattatggaactctaaaatctgaagttgaaaatatatggacaaataatgaagtagcactttttgatattgatgttgttggaggtttcaatatcaagaaaatgtatcccatgaatacattatctatttttgttatgccaccaagtatagatactttaaagaaaagattaatttcaagaggagatattt

SEQ ID NO: 252441 - DNA, 577 bp, Unknown
  Bacterial polypeptide expressing nucleotide sequence isolated from the Sargasso Sea
actggaaaaacaaacagtcgtaaaaaaactactgcaacaaagcaccaacttggaagcatcggtttcattcacaaccagaaaaatgcgtgaaaatgaaaaagaaggccttgattacttctttgtacgcgaaaaaacctttacgaacatgattcataatgatgattttttggagcacgcaaccgtcttcggaaatttttatggcacagagaaaaaaagtgtttcggaaaaactaaaaaaaggagtaaatgtaatcttagaaatcgattggcaaggtgcgctacaaatcaaaagcagcatgccttcatgcgtgatgatttttctgattccgccatcaaaggaagttctgctggccagattaaaaaatagaggcactgactctgatcaggaaatagcatatcgtttcaatcaagcggttttagacttagaacagtcaaaaaagtttgatcatgttttagtcaacgatcagcttgacaaggttgttagagagattgctctctgtattgagggtaaggccaataaaataaatcaatcaaagaaagttgctgaatctcttaaaagtttctttgaaacaaattga

SEQ ID NO: 252442 - DNA, 349 bp, Unknown
  Bacterial polypeptide expressing nucleotide sequence isolated from the Sargasso Sea
aatggccgaaaaaaaagcaggggtaattgttattctatcctctccttctggcgcaggaaaaactaccttagttaaaaaaatttcgtttagaaaaaaatttaaaatatccatttctcacaccacaagaaaacctagagcaaatgaaaaaaatggaagagattatttctttgtaaataaaaaaaaattcctaaaattaataaagaataacaaatttttagaatacgccaaagtcttcaaaaattattatggttcgttaaaagagactgtaattcagaatttagtaaatggagaaaatgttatttttgatattgattggcaaggaacagagcagattaaaaaaaaaaaattg

SEQ ID NO: 252443 - DNA, 157 bp, Unknown
  Bacterial polypeptide expressing nucleotide sequence isolated from the Sargasso Sea
atgccattaaataatgatgggacaatggtgattttatcatccccatcaggggctggcaaaacaactcttgtaaaactcttatcaaaaagaaaaaattttaaagtttctatttctcatacaactagaaaacccagagaaagcgaaatacaaaataagg

SEQ ID NO: 252444 - DNA, 277 bp, Unknown
  Bacterial polypeptide expressing nucleotide sequence isolated from the Sargasso Sea
aatgttgaatgatttaaaaaaaggagagttgattgtttttgcagcaccttcaggtgctggaaagtcatctcttataaaagaaatcattagtaataatgagaatattgaattatcagtatctgcgacaacaagatctccaagagagggtgaaactcatggcaaagattatttttttataactgataatgagtttaatgatcttaagaaaaaaaatgcatttattgagagtgccgatgttcatggacatcaatacggaactctaaaatctttttgttga

SEQ ID NO: 252445 - DNA, 318 bp, Unknown
  Bacterial polypeptide expressing nucleotide sequence isolated from the Sargasso Sea
aatggccgaaaaaaaagcaggggtaattgtaatattatcttctccttcgggcgcaggaaaaacaacattagttaaaaaaatttcaaaaagaaaaaactataaaatttcagtttcttatacaactagaaaacctagagcaaatgaaagtaatggtaaagactattattttataaataacactcaatttaaaaaacttataaaagaaaaaaaatttttagaatatgctaaagtcttcaaaaattattacggatctctaagggatagtgtcataacaaaattatcaaaaggtaaaaatgtaatttttgatattgattggca

SEQ ID NO: 252446 - DNA, 589 bp, Unknown
  Bacterial polypeptide expressing nucleotide sequence isolated from the Sargasso Sea
atggaaggtgcattaataattttatcctctccatctggagctggaaaaaccacattagtcaaaaaattatcaagtctttataactttgaagtttcaatttcatacacaactaggattccaagaataaacgaaataaatggaaaagattacttttttataagtgaagatgactttaaaaaattaatcaataagagtgagttattagagcatgctaaagtatttaataattactatggatcctcaaaaaaaaaagtatttaaacatctagaaaatggtaaaaatgtattattcgacattgattggcagggtacagatcaaattaaaaaaaacgatttaaagtttaaattaattacattttttattctaccgccctcaaaaaaaacattattaaatagattagcagaaagagaaaataacaaagatgaaattataaatgagagaatgaaaaaatttgaagaggatgtaaagcattggaaagattatgattacgtggttataaatgataatttggaattatgtgtacatgagattaaagacattatcgactcagaattaaagaaacaaaaaaaattctttgataaatcgaaaa

SEQ ID NO: 252447 - DNA, 184 bp, Unknown
  Bacterial polypeptide expressing nucleotide sequence isolated from the Sargasso Sea
cttcaacaattattatggaacaacaagaacacctgtgattgacagccttgataagggaaaaaatgttttatttgatattgattggcaaggtgctgatcaaattaaaaataaaggattggattacaaactcattactttttttattttacctccaagtaaggaagttttatttaagagattatcc

SEQ ID NO: 252448 - DNA, 520 bp, Unknown
  Bacterial polypeptide expressing nucleotide sequence isolated from the Sargasso Sea
aatgaatataagtcaaaaaaataaaattataattatatcttctccttctggtgcaggtaaaactaccttatgtaagcttttattaaagaaaatgaatgatgttaatttatctgtatcttatacatctagaaatcaaagacttaatgaaatccatggtaaagattatttttttgtatctaaaaataaatttttacagttgaagaaaaaaaattattttatagaaactgcattaaattttggcaattattatggttcaccatataaaaacttaaaacaaattaaaaataaaaataaaattttatttgatatagattggaaaggtgcacgaaaaattagaaacacaattggtaaaaatgctattattgatttttttattttaccaccatctattaaagagttgaaaaaaagattgattaaaagaggaagagataacaagaaagatataaatctaagattatcatacgctattaaagaaattggtcattataatgaatattcttatgttttaataaatcaaaat

SEQ ID NO: 252449 - DNA, 382 bp, Unknown
  Bacterial polypeptide expressing nucleotide sequence isolated from the Sargasso Sea
aatggtaataagtgataatgaaataaaaagaaaagggttaatgtttgttttatcttcaccttcaggagcaggtaaaacatctttatcaagaaagcttctggaattagataaagaattatttctatcaatatcctatacaacaagaccaccaagaccgggtgaaattgatggtgaagattatttctttgtaaataatgatgattttgctgatatgcaggaacaaaatgaatttttagagtatgcgaaagtttttgattattattatggtactccgaaaaaacctgtcaaaaatattctagataaaggtagagatatactttttgatattgactggcagggtacgcagcaacttatgaataattcaaaagatgatcttgtttaa

SEQ ID NO: 252450 - DNA, 631 bp, Unknown
  Bacterial polypeptide expressing nucleotide sequence isolated from the Sargasso Sea
atgaatacagaagatcaaaataaactagtaataatttcttctccatctggagctgggaaaacaacgctttgtaaaatgttactaaaaaaaatgaaaaatatagaattatccatatcatacacctcgagaaataagagacttaatgagaaaaatggaaaagactatttttttgttacaaaagataagtttaataaattagctaaaaagaatttttttatagaaacagcaaaaaactttaataattattatggctctccatattcaaacattaaaaaagctaaaaaaaataagaatatacttttatttgatattgactggaagggagcaagaaaaataagaaaaaattacaattccaataatattctagatttctttatattacctccatcaaagaatgaattgaaaaaaagattaattagaagaggaagagataatatgaatgaaatatcattaagattgtcatatgctattaatgaaatgaaacattttaatgaatataaatatatcttgataaatgaaaatgttcataaaactgtaaaagatattattaaaattatagaatataataaattaattcaaaaaaatcagatgttattaaataaaaatttaaaaaaaattataaagatttaaa

SEQ ID NO: 252451 - DNA, 551 bp, Unknown
  Bacterial polypeptide expressing nucleotide sequence isolated from the Sargasso Sea
aatgaatacagaaaaaaaattaaataaaataataattatttcttctccatcaggagcaggtaaaactacaatatgtaaggaattattgaaaactagtaaagatattaacctttctatttcttataccactagacaaaaaagagtgaatgaaaaggatggtaaggattattactttgtaactaataaagaatttaacaatttgaaaaaaaatcatttttttattgaaaccgctaaagtatttaatcattattatggatctccatataaaaatataattaattcatttaaaaaaaataaaaacatcttatttgatatagattggcagggtgctaataagcttagaaaaaaatattctaatgaagatataatagatttttttatattacctccaaataaaaaagaattaagaaaaagattaaacaaaagaggaagagataataaaaaagaaatacaaatgagattatctcttgctttatcagaaattagtcatcataatgattacaaatatgttttaataaatgataaactaaatgaaactatttctaatatca

SEQ ID NO: 252452 - DNA, 556 bp, Unknown
  Bacterial polypeptide expressing nucleotide sequence isolated from the Sargasso Sea
atgaaaaatcaaaaaaaacttattatccttactggacccagcggggtaggtaaaggaacagtcgttaaaaaaatattaggtgaagaaaaaaatttttggctttcaatatctgcaactactagacaacctagagagggagagaaggaaggagaaaattactactttttaaatcgagaaaagtttaaagaaatgattgaacaaaaccttttccttgaatgggctcaattcgccggaaactactatggaacaccgttgtcttctgttaatgagaaaataaaaaagggatttactgtacttcttgaaattgaagtagagggtgccaggcaaataaaaaataagtttcctaattcactgtcaatatttttacttcctccggataaagaagagttagagagaagaataagaagtagaggtacagaaaaagaagaggctattaaaaaaagactcttaagggctaattatgagatttcagtatcaaatcagtttgattttgcattaactaatcaccatgttgatgaaacagcaaaaaaaataatcaagttaataaaaacttgat

SEQ ID NO: 252453 - DNA, 459 bp, Unknown
  Bacterial polypeptide expressing nucleotide sequence isolated from the Sargasso Sea
ggctttcaatatccgcaactactagagaacctagagatggagagaatgagggggaaaattattattttttgaatgaagaaaagtttaaacaaatgattgaacaaaatctttttcttgaatgggctcagtttgctggcaactactatggaactcctttgtcttctgtcaataagaaaatcaaacagggatttaccgtactacttgaaattgaagtagaaggagctaagcaaataaaggaaaagtttcctaattctttgtcaatatttttacttcctccagatatcccagaacttgaaagaagaataagaaatagaggaacagaaaaagaggaggcaattaaaaaaagactattgagggcaaattatgagatttcagtatcaaatcaatttgattttgcgttaacaaatcggaatgttgatgaaacagcaaaaaaaataatcaagttaataaaaacttgat

SEQ ID NO: 252454 - DNA, 181 bp, Unknown
  Bacterial polypeptide expressing nucleotide sequence isolated from the Sargasso Sea
atgtttgttttatcttcaccttcgggcgcaggaaaaacttctttatcaagaaagcttctggaattagataaagaattatttctatcaatatcctatacaacaagaccgccaagaccaggcgaaattgatggcgaagactatttctttgtaaataatgatgattttgctcttatgcaggaac

SEQ ID NO: 252455 - DNA, 358 bp, Unknown
  Bacterial polypeptide expressing nucleotide sequence isolated from the Sargasso Sea
tacggtgtccctagaacacaagtcagtgacgctcttgcagatggtaagcacgtcataattcgtgtagacgtacagggtgcaaaacgcctaaaagaaattattcccgaggcgcttctcatattcatactcccaccctccttggacgttcttcgttcccatctcgaaaaacggggtgttgatacagagaatgaaatgaaaaaacgattgcttgcggctaaacaagagatcactcaaacagatctattcgatttcaccgtgacaaataaggaacaccaacttgatcaagccgtgaatcgggtaatacaaatcatcgaaactgaatctctaaaaaaaccaacacgcgagattcggttataag

SEQ ID NO: 252456 - DNA, 487 bp, Unknown
  Bacterial polypeptide expressing nucleotide sequence isolated from the Sargasso Sea
gttgcgtcaacgtcacccggagctgtggttatctgtctccgccaccacccgtgcgccgcgccctggagaggagaacggcattcactacttcttccacagccaagacagctttcagcagctcgtggatcaaagcgggctgctggagtgggcgagctttgctggcaattgctacggaaccccccgtcagcctgtggaggagcgcttggctgctggcgtgcccgtgctgctggaaattgagctcgagggggcccggcaggttcgccagagcagccccgatgcgtttcaaatttttctgcgccccccatcgtttgaagagctggaacgccgcatccgcgggcgcggcaccgacagtgaagaagccattcaaaagcgtcttgcgcgagcgaaagatgagctgaacgctgaagcggagtttgatgcaacagtcgtcaacgacgacttagaacatgcgcttgaacaactcattggtttgatattcagtagttaa

SEQ ID NO: 252457 - DNA, 300 bp, Unknown
  Bacterial polypeptide expressing nucleotide sequence isolated from the Sargasso Sea
cttgtctgaaaaaggcgtattagtgattttgtcttctccatcgggagcaggtaagacaagcatcgcgcgtgctttggttgaagaaaatgaaagctttttattttccgtctcggctacaaccagaaaatctaggccgggtgaagtaaatggcagagagtatcactttttaaccgttgacgaattcagagaaaaaattaatgacggtaaatttttagagcatgccaaagtttttggaaatttatatgggacgcctttagaacctgtaatggagtctattaatgatggtaaagatttgatttt

SEQ ID NO: 252458 - DNA, 280 bp, Unknown
  Bacterial polypeptide expressing nucleotide sequence isolated from the Sargasso Sea
atgtcatcaaccaaaattgggttaatgatagttctatcctctccatctggagctggaaaaacgactttggtaaaactactttcaaaaaaagaaaacttcttcgtatcaatttctcacacaactagaaaaccaagagatcaagaaataagtggcaaagactatcattttgtaaaaaatgatgatttcaaaaattcaattaagaatgatgaatttttagaatacgcaaaagtttttaataactattatggtagtcctaaaaaaacagtaatagaaaaataaa

SEQ ID NO: 252459 - DNA, 179 bp, Unknown
  Bacterial polypeptide expressing nucleotide sequence isolated from the Sargasso Sea
cttgtcagaaaagggcgtattagtgattttgtcttctccatcaggggcaggtaagacgagcattgctcgtgctttggttgaagaaaataaaaactttttattttccgtttcggctactacgagaaaatcaagggcctggggaagtaatgggcagagagtactactttttaactacccga

SEQ ID NO: 252460 - DNA, 577 bp, Unknown
  Bacterial polypeptide expressing nucleotide sequence isolated from the Sargasso Sea
aatgaatacagaaatcaagaataaactgattattatatcatctccatcaggagcgggaaaaacaaccttatgtaagcttcttttaaaaaaaatgaaaaatattaaactttctatttcatatacttccagaaataaaagactcaacgaaattgatggtaaagattatttttttatagacaaaaaagaatttaaagatctcaaaaataaaaaattctttattgaaactgcaaataattttaataattactatgggtcaccatataaaaatattattaaagcaaatagaaataatgagtatttattattcgatattgattggaaaggagcaagaaagataagaaaaaattataataaaattaatattatagatttttttattttaccaccttcaaaatcagaattaaaaaaaagattaattaagagaggtagagataataaaaaagaaattaatttaagattatcttatgcattagaagaaatgaaacattttaatgagtataaacatgttctgataaatgaaaatgttcataaaactgttgatcaaatcaaaaaaattattgaatataatcaattaatc

SEQ ID NO: 252461 - DNA, 574 bp, Unknown
  Bacterial polypeptide expressing nucleotide sequence isolated from the Sargasso Sea
ggtgctggtaaaacatcaatatcaaagcaactcataaaaaaagataaatcaattgcattatcaatttcatgcactacaagacctaaaagaacgaaagaaataaataagaaagactatatatttcttaatgaatatcaatttaatgctcgtataaaaaaaaatgattttttagagtcagcaaatgtttttggatatagatatggcacacttaaacaaactgtaaacagtttttttaaaaaaaagaaagacgtattatttgatattgattggcaaggatttcaacaacttaagcaaactaatttagaagttgttggaatattcattttaccgcctagtaaaaaagagttagttttgagattaaaaacccgagctagagatactaaaaaagagatgaaaaaaagaatgaatttagttcaaaatgaaatttctcattttcctgaatatgattatgttgttataaatgaaaatttagacaactgtgttaatcaaattttgaatattattaagtctgaaagacttaaaaaatctagattaataaatttaacaaaatttgttaataaatttagaacttaat

SEQ ID NO: 252462 - DNA, 628 bp, Unknown
  Bacterial polypeptide expressing nucleotide sequence isolated from the Sargasso Sea
atgaatatagaaaaaaaattaaataaaataataattatatcttcaccatcaggtgctggaaaaactactatatgtaatgaactattgaaaactttgaaaaatattaatctctctatctcttatactacaagacaaaaaagaattaatgaaaaacatggcaaagattatttttttgtatctcaaaaagaatttatagagttaaaaaaaaatgatttttttattgaaactgctaaagtttttaatcattattatggatctccatataaaaatgtaattaattcatttaaaaagaataaaagcattttgtttgatattgattggcagggagctaataaacttagaaaaaaatattctaaaaatgatattattgatttttttatattacctccaaataaaaaagaattacgattaagattaaataaaagaggaagagataataaaaaagaaattcaaatgagactatctttagctttatcagagattagtcatcataatgattataaatatgtaataataaacgataaattaaatgaaactatttctaatattaaaagtatcattaaatataatcagttaaaatctaacttattagataaggtaaataaaaatttattaagcaagaaataac

SEQ ID NO: 252463 - DNA, 193 bp, Unknown
  Bacterial polypeptide expressing nucleotide sequence isolated from the Sargasso Sea
atgaccaaatcaacaaagcctttgatgcttgtgctatcatcaccttctggggctggaaaaacgacactttcaaaaaaaattcaacaatcggataactcttttgaaatttctgtatcacacacaactagaaacccaagaccaaatgaagtagatggtgttgattatcattttgtaaccaaagaaaatttaaaaa

SEQ ID NO: 252464 - DNA, 451 bp, Unknown
  Bacterial polypeptide expressing nucleotide sequence isolated from the Sargasso Sea
atgaacattaaggaagagtgttttttactaatcctttcctctccatctggtgcaggtaagaccagtttgtcaaaaaaaataaaagaagaaatcaaaaattttgaaatttcaatatctcacacaactagaaaacctagaaacgatgaggttaacggtaaagattatcattttatttctaaagaagaatttttaaaaaaaattgataataatgaattttacgaatatgcaaaaatatatgataattattacggaacctcaaaaaaagctgtaaatgatctcttggaaaaaaataaaaatataatattcgatatcgattggcaaggtacacagcaattagttaaattctcgaatttaaattttttaaaaatttttttacttccacccaataaaaacgaattagaaaaaagattaaataatagaaataaagatagtgataaatcactttcaaaaa

SEQ ID NO: 252465 - DNA, 310 bp, Unknown
  Bacterial polypeptide expressing nucleotide sequence isolated from the Sargasso Sea
tatgtccgaattaaatgaagggataattgttgtattatcatccccatcgggcgcaggaaaaactacgctagtaaaaagaatttcactaaataaaaacttctcaatctcaatctctcatacaacaagaaaacctagaagaaatgagattaatggaaaagattatttttttgtttcaggtgcagaatttgaaaaacttataaattctcaaaaattcttagagtatgcaaaagttttcaaaaattactatggatcatcaaaagaaaatgtgattaaaatgttaaaaaatggtgagaatgttatttttgatatt

SEQ ID NO: 252466 - DNA, 610 bp, Unknown
  Bacterial polypeptide expressing nucleotide sequence isolated from the Sargasso Sea
aatgtccttaaatagtggtgggataatgataatattgtcatcaccatctggagcgggcaaaactacccttgttaaattattatccgaaaatagggatttttatacttcaatttctcatacaactagaaaacctcgaaataatgaagaagaaggaaaagattattattttgtaaacaatgatcagtttcaaaatttaattaaaaagaaagaatttttagaatacgctaatgtattcagtcatctctatggaacgactaaaacacctataataaaaaaccttgaaaataacaaaaacgttgtctttgatattgattggcaaggcactgaacaaataaaaaaaaaaaatttagaatataaattactcacattttttgtgctgcctcctagcaaaaaagtattatttaatcgattatcgaatagagacatgaaagataaacttattgttgacgatagaatgaaagaatttaataaagatatacttcattggaaaaattatgattatgtagtgattaacgatgatttacaaaaatgttttaatgaaatttgtgaattgattgattcttttatcaatgaatctaaaaataattatgataaaaaattaatagaaaaa

SEQ ID NO: 252467 - DNA, 667 bp, Unknown
  Bacterial polypeptide expressing nucleotide sequence isolated from the Sargasso Sea
atgaacttaattatttataacattttaccttttaatctcatcgtgaacgacataactggaaaattaattgtcatatctgctccatctggaactggaaaaacaacggtcgtgaagaaactattgaaacaaaatgctaacttagttgcatcggtttcattcaccacaagaaaaattcgtgataatgaaaaagaaggccttgattatttcttcgtagacgaaaaaacctttgggaacatgattcgaaataatgattttttggaacatgcaactgttttcggaaatttttatggcacagaaagaaaaagtgtttcgcaaaaccttgaaaaggggatgaatgtaatcttagaaattgattggcaaggcgcgctacaaataaaaagcagaatgcccttatgcgttatgattttcctgattccgccttcaagggaagtgctgcttagcagattaaaaagtagagggactgattctgatcaagaaatagaatatcgcttcaatcaagcggttttagatctagagcagtcaaataagtttgatcatgtattggtcaatgatcaacttgataaggttgtctctgaaatctctctctgtatcgagggaaaggcaaataaaatagatgatacaagaggggtttctgaatcaattaaaagtttctatgaaacagattgac

SEQ ID NO: 252468 - DNA, 474 bp, Unknown
  Bacterial polypeptide expressing nucleotide sequence isolated from the Sargasso Sea
gatgtctcttaagacagatggatctatatttatattttcatctccatcaggtgcagggaaaactacattagtaaaactagtatcaagaaaaaaaaattttattacatctatatctcatacaaccagaaaacctagaagcaacgaaattgacggtcaagattatcattttgtaaatgataaaaagtttcaagacctgattaataaaaaagaattcttagaatacgcaaaagtttttaataatttttatggcactacaaaaagaccagtattccaaaatttattagacggaaaaaacgttttgttcgatattgattggcaaggaagtagtcaaattaaagctcaaaatattaaatttaaaatattttctttttttgttttaccacctagcaggaaagtattgcaaaaaagattatcaaatagagatatgaaagataaattaattgcatctgaacgaatgaaagaattttatgacga

SEQ ID NO: 252469 - DNA, 324 bp, Unknown
  Bacterial polypeptide expressing nucleotide sequence isolated from the Sargasso Sea
catgaaaacaataaccaatgatatctgggtcattacagcgccatcaggtacaggaaagacaaccctaaatagaagactgatcaatgacctagaccgcctaaaaggagctgtgagctacaccagtcggagtaaaagggctcatgaagtgcacggtgatcactactggtttgtaacggtcaaagagtttgaacaacatctccaaaaaggcaacatgttagagtgggcaaaagtatttggaaactattatggcacaagtgtcgaagaaattaagcgcttagaatctgccaactacgacgtgttactagaaattgatgttcaggggtg

SEQ ID NO: 252470 - DNA, 556 bp, Unknown
  Bacterial polypeptide expressing nucleotide sequence isolated from the Sargasso Sea
tatgaaaaatcaaaaaaaacttatcatccttactggacccagcggggtaggtaaaggaacagttgttaaagaaatattaggtaaagaaaaaaatttttggctttcaatatctgcaactactagagaacctagagaaggagagaaggacggagaaaattattttttcttaaatcaagaaaagtttaaagaaatgattgaacaaaaccttttccttgaatgggctcaatttgctggaaactactatggaacgcctttatcttctgttaatgagaaaataaaaaagggatttaccgtactacttgaaattgaagtagagggtgcaaggcaaataaaaaataagtttcctaattcacagtcaatatttttacttcctccggataaacaagagttagagagaagaattagaaatagaggtacagaagaagaagaggcaattcaaaaaagactctcaagggctaattatgagatttcagtatcaaatgaatttgattttgcattaacaaatcacaatgttgatgaaacagcaaaaaaaataatcaagttaataaaaacttga

SEQ ID NO: 252471 - DNA, 172 bp, Unknown
  Bacterial polypeptide expressing nucleotide sequence isolated from the Sargasso Sea
aatgataattttatcatcaccgtctggagcaggtaaaacaacattagttaaaaaaatctcaaaagaaaaaaaatataaaatttctatttcacacacaaccagagagtcgagacctaatgaaattaatggagtcgattatttttttatatcagaaccaggaattccaaaatct

SEQ ID NO: 252472 - DNA, 460 bp, Unknown
  Bacterial polypeptide expressing nucleotide sequence isolated from the Sargasso Sea
tatgagtgaagaaaaaaaaggtatgatgtttgtcctttcatctccttcaggtgcaggaaagaccacgctaactaaaaaacttgtaaaaaataattcaaattttagactttcaatatctcacacaacaagaaaaccaagatcatcagaaatagaaggtaaagattattattttgtagacgaaaatgaatttaatactttgataagtagagatgaattttttgaacatgctaaaatttttgataacttttatggaacattaaagaaaccagtaattgactttttatcatcaggaaaagatgttttatttgacattgactggcaaggaacacaacaattgaaaaaaataaaaaatttatctattgtaacatttttcattttaccccctaatataaagacattaagagccaggctgcttaaccgacatgaaggacaagaaaatgttatcaatcaaaggatgaaa

SEQ ID NO: 252473 - DNA, 538 bp, Unknown
  Bacterial polypeptide expressing nucleotide sequence isolated from the Sargasso Sea
aatgttgaatgatttaaaaaaaggagagttaattgtctttgcagcaccttcaggtgccggaaagtcgtctcttataaaagaaatcattactaataatgagaacatagaattatcagtatctgcgacaacaagatcaccaagagagggagaaactcatggcaaagattatttttttataactgataatgagtttaatgatcttaagaaaaaagacgcatttattgagagtgctgatgttcatggatatcaatacggaactcttaaagcttttgttgaagagaagttagagaataatatcagcgttgtcttagatattgacgttcaaggatttattcaaattagcaactcaattaaacaagttatttcaatttttattatccctccatcattagacgaattaaaaaagagattaattttaagaggtctcgatgctgatgatgttattaatagaagaatggaaaatgcaataaaagaattaaagcatgctaaatattttgattatattgttttaaatgatgattttaatagagcttttaat

SEQ ID NO: 252474 - DNA, 316 bp, Unknown
  Bacterial polypeptide expressing nucleotide sequence isolated from the Sargasso Sea
aatggataaacaaaatataaacatctttgttatttcgagcccctctgggggaggaaaaacaagtcttataaaaaagctccttgaagatccaagatcagaaggtacagttttaagcatttcccacacaacaagagaaaagaggttgaatgaaaaagatggagttgactacttctttactgataaaaaaagttttgaagataaaataaaaaaaaatgattttttagagtatgcaacggtatttgataattattatggcacttctcaggaaacagttaacacactagtcagtcaaggcaagacggttattcttgaattg

SEQ ID NO: 252475 - DNA, 301 bp, Unknown
  Bacterial polypeptide expressing nucleotide sequence isolated from the Sargasso Sea
aagtaaaaaattaaaatataagattataacaatatttattttacctccatctaaagaagaactttttaaaaggttattgaaaagagagcagaaagacaaaaatattgcaaacgaaagaatgaaacaatttaaagaggatgtattgcactggaaggattacgactttactgtaataaatgatagaattgaaaaatgctacaaatcaattatccactttattaaaattaacaaaaaaaataaatttattaaaaaatataataaaacatttattaaaaaacatattcaatatctagttaattaa

SEQ ID NO: 252476 - DNA, 310 bp, Unknown
  Bacterial polypeptide expressing nucleotide sequence isolated from the Sargasso Sea
tggcaaggtgcacagaaattggcaaatttctctaaaactgatattgtttctatttttatattaccaccaagtaattcaatccttaaagaaagattaaaaaaaagaaatgaagattcccctcaaattgtaaacaagagaatgagtaaagcaaaatcagaaataagtcattggatagaatatgattatgttttaataaatgaagatttagcaaaatgttcagatgaagttgtcactatcttaaaagcggaaaggaaaaaaagggatagacaaaaattcacttttggttttattgaaaagcttttagagtaac

SEQ ID NO: 252477 - DNA, 570 bp, Unknown
  Bacterial polypeptide expressing nucleotide sequence isolated from the Sargasso Sea
ctgaaaaaacatctatttcaaaaatgttactaaaaaaagataaattattatcattatctatatcttgtactacaagacctataagaaaaggagaagtaaacaagaaagattatatttttttaaatcaagagcaattcagtgactctttaaaaaaaaataaatttttagagtcagcttatgtctttggatataaatacggaactctaaaagatacagttaataatttttttaataaaaaaaaagatgtgttattcgatattgactggcaaggttatcagcaattaaagcaaagtaatatggatgtgattggcatatttatattaccacctagtaaaaaagagttaattaaaagactcagaactaggggaagagacactcaagatgaaatgaaaaaaagaatggatttagttcaaaatgaaatttctcatttcccagaatatgattatgtagttgttaacaaggatctaaaagaatgtgtaaataaaattaaaaatattattgactcagaaagatcaaaaaaatcaagacttattaatcttactaattttgttaataagtttaggaattaat

SEQ ID NO: 252478 - DNA, 292 bp, Unknown
  Bacterial polypeptide expressing nucleotide sequence isolated from the Sargasso Sea
atgattaatagtgaaaagcctctcatgcttgttctatcctcaccatcaggtgcaggtaaaacaactttaacgaaaaaaatccaacagtctgataattccttcaaagcttctgtttcacacacaactagaaaagccagagccaacgaagtcgatggagtagactatcattttgtatcaaaagaaagatttcaaaaacttatagaggaaaaagctttttatgagcatgcaaaaatctttgataattattacgggacatctaaattatctataaaaaaaattatagacaacaaac

SEQ ID NO: 252479 - DNA, 556 bp, Unknown
  Bacterial polypeptide expressing nucleotide sequence isolated from the Sargasso Sea
atgaaaaatcaaaaaaaacttattatccttactggacccagcggggtaggtaaaggaacagttgttaaagaaatattaggtaaagaaaaaaatttttggctttcaatatctgcaactactagagaacctagagagggagagaaggacggagaaaattactatttcttaaatcaagaaaagtttaaagaaatgattgaacaaaaccttttccttgaatgggctcaattcgctggcaactactatggaacgcctttgtcttctgttaatgagaaaataaaaaagggatttaccgttctacttgaaattgaagtagagggtgcaaggcaaataaaaaataagtttcctaattcactgtcaatatttttacttcctccggataaagaagagttagagagaagaataagaaatagaggtacagaaaaagaagaggcaattaaaaaaagactgtcaagggctaattatgagatttcagtatcaaatcaatttgattttgcattaacaaatcacaatgttgatgaaacagctaaaaaaataatcaagttaataaaaacttgat

SEQ ID NO: 252480 - DNA, 352 bp, Unknown
  Bacterial polypeptide expressing nucleotide sequence isolated from the Sargasso Sea
atgataattctatcatcaccgtcaggagcaggaaaaactactttagttaaaaaaatttctagtaaaaaaaaatataaaatttctatttctcatacaaccagagaaccaagaccaaatgaaatagatggtttggattatttttttatttctaaagaaaaatttcaaatgttaattaatgaaaatgcgttcttagaatacgcaaatgtatttaaaaatttatatggatcaacaaaagaacaagtttttagtaatttagacagtggtcaaaatgttttatttgatatcgattggcaaggtgcaagacaaataaaaaataaaacattaaattataaacttatatctttttttatct

SEQ ID NO: 252481 - DNA, 550 bp, Unknown
  Bacterial polypeptide expressing nucleotide sequence isolated from the Sargasso Sea
ctcagagacaaataattatataatttcaatttcacatacaacaagaacgccaagagcaaatgagattaatggtagagattattattttgttagcaaaggtgaatttgaaaaattgaaaaatgaggatgaatttttagaacatgcagaagtatttaaaaatctttatggctcatctaaaggaaatgtaataaaaaatttacaagaaggaaaaagtgttatttttgatatagattggcaaggagctgatcaaataaaaaaaaaaaaattaaattataaaattatatctttttttattttgcccccaagtaaagaggttttatttcagcgtttgttaaatcgagatataaaaaataaattaattgttgaggaaagaatgaagcagtttagtaaagatattctacaatggaaaaattatgattttgttgtaataaatgatcaattaaaaaaatgttataaagaaataatgtattttatcgatactaaaattagaaacctggacaataattacaattctaaaaatattgaaaagcacataaagactttaatttga

SEQ ID NO: 252482 - DNA, 289 bp, Unknown
  Bacterial polypeptide expressing nucleotide sequence isolated from the Sargasso Sea
atggccgcaaaaaaagcagggataattgtaatattatcctctccttcgggcgcaggaaaaactacattagtaaaaaaaatttctaaaagaaaaaaatataaaatttccatttctcacacaactagaaaacctagagctaacgaaaaaaatggtaaagattattattttataaatagctcaaaatttaaaaaactaataaaagcaaaaaaatttttagaatatgctaaagttttcaaaaattattatggttcactaaaagagaatgtaattacaaaattaacaaatggtg

SEQ ID NO: 252483 - DNA, 598 bp, Unknown
  Bacterial polypeptide expressing nucleotide sequence isolated from the Sargasso Sea
aatggcaataaatgacaatgaaataaaaagaaaagggtttatgtttgttttatcttcaccttcaggagcaggtaaaacatctttatcaagaaagcttctggaattagataaagaattatttctatcaatatcctatacaacaagaccaccaagaccgggtgaaattgatggtgaagattatttctttgtaaataatggtgattttgctgatatgcaggaacaaaatgaatttttggagtatgcgaaagtttttgattattattatggtactccgaaaaaacctgtcaaaaatatcctagataaaggtaaagatatactttttgatattgattggcagggtacgcagcaacttatgaataattcaaaagacgatcttgttaaggtttttgtattacccccatctatagaagaattagaaagaagactaaaagagagaaaacaagataaagatgagatcattcaaaaaagaatgtctagagcatcagatgagataagtcattatgcagaatatgattatattttagttaatgataattttgatgagacagttgaagagattattagcatactaaatgctgaacgattaaaaaaatcatag

SEQ ID NO: 252484 - DNA, 304 bp, Unknown
  Bacterial polypeptide expressing nucleotide sequence isolated from the Sargasso Sea
ctggtcaatactatcatgaaaacagcagcaaagggtatgttgtttgtactatcctcaccttctggagccggcaagacaactttaactaaaaaaatttctgaaaataattctaattttaaaatttcaatttcacacaccacaagaaagccaagaccaaacgagattgatggaaaagattatcattttgttaaccaaactcagtttagtgaattaattaaaaataatagtttttttgaacacgcaaatatttttaataatttatacggaactttaaaaaaaccaagtattagaccttatatctaaa

SEQ ID NO: 252485 - DNA, 300 bp, Unknown
  Bacterial polypeptide expressing nucleotide sequence isolated from the Sargasso Sea
aaataagaaaaaaatttaataaaaaagatataattgacatttttattttaccaccttcagtaaaagaattaaaaaaaagattaataaaaagaggaagagacagtaacaaagaaattaatctaagattatcttatgctcttgatgaaattaagcattataatgaatacaattatgttcttataaatcaaaatattcatgaaacagctactgatataatagatattataaagtatcatgaattaattaaaaaaaatgaaaaagtattaaataagaaattaaaaactcttataaatttctaat

SEQ ID NO: 252486 - DNA, 634 bp, Unknown
  Bacterial polypeptide expressing nucleotide sequence isolated from the Sargasso Sea
tatgagtatagaaaaaaatagtaaattaataattatttcatcgccatctggtgcaggtaaaactacattgtgtaaattattaataaaaaaaatgaaaaatatcaatttatcaatttcttacacttctaggagtaaaagattaaatgaagttcatggaaaagattactattttgtaaataaaaaaaaatttgaattactcaaaaagaaaaattatttcattgaaacagcaactaactttaataacttatatggttcaccatttaaaaatatagttctatcaaaaaaaagaaataaacacattttgtttgatatagattggaaaggtgctagaaaaataagaagaaattacacgaaagatgatataattgatttttttattctaccaccatctaaatctgaattaaaacgaagattagtaaaaagggggagggataataaaaaggaaattgatttaagactatcttatgcaatagatgaaatgaagcattacaatgaataccaatatgttctgataaatgaaaaagttcataagactgttaatgaaataaaaaaaataattgaatatcatcaattaattataaatcagaaaaaggttttaaggtcaaaattaaaaaagattataaatagaaattaa

SEQ ID NO: 252487 - DNA, 370 bp, Unknown
  Bacterial polypeptide expressing nucleotide sequence isolated from the Sargasso Sea
ctgtagagtttgttcatcaaaactgagcacaggagtaaatttaattctagaaattgatgtgcaggggttcaggcaaattaatgatttatctcttaattatgattctatttttattctccccccatctatcgattctttagaggaaagaataaaaagtaggggagacgaggacttagagtcaattaatttgagattaaaaaatgcaaaagatgagttggctcatgcaaaagaatacaatcatattataattaatgattcctttgaggaggcagagatggagcttttcaacattatttcccaagaaaaaccattaaataagcaaaatattgaagaagtccaacagtttttagctcagctattgtcttattag

SEQ ID NO: 252488 - DNA, 544 bp, Unknown
  Bacterial polypeptide expressing nucleotide sequence isolated from the Sargasso Sea
aaaggttttgtaacatcaatatcacacactacaagggcacctagatcaaatgaggtcaatgggaaagattatcattttgtaagcattgagaaatttgaaaagatgataagcaataaagattttttggaatatgcaaaagtttttaaaaatttttatggaactacaaaatcaaatgtttatgcggaattgaataaaggcagagatgttgtatttgatattgattggcagggaacaagtcaaattatatctcaaaaattaagaaataaattattaactttttttattttaccccccagtaggcaagaattattcaagagactttctaatagagatatgaaagataaacttatagctgaggaaagaatgaaacagtttgacaaggatgttttgcactggaaagattatgactatgtaataattaacaatgatcttgaagtttgctacaagcaaatatcagagtatatagattttgaaattagcaataaaaaatgtgattatgatgtaaattcaattaaggaacatatcaaaaaactaacttcttaaa

SEQ ID NO: 252489 - DNA, 522 bp, Unknown
  Bacterial polypeptide expressing nucleotide sequence isolated from the Sargasso Sea
tttcgatcagcgccaccacgcggcagatccgcccgagcgaacgcgagggcgtgcattatttcttcatggatccggacggcttcatgaagaagcgcgacgagggcgcgtttctggagtgggcggaagtgcacggtaattactacgccacgccgaaggccgccgtcgagcaatcgcttgccgccggtcgcgacgtgctgttcgatatcgatgtgcagggcgccgagcagttgaagcaggcgatgcccggcgatgtcgtcggcatcttcgtgctgccgccctcgatggaggcgctcagggcccggctgctggcgcgcgcggaagacagcaaggccgccatggaagtgcgcctcaagaacgccaccggcgaaatctcgcactggcgggactacgaatatgtcgtcatcaacgacgacctcgacgatgcctacgacctcgtccgctcgatcctgcgcgccgaacgcgccaagcgcgaacgcgaaacggcaatcccgcgtcacgtcgaaagcctgctgggccaatagg

SEQ ID NO: 252490 - DNA, 136 bp, Unknown
  Bacterial polypeptide expressing nucleotide sequence isolated from the Sargasso Sea
atgtccagctttaaaagaggtggaatatttatactttcatcaccttctggtgctgggaaaacaacacttgtaaaaaaaatttcaaaaaataaaaatttccaagtttccgtttcacacactactaggcttcctagac

SEQ ID NO: 252491 - DNA, 202 bp, Unknown
  Bacterial polypeptide expressing nucleotide sequence isolated from the Sargasso Sea
atgtcgaatgaaaaaggccaacttatagttatttcagctccctcaggagctggaaaaacatctattattaagaatgttataaaaaaactaaatgatgagaacaaaaaatcaacattttctatttctcatacaacaagattaccgagagatggtgatatagatggcagcgattatttttttgtatcaaatgaaatatttgatg

SEQ ID NO: 252492 - DNA, 349 bp, Unknown
  Bacterial polypeptide expressing nucleotide sequence isolated from the Sargasso Sea
actaaagcatggcaaaaatattgtatttgacattgattggcaaggaactcgtcaaattaaaaataaaaaattaaactacaaactaattacaatttttatactaccgccatcaaaaaatgaattattagcaagactcactaaaagagaaaataaaaacatgaaaactgtaaaaaaaagaatgaaagaatttaaaaaagatctatctagatggaaagaatacgattatgttgtgatcaatgataatttacaaaagtgttataaaaacattatgaaaattattagaagaaaaaataaaattgtttatgataaaaattttattagcatgcatgttaaaagattattaaactga

SEQ ID NO: 252493 - DNA, 481 bp, Unknown
  Bacterial polypeptide expressing nucleotide sequence isolated from the Sargasso Sea
atgaatattcataaatcatctaatttatacgtaataagcgcaccctctggcgcaggtaaaacctcgcttgttaaagagttgtgcaaaaaagtaagctttataagtccttcggtttcatataccacacgcaaaataaggaaatcagaagtagagggaaaagattacttcttcactaatagaactaacttcaaaaaaatggcatcaaacaatgaatttattgagttccagagtgtatatggcaatttatatggatcctcaaagacttatgtagagcaaaaattaaaagatggtgatgatgtgattttagaaattgactataaaggaatgatgaaaataaagtcaatgtatccctcagcgatcacaatgtatattgtcccccctagtatagattctttgaggaagcgtttaatttgtcgcggccaagacgatattgaggttgttgagaaaagaattagctcagcaaaatttgaattgagcttct

SEQ ID NO: 252494 - DNA, 515 bp, Unknown
  Bacterial polypeptide expressing nucleotide sequence isolated from the Sargasso Sea
aacaagaaagccaagccctaatgaaatctctaataaggattatttttttgttagtgaagatgagtttaaaaggctaattaaaaatcaagaatttttagaatacgcaaaagtttttaataatttttatggctcaactagaacaccagtcataaataatttagataatggaaaaaacgtactttttgatattgattggcagggtgctgatcaaatcaaaaataaaaaattagattataagttaataactttttttatattacctccaagtaaagaagtactatttgagagactatctaatagagacatgaaagataaattaatagttgatgaaagaatgaaacaatttgaacacgatgtcttacattggattaattatgattatgtagtgataaataataatttagaagattgttacaaaaaaattttaaatctaatccaagctgaaataagaaatacgtcaaaagattatgataaagattttatcagaaatcatgtagaaaaactcacgtcatagc

SEQ ID NO: 252495 - DNA, 271 bp, Unknown
  Bacterial polypeptide expressing nucleotide sequence isolated from the Sargasso Sea
atgtcctcaaatatagacggaataatgatcattctgtcttcaccatctggagctggaaagactacattagttaaaaaaatttcatccataaaaaattttgaaatttcaatttcctatacaacaagaaaaccaagatcgaatgaagaagatggcaaacattatttttttataaataaaaaaaaatttgaaaaattaataatagatggggaacttatagaatacgcaaatgtttttaataattattacggaacttcaaaaaataaagtttaaa

SEQ ID NO: 252496 - DNA, 526 bp, Unknown
  Bacterial polypeptide expressing nucleotide sequence isolated from the Sargasso Sea
gctggaaaaactactctttctaaaaaaattcaacaatcagatagttcttttaaaatttcagtttctcatacaacaagaaaagcccgacctaatgaagtagatggtgtcgattatcattttgtatctaaagatgaatttaaggaaatgataaagaaaagtgcattttacgaacattcacaaatttttggaaatttctatgggacttcaaaatcttctgtgaacaaaattataaaagacaaatttaatgtattatttgatatagattggaaaggtgcgcaacaattaagcaactataaacaattaaatcttctaaaaatatttatactaccaccaaataaagatgaattagaaaaacgattagttgctagaaaccaagatgataaagagtcaataaaaaacagacttttagcttactctcaagatataaaacactcaaatgaatatgatcatgtaattgtaaatgataatgttgattcttgcttcaattcaataaaaaagataatttctaatcgcataaatatttaaa

SEQ ID NO: 252497 - DNA, 604 bp, Unknown
  Bacterial polypeptide expressing nucleotide sequence isolated from the Sargasso Sea
tatgcttgtattgtcatcaccatctggtgcaggtaaaacagcgcttgcaaacaaactattagagagtgatagttcatttgaactatcggtatcattaacaactagaactccaagaaatggtgaagtagatggtaaagattatttttttgttaatgagtatgaattttctagtatgattgaaaataatgaattattagaatttgccaatgtgttttcaaataagtatggaactaaaactaatctagtaatgaatgctttaaataatggaaaaaatgttctttttgatatagattggcaaggagtaaaacaattaaaagaaaatgtaaagctatcaaggcagttagttacagtatttattcttcctccttcaatatctgaattaaaccgtagacttaaaaatagggctctagatagtgaggaaactctaaaaaatagaatgtttcaggctgagaaggaaataagtcattgggttgattatgattatgttattgtaaatgatgactttcagaaatgttttgatgaactatatgctattgtaaaagctgaaaagttaaaaaagataaggcagatatatcttgatgaatttacaaaatactcatcttag

SEQ ID NO: 252498 - DNA, 355 bp, Unknown
  Bacterial polypeptide expressing nucleotide sequence isolated from the Sargasso Sea
aataaaggcaagaatgtattatttgatatagattggcagggcgctgatcaaattaaaaataaaaaacttgattataaattgattactttttttatattacccccaagtaaagaaatactttttaaaagattatcaaacagagacatgaaagataaacttattgcagacgaaagaatgaagaaatttagtagagatgttttacattggattaactatgattatgtagtaattaatgatgatcttaataagtgttattctaaaatatataatttaattcaagcagagttaacaaatgactcaaaagattatgatttagattatgtgagaaaacatgtgcaaaaattaactaattaat

SEQ ID NO: 252499 - DNA, 184 bp, Unknown
  Bacterial polypeptide expressing nucleotide sequence isolated from the Sargasso Sea
ttgagaatacagcgccgcggattgatgtttgttttatcctccccttctggagcgggtaagacgacgatctcccgtgcaattctagaacgtgacccagagatcgtcatgtcgatctccatgacgacccggccgaagcggccgggaaaagttgctgcacgcgattatcacttcgtcaaaaccgcgg

SEQ ID NO: 252500 - DNA, 571 bp, Unknown
  Bacterial polypeptide expressing nucleotide sequence isolated from the Sargasso Sea
atgagtatagaaatcaaaaataagcttattataatctcttccccatctggcgcaggaaagacaactttatgcaagctgttgttaaaaaaaatgaaaaatatttcattatcaatatcttatacatcaagaaataaaagacttaatgaaattaatggaaaggactatttttttgtgagtaaagataaatttttaaaattaaataaaagtaatttctttatagagacagctaaaaactttaataatttgtatggatctccttataaaaatgttattgattcaagaaaaaaaaatactcatttactatttgatattgattggaagggggctaggaaaattagaaataaatatagtaaaaatgaaattatagatttttttattcttccaccttcaaaatatgagttaaaaaaaagactagttaaacgagctagagagagctcaaaagaaatcaatttaagattatcctatgctattgatgaaatgaagcattttaaagaatataaatatgttttgataaatgaaaatgttcataaaacagttaatgaaataaaaaaaattattgagtttaatgatc

SEQ ID NO: 252501 - DNA, 328 bp, Unknown
  Bacterial polypeptide expressing nucleotide sequence isolated from the Sargasso Sea
ctttaaaaaaagcaattgggatagtgaagaattaatattatttgatgtggacgttaaaggcgcaatgtcaattaaaaaaaaatatccgaataatactcttactatatttattttaccgccttctttagaggatttaaagatgcgtttgatgaaaagaggaacagattcaatagaaataattaataaaagattagaaagaacaaataaagagatgaagtttaaagataaatttgatacttttatgataaatgatgatctttctaatgctattaaaaaattaaatgaaataatatcaaatcaaaaccaaggagtaataaatggcagttaa

SEQ ID NO: 252502 - DNA, 506 bp, Unknown
  Bacterial polypeptide expressing nucleotide sequence isolated from the Sargasso Sea
accaagacctaacgaaacatctaataaagattatttttttattgatgaaaatgaattcgaaagattaatcaaaaatgaggagtttctagaatatgccaaagtatttaataatctttatggtacttctagaacaccagtaattgataaactagataaaggcaaaaacgttttatttgatattgattggcaaggtgctgaccaaattaaaaataaaaaattagattataaattaattactttttatatacttccacctagtaaaaatgaactatttgaacgactttcaaatagagatatgagagataagttgatagcagaggaaagaatgaaacaatttgaaagagatgtattacattggattaattatgattatgttgttgttaatgataatttagatacttgttttacaaagattaaaaatttaatagatgcagaagtaagtaatggatctaaagattatgatttaaagtttatcagaaaccatgtaaaaaaattaacttcctaat

SEQ ID NO: 252503 - DNA, 361 bp, Unknown
  Bacterial polypeptide expressing nucleotide sequence isolated from the Sargasso Sea
atggataatagtaataagcctctcatgcttgtgctttcctcgccatctggagccgggaaaacaacactcacgaaaaaaattcaagaatcagatagcacttttagagtttctatttctcataccacccgcaaagcacgtgccaacgaggtagatggagtagattatcattttgttaaaaaagccgaatttgaaaaattaataaaagacaaagcattttatgagcatgcgaaaatttttgaaaatttatatgggacatcaaaatcttcaataaaaaaaattactgaaaaagggtacaatgttttatttgatattgattggcaaggtgcagaacaattgtcgagacataaggagttaaattgta

SEQ ID NO: 252504 - DNA, 241 bp, Unknown
  Bacterial polypeptide expressing nucleotide sequence isolated from the Sargasso Sea
aatgcagaatagcgataggcctctcatgcttgttttatcctcgccgtctggagctggaaaaacaacactaacgaagaaaattcaagagtcagatagttcatttaaagtttcagtttctcacacgacaaggaaggctcgtcccaacgaggttaacggcgtggattatcactttgttagtaaggaaaaatttcagcaattaataaacgaaaaagctttttatgaatatgcaaaaattttgaca

SEQ ID NO: 252505 - DNA, 369 bp, Unknown
  Bacterial polypeptide expressing nucleotide sequence isolated from the Sargasso Sea
tatacaaattagaaagaaatgaaaatgtaatatttgatattgattggcaaggaactaaacaaataaaaaatcaaaaattaagatatcaaattataacaatatttattttacctccttcaaaaaaagaattgtataaaagattgttaaagagagaccaaaaagataaaaaaattgcaagtgaaagaatgaagcaattcaaaaaagatgttttgcattggaaggattatgattttgcggttattaacgataaattagaaaaatgttataagttaattattaaatatattaataaacaaaaaaaacaaaaggcaactctaaaatacaataaaaatattattaaaaatcatatactcaaattaattaagtgat

SEQ ID NO: 252506 - DNA, 229 bp, Unknown
  Bacterial polypeptide expressing nucleotide sequence isolated from the Sargasso Sea
atggtgataaaaaaaaaaggtatgatgtttgttttatcatcaccttcaggagccggcaaaactactttaactaaaaaactagctggctctaacaaaaatttttcaatatccatttcacacaccacgaggaaacctaggccagacgaagtaaataaaaaagactattattttgttgatgaaaaagaattaaaatcacttataaaaaaaaatagttttttgagcagcaaga

SEQ ID NO: 252507 - DNA, 274 bp, Unknown
  Bacterial polypeptide expressing nucleotide sequence isolated from the Sargasso Sea
gatattattgatttttttattttacctccatcagttaaagaattaaaaaagagattagttaaaagaggtagagataattcagatgatataaatttaagattatcatatgcgttaaaagaaattagtcattataatgaatattcatatgtattaataaataaaaacgtgattcagacggtaaatgatataattcatataattaagtataactacattttagataaaaatcagaaattaactgataggaagcttaaaagtcttataaatttctaat

SEQ ID NO: 252508 - DNA, 285 bp, Unknown
  Bacterial polypeptide expressing nucleotide sequence isolated from the Sargasso Sea
taaaaaattaaattataaaataattaccatatttattttaccaccttcaaaaaaagaattattcagaagattacttaaaagagataaaaaagacaaaaaaattgcgagtgaaagaatgaagcaatttaaatttgatattaaacattggaaagactacgattatacagttattaatgataaaattgagaagtgctacaaacaaataatctcttatataaaaaagagaaaaaaaacccaaacaaatctaaaattcaaaaaaaaaattattaaaaaccatattaataa

SEQ ID NO: 252509 - DNA, 589 bp, Unknown
  Bacterial polypeptide expressing nucleotide sequence isolated from the Sargasso Sea
aaaaaggatagttttgggttttaacattgttttgtcttcaccatcaggtgctggtaaaaccactataacaaaaaaattaagccagaagtatcctaacattaaaatttcaatatctcacactactcggaaaccaaggcaaaatgaaattgacggtgtggactatcattttgtaagcaaagaagaatttgaaaaattaataaaacaaaatagtttttacgaacatgccaaaatttttgataattattatggcacttcaaaaaattcagttaataaacttcacaaagaaaattacgatgttgtttttgatatagattggcagggtacaaaaaaactgtctgaattcaaagaactgaacttaataaaaatattcattttaccacctgataaaactgaacttaaaaatagattaattaaaagaaaccaggataatgaaaaaatagtcgaaaaaagagtaaaacaatttgagaatgacgtacaacattggtttgattacgactatgtagtgattaataaagatttagagagctgctttggtcaaattgaaaaaattatcaaaactcacaaaaaagaaaaaaaatcttttatttga

SEQ ID NO: 252510 - DNA, 370 bp, Unknown
  Bacterial polypeptide expressing nucleotide sequence isolated from the Sargasso Sea
gtaatccaaaatttagaaaagaatcaaaacgtaatttttgatattgattggcaaggtgcagaccaaataaagaataaaaaattaaattataaattgattactttctttatattacccccgagcaaaaaagttttatttgaaagactttctaatagagacatgagagataagttgatagctgaagaaagaatgaggcaatttgatagagatgttcttcattggattaattatgactacgtcgtaataaatgacagtttagagcaatgttttttaaaaattgaaacattaataaacgctgaaatcaataatggttcaaaagattatgatagagagtttataaaaaaacatattgaaaatttaatttcttaag

SEQ ID NO: 252511 - DNA, 667 bp, Unknown
  Bacterial polypeptide expressing nucleotide sequence isolated from the Sargasso Sea
gtgatcgagggcttcctgccgcccaacccgatcgaagccgaaggccccttcgccgagtttcagggctaccagggcccgcagattcccaatccgatagttgaggtgagctgtatcacccggcgcaaggacgctatttatcacgattgcggttccggcctgcctgatcacctggtgcctgataacatgggtatggagggttatgtctattctctcgcccgccaggtatcgccgtcgctgatcaacgtacatgttccggtgtcgggccgtcgatttcacgcctatctgcaatttaaagaccctcggcccggtgaagtccgcgatgccatgatggcggcaatcgctttccggcggcttaaggcggtctacgcgttcgacgatgacatcgacatcttcgacgatcgacaggccatgtgggcgctggccacgcgagtccaatggcaccgcgacgtcatgcagctgaacggtttgacgctggcgccgctcgatccgtcggcaccggcatcgggaaacaccatcaccaaggcggccatcgacgcaacgcttccctccgccgcccggccaggacaaccgaagccagtggcgccacgcaaccgtgtttcagatgaggcgcttgcctccgcacacgcggcgctcgacggcatagacatctccgactggccgagctgaa

SEQ ID NO: 252512 - DNA, 336 bp, Unknown
  Bacterial polypeptide expressing nucleotide sequence isolated from the Sargasso Sea
tttttgatattgattggcaaggaactgagcaaataaaagaaaaaaaattaaaatataaaataataactatattcatacttcctccatcgcgaaaagaattatttaatagacttttaaatagagatcaaaacgatgaaaaaaatgccatgctaagaatgaaacaatttgataaggacgtggttcattggaaaaactatgattttgttgtaattaatgacgattttaataagtgttatgaaaaaattataaaatacattaacttaaaacaaaataatacttcagaaagttatgataaaaacgaaataagcaaacacgttttagatttacttaagtaaa

SEQ ID NO: 252513 - DNA, 559 bp, Unknown
  Bacterial polypeptide expressing nucleotide sequence isolated from the Sargasso Sea
gaattatcaaaattagataattacgagatttcaatatcacatactacaagagaacctaggtctaacgaaaataaagatgaacattacttcttcgttaataatcgagagttcaaaagattaattaataatggtgagtttttagagtacgcaaaagtttttaataacttttatggcacaactagatctccagtcatagataagcttaataaaggtaaaaatgttttgttcgatattgactggcagggggcagaccaaataaaaaataaaaaattagattatagattaattacattttttatcttaccaccgagtaaagaagttttatttgatagattatcaaatagacacaagaatgataaattgattgcagatgaaaggattaagcaattcgaaagagatgtattgcattggataaattatgattacgtagttatcaatgataatttagaaaattgttatactaaaataaaaaatttaatagatgctgaaatgaaaaatggatcaaaagattacgatgagaattttataagaaaccatgtagaaaaattaactatttaaa

SEQ ID NO: 252514 - DNA, 883 bp, Unknown
  Bacterial polypeptide expressing nucleotide sequence isolated from the Sargasso Sea
cgcgacccgagcgggcaaagtctaagcacggtagatccccttaccgatgagtctaagattgttcgagatgttgaagaaaccagaggtcacgtatttgccaagggggtctattatcttgatagcgattggttggctggaatggatattaaacttgcttccgaccattactacctcgggaattttggcttttctcccgtctatgatgcgaccgacatagtttcccgctatagaggacaatcgcatttaacgagccagttgttttttgagagggcagcgggcagaaattacaccaatgttgcggctgtgggatttcaaagccttaatcctgctactgggtcccgtagccttccgtacctcttgccggttgctagtttcagttacaggggccagccaggcctgtcaggggattattggcttcttgatgccaaccttcggtttttgggtcgtgaagagggaatacaaagcaggagattaatcgttaaaggtggatggcgcataccctatacgtcagcctttggagctaaatattctttcaatttagggcttcgagcggatgggtactatgtgtctgatcgtccaggttccgtgcagccgggagttaggagcgatagttatgaaggtcggctgctgcccgagagttacatggactggcggctgcctctagctaggcccttagggcgggggctcctaatagtggagccaattggccaagtggtgtggcggccaaatgggggggatagcaacaagatccccaatgaagacagtctcgcattcgaatttgatgatttaaaccttttcagcgttgataggttccccggtttagaccgctacgaaggtgggggtcgtttgaattatggtttacgatcagagatcaactctacct

SEQ ID NO: 252515 - DNA, 392 bp, Unknown
  Bacterial polypeptide expressing nucleotide sequence isolated from the Sargasso Sea
caaaactgaagaatttttaattaatggtaaagatatcatatttgatgtagattggcagggggggacaaaaataagaaattcttatttagctccttcagtagtttcaatttttattttacctcctagtattaaaaccttacaggaaagattactcaatagaaataaagatgacgataaaacggtaaaacttagaatgaaagaagctcgttctgagattagtcattggtccgagtatgattatatattggttaatgataattttgaaaaagtaaaaaagaatatacttaaaattattgaaattgaaaaaattaaaagaaatagacaaaatatattgcctgattttatttctaaattaaatactgaatttgatgattttataaataatacttaat

SEQ ID NO: 252516 - DNA, 189 bp, Unknown
  Bacterial polypeptide expressing nucleotide sequence isolated from the Sargasso Sea
gatgacaaaaagtgacaaacaatttttaattattatttcatcaccatcgggtgctggcaaaaccacaatttgcaaacgtttacttaaaatggacaaatttttaaaagtatcgatatctgatactaccagaccaccacgatcaaatgaagtagaaggaaaagattataattttattgatgaaaaagagtt

SEQ ID NO: 252517 - DNA, 547 bp, Unknown
  Bacterial polypeptide expressing nucleotide sequence isolated from the Sargasso Sea
atcaaaaattatcaaatctcaatttcccacactacaagaaaaccaagagaaaacgaagctaatggcaaagactatttttttattaatgaaaaagagtttaaagacttaattaataaagaagattttttagaatacgcaaaagtttttaataatttttatggaactactctaaaaccggttaaagataatctagataatggtaaaaatgttatatttgacattgattggcaaggtgctcaacagataaaaaataaagggttaaaatataaattgataactttttttgtattgcctccaagcaaggaagttttgtttaatagactttccaatagagacatgaaagataaagttatagtagaggaaaggatgaaagaatttaataaagatatattacactggaaaaattatgattatgtcgtaattaatgataaattggataattgttttaaagaaatatcagccctaattgattcagaaataaataaaacaaaaaataattataatttgaagtccatcgaaaatcacgtaaatagtctaattgactaaa

SEQ ID NO: 252518 - DNA, 547 bp, Unknown
  Bacterial polypeptide expressing nucleotide sequence isolated from the Sargasso Sea
ttggaacaaagcgctaacttgttagcatccgtttcattcacaaccagaaaaatacgtgaaaatgaaaaagaaggtcttgattatttctttgtatgcgaagaaacctttacgaacatgattcataatgatgattttttggagcatgcgactgtcttcggaaatttttatgggacagagaaaaaaagcgttttggaaaacctagaaaaaggggtaaacgtaatcttagaaatcgattggcagggcgcgcaacaaatcaaaagcagaatgcctttatgcgtgatgatttttctgattccgccatcaagggatgtactgctgagaagattaaaaaatagaggcactgactctgatcaagaaatagaatatcgtttcaatcaagcggttttagaccttgagcagtcagataagtttgatcatgtttttgtcaatgataaacttgacaaggttgttacagagattgctctttgtattgagggaaaagctaataatacaaatcaatcaaacaatgttactgaatctcttaaaagtttctttgaaacaaattgac

SEQ ID NO: 252519 - DNA, 419 bp, Unknown
  Bacterial polypeptide expressing nucleotide sequence isolated from the Sargasso Sea
tttgggtttcaacattgtattatcttcaccttcaggtgctggcaaaaccacaatcacaaaaaaaataagccaaaagtatccgaacattaaaatatctatttctcacaccacaaggaaaccaaggcctaatgaaatagatggtgtagattatcattttataagtaaagataaatttaaaaaacttatcaaagaaaatagcttttatgagcatgcaaaaattttcgataattattacggaacgtcaaaaaaatctgtaaacacattacatgaaaaaaattatgatgtaatttttgatattgattggcaaggtacaaaacaattatctaaatttaaagaattaaacttaataaaaatatttattttaccacctgataaaaaagagttaaaaaaaagacttataaaaagaaatcaagataata

SEQ ID NO: 252520 - DNA, 616 bp, Unknown
  Bacterial polypeptide expressing nucleotide sequence isolated from the Sargasso Sea
aatgtcgaatagtgggaaattaattatttttgctgctccctccggtgctggaaaatcatcgctaataaaaaaaattatagaaattagtgaaaataaattagaactatcagtttctgctactacaaggcttcctcgtgaaggagaaactcatggaaaagattatttctttattactgacgaagagtttaatgatctaaagaataataaagcattcatagaatgcgcaaatgttcatggtaatcagtatggaactttaaaatcgtttgttgatgagaagctagaagaaggtattcacgttattttagatattgacgttcaaggatttacgcaaattagaaatactttagaaaatacagtatctatttttattattccaccatcttttgatgaattaaagaaaaggctaactttgcgaggccttgatcttgatgaggttattaaaaaaagattagaaaatgcaaaggaagagcttaaacaggccgaatcttttgattatattattttaaatgataactttgacaaagctatagaggaactatcttccattatattagacggaaattatgaccataatagtcaagttaatcataatatattaaaggatttattggattaa

SEQ ID NO: 252521 - DNA, 619 bp, Unknown
  Bacterial polypeptide expressing nucleotide sequence isolated from the Sargasso Sea
aatgtcgaatagtggaaaattaattatcttcgctgctccttctggtgctggcaaatcatcatttataaaaaaaattattaaagatagtaaaaataatttacaactatcagtttctgcaactacaagacttcctcgcggtggagaaatccatggtaaagactatttttttatatctgaaaaagagtttaatgaacttaaaaataatcaagctttcttagaatttgcaaatgttcatgggcatcaatatggaacgataaaatcatttgttgacgaaaggttaggggaggggattcatgtaattttagatattgacgtacaaggatttactcaaatacaaagagctattacaaaagatatagtatctattttcattattcctccgtcttttgatgaattaaaaagaagattaattttaagaggccttgattctaatgatgctattgataaaagactagaaaacgccagaaaagaacttgaacaggctgaaaattttgattacttagttttaaacgatgattttaatatggcttataatgaaataacttctattatatttgacaaagattatgaatataatgtcactaacaataaaaatatattgaaagatttgttgaattaa

SEQ ID NO: 252522 - DNA, 556 bp, Unknown
  Bacterial polypeptide expressing nucleotide sequence isolated from the Sargasso Sea
tatgaaaaatcaaaaaaaactcattatccttaccggacctagcggggtaggtaaaggaactgtcgttaaagaaatattaggtaaagataaaaatatttggctttcaatatctgcaactactagagagcctagagagggagagaaggagggagaaaattattattttttgaatcaagaaaagtttaaagaaatgattgaacaaaacctttttcttgaatgggctcaatttgctggaaactattatggaactcctttatcttctgtcaatgagaaaatcaaaaagggatttaacgttttacttgaaattgaagtggaaggtgcaaagcaaataaagaaaaagtttcctgaatccctttcaatatttttactccctcctgacaaatcagagctagagagaagaataagaaataggggtacagaaaaagaagaggcaattaaaaaaagactcttaagggctagttatgagatttcagtatcaaatcaatttgattttgaattaacaaatcacaatgttgatgaaacagctaagagaataatcaagttaatacaaacttga

SEQ ID NO: 252523 - DNA, 622 bp, Unknown
  Bacterial polypeptide expressing nucleotide sequence isolated from the Sargasso Sea
aatgttgaatgatttaaaaaaaggagagttaattgtttttgcagcaccttcaggtgccggaaagtcatctcttataaaagaaatcattagtaataatgagaatatagaattatcagtatctgcgacaacaagatcaccaagagagggagaaactcatggtaaagattatttttttattactgataatgagtttaatgatcttaagaaaaaagacgcatttattgagagtgctgatgttcatggaaatcaatacggaactcttaaatcttttgttgaagagaagctagagaataatatcagcgttgtcttagatatcgacgttcaaggatttattcaaattagtaactcaattaaagaagttatttcaatttttattattcctccatcattagacgaattaaaaaagagattaatcttaagaggtctcgatgctgatgatgttattaatagaagaatggaaaatgcaataaaagaattaaagcatgctaaatattttgattatattgttttaaatgatgattttaatagagcttttaatgacataacttctattatatttgataagaattatgaatataatgaaacttataataaaaatatattgaaagatttattggattaa

SEQ ID NO: 252524 - DNA, 313 bp, Unknown
  Bacterial polypeptide expressing nucleotide sequence isolated from the Sargasso Sea
tatgaaaaatcaaaaaaaacttattatccttactggacccagcggggtaggtaaaggaacagttgttaaagaaatattaggtaaagaaaaaaatttttggctttcaatatctgcaactactagagaacctagagatggagagaaggacggagaaaattattattttttaaatcaagaaaagtttaaagaaatgattgaacgaaaccttttccttgaatgggctcaatttgctggaaactactatggaacacctttgtcttctgttaatgagaaaatgaaaaaggattcaccgtactacttgaaattgaagtag

SEQ ID NO: 252525 - DNA, 535 bp, Unknown
  Bacterial polypeptide expressing nucleotide sequence isolated from the Sargasso Sea
aatgataataatatttagtggaccatcaggtgtgggcaaatcaacaattataaatgagttaatcaatcataaaaaactatacttttcggtatctcatacaacaagagaaaaaagacataacgaagaaaacggtgtcgattacttttttatcagcgaagatgaatttaataatttaataaataaaaattattttattgaatatgaaaagtatggcactgacttttatggtacaggtaaggatcagcttagtacaagtaatccaattacagttttagatgtagaagttaacggagctacaaaattgttgaatgaaaataaaagttttataggaatatttattgatattgaaaatgatgaacttattgaacgtttaaaagatagaggtcatgacaatgaatttattaataaaagaatgaatttagcaaatgaacaacgtaataaaataagtgaatttgattttatagtaaagaatgttgatataaatactactgttaaagaaatacttgatataatatgtaacttagaggaatcatga

SEQ ID NO: 252526 - DNA, 616 bp, Unknown
  Bacterial polypeptide expressing nucleotide sequence isolated from the Sargasso Sea
atgtcgaatagtgggaaattaattatttttgctgctccttctggtgctgggaaatcatcgctaataaaaaaaattatagaaattagtgaaaataaattagaactatcagtttcagcaactacaaggcttcctcgtgaaggagaaactcatggcaaagattatttctttatttctgataaagagtttaatgagctaaagaataataaagcattcatagaatttgcaaatgttcatggtcacaagtatggaactttaaaatcatttgttgatgagaagctggaagaaggtattcacgttattttagatattgacgttcaaggatttaatcaaattaaaaatgctatagaagatacagtatccatttttataatcccaccttcttttgatgaattaaagaaaaggttaactttacgaggccttgatcttgatgaagttattaaaaaaagattagaaaatgcaaaggaagagcttaaacaggctgaattttttgattatattgttttaaatgataaatttgataaagctgtagaggaaatatcttccattatatttagcgaaaattatgaatataatagtcaagataaccttaatatattaaaggatttattggattaat

SEQ ID NO: 252527 - DNA, 646 bp, Unknown
  Bacterial polypeptide expressing nucleotide sequence isolated from the Sargasso Sea
aatggaaacaaatgataataaaataaaaagaaaaggtttaatgtttgttttatcttcaccttcaggagcaggtaaaacatctttatcaagaaaacttcttgagctagatgatgaattatttttatccatatcatatacgacaagaccgccaagacctggtgaaattgatggtgaggattatttttttataaataatgatgattttgcacttatgcaggagaagaatgaattcttagaatatgcaaaagtttttgattattattatggtacacctaaaaaacctgttgaaaagattttaaacaagggaaaagatatactttttgatattgactggcaaggaacacaacaactcatgaataattctaaagacgatctcgtgaaagtttttgtcttacctccatctattgaagagctagaaaggagacttaagaaaagaaagcaagatgatgatgagataattcaaaagcgaatgtctaaggcctctgatgagatgagtcattatcctgaatatgattatattttagtaaatgatgaatttgataagactattcaagaaattttaaacatacttaatgctgaaagattaaaaaatcatagacaaataaagactcaaaaaattgttaaaaatcttcgtggttcactttaa

SEQ ID NO: 252528 - DNA, 451 bp, Unknown
  Bacterial polypeptide expressing nucleotide sequence isolated from the Sargasso Sea
aatgatagttctttcttctccatcaggagctggaaagacgactttagtaaaattactatccaaacgtgataattattttgtttcgatatcacacaccacaagaaaacccagagaaaacgaaaaaaatggtagagattacttttttgttagcaataatgattttgaaaaatcaataaaaaatagtgaatttttagagtacgcaaaagtttttaaaaattattacggaagtccaaaattaccagttattgaaaaattaaaaaaagggtccaatgttgtttttgatattgattggcaaggtacacaacaaatcaaaaaacacaaaatggattttgaattattaacaatttttgttttaccaccaagtaaaaaggagctgctggatagactttcgaatagagatatgaaagataaacttatagtaaacgaaagaatgaaagaatttgaaaaagac

SEQ ID NO: 252529 - DNA, 187 bp, Unknown
  Bacterial polypeptide expressing nucleotide sequence isolated from the Sargasso Sea
atgattatcttgtcttctccttcaggagcaggaaaaactactttatccaacttactatctaagcaagataattttgaaatatcaatttctcatacaactcgaaaacctcgtcccaatgaagttccaaataaagattatttttttgtaaatagtgatgagtttaataggcttattaaaaatgaagaat

SEQ ID NO: 252530 - DNA, 646 bp, Unknown
  Bacterial polypeptide expressing nucleotide sequence isolated from the Sargasso Sea
atggaaataaatgataataaaataacacgaaaaggtttaatgtttgttttatcttcaccttccggtgcaggcaaaacatctttgtcaagaaaacttcttgaattagataaagagctatttctatcagtatcctatacaacaagaccaccaagacccggagaaattgatggagaagattatttttttgtaaatagtaatgattttgcctctatgaaggagaaaaatgaatttttggaatatgcaaaagtttttgattactattatggtactccgaaaaaaccggttaaaaagactttagataaaggcagagatatactttttgatattgactggcagggtacacaacaacttatgaataattcaaaagatgatcttgttaaggtttttgttttgcctccatcattagatgaattagagagaagacttaaggaaagaaagcaagatcaagatgagattatacaaaaaagaatgtctaaagcgtcagatgaaatgagtcattatgctgaatatgactatattttagttaatgatgattttgataaaacagttgaagaaattataagtattcttaatgctgaacgattaaaaaatcacagacaaatcaaaacccaaaaaattgttaaaaatcttagaggttctctttagt

SEQ ID NO: 252531 - DNA, 337 bp, Unknown
  Bacterial polypeptide expressing nucleotide sequence isolated from the Sargasso Sea
ttgttatttgatatagattggaaaggagcaagaaaaataagaaaaaaatacaataaagatgatattatagatatttttattttaccaccctcaaaatcagaattaaaaaaaagattaattaaaagaggtagagataattccaaagaaattaatttaagattatcatatgcaatttcagaaatgaaacattatagagaatataaatatgtacttataaatgaaaaagttaaaaaaactgtgcaagatattaaaaaaataatagaatttaacgaatttgttgaaaaaaataatttaatcttaaaaaaaagtttaaaaaaaattgtagataatcaataat

SEQ ID NO: 252532 - DNA, 586 bp, Unknown
  Bacterial polypeptide expressing nucleotide sequence isolated from the Sargasso Sea
aatgttgagtgataagcaagatcagctctttataattactgctccatcaggagctggaaaaactagtttaattaaaaacattttaagccatgcagaaagtaatggatataaagttcatttaacactctcacatacaaccagaacaccaagggaaggagaaatagatggtgttgattattgttttattgacgaggaaacatttaaagaaaacataaataatgagatatacgttgaatatgcaatggttcatggaaatttatatggcacaccaaaagactcaattgattcttttttagaagatgattttattgtgataatggaaatagattggcaaggagctttaaatattttaaaagcgtatccaaaggctgaaagtgtttttatatcacctccatctatagaggatttaagacagagacttcttgatagaggattagattcagaagacgtaataaatcaaagagtcagtggagctgaaaaagaaattttgcaaaaaacaaacttcaaacacgaaattattaacttttcccttgacacagctactaaaaagcttataaatatcatcttcagagaaaaccatggctag

SEQ ID NO: 252533 - DNA, 463 bp, Unknown
  Bacterial polypeptide expressing nucleotide sequence isolated from the Sargasso Sea
atgatatttgagtttaaaagactaataaataatcaagaatttttagaatacgcaaaagtttttaataattattatgggacaactagaactccaattattgataatcttaataaagggaaaaatgttttatttgatattgattggcaaggcgctgatcaaatcaaaaataaaaaattagattataaattaattaccttttttattttacctcctagtaaagagactttattcaaaagactctcgaatagagatatgaaagataaacttatagttgaagaaagaatgcaacagtttgagagagatgtacttcattggataaactatgattatgtagttattaatgatgaattgaataattgttacatgaaaataaaaaacttaatagatgcagaaattaataatggatcaaaagattatgatcctaagtatataagaaatcatgtagaaaaactaactacttaaa

SEQ ID NO: 252534 - DNA, 397 bp, Unknown
  Bacterial polypeptide expressing nucleotide sequence isolated from the Sargasso Sea
aaagaaaaatttactttacttttgaaagaaaaagctttttatgaacacgcacaaatatttggaaatttttacggaacatctaaagcctcaataaaaaaaataacaaacaataaccataacgttttattcgatattgattggcaaggaagtgagcaactaagcaagtttaaagaattaaacctggttaaagtgtttattcttccacccagcaaggaggaattagaaaaaaggttaatttcacgaaatcaagatgataaagaagcaataaatagaagaatgcttgcatattctaaagatatctctcataaaaaagattatgattatgttctcatcaatgacaatgtagaaaattgttttaatgaacttaaaaaaattgtttcaaaacatctaaattaaa

SEQ ID NO: 252535 - DNA, 1237 bp, Unknown
  Bacterial polypeptide expressing nucleotide sequence isolated from the Sargasso Sea
ctgccgctcgaaggcattcgtgtgatcgatttttcccgcgtgctcgcaggcccactgtgctccgcgctgctcagtgatctgggtgctgaagtcatcaagatcgagccgcccggcggcgacgactatcgcgcaatcggcccgttctccgccggcgagagtggtcttttcagcgcgatgaaccgcaacaaacaaagcgtggtgatcgacctgaaacgcgacgaaggccgcgaactcgctcaggcactctgcgcgcaggccgatgtcgtcgtcgagaactttcgtcccggtgtggccgagcgtctgggcattggctacgcgcaactcgccgcgcacaatcctgggctcgtttatgcgagcgtctcaggtttcggtcagacgggtccggagtctcatcgacccgcctacgacatcatcctgcaggcgatgtgcgggctcatggacgcgacgggttcacccgacggggcgccgacgcttgtcggcgattccgtttcggacgtggtgagcggcatctttgcgtcgtggggcgtgctggctgcgttgctcgcgcgcgagcgaaccggcaagggtacgcacgtggacgtggcgatgttcgacgcgacgcttagcctgaccacagcgctggtcgcgcgctacgcgacgaccggcattgcgccgcagcgggtggggaaccggcacccgtcgtcggcgccgtttggagcctatcgcgcgagagacggctactttgtcgtggcggtgctcaacaatcgtcttttcgagcgcctggcacacgcaatgaaccagcccttgctgatcgacgatgcgcgctttgcgaacgatgcagcgcgatgcgagaacgaagccgcattgcgcgcctgcatcgagtcatggtctggagtgcggagcattgccgaggtgaatgcgctactgagcgaagccggcattcccgttgcgccgatccagaacatcagtgaagcgctggagagcgagcaggcacgcgcgcgcggcgttctggtcgaggcgccggccggcggcggtggcgtcgtgcgcctgccaaagcagccggtccacttctcggcgtggcccaccacgcgcacgacgcgcgcgccgcgccttggcgagcacacgctggcggtcctgcaacagcaactcggcgtcgatacggcgtatgtcgccacgctggttgccgccggtgtactacgtgtggacgaagccaccgacttgcgaagcgaaacgaatcaggagacgaacaatgcttaaa

SEQ ID NO: 252536 - DNA, 2137 bp, Unknown
  Bacterial polypeptide expressing nucleotide sequence isolated from the Sargasso Sea
atgaccattttccagttgcgtgcgccgcgggcgtcacgcaatgcctgcgcgcggcggttgccgcgcgtgctgaaactcaccgttcccgcacttgctgtcagtgcattggctgcgagcgctgcggctgccgaaacgacgacgcgcgcgccccgcgcgccgaccgacgagtcggccgcgccgctgccggccatcgaagtcgtcgcatcgccgctgtcgacgccgctcgtcgtcgtcacggatccgaagacgccgcgccagccgctgcccgccagcgacggcgcggattacctgaaaacgatccccggtttcacgtcgatccgcagcggcggcaccaacggcgatctcgtgctgcgcgggatgttcggctcgcggctgaacatcctcgcgaacgggatgtcgacgctcggcgcatgtccgggccggatggatgcgccgacgtcgtatatcgcaccggaaagctatgacaaggtcaccgtcgtgaaggggccgcagacggtgctgtacggtcccggcgcgtcggccggcaccgtgatgttcgagcgcgtgacgccccgcttcgacaagcccggcatgcgcttcgagggcagcctggtcggcgggtcgttcggccgcaacgaccagaacgtcgacgtgacggccggcacgccggacgtctatggccgcgtgaccgcgaaccacgcgcattcgcaggactacaaggacggcaacggcaacaccgtgccgtcgcagtgggacaaatggaacgccgatgcggcgctcggctggacgccggacgaccacacgcgcgtcgagctgaccgccggcaccggcgacggctatgcgcgctacgcggggcgcgggatggacggcgcgcatttccgccgcgagacgttcgggctgtcgttcgacaagcagtatctcggcgacgtgctcgaccggatcgaggcacgcgtgtactacaacgaagccgatcacgtgatggacaactacacgttacggcaaccggatccgaccagcagcatgccgatgcggatggcatcggaagtgcggcgtcgcacgttgggcgcgcgcgcggccgcgacgttccgcttcgccgacgacttcaagctcgtgacgggagtcgatgcgcaatcgaaccggctcgactcgcgctcggcgatggggcggcagaactatggcgacaagccgtgggatgcgcaggcgacgatgtggaacgccggcgtgttcggcgagctgacgtggtatgcgaacgacgtgtcgcgcgtgatcggcggtgcgcgcatcgactatgcgagcgcgcgcgacaagcgcgcaacggcgagcggcatgatgaagagcaagccgaacccgaccttcgatgacgatcgcacgcgcgtgctgccgagcggcttcctccgctacgagcgcgatctcgcgtcgctgcccgtcacgtggtacgcgggcgtcggccatacggagcgctatcccgactattgggagctgttttccgcgaagcgcgggccggccgggtcggtcaacgcgttctcggcggtgcagccggagaagaccacgcagctcgacatcggcgcgcaatacaagagcgaacggctcgatgcatgggtgtcggcgtatgcgggttatgttcaggacttcatcctgttcaactatgcggccggcatgatgggcccgaccacgcaggcaaccaacgtcaacgcacagatcatgggtggcgaagcgggcgtctcgtggaaaccggtttcgccgctgcgcgtcgagacgtcgctcgcgtatgcgtgggggcgcaacgtggcaaccggcgatccgttgccgcagatgccgccgctcgaggcgcgcatcgggctcgaatacacgcgcggtgcgtggtcggcaggggggctgtggcgcatcgttgcgccgcagcatcgctatgcgctgaacgagggcaacgtggtcggcaaggacttcggcccgagcgccggattcggtgtgctctcgctgcatgcgcaatacaacgtcagcaagaccgtgcagatctcggtcggcgtcgacaacgtgctgaacaaggcctacaccgagcacctgaacctcgccggcaacgcgggcttcggctatccggcgaactcgccggtgatggagccgggccggaccgcatggttgcgtgtgagtgcgaagctttgac

SEQ ID NO: 252537 - DNA, 352 bp, Unknown
  Bacterial polypeptide expressing nucleotide sequence isolated from the Sargasso Sea
gatgaaaaaactaacagtgggtaaagatattattcttgatattgatgttcaaggatatgagcaaataaaaaaatcctttgtagatacaatatctatattcatactgcctccatcattagaagagcttgagcagagattaaaagatagaggcttagattctgagaatgtaataaaaaaaagacttgttaatgcaaaatcagaactcatgtacgcagagaattttgaccacattttagtgaatgataattttgagaagactattgaatatttaaaattaataatttttgatgaaaagaaaagttacgactctagaaaaagtaacaatatattaaaagatttattggataaatga

SEQ ID NO: 252538 - DNA, 580 bp, Unknown
  Bacterial polypeptide expressing nucleotide sequence isolated from the Sargasso Sea
catgaatattcataaatcgtctaatttatacgtaataagcgcaccatcgggtgcaggcaaaacatcgcttgtgagagaactttgcaaaagagtggcttttatgagaccttcgatatcatataccacacgtaaaataaggaaatcggaaattgatggcaaagattatttttttacaagtagagaacattttgaaagcatgatttctaaagaccagtttatcgaatatcagagtgtttatggtaatttatatggctcaactagggaaaatgtacttaatcagttagatgaaggttatgacgtaattttagagattgattataagggcatgatgaaaattaagtcaatttatcccgaggctattacgatatatatagtcccgccttctatcgattctctcagagagcgtctaatctctagagctcaagacgatcttgaaactgttgaaaagagaattagctcagcaagatttgagttgtgttacgcaaaatttgctgattatgtgattattaatgggaattttagatctgcatttgttgatttagttaagattattctggttaataaactaacaaagctataa

SEQ ID NO: 252539 - DNA, 349 bp, Unknown
  Bacterial polypeptide expressing nucleotide sequence isolated from the Sargasso Sea
atggccgaaaaaaaagcagggataattgtaatattatcctcaccttcgggcgcaggaaaaacaactttagtaaaaaaaatatcattaagaaacagctacaatatttctatttctcatactacaagaaaaccccgagttaacgaaaaaaatggcaaagactactttttcattaacaataaaaaattcaaaaatcttattaaaaaaaaaaaatttttagagcacgccaaagtattcaaaaattattatggatctcttaaagagacagtaattgaaaatctagaaaaaggcgaaaatgtaatttttgatattgactggcagggaactaaacaaataaaaaataaaaaattaa

SEQ ID NO: 252540 - DNA, 592 bp, Unknown
  Bacterial polypeptide expressing nucleotide sequence isolated from the Sargasso Sea
atgttgaatgatttaaaaaaaggagagttaattgtttttgcagcaccttcaggtgccggaaagtcatctcttataaaagaaatcattagtaataatgagaatatagaattatcagtatctgctacaacaagatcaccaagagagggagaaactcatggtaaagattatttttttattactgataatgagtttaatgatcttaagaaaaaagacgcatttattgagagtgctgatgttcatggacatcaatacggaactcttaaagcttttgttgaagagaagctagagaataatatcagcgttgtcttagatatcgacgttcaaggatttattcaaattagtaactcaattaaagaagttatttcaatttttattattcctccatcattagacgaattaaaaaagagattaatcttaagaggtctcgatgctgatgatgttattaatagaagaatggaaaatgcaataaaagaattaaagcatgctaaatattttgattatattgttttaaatgatgattttaatagagcttttaatgacataacttctattatatttgataagaattatgaatataatggaaacttataat

SEQ ID NO: 252541 - DNA, 379 bp, Unknown
  Bacterial polypeptide expressing nucleotide sequence isolated from the Sargasso Sea
aagaaatgtcgtggagaaacttgaaaaaagtgaaaatgttatttttgatatagactggcagggaactcagcagattaaaaatattaaattaaaatataaaataataactatttttattcttccaccatctaaagaagaattatttaacagattattaaaaagagataaaaaagatcaaagaattgcaactgagcgaatgaaacaatttaagaaagacattactcattggaaagattatgattatacagtaatcaatgataaaattgaaaaatgttataaacaaataataatttttatagcaaaccaatcaaaaaataaaaaaaaattaaaatataataagcaacctataaaaaatcatataaaaaaattattaaattaa

SEQ ID NO: 252542 - DNA, 385 bp, Unknown
  Bacterial polypeptide expressing nucleotide sequence isolated from the Sargasso Sea
atacaatcatcaatatggaactttacgatcgtatgtagaaaaaaagattaatgctaatattaatttaatactagacattgatacgcaaggatttgaacaaatcaaagaaagcaatatcgttagtacatcaatatttattttgcctccaagtatcatcgagcttgaaaaaagacttattgaaagaaatttagattctaatgatgtgattaaattaaggcttgaaaatgcaaaaaaagagctagatatagcctacgaatatgattgcatggttttaaatgatgattttaatagggcatttgaagcattaaaaagtattattttctttaaaaaagaaatacaagatgatactcaaaataaaaagatattaagagatttgttgtcttaa

SEQ ID NO: 252543 - DNA, 517 bp, Unknown
  Bacterial polypeptide expressing nucleotide sequence isolated from the Sargasso Sea
aatggaattaaatgataatgaaataaaacgaaaaggtttaatgtttgttttgtcctcaccctcgggtgcaggtaaaacatctttatcaagaaaacttctggagttggataaagagctatttctatcaatatcttatacaacaagaccgccaagaccaggtgaaatcgatggagaagattatttttttgtaaataatgatgattttgcatttatgcaggaagaaaatgaatttttggaatatgcaaaagtttttgattattattatggtactccaaaaaaaccaattaaaaaaattttagataaaggtagagatgtgcttttcgatattgattggcaagggactcagcagctcatgaataattcaaaagacgatcttgttaaagtctttgtattacctccatctatagaggagttagaaagaagacttaaggaaagaaaacaagatgatgatgcgattatacaaaaaagaatgtctagggcgtcagatgaaatgagccattatgcagaatatgattat

SEQ ID NO: 252544 - DNA, 631 bp, Unknown
  Bacterial polypeptide expressing nucleotide sequence isolated from the Sargasso Sea
atgaatatagaaataaaaaataaattaattattatatcatctccttcaggagctggtaaaacgactttgtgtaaattactgttaaaaaaattaaaaaatatatcactttcaatatcttacacctcaagaaataaaaggttgaatgaaattaatggtagagattatcattttgtcactcaagataaatttaaaatattaaaaaataaaaatttttttatagaaacagctaaaaattttaataacttttatggctctccatataaaaatgtaaaaattgctaataaaaaaaatgaacatttattatttgatattgattggaaaggagcaagaaaaattagaaaatcttataaaaaagatgatataatagatttttttattttacctccttcaaaatctgaacttaagaaaagactgcttaaaagaggtagagacaatttaaatgaaataaatctacgtttatcttatgcaattaatgaaatgaaacattataatgagtataaatatgttttaattaatgaaaatgtaaataaaactgtagagagaattaaaaatataatagaatatcataatctaataaataataataaagcacttctaaaaaataaattaaaaaagattataaatatataaa

SEQ ID NO: 252545 - DNA, 625 bp, Unknown
  Bacterial polypeptide expressing nucleotide sequence isolated from the Sargasso Sea
cttgaaagacataactggaaaattaattgtcatatccgccccatctggaactggaaaaacaacagtcgtaaaaaaactactacaacaaagcaccaacttggaggcatcggtttcattcacaaccagaaaaatgcgtgaaaatgaaaaagaaggccttgattatttctttgtaagcgaaaaaacctttacgaacatgattcaaaataatgattttttggagcacgcaactgtcttcggaaatttttatggcacagagaaaaaaagtgtttcggaaaacctaaaagaaggggtaaatgtaatcttagaaatcgattggcaaggtgcgctacaaataaaaagcagcatgccttcatgcgtgatgatttttctgataccgccatcaaaggaggttctgctggccagattaaagaatagaggcactgactctgatcaagaaatagcatatcgtttcaatcaagcggttttagacctggaacagtcaaataagtttgatcatgttttggtcaatgatcagcttgacaaggttgttacagagattactctctgtattgagggtaaggccaataaaataaatcaatcaaagaaagttgctgattctcttaaaagtttctttgaaacaaattga

SEQ ID NO: 252546 - DNA, 217 bp, Unknown
  Bacterial polypeptide expressing nucleotide sequence isolated from the Sargasso Sea
catgtccgataatcatgaagggataatagtgatactatcatctccatcgggcgctggaaaaacctcactagtaaaagaaatatcattaaagaataattattttatatctatttctcacaccacaagaaaaccgagatctaatgaaattgacggaaaagattatttttttataaatcagaatgaatttaaagaattaatttccaaaagaaaattttta

SEQ ID NO: 252547 - DNA, 310 bp, Unknown
  Bacterial polypeptide expressing nucleotide sequence isolated from the Sargasso Sea
atgaataaatctaaaaagcctttgatgcttgtgctatcatcaccttctggggctggaaagacaactctttcaaaaaaaattcaacaatctaacagttcttttgaaatttcagtatctcatacaacaagaaaaccacgaccaaatgaagttgacggcgtagactatcatttcgtaagtaaagaaaaatttagtttacttttgaaagagagagctttttatgagcatgcacaaatatttggaaatttttacggaacatctaaaacttcaataaaaaaaataacaaacaataatcataacgtattattcgata

SEQ ID NO: 252548 - DNA, 438 bp, Unknown
  Bacterial polypeptide expressing nucleotide sequence isolated from the Sargasso Sea
catgagcggcagccggggcggcctcaccgtgatcaccggtcccagtggagttgggaaggggactctggtcagccgtcttctggaacgtcacccctcggtgtggttgtcggtttccgccacaacccgtgctccccgtgagggggaacaggacggcgtcaactacttcttccacaccagggatcaattcgatgcccttgtgacccaggggggactgctggaatgggctgaattcgcccggcaactgttacggcacccctcgcgcgcctgtcgaggagcagctggcgagtggccgggcggtgctgctggagatcgaactggagggggcccgtcaggtgcggcgcagtttcccgagcgggtttcagatctttctggcgccgccaagcttctcggaactggaacgtcgcatccgtggccgcggcacggatgcagaggatgcca

SEQ ID NO: 252549 - DNA, 244 bp, Unknown
  Bacterial polypeptide expressing nucleotide sequence isolated from the Sargasso Sea
aatgtccagctttaaaaaaggtggaatatatattctctcatcaccatctggtgcaggcaaaactactttagtaaaaaaaattgcaaaaaataaaaattttttaatatctgtatctcacaccacaaggcctccaagatctaaagaaaaaaatggtgttgactattattttacttctaaaaacaattttaaaaaactgattaaaaaaaaaaaatttctagagcatgccaaagtattaataattact

SEQ ID NO: 252550 - DNA, 634 bp, Unknown
  Bacterial polypeptide expressing nucleotide sequence isolated from the Sargasso Sea
atgcccatagaaaacgatggggtaatgataatcttatcctctccatcaggagcaggcaaaacttctcttgtaggtttattatctaaacttgataattttgaagtttcaatctctcatacaacgcgagaaccaagactgaacgaaaccccaaataaagactattatttcataagtgagactgaatttaaaaggctcattaaaaatcaagaatttttagaatatgcaaaagtctttaataatttatatggaacaacaaggacccaagtaataaatcatttaaacgatggtaagaatgttttatttgatattgattggcaaggggcggaccaaataaagaataaaaaattggattataaattaataactttttttattttaccaccaagtaaggagatcttgtttgaacgattgtcaagtagagatatgaaagataaacttattgtcgatgaaagaatgaaacaatttgagcatgatgttttacattggataaattatgattatgtagttattaatgatgacttagaaagctgttatttaaaaataaaaaaattgatagaagcagagattaaagatagttcaaaagattatgataaagaatttatcagaagacatatagaaaagttaacatcttaat

SEQ ID NO: 252551 - DNA, 616 bp, Unknown
  Bacterial polypeptide expressing nucleotide sequence isolated from the Sargasso Sea
aatgagtactcgccgccgcgggattctgctggttgtttccgcgccctcggggggcggaaagacaacgctggtgaagtccgccatggcggccgagccttcgttgcagctctcggtttcctgtaccacgcgaaaaccgcgcgatggcgaagtcgatggtgtggattatcgcttcgtctcgcagcagaactttcgcgaatgcctcgatgagggagagtttgtcgagtgggccgaggtcttcgaccatgcctacgcgacgccgcgcacgccactggatgtggcgattggcgaggggcgcgatatccttctcgatgtggatatccagggcgctcgatcgctgcgaaaggcttatccgaaggacgccgtggggatctttgtgatgcctccctcggccgcggttctcgagacgcgactgcgggctcggggcaccgatgatgaggcgcagattgcgcggcggctggcccgggttcgcgaggaggtcagcgcagcgcgcgaggtgggcgtatacgattatttgatcgtaaacgatgaccgcgacaaggcggccgacgaccttctgtcgatcattcgggccgaacgttgtcggcaagggcgtttggcgcccccggatctggaataa

SEQ ID NO: 252552 - DNA, 595 bp, Unknown
  Bacterial polypeptide expressing nucleotide sequence isolated from the Sargasso Sea
atgccatcagaaaaagatggggtaatgataattttatcttctccttctggagcaggtaaaactacattagttaaaatgttgtcaaagttagataactttgaaatctctatatctcacacaactagaaaacctagacctaatgagaaacctaacgaagattatttttttgtagatgaaaaagagttcaaaaggtttattaaaaatgaggaatttttagaatatgctaaagtttttagtaatttttatggaactacaagaacaccagttattgataagcttaataaaagtaaaaatgttttatttgatattgattggcaaggtgctgaccaaataaagaacaaaaatttagattataagctaatttcatttttcattttaccacctagtaaagaaatattatttgagagactttcaaatagagatatgaaagataagttaattgctgaagagaggatgaagcaatttgggagagatgtgttgcattggattaattatgattatgtagttataaatgataatattgaaacttgttattttaaaataaaaagtttaattaatgctgaaataaataatggttctaaagattatgattctg

SEQ ID NO: 252553 - DNA, 577 bp, Unknown
  Bacterial polypeptide expressing nucleotide sequence isolated from the Sargasso Sea
tatgaaaaatctaattgttatttctgcaccatctggagcgggaaaatctactttatgtgaggaaataagacgaattaatcctaatattaaattttctatttcttgtactaccagacctaagcgtgattatgaaatagaaggagttaattattattttttgacaaataatgagtttatggataaagttaacaataatgaattagttgagtacgagcaagtccatggttattattatgggactttaagtaatactctaaaaaaagcaattgatagtgaagaattaatattatttgatgtggatgttaaaggtgcaatgtcaattaaaaaaaaatatccgaataatactcttactatatttattttaccgccttctttagatgatttaaagatgcgtttgatgaaaagagggacagattcaatagaaataattaataaaagattagaaagaacaaataaagagatgaagtttaaagataaatttgatacttttatgataaatgatgatctttctaatgctattaaaaaattaaatgaaataatatcaaatcaaaaccaaggagtaatacatggcagttaa

SEQ ID NO: 252554 - DNA, 334 bp, Unknown
  Bacterial polypeptide expressing nucleotide sequence isolated from the Sargasso Sea
tatgaaaaatcaaaaaaaacttattatccttactggacccagcggggtaggtaaaggaacagttgttaaagaaatattatgtaaagaaaaaaatttttggctttcaatatctgcaactactagaaaacctagagagggagagaaggacggagaaaattattatttcttaaaccaagaaaagtttaaagaaatgattgaacaaaaccttttccttgaatgggctcaatttgctggaaactactatggaacgcctttgtcttctgttaatgagaaaataaaaaagggatttaccgtactacttgaaattgaagtagagggtgcaaggcaaataaaa

SEQ ID NO: 252555 - DNA, 371 bp, Unknown
  Bacterial polypeptide expressing nucleotide sequence isolated from the Sargasso Sea
attttatgaacatgcaaagatctttgataattattacggcacatctaaaaaatctattaaaaaaattacagagaaaggttgcaacgttttatttgatattgattggcagggcgctgaacaacttagtaaatacaaagaattaaatttactaaagatttttatacttcccccaagcgtcgaagaacttgaaaagagattggtttcacgtaaccaagatgataagaaggcaattaaaagaaggttaagcgcctacgaaaaagatgtaactcactcaaaagattatgaccatgtaattattaacgataaagtcgaaatgtgcttcaagcagataaaagacataatactaaatcatttaaaaaagaataattaat

SEQ ID NO: 252556 - DNA, 525 bp, Unknown
  Bacterial polypeptide expressing nucleotide sequence isolated from the Sargasso Sea
aatgtcgaataatctatatattattacagcaccgtcaggagctggtaagacaacacttataaaaagggttttagagcatgctcaagaatataataaaaaagtttcattatcgatttcccatactacaagagctcctagagatggtgaaaaacatggtatagactatttttttgtttcagaagaagagttcaaagaaaatattgtgaaaggggaatacattgaacatgctactgttcacggaaattattacggaacacctaaatctcagatagatagtgaccttaataaggatttgaagatattactagaaattgattggcagggagcactgcaaataatggatcattatccagacgcggaaagtatttttatatcaccaccttcagttgatgaattaagaataagattaatggagcgtggtcttgattcagaagatgtaattaatcgcagaattgcaggagctcaaatagaaatggataaatcgtcacattttaagcatcaaataactaatatttcactagacat

SEQ ID NO: 252557 - DNA, 364 bp, Unknown
  Bacterial polypeptide expressing nucleotide sequence isolated from the Sargasso Sea
atgctttcatctaaagacggcaaaatgataattttatcatcaccgtctggagctgggaaaacaactttagttaaaaaaatttcaaaagaaaaaaaatacaaaatttcaatatctcacacaactagagagccaagacaagatgagatagatggcgttgattatttttttatatcaataaatagatttaaaaaactcatagaagaaaaagcttttttagaacatgcgaatgtttttaaaaatttatatggctcaacaaaagaacaagtttttaaagatttacaaaaaggttataatgtactttttgatattgattggcagggctctcaacagataaaaaaaaaaacattagattttcatctcattc

SEQ ID NO: 252558 - DNA, 631 bp, Unknown
  Bacterial polypeptide expressing nucleotide sequence isolated from the Sargasso Sea
aatgtcgaatgataaaggccaacttatagttatttcagctccttcaggagctggaaaaacatctattattaagaatgttataaaaaaactaaataatgaaaacaaagaatcaaagttttctgtttctcacacaacaagattgccaagagaaggcgatatagatggcaacgattatttttttgtatcaaatgaaagatttgctgagctttatgaagctggaaactttatagagactgctgaggttcacgattataaatatgggacatcaaaagactttatagataagaatataaatcaaggaataaatgtgtttctcgagatagatgttcaggggtttcaagaattaagatccaaaaatatcgaatttagatcagtctttatattacctccctcaatagaggagctaagagcaaggatccaaaaaagaggtcttgattcgacgggtgttattgaaaaaagaatgaagaatgcattaaaagagttgggtgaagcagaagaatatgattatttagtaataaatgatatttttgaacacgccattgaagaattacttgaaatggtcataaataaaggttttaaagaccaaactcgtgataaaaaactaaagatattgaaagatttgttgtcttaa

SEQ ID NO: 252559 - DNA, 610 bp, Unknown
  Bacterial polypeptide expressing nucleotide sequence isolated from the Sargasso Sea
gatggtagttttatcttctccttcgggagctggtaaaacaacattagcaagcatgttatccaagttagataattttgaagtttcaatttctcatactactcgccagccaagaccaactgagataaacgaaaaagattattattttgtaaatgaaactgaatttaaaagattaatcaaaaatgaagaatttcttgaatatgcaaaagtttttaataattattatggaacaactagaacaccagttatcaataagctagataaaggaaaaaatgttttatttgatattgattggcaaggagcagatcaaataaaaaataaaagattagattataaattagtaactttttttatactgccaccaagcaaagagattttattcaaaagactttccaatagacatatgaaagataaattgattgttgaagaaagaatgaaacagtttggaagagatgtattacattggataaattatgattatgtaataataaatgataacctggaaaattgttattcaaaaatatttaatttaattgaagcagaaataaataatggctcaaaagactatgatgttgaatatgttagagatcatgttgaaaaattagtttcttaa

SEQ ID NO: 252560 - DNA, 634 bp, Unknown
  Bacterial polypeptide expressing nucleotide sequence isolated from the Sargasso Sea
aatgcccccaatgagtgaagggataatgataattctttcatctccatctggagcggggaaaacaactttagtaaaacttttatccgagaggaaaggttttataacatctgtatcccacacaactagaacaccaagatttaacgaggtagacggaaaagattatcattttgtaagtaatgaaaaatttgaaaaaatgataaataataaagagtttttagaatttgcaaaagtttttaaaaacttttatggcaccactaaatcaaatatttttaaagagttgaatagcggaaacaatgtaatatttgatattgattggcaaggaacaaatcaaattatttcacaaaaattggaaaatagattattaactttttttattttaccaccaagcagggaagagctattcaaaaggcttacaaatagagacatgaaagataaacttatagctgaagaaagaatgaagcaattcgataatgacgttttacactggaaagattatgactacgtaattattaataatgatcttgaagcttgttacaatcaaatatccgagtatatagattgtgaaattaacaaaaaaaagagttcttatgatattaatttaattaaaaatcatattaaaaaattaattttctaa

SEQ ID NO: 252561 - DNA, 529 bp, Unknown
  Bacterial polypeptide expressing nucleotide sequence isolated from the Sargasso Sea
ttcgaaacttcaatttcatacactactagaaaacccaggccaaaagagaaaaatggaattgactatttttttgtaaatagtcaaaaatttaaaaaacaaataaaaaaaaaagaattcctagaacatgccaaagtttttaaaaactattatggttcactaagatcaacagtaatcaataaattaaaatcaggaaaaaatgtaatttttgacatagattggcaaggaacacgacaaattaaaaataaaaaattaaagtataaaattattacaatatttattcttccaccatccaaaaaagaattatttaatagacttttaaaaagagatcaaaaggataaaaaaactgcaagcgagagaatgaaacaattcaaaactgatgtaatgcattggaaagattacgactattcagttataaatgacaaagttgaaaagtgctataaacaaataatgaaatttataaaatataaaaaaaaatttaagaaacataataaatttattcaagatcatattgaaaaactaatcaattgaa

SEQ ID NO: 252562 - DNA, 313 bp, Unknown
  Bacterial polypeptide expressing nucleotide sequence isolated from the Sargasso Sea
tttgttttacagtttattagaaaaggaaattataaaattgtctaagttgataccagcgggaggacttttaattataatatcgtcgccatcaggtgctggaaaaacaagtatatcaaaaaaaatattagaaaatgattctagggtaatgttttcaatttctgctaccacaagggcacctagagtaggagaaactgagggtatagagtactattttaagagtaatgatgaatttgaaacgatgatagagtctggggaaatgttagaatatgcaactgtttttggtataaatatggaacaccgagaaaaccagtag

SEQ ID NO: 252563 - DNA, 637 bp, Unknown
  Bacterial polypeptide expressing nucleotide sequence isolated from the Sargasso Sea
atgcccgaaaaaaaagcaggggtaattgtaatcctatcctctccttctggcgcaggaaaaacaacattagtaaaaaaaatttcaactcgaaaaaattataaaatatctatttcacatacaactagaaaacctagatataatgagaaagacggaagagattacttttttgtgaatagtaatgaattcagaaaattaataagaaacaataagtttttagagtatgccaaagtatttaaaaattactacggatcactaaaggaaactgtaatcaaaaaattattaaaaggagaaaatgtaatttttgatattgattggcaaggaacggaacagataaaacgtaaaaaattaaaatataagattataactatttttatattgcctccttcgaaaaaagaattgtttgaaagattattaaaaagagatcagaaagataaaaaaattgccaaagaaagaatgaagcaatttaagcatgatgtgaagcactggaaaaattatgactttacagtgataaacgataaagtagagaagtgttataaattaattattaattttattaataaacaaaaaaaattaaaatctaaattaaaatataataaaaaatctattaaagatcacgttgattatttaattaactgac

SEQ ID NO: 252564 - DNA, 426 bp, Unknown
  Bacterial polypeptide expressing nucleotide sequence isolated from the Sargasso Sea
tatgaaaaatcaaaaaaaactaattatccttactggacccagcggagtaggtaaaggcacagttgttaaagaaatattaggtaaagaaaaaaatttttggctttcaatatctgcaactactagagaacctagagagggagagaaggacggagaaaattactactttttaaatcaaggaaagtttaaagaaatgattgaacaaaacctcttcctggaatgggctgaatttgccggaaacttttatggaacgcctttttcttcagttaatgagaaaataaaaaaaggatttaccgtacttcttgaaattgaagtagagggtgcaaggcaaattaaaaaaaagtttcctaattcactatcaatatttttacttccacctaataaagaggagttagagagaagaataagaaatagaggtacagaaaaaga

SEQ ID NO: 252565 - DNA, 448 bp, Unknown
  Bacterial polypeptide expressing nucleotide sequence isolated from the Sargasso Sea
aatgatcattttatcttctccatctggagcaggtaaaactactctggttaaaaaattatctgaaaatgataattttgaaatttctatatctcatacaacaagacaacctcgtcctaacgaaaatcaaaatgaagattatttttttgttaatgaattagagttcaaaagattaattaataatgaagagtttttagaatatgcaaaagttttcaataatttgtatggtacaacaagaacaccagttatagataaattaaacaaaggtaaaaatattctttttgatattgattggcagggtgctgatcaaattaagaataaaaaattagattataaattaattactttttttatattacccccaagtaaagaagttttatttgaaagactgactaaacgacataaagatgaaaaattaatagccgaggaaagaatgaaacaattgaaagag

SEQ ID NO: 252566 - DNA, 568 bp, Unknown
  Bacterial polypeptide expressing nucleotide sequence isolated from the Sargasso Sea
atggccgaaaaaaaagcagggataattgtaatattatcctctccttcgggcgcaggaaaaactacattagtaaaaaaaatttcaataagaaaaaaatataaaatttcaatttcttacacaaccagaaaaccaagaataaatgaaaaaaatggtaaagactattattttataaataactctcaatttaaaaaacttataaaggaaaaaaaatttttagaatatgctaaagttttcaaaaattattacggatccttaagagaaaatattataaccaaattagaaaaaggtaaaaatgtaatttttgatattgattggcaaggaactaagcaaataaaaaataataaattaaattataaaattataacaatatttattttaccgccttcaaaaaaagaattatttgaaagattattaaaaagggaaaaaaaagataaaaaaattgcagcagaaagaatgaaacaattcaaatatgatgttatgcattggaaagattatgattttactgtaataaatgataaagtagaaaaatgttacaaactaatttctaattttataaattcacaaaaaa

SEQ ID NO: 252567 - DNA, 400 bp, Unknown
  Bacterial polypeptide expressing nucleotide sequence isolated from the Sargasso Sea
aatgaatttaaaaaattaattcaaaaaaatgaattttatgaatatgcagaaatttttggcaattattacggaacttctaaaaaatcagttttagatttagttaaaaaaaaaaatgatattttgtttgatattgattggcaaggtactaagcaactttcaaaatttaaagaattaaatttacttaaaatatttatactccctcctagtaaagaagaattaagaaaaaggctaattcaaagaaatcaagacaaaccaaatgtagtttctgaaaggctagatgcttatgaacgtgactccgctcatcaaaaagattacgactttgtagttatcaatgacaatctagaagattgttttagggaagtagagaaaattgtaatctcaaaaaaaggaaaaatttaag

SEQ ID NO: 252568 - DNA, 555 bp, Unknown
  Bacterial polypeptide expressing nucleotide sequence isolated from the Sargasso Sea
aatgcccttagaaaaacatggggtaatgataattttatcttctccatctggagcaggtaaaacaacgctggtcaagatgttatctgaccttgataactttgaagtttcagtttcacatactacacgacaaccaagacctaacgaaacaactaataaagactatttttttattgatgaaaatgaatttgaaagattaatcaaaaatgaggaatttcttgaatacgcaaaagtattcaacaatctttatggcacttctagaacacctgtaattgacaaactagataaaggcaaaaacgttttatttgatattgattggcaaggcgctgaccaaataaaaaataaaaaactggattataaattaatcaccttttatatacttcctcctagtaaaaatgaactatttgaaagactttcaaatagagacatgaaagataagctgatagcagaagaacgaatgaaacaatttgaaagagatgtattgcattggatcaattatgattatgttgtagttaatgataatttggatacttgctttgcaaagatcaaaaatttaat

SEQ ID NO: 252569 - DNA, 637 bp, Unknown
  Bacterial polypeptide expressing nucleotide sequence isolated from the Sargasso Sea
atggccgaaaaaaaagcagggataattgtaatattatcttctccttctggcgcaggaaagactacactagtaaaaaaaatttcttcaagaaaaaattatcaaatatctatttctcataccacaagaaaaccaaggtcaactgaaaaaaacggaagagactatttctttattaaaaaaaaagaattcaaaaaattaattcaagaaaaaaaatttttagaatatgcaaaagtttttaaaaacttctatggctcgttaaaagaaaaagtaataaataaattaaaaaatggagaaaatgttatttttgatatcgattggcaaggaactagacagataagaaataaaaaattaaaatataaaatcataacaatatttattcttcctccatcaaaagaggaactttttaaaagattactaaaaagagaaaaaaaagataaaaaaatagccaatgagagaatgagacaatttaaagatgatgtaatgcattggaaggactatgactttgctgtaattaatgacaatattgaaaaatgttataaattgatagtaaattttataaattcgagaaaaaacaagaaatcaaaattattatcaaataggaaatttataaaaaatcatattgattacttactaaattaaa

SEQ ID NO: 252570 - DNA, 535 bp, Unknown
  Bacterial polypeptide expressing nucleotide sequence isolated from the Sargasso Sea
aatgaaaagtttaaaaaaacataaaggcgtaatgctagttttatcctctccatcaggagcaggaaaaagctcaatatgtagagctttattagatttagatagaaatttatatttatcaatttctacaactacaagaaagaaaaggcctaatgaggtatctggaatagactataattttgtaacgttagatgagtttgaatataaattaagccaaaataattttatagaacatgcaaaagtatttaataatttttatggcacagataaatctattgtagaaaataaaattaatgaaggtaaagatttattatttgatattgattggcaaggtgctcagcaactaagggaaaagatgagggaagatattgtatctgtatttattttacctccctcaaaaaaggaacttgaaagaaggttgaaagaaagaggtcaagatacagatgaagtagttaaagaaagaatgagtgaggcgactgcagaaattactcactgggctgaatatgattatgtaataataaatgaagatttaaattta

SEQ ID NO: 252571 - DNA, 454 bp, Unknown
  Bacterial polypeptide expressing nucleotide sequence isolated from the Sargasso Sea
tagaaaaccaagaccaaatgaggtcgagggaatagattatttttttttatcaaatgatcaatttaaagataagataaaaaacaacgaattttatgagcacgcaaaaatctttggtaattattatggtacttcaaaaaagtcggttattgatttattaaaaaacaaaaacgatgttttgtttgatattgattggcaaggaacacaacaactatctaaacatagcgagctcaaacttacaaaaatttttatattacccccaagcaaagaggaactaaaaaaaagattaattcagagaaaccaagataaacctgaaatagtattagaaagacttgattcttacgaaaatgatttgaagcacaaaaatgattatgactatgttgtaatcaatgacaatttagagatttgttttaaaaaagttgaagaaataattctgttcgaaaaaagcaaagtgtaa

SEQ ID NO: 252572 - DNA, 628 bp, Unknown
  Bacterial polypeptide expressing nucleotide sequence isolated from the Sargasso Sea
tttgattgtgaatgcatcgagaggacagctgttaatcgtgtctgcgcccagcggcgcgggaaagacttccctgatcaaagcattgatgaaacaagatcagcgggttgaagtttccgtgtcgcacacgacccgaccgcaacgttccggcgaagtagagggcgtcaattatttctttatctcgactgaaactttccatgagatgcgtgaggccggcgccttctttgaatctgcagaggtcttcggccatttctatggcaccagcctgacccaactggaggctaggctctccgacggcgcagacgtgattctagaaattgactggcaaggtgctcaacaagtaagaaagttgctgcccgacagcgcctggcttttcctcctgccgccctcgctcgaggcgctcaagtcgcgactgcaggcgcgtggtcaagacgacgaagacaccatcgaaataaggatgcgtgccgcgcgggatgaaatgtcgcattgggatgaggccgactatctgattattaatgaccagttcgactcggcgctggaggccctgcaggcgctggtgcgctctttgcggctacgcaccggtcaacagcagtcagcacttcagaatcacatcgaggatctgctcaactag

SEQ ID NO: 252573 - DNA, 619 bp, Unknown
  Bacterial polypeptide expressing nucleotide sequence isolated from the Sargasso Sea
ggggtaattgttatactatcttccccctcaggtgccggtaaaactacattagttaaaaaactttcaaaaagaaacaatttcaaaatatcgatttcacatactactaggaatcctagaccgagcgaaaaaaatggtaaggattatttttttataaaagataaagaatttaaaaccttaatcaaaaaaagaaagtttttagagcatgctaaagttttcaaaaatttttatggatctttaaaagaaacagtaataaaaaaattagaaaaaggagaaaatgttgtatttgatattgattggcaaggaacgcaacaaataaaagctaaaaaattaaaatataaaataataactatatttattctacctccatcaaaaaaggaactattcaataggttgttaaaaagagatcaaaaagacaaaaaaattgcaagtgttagaatgagacaatttaaaaaagatgtccttcattggaaagattatgattttgcagtaataaacgataaaattgaattatgttataatcaaatattaaattttattaaaaaacaaaaaaatagtttaaaaaaattaaaatacgataaaaaaatcgttaagaatcatataaaaaatttaatcaattaga

SEQ ID NO: 252574 - DNA, 391 bp, Unknown
  Bacterial polypeptide expressing nucleotide sequence isolated from the Sargasso Sea
tgaaaaatttcaatcactagtaaaaaatgattctttttatgaatattgtaaaatttttggaaatttttatggtacttctagatcctctgtaaatgaaattaccgatcaaggtctaaacgtcctatttgatattgactggcaaggttcccagcagcttagaaaatttaaagaattaaatttagttacaatattcatattaccgccaagtaaagccgaattagaaaaaagacttatagcaagaaatcaagatcaaaaagcttctattaagaagagactccttgcttacactgaggacataaagcactcaaaagaatacgaccatgtgttagttaacgataatgtagaggattgttataacgagataaaaaaaattatttctaaaagtaattaa

SEQ ID NO: 252575 - DNA, 614 bp, Unknown
  Bacterial polypeptide expressing nucleotide sequence isolated from the Sargasso Sea
gcttctgattgtaatatcgtcaccatctggagctggtaaaacttctgtctgcagaaaaatacttgaaaataatgagagtattcagatctcaatttcagcaacaacacgcaaaccaagaaaaaatgaagttgatggtattgattataattttatatctagagatgattttcagaataaaataaaaaataatgagtttttggaatatgctgaagtatttgataacttttatggttcattaattaaagatgttgaaaagatcgctaaatctaaaaaagatgttttattcgatatagattggcaaggaactcaacaattatatcaatcaaagccagataaattaatttcgatatttattttaccacctacaagatctgagattgaaaatagattgaagcaaagagaattagacacaggggataatgactcgattattgatcaacgtatgtcaaaattcaaagatgagataagccattgggttgaatatgattatgtagttattaataagaatttagacgtatgtgttcaagaagtattaaacattattaatgtcgagagaaaaaagcgtcatcgacaaatagctttaattgataaagtaagagaacttacttcataag

SEQ ID NO: 252576 - DNA, 523 bp, Unknown
  Bacterial polypeptide expressing nucleotide sequence isolated from the Sargasso Sea
tcacatacaactcgaaaacctagaagtaatgaaattgatggttcagattatttttttgtaaaagaagaagagtttaaagaattaatttataataaaaaatttctagaatacgcaaaagtatttaataattattatggatcatctaaagatgttgtttttaaaaaattagataatggagaaaatgtaatatttgatattgactggcaaggaacagaacaaataatacaaaaaaaactaaaatacaaaataattacaatttttatacttcccccatctagagaagaactgttcaatagacttttaaatagagatttaaatgatgaaaaaaatgcaaaagaaagaatgaaacaatttgataaagatgtaatgcattggaaaaattatgacttagttgtaataaatgatgatttcagaaaatgttacaataacataataaaatatattaatttagaaacaaaaaatatcacagagatatataacaagactgatattgaaaatcatgttttagctcttcttaaataat

SEQ ID NO: 252577 - DNA, 295 bp, Unknown
  Bacterial polypeptide expressing nucleotide sequence isolated from the Sargasso Sea
atgaataatataagcagtaaacctcttatgcttgttttatcttccccatcaggcgcaggcaaaactacactttcaaaaaaaattcaacagtcagatagcacgtttagaatatcagtctcacacaccacaagaaaagccagacctaacgaggtagacggtgtagattatcattttgtttctgaagaagaatttaaaattttattaaaaaaagaggctttttatgaacattcaattatatttggaaactattatggtacttctaaaaattcagttgatgaaattataaaaaagaaat

SEQ ID NO: 252578 - DNA, 637 bp, Unknown
  Bacterial polypeptide expressing nucleotide sequence isolated from the Sargasso Sea
atgtcatcaaataatgatgggataatcgttatattatcatcaccatccggagctggaaaaactacactcgtaaatttattattacaaaaaaaagattttaccaattcagtttcacacacaacaagaaaacctcgaagcaatgaagtaaatggaaaagactatttttttgttagtggtgaagaatttcaaaatttaataaaaaataatgaatttttagaatatgcaacagtgtttaacaatctttatggaagtactaaaaaacctgttttagaaaatcttgaaaggggcaataatgttatatttgatatagattggcaaggaactaaacaaattatatctcaaaatattaaatataaaataattactttttttgttttaccaccaagtaaagaaattttatatgaaagattaacaaatagagacatgaaagataaattgattgcatctgaaagaatgaaagaattttacaaagatatcaaacattggattgactatgattatgttgttattaatgatgaattaaataaatgttatgaagaaatttcaaaaattattgattcatcatataatgatagcaaaaaaattaaatatgataataatcttataaaagaacacataaaaaagttaacttcttaaa

SEQ ID NO: 252579 - DNA, 634 bp, Unknown
  Bacterial polypeptide expressing nucleotide sequence isolated from the Sargasso Sea
atgtctttaggaaaagacgggatagttgtagtattatcatcaccgtctggagccggtaaaaccacacttgtaaaaaaaatttctcaagagcaaaatttcaaaatttcaatttcttatacaacaagaaaaccaagaacaaacgaagtaaatggcaaggattattattttattagcaaagaagaatttgaaaatctaattaaaaatagtgaacttttagaacatgcaaaagtttttgaaaattactatggctcatctagagatcaagtatttgaaaaattaaataggggagaaaatgtaatttttgatattgattggcaagggactgaacaaattaaaaaacagaagttaaaatatcaacttattacattctttattttgccaccaagcaaaacagaattatttaacaggctaaaaaatagagatatgaaggataaaaatattgtcgatgaaagaatgaaacaatttaataaagatattgaacattgggaagattacgattttgtagtaattaatgatgatttagagaaatgttatgatgaaataattaagtttatcgatagtaaaataaaaaatatagatatcgattataataaaaataatattttagatcacataaaaaaattaagagcttaat

SEQ ID NO: 252580 - DNA, 640 bp, Unknown
  Bacterial polypeptide expressing nucleotide sequence isolated from the Sargasso Sea
aatgtccgataaaaaagaagggatagttgtaatattatcttctccatcgggcgctggtaaaaccactctagtaaaaaaaatatcaaaaagtaataattttttaatttcaatatctcacacaacaagaaaacctagaagtaacgaagtagacggatcggattatttctttatctcatcagaagaatttaagaatttaatttcaaaagataaatttttagagtatgcgaaagtatttaataattattatggttcatctaaagatttagttatagaaaaattagaaaaaggccatgatgttatttttgatattgattggcaaggaactgaacaaataaaaaatcaaaagcttagacagaaaataattacaatatttatattaccaccttcaagagacgaattatatcaaaggttaatgaatagagaaattaaggataaaaatatagccgaagaaagaatgaaacaatttgataatgatctattgcactgggtaaactatgattttgtagtgataaatgatgatcttgataagtgctacaaacaaattgtagattttataaatttaaaaaaattaaataataattcaattacttttgataaagaagcaattgaaattcacgttaaaaaattacttcttaagtaa

SEQ ID NO: 252581 - DNA, 584 bp, Unknown
  Bacterial polypeptide expressing nucleotide sequence isolated from the Sargasso Sea
agacagcgtcatgcttgtcctctcctctccttcaggagcggggaaaactaccatttcaaaaaaaattcagcaaaaataccctgactttaaaatttcggtttctcacacaactagaaaaccaagacctaacgaaattgacggggtagattatcattttgttgatgaaaaaaaatttaaagagttaattaatgaaaatcaattttatgaatatgcaaaaatatttgacaattattatggaacttcaagaaaatcaattaaagttcttcaagaaaaaaattataatattttgtttgatattgattggcagggcactcaacaattagcaaaatttaaagatttagacttattaaaaatatttatattgcctcctgataaagatgaactcaaaaatagattggctcaaagaaatcaagataaagaagaggtaatagaacaaagactccaacattattcaaaggacataatgcattgggctgattatgattatgttgtaacaaatgataatctggaaaattgttttaagcagattgaaaaaataattgctgaaaaaagctcatcaccgatcactaatcttttcaaataag

SEQ ID NO: 252582 - DNA, 460 bp, Unknown
  Bacterial polypeptide expressing nucleotide sequence isolated from the Sargasso Sea
aatggtcatattgtcttctccatctggcgcaggcaaaactacaatcacaaaaaagatacaacaaaaatatcaatcatttaaaatttcagtttcgcatacaacaagaaaaccgaggccgaatgaagttgatggtatcgattatcattttgttacaaacgaagagtttaataaattaattaaagagggacaattttatgaatatgcaaaaatatttgataattattatggaacaaataaaaagaacgtcgacgagctatttaaaaaaaatgatgtaatttttgatatagattggcagggtaataaacaattatctaagtttaaaaacttaaaattaattaagatatatttaattccacccaataaagatgaattaaaaaaaagacttattagcagaaatcaagactccacagaagaggtacaaagaaggtttaaggcatttgacaaagatataaaatattgg

SEQ ID NO: 252583 - DNA, 282 bp, Unknown
  Bacterial polypeptide expressing nucleotide sequence isolated from the Sargasso Sea
aatgttttcaaccaaagatggcaaaatgataattctgtcatcgccgtcaggagctggtaaaacaactttggttaaaaaaatttctaaagaaaaaaactataaaatttctatttcccacacaactagagcacctagatcaaatgagattgacggtgttgattatttttttataacacaggaaaattttcaaaaacttataaaaaatgatgcttttttagaatatgcgaatgtatttaaaaatttatatggatcttcaaaagagcaagtttttaaaagtttaga

SEQ ID NO: 252584 - DNA, 481 bp, Unknown
  Bacterial polypeptide expressing nucleotide sequence isolated from the Sargasso Sea
atgataattttatcatccccctctggtgcaggcaaaacaactttagttaaacttctttcagaaaaaaataatttttttatatctacttctcacaccacaagagaaccaagaccaaatgagttaaatggtaaagattatttttttgtaaagcatgatgaattcaaaagattaattcaaaatgatgaattcttagaatatgccaaagtgtttaataattattacggcacttcaaggactccagtcattcaaaatttagaaaataataaaaatgttatttttgatattgattggcaaggcgcagaccaaattaaaaataaaggattaaattataaattaattactttttttattttaccgccaagtaaaaaagttttatttgaaagattatcaaatagagacatgaaagataagctaattgctgacgaaaggatgaaacaatttgatagagatgttttacattggataaattatgattatgtag

SEQ ID NO: 252585 - DNA, 475 bp, Unknown
  Bacterial polypeptide expressing nucleotide sequence isolated from the Sargasso Sea
atgataataatatcatcaccttccggagcaggaaaaacgacaatcgtaaaacttttatcagaaaaatttaattacagaatatcgatatctcatactactagaaaacccagaatagatgaacttgatgctaaagattatttttttattagtaaattagaatttaataatctaataaaaaaaaaatattttattgaacatgcgcaagtttttgaaaatttatatgggacttcaaaagatcaggttattagcaatctaaaaaaaggaaaaaatattctttttgatatagattggcaaggagcaaaacagataagaaataaaaattttaaatacaaactgttaactttttttattttacctccatcaaaaaaagaattactaaatagactttataaaagagaatcaaacaactcagaaattgtaatgcaaagaatgaaaaattttaaagaagacgctattacactgggaagattatgat

SEQ ID NO: 252586 - DNA, 331 bp, Unknown
  Bacterial polypeptide expressing nucleotide sequence isolated from the Sargasso Sea
aatgttctcttcgaaagacggcaaaatgataattttatcatctccgtctggagctggaaaaactactttagtaaaaaaaatctctcttcaaaaaaaatttaaaatttcaatttcacacacaactagagaaccaagatctaatgaaatagatggagtagactatttttttacctcacaagataaatttcatgaaatgattaaagaaaaagcttttttagaatacgctaatgtgtttaaaaatttatacggatctacaaaagatcaagtatttaaaaatttagacatgggaaacaatgtattgtttgatatagattggcagggagctcaacaa

SEQ ID NO: 252587 - DNA, 637 bp, Unknown
  Bacterial polypeptide expressing nucleotide sequence isolated from the Sargasso Sea
aatgaaaagcttaaaaaaacataaaggcgtaatgctagttttatcctctccatcaggagcaggaaaaagctcaatatgtagagctttattagatttagataaaaatttatacttatcaatttctacaactacaagaaagaaaaggcctaatgaggtatctgggatagactataactttgtaacgctagatgagtttgaatataaattaagccaaaataactttatagagcatgcaaaagtatttaataatttttatggtacagataaatcttttgtagaaaataaaattaataaaggtaaagatctattatttgatattgattggcaaggtgctcagcaactaagggaaaagatgagagaagatattgtttctgtatttattttacctccctcgaagaaggaacttgaaagaaggttgaaagaaagaggtcaagatacagatgaagttgttaaagaaagaatgagcgaggcgacttcagaaattactcactgggctgaatatgattatgtaataataaatgaagatttaaatataagtgtaaaaaccgtattaggtatattacactctgaaaggatgaaaagaataagacaaattgggttaggagaatttgttagaactataagtcttgataattag

SEQ ID NO: 252588 - DNA, 286 bp, Unknown
  Bacterial polypeptide expressing nucleotide sequence isolated from the Sargasso Sea
aatgcccggcattaaaaaaggtggcatgtttatactctcgtcgccttctggtgctggtaaaacaacacttgttaaaaaaatttcaagaaatagaaattatatagtatcagtatctcacactactagaccccctagaccaagtgaaaaaaacggcaaggattatttttttatatcaaagaataattttaaaaaacttattaaaaaaaaagagtttttggaacatgcaaaagtttttgacaattattatggatcatcaaaaaaaataataataaaaaagctaatgcaa

SEQ ID NO: 252589 - DNA, 637 bp, Unknown
  Bacterial polypeptide expressing nucleotide sequence isolated from the Sargasso Sea
catgtccgataatcatgaagggataatagtaatattatcatctccttcgggcgcagggaagacatcgttagtaaaagaaatttcatctaaaaataatttctcaatatctatttctcacacaacaagaaaacctagaagcaatgaaaaagatggtattgattactattttgtaacgcttgaagaatttaaaaagataatttcagaacaaaaatttttggaatatgcaaaagtttttaaaaattactatggttcatctaaggatattgttattgaaaaattagataatggtgaaaatattatttttgatattgattggcaaggaactgaacaaattaaacaaaaaaacttgaaatataaaataatcactatattcattttacctccatctagagaagaactttttaaaagacttttaaatagagactcaaatgatgaaaaaaatgctaaagaaagaatgaagcaatttgataaagatgtattacattggaaaaactatgatttagtagtggtcaatgataatttagaagaatgttataaaaaaataattaaatatattaatttaaaaaaagataataatattttagaaaattatgataagaatttaataagcaaacatgtttcaagtttgcttaattga

SEQ ID NO: 252590 - DNA, 517 bp, Unknown
  Bacterial polypeptide expressing nucleotide sequence isolated from the Sargasso Sea
accacaagaaaacctagaaataacgaaattgatggaattgattattattttgttgaagaagaaaaattcaaggaattaatttctaaaaataaatttttagagtatgccgaagtttttaataattattatggctcatctaaggatgtagttatacaaaaattagagaagggacaaaatgtaatttttgatattgattggcaaggaacagaacaaataaaacaaaaaaaattgaattataaaataataacaatatttattcttcctccatctagaaaagaactttttaatagacttttaaatagagatttaaatgatgaaaaaaacgctatagagagaatgaagcagtttgataaagatgtattacattggaaaaattatgatttagttgtaattaatgataattttgacaagtgttacaataaaattattcaatatattaatttagtattagaaaacaaatcagaaaattttagtaaaagtgaaattgaaaatcacgttttaagtcttcttaagtaac

SEQ ID NO: 252591 - DNA, 610 bp, Unknown
  Bacterial polypeptide expressing nucleotide sequence isolated from the Sargasso Sea
aatggttatactatcctctccatcaggagcaggtaaaaccactttagtaaacttactttcaaaacaaaaaaattttgaaatttctatctctcacacaacaagacaaccgagagctggagaggttccagacaaagattatttttttgtaaatgatgctgaatttaaaagattaatcaataatcaagaatttttagaatatgcaaaagttttcaataactattacggaactacaagaacaccaattattgataatctaaacaaagggaaaaatgtcctatttgatattgattggcaaggcgctgatcaaataaaaaataaaaaactggactataaattaattactttttttattttacctcctagtaaagagattttatttgaaagactttcaaatagagatatgaaagacaaacttatagttgaggaaagaatgcaacaattcgaaagagatgtattacattggataaattatgattacgtagttataaatgataatttagacaaatgttttttaaagattaaaaatttgataaatgcggaaataagcaatggatcaaaagattatgattcagattatgttaggaatcatattgaaaaattaacatcttaa

SEQ ID NO: 252592 - DNA, 180 bp, Unknown
  Bacterial polypeptide expressing nucleotide sequence isolated from the Sargasso Sea
tatgagttatgattcaaataatatcatggtaatcttatcatctccttctggggctggcaaaacaacgataacaaagaaaattcaacaaaaatatcaatcatttaaaatatcagtttctcacacaactcgtaaacctcgacctaacgaagtagacggtgttgattatcattttgtttctca

SEQ ID NO: 252593 - DNA, 598 bp, Unknown
  Bacterial polypeptide expressing nucleotide sequence isolated from the Sargasso Sea
tcaccctctggcgctggaaaaacaactttagtaaagaaaatttcattgagaaaaaatttcaaaatttcagtttcacatactacgcgtaaacctaggctaaatgaaaaaaatggcagagattatttttttatagataataaaaaattccagtttctaattaaaaatagaaagtttttagaacacgccaaagtctttaagaattattacggttctctaaaagatactgttatagaaaagttaaagaagggtgaaaacgtaatttttgatatagattggcaaggaactcgtcaaataaaaagtaagaaacttaaatataagataataactatatttattcttccaccatcaaagaaagagttatttaatagattgctaaaacgagaccagaaagataaaaaaattgcttctgaaagaatgaaacaatttaaagcagatgtgatgcattggaaagattatgattatacagttattaacgataaagttgagttttgttataaggaaataataaattttattgagaaaagaaaaaaaagtagttttaatttaggctataataaaaaaaaaataaaaaaccatattaaaaatttaatcaattaaa

SEQ ID NO: 252594 - DNA, 535 bp, Unknown
  Bacterial polypeptide expressing nucleotide sequence isolated from the Sargasso Sea
ctcggtctcggccacgacccgcgatccgcgcccgggcgagagcgacggggtggagtatttcttcaaatcccgcgccgagttcgaaaagatggtcgatcagggcgacatgctggaacatgccgaggtgttcggcaatttctacggcacgccaaaaggtccggtggaggccgcgatgggcgaggggcgcgatacgctgttcgacgtcgactggcagggcgggcagcacatccgcaactcctcgctgggcaaggacgtggtctcgatcttcatcctgccgccctcgattgcggcgctggaagagcgtctgcgcagccgcgcgcaggacagcgatgccgtgatcaacggccggatggaaaaatcgctcgccgaaatcagccattggtcggaatatgactatgttctggtcaatgacgatctcgaccgcgcggaagagcagttgcgcacgatcctgaccgccgagcgcagccgccgcgaccgtcagaccgggctgaatgaattcgtgcgaaaactgaacagggagttcgagacgagatga

SEQ ID NO: 252595 - DNA, 634 bp, Unknown
  Bacterial polypeptide expressing nucleotide sequence isolated from the Sargasso Sea
atgccctcaaaaaaagaaggggtaatgataattttatcctctccttcaggagctggcaaaacaacattggtaaaaatgttatctaaattagataactttgatatttcaatatctcatacaacacgtcaaccaagacataatgaaaaatttaatgaagattatttttttattcatgaagctgaatttaaaagattaattaataatcaagaatttttagaatacgcaaaagtattcaataatctctatggaacaactagaacacctgttataaataaattaaataaggggaagaacgtgttgtttgatatcgattggcagggagctgatcagataaaaaataaaaaattagattataagctaataacattttttattttaccaccaagtaaaaaagtattgtttgaaagattatcaaacagagacatgaaagataaactacttgtagaagagagaatgaagcaatttgagagagatgtgctacattggataaattatgattatgttattataaatgaggaccttgatagttgtttttctaaaattaagaaattaatatttgcagaaattgataacggttcaaaagattatgatctagagtacattagaaaacacgttgagtctttaactagttaat

SEQ ID NO: 252596 - DNA, 602 bp, Unknown
  Bacterial polypeptide expressing nucleotide sequence isolated from the Sargasso Sea
aatgataattttatcttctccatcaggtgcaggtaaaactactctagttaaaatgctatctgaaaaagataattttgaaatctctatttcacataccacaagaaaaccaagacaaaacgaaaatcaagatcaagattatttttttgttaacgagaccgaatttaaaagactaattaagaacgaagaatttcttgaatacgcaaaagtattcaataatttttatggcacaacaagaactccagttatagataaattaaataaaggtaaaaatgtactttttgatattgattggcaaggagcggatcaaattaaaaataaaaatttagattataaattgattacattttttattcttcctccaacaaaagaggttttatttgaaagattgtctaaacgtcatgtgaatgacaaattgatagctaaggaaagaatggatcaatttggaagagacgtcttacactggattaattatgactatgttgtcattaacaatgatttaaataaatgtttttcaaaaataactaatttaattgatgcagagatgaatgatggttcaaaagattatgatcttgaatatattagaaaccatgttggaaaattaa

SEQ ID NO: 252597 - DNA, 598 bp, Unknown
  Bacterial polypeptide expressing nucleotide sequence isolated from the Sargasso Sea
tatgactgccagcaaaagcggtacaattttcgttttatcgtcaccgtcaggtgcaggtaagactactttgaccaaaaaacttgaaaaaaataatacaaatttcgttatatctatttcacatacaacaagaaaagctagaccaggcgaggtaaatggtaaagattattattttgtaaatgaacaagaatttaattctttagttgaaaataataatttttatgagtttgcaaaaatatttggcaactattatggaactttaaaaaaacctgtaataaaacatttatcagaaggcaaggacgtactgtttgatattgattggcaaggaacacagcaactaaaaaaaatttcaaatttatctttggttacgttttttatagttcctccgaatatagaggttttaaaaaaaagattgctaaataggcacaaaggacaggaaagtttaatcaaacctcgtatgatgaaatttcatgaagagctttcacactggaaagaatatgattatgttgtagttaatgatgatttagaaatttgctatacaaaaatattaaagataattacaaacacaaaaaatggaataaatgaaaagcaagatttatca

SEQ ID NO: 252598 - DNA, 424 bp, Unknown
  Bacterial polypeptide expressing nucleotide sequence isolated from the Sargasso Sea
aaaaatggtatagattatcatttcatcacaataaataaatttgaagagtttatattaaatgaaaaatttgtggagtgggagaatgttcatggaaattattatggtactgcaaaagatgctcttgaagctgctattgtaagtgaaaaaacattattgttagaaatggatgtaaaaggttcaatgtctataaaaaaactttacccgcataatacattctccatctttattttacctccgagtctggaacacttaagagctcgattaaaaaaacgaggtacagattctgatgaaacaattgaaataagattaaaaagatatcagcaagaaatagagtttcaagatagatttgatgcagttatgattaatgaagatcttgaatcagcaaagcttgaattaattaatattgttaacgaactaaagtaag

SEQ ID NO: 252599 - DNA, 631 bp, Unknown
  Bacterial polypeptide expressing nucleotide sequence isolated from the Sargasso Sea
ctggtcgctccttccggaactggaaagacgaccctggccagccggttgattgatggatcaggaccatacgtcttttctgtatctgcgaccacgagaaagccgcgagacggtgaacgagacggtattgattatcacttccttcagcctaaagagtttgacgatcggattgacgagggctggtttgccgagtgggcacttgtgcacgatcacatgtacggtacgccgcgttcagaactggatgcggcctcggcccgaggagaacatgtcgtgatggatattgatgtgcagggggcgagtcagattcgggcttcagtcgctcaggcaaagctgatcttcgtgctgccgccatctgtcgatataatgttagctcgcctcattaagcgagggacggaggaccccgagagtattgctagaagactcgagtccgccgttgtggagcttcaagcggttcccgacttcgactacgttgtcgtcaacgatgatttggacgagtgtgtttcggagatccggaacatcgtagaagggcaagagccaacagtttcccatgagcaggacgctgaacagatgcgccgagagatcgtgaagctattggaaggctattacaatatgtatcagaaggattcagaatagg

SEQ ID NO: 252600 - DNA, 610 bp, Unknown
  Bacterial polypeptide expressing nucleotide sequence isolated from the Sargasso Sea
aatgataattttatcttctccttctggagcaggtaaaaccacattagttaaaatgctgtcaaagttggataactttgaaacctccatatctcacacaactagaaaacctagacctaatgagaaacctaataaagattatttttttgttgatgagaatgagttcaaaaggtttattaaaaatgaagaatttctagaatacgcaaaagtttttagtaatttttatggaactacgagaacacctgttattaacaaacttaataaaggtaaaaatgttttatttgatattgattggcaaggtgctgaccaaataaagaataaaaacttagattataagttaatatcattttttattttaccaccaagtaaagagactttgtttgagagactttctaatagagatatgagagataaattaattgctgaagagagaatgaagcagtttggacgagatgtattacattggataaattatgattatgtagttataaatgatagaattgaaacttgttattctaaaataaaaaatttaatttatgcggaaataaacaatggttcaaaagattacgatcttgagtatatcagaaatcatatagaaaaattaacttcttaa

SEQ ID NO: 252601 - DNA, 514 bp, Unknown
  Bacterial polypeptide expressing nucleotide sequence isolated from the Sargasso Sea
aatgccatcagaaacagatggagttatgataattttgtcttctccatcaggagcaggtaaaaccactctcgtaaagaaattatctgattatgataattttgaagtgtcaatttcccatacaactagaaaaccaagaccaaatgaaaatcaaaataaagattacttttttgtaaacgaattagaatttgaaagacttattaaaaatcaagaatttcttgagtacgccaaagtatttaataacttgtatggtactacaaggacaccagtaattgataaactcaataaaggcaagaacgtattattcgatatagactggcaaggtgctgatcaaattaaaaataaaaaattagattataaattaatcacattttttatacttccacctagtaaagaaattctctttgatagattatctagtcgccacattaacgacaaatcgatggctgaggaaagaatgagtcaatttgaaagagacgtgttacattggattaatacgattatgttgttattataa

SEQ ID NO: 252602 - DNA, 409 bp, Unknown
  Bacterial polypeptide expressing nucleotide sequence isolated from the Sargasso Sea
tttttggaatcagctaatgtccacggctatcattatgcgaccttaaaatcttttgttgatgaaaaaacaagctcaggaataagtgtaatacttgatattgatgttcaaggttttaaacaagtaaaacaaacctcgcaagataatgtctcaatttttatcctacctccgtcattggaggagcttgaacaaaggctatttaatcgtggttcagaatctgcagaaagcattaaaaaaagacttaaaaatgcacttattgaattaagatctgctgaaatatttgattatgttgtagtaaatgacgaatttgacaacactattaaaattttaagttcaattctctttgatgaaaacattgaatataatgatgaaaacgcaaagaatatattaaaagaattattggataattaac

SEQ ID NO: 252603 - DNA, 280 bp, Unknown
  Bacterial polypeptide expressing nucleotide sequence isolated from the Sargasso Sea
aatgtcttcaaaagaagatggggcaatgatcgttttatcatccccttcaggtgctggaaaaactacacttacaaaattgctttcaaaaaataatgattatttgatatcagtatcgcatacaacacgaaaacctagaataaacgaaatagatgcaaaagactatttttttgtaaacgaaaatcaatttaaatctttaattaaaaaagatgaatttttagaacacgcagaagtttttaatcatctttatggcacaagcaaaacttttgtaatcaatagcctt

SEQ ID NO: 252604 - DNA, 592 bp, Unknown
  Bacterial polypeptide expressing nucleotide sequence isolated from the Sargasso Sea
aatgagtcatggttcttcaaatatcatggttgtcttatcttctccgtctggagctggaaaaaccacattaactaaaaaaattcaacaaaaatacagttcttttagaatatcagtttctcacacaactcgtaaaccaagaagcaatgaagtagatggggtagactacaattttgtatctgaaaaaaaatttcaagaattaataactaaaggagaattttatgaatatgctaaaatatttggaaattattatggaacctcaaaaaaaactgtaaatgaattaataaaaaaaaatgatataatttttgatattgattggcaaggaaccaaacaattatcaaagtttaaagaattaaatctaataaaaatttacttattgcctccaaacaaagatgaattaaaagaaagactaattaaaagaaatcaagattctacccaagaagttcagaaaagatttaaagcatttgacgaagatataaaacattgggcagactatgattatgtaataattaataaggatttagaaaactgttatcaacaaatagaaaaaattatttcaagtaataaaaacaagcaatcaatttccttcaaataa

SEQ ID NO: 252605 - DNA, 538 bp, Unknown
  Bacterial polypeptide expressing nucleotide sequence isolated from the Sargasso Sea
gatgccgacacacacccacgggatgatgataatcatttcatctccctctggagcaggaaaaacaacaatcgtaaaacttttaaaaaaaaaattcaattaccggatttccatatcatacactacccgaaaaccaagaaaagtagagacaaacaggaaagactatttttttataaataaatcaagatttttaaagctaataaaagaaaaccacttcattgaatacgcaaacgtttttgataatttatatggcacatcaaaagagcagataaccaatatgttggaaaaaggagaaaatgtattatttgatattgattggcaaggagcaaagcagataagaaaaaaaaaattgaaattcaaattaatatcattttttatcttacctccatcaaaagatgagcttcttaaaaggcttaaaaagagagaaggaaataatgataatatagttaaacaaaggatgaaaaattttaaaaaagatgtattgcattgggatgaatatgatttcgtagtaataaacaaggataaaaataaatgtttttga

SEQ ID NO: 252606 - DNA, 634 bp, Unknown
  Bacterial polypeptide expressing nucleotide sequence isolated from the Sargasso Sea
atgtctttgaaaaaagatggaataatgattatactttcatctccatcgggagcgggaaaaacaaccctcacaaacttactttctagaaaattcaggtttcatatatcagtatcccataccacaagaaaacctagacctagagaaattcattcgaaacactatttttttgtaaagaaaaaagaattcaacggattaatattaaataataaatttttagagtatgcaaaagttttcaataatttttatggaacgtcaaaagattatgtttttaaaatgttaaaaaatggaaaagatgttttatttgacatagactggcaagggactaagaaaataaaaaataaaaaactaaaatttaaaatattgactatttttgtgcttccgccaagtagaggtgtactttttaaaagactatcaaatagggatatgagagataaattaatagccgaagaaagaatgaagcagtttaataaagatatattacattggaaaaattatgattatgtagttattaacgacaaattagatagatgcatccaagaaataaaaaaaattatattttctaaaaaaaaatcaaaaaaatatcctcaagataaaaagaaaatcaaacaacatgtaaaatatttattaagttaat

SEQ ID NO: 252607 - DNA, 502 bp, Unknown
  Bacterial polypeptide expressing nucleotide sequence isolated from the Sargasso Sea
aatgtcttcaaaaaaagacgggataattgttatattatcatcaccgtctggggcaggtaaaacaacacttgtaaaaaaaatctcaaaagaaaataaattcaaaatttcaatttcacacaccacaagaaaaccaagaactaacgaagtaaatggtaaagattatttttttactagcgaagaagatttcaaaaatttaataaaaaatgaagattttttagaatatgccaaagtttttggaaattattatggatcatcaagaaaacaagttttagaaaatttaaaaaagggtgaaaatgttatttttgatatagattggcaaggaaccgaacaaatcaaaaaacagaaattaaattataaacttattacattttttattttaccacccagtaaatcagaattatttagcagattaaaaaatcgggacatgaaggataaaaatattgttgaagaaagaatgaaacagttcaatgaagatataaaacaatgggaaggatacgatttt

SEQ ID NO: 252608 - DNA, 637 bp, Unknown
  Bacterial polypeptide expressing nucleotide sequence isolated from the Sargasso Sea
aatggccgaaaaaaaagcagggataattgtaatattatcttctccttcaggcgctggtaaaacaacattagtaaaaaaaatttcatcaagaaaaaatttcaagatttctatatcacatactacaagaaaaccaagagcgaacgaaaagcatggaagggattatttttttataagtaatcaaaaatttagaaacctaataaagaacaaaaagtttttagagcacgcaaaagtttttaaaaattattatggctcacacaaagaatcagtaattaaaaaactaattaatggtgaaaatgttatatttgatattgattggcaaggcactaggcaaataaaaagtaaaaaactaagctacaaaataattactatatttattcttccaccatcaaaaaaagagttatttaaaagattattaaaaagggataaaaaagataaaaagatagctagagtcagaatgaaacaatttaaatctgatatcatgcattggaaagattatgattatgcagtaattaacgatcaaatagaaaaatgctatagactaatcataaaatttatccgagaaagtattagacataaaaataagcctatttataataaaatacttatcaaaaaacatgttcggaaattaattagttaa

SEQ ID NO: 252609 - DNA, 532 bp, Unknown
  Bacterial polypeptide expressing nucleotide sequence isolated from the Sargasso Sea
aatgataattttatcttctccgtcgggagcgggaaagactactttagttaaagaattatctaaattagataattacgaaatatctatttcacataccacgagaggtccgagatcaaacgaatctagagatgaacattactttttcgttaacgatgaagaatttaaaagattaattaataatggagagtttttggagtatgcaaaagtttttaataacttttatggaacaactagaactcctgtaatagataaactaaataagggtaaaaatgtactatttgatattgattggcagggagcagatcaaataaaaaataaaaaattagattataaattaattaccttttttattttgcctcccagcaaagaggttttatttgagagattatcaattagacataagagtgataaatttattgctgaagagagaattaatcagtttgagagagatgtactacattggataaattatgactatgtagtcataaatgataatttagaaagttgttatctgagaattaaaaatttaatt

SEQ ID NO: 252610 - DNA, 601 bp, Unknown
  Bacterial polypeptide expressing nucleotide sequence isolated from the Sargasso Sea
ttgattattttttctgctccttcgggagctggaaaatcttctttgattaaggaaattatagatttaagtcctaataaaatagaattatctatatcagcaaccactagagatgctcgtgatggcgagctgaatggtaaggactatttctttatatcagatgaagaatttaatgatcttaaagatagagatgcatttatagagaatgcaaatgttcatggtttccaatatggaactcttaaatcttttattgatgaaaagacagagtcaggcattaatataattttagatatagatgttcaggggtttaatcagattaaagcgttaaatgtagataacttatctatttttataattcctccatcctttgatgaactaaaaaatagacttcttctaagagggtctgattcagatgatgctattgagcataggctagtcaatgcaaaaaaagaattaaaatctgctgaattatttgattatatagttctaaatgataattttaatgaaacccttaaagaactaagctctattatatttaatataaatcatgaatataataaacaagataacttgaatatattacgagatttattggataaatagc

SEQ ID NO: 252611 - DNA, 598 bp, Unknown
  Bacterial polypeptide expressing nucleotide sequence isolated from the Sargasso Sea
ttgattattttttctgctccttcaggagcaggaaaatcttctttgataaaagaagttatatctcgcagttctggaaatattcagttatcaatttctgcaacgacgagatctccaaggaatggcgaagagcatggaagggattatttttttatatctgatgaagagtttgatgaactaaagaaacaaaactcttttgttgagcatgcaaatgtttatggttatcaatatggaaccttaaaatcttttgtggatgaaaagattaaaaatgatattaatattattcttgatattgatgttcaaggatttgatcaaataagaaattctatagaaaatagcatatcaatctttatcataccgccatcaatactagagttagaaaaaaggttgttttcaagaggattagattctgatgaagtcattaaaaaaagattaaagaatgtaaaaaccgaacttaaatatgctgaactatatgatcatatagttcttaatgatcagtttaaaaatgctatcaatgaactaacttctataatttatgataaaaatttcatttataacaaagaaactaatataaatttgttaaaagatttattggattaat

SEQ ID NO: 252612 - DNA, 535 bp, Unknown
  Bacterial polypeptide expressing nucleotide sequence isolated from the Sargasso Sea
aatggttatattgtcctctccttccggcgcaggtaaaaccacacttgtaaacttgctctcaaagcaagagaattttaaaatttctatttctcacacaacacgaaagccaagagatggagaaatacaagataaagattattactttgtaaatgataaagaattcaaaagattaattaataatcaagaattcttagagtacgcaaaagtttttaaaaattattatggcacaactcggactccagttatagacaatcttaataaaggaaaaaatgtattatttgatattgattggcaaggagcagatcaaattagaaataaaaaacttgattatagattaatcactttttttattttacccccgagtaagaaaattttatttgataggctttcaaatagggatatgaaagataaactgatagctgaggaaagaatgcaacaatttgaaagagacgttctacattggattaattatgattatgtagtaattaatgatgatttagagaaatgttatcttaaaattaagaatttaattaac

SEQ ID NO: 252613 - DNA, 604 bp, Unknown
  Bacterial polypeptide expressing nucleotide sequence isolated from the Sargasso Sea
atgaggtgcagaacagtgaagaatatagacgaaacgatcaaacgccgtggccttttgctggtgctgaccgcacctagtggatgtggcaaaagtacgattacccgcaagatcatgggggatgatccgtctatcgtggtttctgtgtcggcgacaacccgtgatccacgccccggtgaaaccgatggggaagattatttcttcatgaaaactgaggaatttcgccaaaaggtgaatgccggtgagtttctggaatgggcggaagtttttggtcgccattacgggacgcctaaatctgctgtggaagcggcccttgtgtcggggaaagacgtgttttttgatatcgattggcagggcgcagaacaattgcgcaaaaacgccccggacgatctggtgtggatttgtattttgcccccgactattgaatcccttgaaaatcgcttacgtgcccgtgggcaggatagtgatgaagtgattgcccgacgtatgctggaagctgaaagtgaagccagccattgggcggatgcggattatgtggtcgtcaatgatgatctggataaagcaacccgacaggtgcgcgcgattctggatgcagagcgcatcaaaa

SEQ ID NO: 252614 - DNA, 346 bp, Unknown
  Bacterial polypeptide expressing nucleotide sequence isolated from the Sargasso Sea
atggtgatactctcatccccgtctggtgccggaaaaacaactataagtaaaaaactacaacaaaaatatcaaaattttaagatctcagtttcacacaccactagaaccccgagacctaatgaagtcgacggcatagattacttttttgtttcccatgatgaatttaaaaaattaattgaaaaaaacgaattctatgaatatgcagaaatttttggtaactattatggaacttcaaaaaaatctgttttagacttagtcaaaaaaaaaaatgatgttctatttgatattgattggcaaggtactaagcagctttcaaaatttaaagaacttaatttacttaaaatat

SEQ ID NO: 252615 - DNA, 397 bp, Unknown
  Bacterial polypeptide expressing nucleotide sequence isolated from the Sargasso Sea
ggaagagttcaaaattttattaaaaaaagacgcgttttatgaacactctgtaatatttggtaattattatggtacatcgaaagcttctgttgacgacattataaagaaaaaatttaatgttttatttgatattgattggaagggcgcgaagcagctgagtgcttttaaagaactaaacttgctaaaaatttttattttacctccaagcaaagaagagttagagaaaagacttatagcaagaaatcaagatggaaaagagtcaattaaaaaaagagttttagcatattctcaagatataaaacatgcaaatgagtatgatcatgttatcacaaatgacaatgtagaaaattgttttaataaaattttaagaataattaaaaagcatcttaataattaa

SEQ ID NO: 252616 - DNA, 634 bp, Unknown
  Bacterial polypeptide expressing nucleotide sequence isolated from the Sargasso Sea
catgtccgataatcgtgaagggataatagtaatattatcatctccctcgggtgcaggaaaaacttcattagtaaaagaaatttctttaaaaaataattattctatatctatttctcataccacacgaaaacctagagccaatgaaaacgatggcattgattatttttttgttaatcaagaaaaatttaaaaaattaatttctaacaaaaaatttttagaatatgcaaaagttttcaataattattatggctcatctgaagatgatgtttttgaaaaattagataaaggacaaaatgtaatttttgatattgattggcaaggaactgagcaaataaaagaaaaaaagcttaaatataaaataataacaatatttatactacctccatctagaaaagaattattcaatagacttttaaatagagacttgaatgatgaaaaaaatgcaaaggaaagaatgaaacagtttgataaggatgtagtgcattggaaaaactatgacttagttgtaattaatgacgattttaacaagtgttatgaaaaaataatgaaatacattaactcaagtaaaaaaaatattttaataaattatgataaaaatgaaattagcaaacatataacagaactacttaagtaa

SEQ ID NO: 252617 - DNA, 598 bp, Unknown
  Bacterial polypeptide expressing nucleotide sequence isolated from the Sargasso Sea
aatgaatcatgataatcaaaatatcatggtggttctttcttctccttctggtgcaggaaaaactacaattacaaaaaaaatacaacaaaaattttcctcttttaaaatatcagtttcacatactactagaaaaccaagatcgaacgaggttaatggagtagactacaattttgtatctcacgaaatctttgaaaaacttattaaagagaaaaagttttacgaatatgctaaaattttcgacaactattatggaacactcaaagatacggttgacaaattgataaaaaataatgacgtaatctttgatattgattggcaaggaacaaaacagctttcaaagtttaagaaccttaatttaataaaaatatttatatctattattgataagaaagagctccggatgaggctggtaaaaagaaatcaagatagtacaactgaagtggaaaaaagatttaaatcttatgacgaagatattaaacactggactgattatgattacattgttattaacaaagatttagaaaattgttttaagcaaatagaaaaaataattttaagctttaaaagaaaagttaattttcctcgtacaattgagtaa

SEQ ID NO: 252618 - DNA, 607 bp, Unknown
  Bacterial polypeptide expressing nucleotide sequence isolated from the Sargasso Sea
gatgtccgattcaggctcaactggcctccttctcgtcctgtccggcccctccggggtgggcaagaccacgatcgcgcaccgggtccaggagcggttcgacggcatcttcagcgtgtcggtcaccacacgtccccgcagcagcgacgaggtggacggcgaggactacaccttcgtcgaccccgacaccttccagacgatgctggacgcgggcgagtttctcgaatcggccgaggtcttcggcaagcacgcctacggcaccccacgggctcccgtccgccgacggctggacgaaggacgcctcgtgatcctcgacatcgacgtgcagggtgcgcggcaggtccgcgactcgatgcccgagtcgttcatgctcttcatcctcccaccgagcgaggaggaactgcagcgacgactcgagtcgcgggggcgcgacgacgacgaggccatccagcgtcgattcgccgaagcacggcacgagatcgaactggccacgacgagcgatctctacgacgccttcgtcgtgaacgcggacctcgaggccgcgatccacgagacctgtgaactgatcgccgcccgcatgcagcacggacctcgggaatcgacggcgtga

SEQ ID NO: 252619 - DNA, 331 bp, Unknown
  Bacterial polypeptide expressing nucleotide sequence isolated from the Sargasso Sea
atgataattttatcttctccttccggagcaggtaaaaccactctggtaaaaatgttatcaggtatagataattttgaagtttcaatttcacatactactcgtcaaccaagacctgaagaaacgtcaaataaagattatttctttgtaaacgagcatgagtttaaaagattaataaacaatcaagagtttttagaatacgcaaaagtatttggcaatttttacggcactacaagatcaccagttattgataaacttagcaaaggaagaaatgttttatttgatattgattggcaaggtgctgatcaaataaaaaataaaaaattagactata

SEQ ID NO: 252620 - DNA, 407 bp, Unknown
  Bacterial polypeptide expressing nucleotide sequence isolated from the Sargasso Sea
tatgcccagcttaaataaagggagtatgattattttatcatctccatctggtgctggaaaaacaaccctagtaaaaaaaatttccaaaaataaaaacttttctgtttctatctcacacactactagattgccaagacctaatgaaaaaaatggtaaagattattatttcatttcaaaaaattactttaaaaggctaattaaaaaaggtgaatttttagaacatgcaaaggtctttgataattattatggctcatcaaaaggattggttacagaaaaaatcaaaaagggtaaaaatatagtatttgatattgactggcaagggacaagacaaattagaaataagaatttaatttacagattattgacaatttttatactaccgccttcaaaaaaggagctttacacgc

SEQ ID NO: 252621 - DNA, 568 bp, Unknown
  Bacterial polypeptide expressing nucleotide sequence isolated from the Sargasso Sea
atgaaatctacagaaacccaagggtttatgatgattttgtcttccccttctggcgcgggaaaaaccactttgacgaaacttctagcaaaaaatttttctaatttcaccatatccgtctctcacacaacaagaaaacctagatcaaatgaaactgatggaaaagattatttttttgttaacgaagatcaatttcaaaaattaatcaaagaaggtttttttctggaatttgcaaaaatatttaataatcattatggaacagcaaaaaaaagtgttttggaaaaaattaacaaaggattaaatgttatatttgatattgattggcagggcacagaacaagttaaaaaaaaaattaaaaatattaagctcattacagtgtttattttacctccagacattcaaactttaaaacaaagacttgttaacagagaccaatccggcaaacaagttgccgaacaaaggatgaaaaaatttaaagaggaattatctcattggtccgattacgattatgttgttgttaataaggatcttaacgactgttataatgaaattttagaaattataaaaggag

SEQ ID NO: 252622 - DNA, 178 bp, Unknown
  Bacterial polypeptide expressing nucleotide sequence isolated from the Sargasso Sea
tatgataaataataatactgtttcaagaaattcttttatgttagttatttcatcaccatctggtgctggaaaaactgctttagcaaataaactattaaatgttgacaacggttttgccttgtcagtttctgtaaccacgagacctccaagacccggtgagattgatggcaaagattat

SEQ ID NO: 252623 - DNA, 595 bp, Unknown
  Bacterial polypeptide expressing nucleotide sequence isolated from the Sargasso Sea
atgatcattctttcctctccatccggagcaggaaaaacaacactagtgagtcttctatcaaaattagataattttgaaatttcaatttctcatactaccagaaaaccaagaacaaatgaaattcaggatcaagattattattttgtaacagaagagaaatttaagagattaataaaaaatgaagaatttttagaatatgctaaagtttttaataatctatatggaacaacaagaacaccagtaatagataaattgaataagggaaagaatgtcttatttgatattgattggcaaggagcagatcaaattaagaataaaaaattagattacaaattaataacattttttattttaccaccaagtaaagaagttttatttgaaagattgaaaaatcgtcatatgaatgaaaaattgttggcagaagaaagaatgaaacaatttagccatgatgtattacattggattaattatgattatgttgttattaatgaaaatttagaaaattgttattcaaagatattaaacttgattaaagcagaaatggaaggcggatctaaagattatgattcggaatttattaggtctcacgtgaaaa

SEQ ID NO: 252624 - DNA, 436 bp, Unknown
  Bacterial polypeptide expressing nucleotide sequence isolated from the Sargasso Sea
aatgagcaaatctataaagcctttgatgcttgtgctatcatcaccttcaggggctggtaaaaccactctttcaaaaaaaattcaacaatcagataattcttttgaaatttcagtatcacatacaacgagaaaccctagaccaaacgaagtagatggagttgattaccattttgtaacgaaagaaaattttttaaaattattagatcaagggttgttttatgaacatgctaaaatatttggtaattattatggaacttcaaaatcatcaatcaaaaaaattacagataataaccacaatgtattgtttgatattgattggcaaggaagccagcaactaagtaagtttaaagagcttaatttagtaaaagtattcatacttccgcctagtagagaagaattagaaaaaagacttatagcaagaaatcaagatgatcaa

SEQ ID NO: 252625 - DNA, 286 bp, Unknown
  Bacterial polypeptide expressing nucleotide sequence isolated from the Sargasso Sea
atgaataatataagcagtaaaccacttatgcttgttttatcttccccatctggtgctggtaaaacaacactttcaaaaaaaattcaacagtcagattgtacgtttagaatatcagtctcacacacaacaagaaaagccagacctaacgaggtagatggtgtcgactaccattttgtttctgaagaagaatttaaaatcttattaaaaaaagaatctttttacgaacattctattatatttggaaactattatggtacttctaaaaattcagttgatgaaatttaaa

SEQ ID NO: 252626 - DNA, 631 bp, Unknown
  Bacterial polypeptide expressing nucleotide sequence isolated from the Sargasso Sea
atgtcatcatcaaaagatggggcaatgattgtattatcttctccatcaggcgcaggaaaaacaactcttgttaaaaaaatttctaagctaagtaatttcgttacatctgtatctcacacaactagaaaaccaagaattaatgaaaaaaatggagaagattattacttcataagtaaaacgaaatttaaaaatttaatacaaaaaagagaatttttagaacatgcaatggtatttaaaaatttttatggaacatcaaaaaaatttgttttcacaaatttaaaaaaaggaaagaatgttttatttgatattgactggcaaggttctgataaaattaaaaaaaaaaaattaaattttaaattactgactttttttattctacctccaagtaaaaaaattcttaaagagaggttactaaatcgacaaaaaaaagataataaattagttgccgaaagaatgaaacaatttgaaaaagatgtcaaaagatggaaaaattatgaatttattgtaataaatgacaatttatcaaaatgctacaatgagattgtttcaataataaaaactaaactatcaagaaaaaaaattttaattaataaaaaaaaaattgaaaaacatattaaaaaattaatttaaa

SEQ ID NO: 252627 - DNA, 634 bp, Unknown
  Bacterial polypeptide expressing nucleotide sequence isolated from the Sargasso Sea
aatgcccactacaaatgatggggtaatgatcattttatcctctccttccggagcaggaaaaactaccttagtaagtctattgtcaaaattagataattatgtagtttctgtttctcacacaaccagacaacccaggcaaaatgaaattcaaaataaggattattattttgtagagaaaaatgaatttaaaagattaataaataatcaagaatttttggaatatgcaaaggtatttgataatttttatgggactactagaacaccagttatagacaacctaaataaaggcaaaaacgtattatttgatatcgattggcaaggagcagaccaaattaaaaataaaaaacttgactataaactgattactttttttattttacccccaagtaaagaagttttgtttgaaagattatcaaatagagatatgaaagataaacttattgttgaggaaagaatgaaacagtttggtagagatgttttacattggataaattatgattatgtagtcataaatgatgacttaaaaagctgctattcaaaaattataaatttgattaatgcagaaatcaaaaatgattcaaaagattatgacttagaatttgttagaagtcatgttgaaaaactaactacttaa

SEQ ID NO: 252628 - DNA, 607 bp, Unknown
  Bacterial polypeptide expressing nucleotide sequence isolated from the Sargasso Sea
aatgcccgtgactgctaacgcctcacttttcgtcattgcggcaccatcgggtgccggcaagacgacgctcgtcaagaagctgatcgagaagaacccttccttgacgttttcaatctcgtacaccacacgcaaacagcgatcgaccgaggagcatggccgcgattattttttcgtcgacaaggacaccttcaatgcgctgaaggaacagggcgagttgctcgaatcggcgatcgtattcgacaaccactatggcacgagccgatcccaggttgaggaacacatggccggaggcaatcatgtcctgctggaaatcgactggcaaggtgcggaacaggtgcggacctcgatgcctgattgcgtgactattttcatcctgccgccatcccgcccggaactggaacgacggctgcgcgggcgaaagacggattccgacgaggtaattgaacgtcggctgcgggacgcgctgggtgacatgtcccactggcacgaatttgaccacgtcatcgtcaacgacgacctcgaccaggcggtcgaggatctccaggctatcatcgagggcgagggccggaattcgcgggtcagcaactccgtcctcgaggaacgggtt

SEQ ID NO: 252629 - DNA, 628 bp, Unknown
  Bacterial polypeptide expressing nucleotide sequence isolated from the Sargasso Sea
tataaaagaaaaacctatgatgtttgtattgtcctcaccttcaggagcaggaaaaactactctaacaaaaaaacttgcaaaagataattcaaactttacgatttcaatttctcatacaacaagaaagcctcgtcccatggaaacaaatggcaaggattattattttgtaagtgaaaaagaatttaatacattggaaaaaaataatgatttttttgaacatgctaaaatttttgataatttctacggcacacttaaaaaacctgtaatagattttttaaaaagtggtaaggatgttttgtttgatatagattggcaaggcactcaacaattaaaaaatattaaaaatttaagtctagttactttttttattctacctcctgatattaaaaccttaaaagaaagactattaaatcgtcacgaaggtcaagaagaattaattaaaaaaagaatggaaaagtttagtgaggaagtttctcattggaacgaatatgactatgttgttgtgaatgacgatttagatatatgtaataaaaaaatattagaaataattacctccgaaaaaaaaggactaaggcaaaatcaaaatgttgaagaaattaaaatgaagatcagtgaactaactggttag

SEQ ID NO: 252630 - DNA, 546 bp, Unknown
  Bacterial polypeptide expressing nucleotide sequence isolated from the Sargasso Sea
aaaaaaaatttaaaatatcaatctcatttacaacaagaaaaccaaggacaaacgagacgaatggaaaagattatttttttgttgaggaaagtgaatttaaaagattaataaaagatcaggacctattagagcatgcaaaagtttttgaaaattattatggatcctctaaaagccaagttttaaatcatctaaaaaaaggaaatagtgtaatttttgatatcgattggcaaggagcagaacaaattaaaaatcaaaaactaaattataaattaataacattttttatcttaccaccaagtaaagaagaattatttaaaaggttaaaaaatagagatatgaaagataaaaatatagtagatgaaagaatgaaacaatttaatgaagatattaatcattggaaaaattatgattttgttgtgatcaacgataatttagaaaaatgttataaagaaataattaatttaatcgataaaaaatctaataatttaaaaattgatcgtgattcattaaaaattgaagatcatataaaaaagctaagaaactaaa

SEQ ID NO: 252631 - DNA, 634 bp, Unknown
  Bacterial polypeptide expressing nucleotide sequence isolated from the Sargasso Sea
catgcccataaataatgatggggtaatgattatattatcttctccttctggagctggcaaaacaacacttgtaaaacttctttcaaaattggaaaattttgaggtatcaatatcacacactacaagacagcctagggataatgaaattccaaataaagattattattttgtaaatgaagatgagtttcaaagattaataaaaaatcaagaatttttagaatatgctaaggtgttcagtaatttatatggtaccacaagaactccagtaatcgataatttaaacaagggtaaaaatgtattatttgatattgattggcaaggagcagaccaaattaaaaataaaaaacttgattataagttattaagtttttttatactaccaccaagtagagatgttttgtttgagaggcttacaaatagagatatgaaagataaagtaattgtagaggaaagaatgaaacagtttagtagagatgtacttcattggataaattatgattatgttgttataaatgatgagcttaataattgttataataagatatataatcttattaaagctgaattaaacgagggatcaaaagattacgatttagagtatataagaaatcatattgaaaaattaacttcttaa

SEQ ID NO: 252632 - DNA, 505 bp, Unknown
  Bacterial polypeptide expressing nucleotide sequence isolated from the Sargasso Sea
aaaatacaattcctttcgaatatcagtttctcatacaactcgtaaaccaagaactaatgaagtagacggggttgattacaattttgtatctgaaaaaaaatttcaaaaattaataaataatggagaattttatgaatatgctaaaatttttggaaattattatggaacttcaaaaaaaactgtaaatgaattaataaaaaaaaatgacataatttttgatattgactggcaggggactaaacagttatcaaagtttaaagaattaaatttaataaaaatttacttattaccgccaaataaaaatgaactaaaagaaagactgattaaaagaaatcaagattctcctcaagaagttcaaaaaagattcaaagcattcgacgatgacataaaacattgggcagactatgattatgtaataattaataaagatttagaaaattgttatcaacaaatagaaaaaattatttcaaccaataaaaacaagcaattaatttctttcaaataa

SEQ ID NO: 252633 - DNA, 490 bp, Unknown
  Bacterial polypeptide expressing nucleotide sequence isolated from the Sargasso Sea
aatgtctttgacaggtgatggtttgataataattttatcatcaccctcaggtgcaggcaaaacaaccctcgttaaaaaattatcaaaattaaacaacttcattacttcagtttcacatactaccagacctcccagaacaaatgaaacaaatggtaaggattatttttttatctcaaaaaaaaaatttaaatcattaataaaaaaaaaaaattttttagagtatgcgaaagtatttgacaactactacggctcaagcaaaaattttgtattaaaaaatttaaaaaaaggtaaaaatgtattatttgatattgattggcaaggtactgaaaaaataaaaaagcaaaaatttaattttaaattaattactttttttatattacccccaagtagaaaaattttatttaaaagattatcaaatagagacatgaaggataagctaatagcatctcaaagaatgaaacagttgataaagatgtttgcatggaaaaaa

SEQ ID NO: 252634 - DNA, 563 bp, Unknown
  Bacterial polypeptide expressing nucleotide sequence isolated from the Sargasso Sea
catgtccgataatcacgaggggataatagtaattctatcatctccatcgggtgcaggaaaaacttctcttgttaaagaaatttctttaaaaaatgattattctatatctatttctcacactacacgtaaaccaagattgaaagaaattaacggtaaagattatttttttgttaatcaagaagagtttaaaaaattaatttttacaaataaatttttagaatatgccaaagtttttaataattattatggctcatctgaagaagttgtttttgaaaaattgaataaaggacaaaatgtaatttttgatattgattggcaaggaactgaaaaaataaaaaaaaaaaaattaaaatataaaataataacaatatttatactcccaccctctagagaagaattatttaatagacttttaaacagagatcaaaatgatgaaaaaaatgcaatggaaagaatgaggcaatttgatagggatgttgttcactgggaaaactatgatttagttgtaatcaatgatgattttaacaagtgttatgaaaaaataattaaattcattaaattaa

SEQ ID NO: 252635 - DNA, 358 bp, Unknown
  Bacterial polypeptide expressing nucleotide sequence isolated from the Sargasso Sea
ttttgttgatgaaaaaacatgctcaggagtaagcgtaatatttgatattgatgttcaaggttttaaacaagtaaaacaaacctcgcaagataatgtctcaatttttattctacctccgtcattggaggaacttgaaaaaaggctatttaatcgtggttcagaatcttcagaaagcattaaaaaaagactagaaaatgcacttattgaattaagatctgctgaaatatttgattatgttgtagtaaatgacgaatttgacaacactattaaaattttaagttcaattctatttgatgaaaacattgaatataataatgaaaacgcaaagaatatattaaaagaattattggataattaa

SEQ ID NO: 252636 - DNA, 622 bp, Unknown
  Bacterial polypeptide expressing nucleotide sequence isolated from the Sargasso Sea
aatgtccataaaaaaagatggaacaatggtgatattgtcatctccatctggggctggcaaaacaactctagtaaaattactctctgagcaaaaaaaatttcaaatttcaatttcacatacaactagaaaaccccgtattaacgaaatagatggaaaagattattattttgtaaatcatgaatattttcagcaatcaataaaaaatcttgaatttcttgaatatgctgaagtttttaaaaatttttacggcacaaaaaaagatcctgtaattaaatttttgaaagatggcaaaaatgtaatttttgatattgactggcaaggagctcaacaaataaaaagtagaaaacttaagtataaacttataacgttctttgttttgccaccaagtaaagaaatattatttcaaagattatcaaatagagatatgaaagataagttaatagttgatgagagaatgaaagaatttgagaaagatattcttcattggaaagattatgattacgtagttgtcaacaacaaattagatgaatgctacgatgaaatttcgactttaattgagtgtgaaataatgaataaaaaaatcatttacgataaaaagaaaattgaaagtcatatgaaactt

SEQ ID NO: 252637 - DNA, 448 bp, Unknown
  Bacterial polypeptide expressing nucleotide sequence isolated from the Sargasso Sea
gatgcatgataataaaaatatcatggtagttttatcatctccctctggagcaggtaaaacgacgattacaaaaaaaattcaacaaaaatttagttcctttaaaatatctgtatctcacactacaagaaagccaagacctaacgaggtaaacggtgttgattatcactttgttaactcagaaaaattcaaacttttaataaatgaaaataaattttatgaatatgcaaaaatattcgataattattatggaacttcaaaagaaattgttgataatttaatcaaaactaacgacataatattcgatatagactggcaaggaaaccaacaactttcaaaatataaaaatttaagtttaattaaaatatttattacaactaaaaataaagaagaagttaaaagtagattaatgaagagaaatcaggacagcaaagaagaagtaaaaaaaagg

SEQ ID NO: 252638 - DNA, 625 bp, Unknown
  Bacterial polypeptide expressing nucleotide sequence isolated from the Sargasso Sea
aataaagacgggataattatagttttatcgtctccgtctggagcaggtaaaacaacattagtcaaaaaaatagccaaagaaaaaaaatttaaaatatcaatctcatatacaacaagaaaaccaagaacaagcgagtcaaatggtagagattatttttttatagaggaaaacgaatttaaaagcttaattcaaaatcaggaatttttagaatacgctaaagtttttgaaaattattacggatcttccaaaagtcaagtattagaacatttaaaaaatggtgacagtgtaatttttgatattgattggcaaggaactgagcagattaaaaagcaaaaacttaattataatttaattacattttttattttaccacctagcaaagaagaattatttaaaagattaaaaaatagagatatgaaagataaaaatattgttgaagaaagaatgaagcagtttaatgaagatatcaatcattggaaaaattatgattttgttgtaatcaatgataatttagaaaaatgttataatgaaatagtaaacttaattaataaaaaagttattaattcagaaattaactatgatttatcaaaaattaatgaacatattaaaaaactaagagattaat

SEQ ID NO: 252639 - DNA, 634 bp, Unknown
  Bacterial polypeptide expressing nucleotide sequence isolated from the Sargasso Sea
atgtccgataataatgaagggataatagtaatattatcatctccctcgggcgctggaaaaacttcattagtaaaagaaatttctttaaaaaataattattctatatcgatttctcataccacaagagagccaagagctaacgagattgatggtattgattatttttttatcaatcaagaagaatttaaaaaattaatacataaaaaaaaatttttagaacacgcaaaagtatttaacaattattatggatcatccaaagatgtcgtttttgaaaaattagaaacagggcaaaatataatttttgatatagattggcaaggaactgaacaaataaaagaaaaaaaacttcagtataaaataataacaatatttatacttcctccttcaagaaaagaattgttcaaaaggcttttaaatagagatattgatgacgaaaaaaatgcaatggaaagaatgaaacagtttgataaggacgttgttcattggaaaaactatgatttagtagtaattaatgatgattttaatatgtgctatgaaaaaataattaaatacattaattcaagaaaaaataatattatagagaattatgataaaaaagaaattagtaagcacgttttagagctacttaagtaaa

SEQ ID NO: 252640 - DNA, 631 bp, Unknown
  Bacterial polypeptide expressing nucleotide sequence isolated from the Sargasso Sea
atgtcgagtgataaagggcaactcatagttatttcagctccctcaggagcaggaaaaacatctattattaagaacgttataaaaaaactaaatgatgaaaatagaaaatcaaagttttctgtttctcacacaacgagattaccgagagaaggtgatattgatggcagcgattatttttttgtatcaaatgaaatttttgatgagctttatgaggctggaaactttatagagaccgcagaggttcacgattataaatacggaacgtcaaaagactttattgatgagaacataaaccaaggaataaatgtctttcttgaaatagatgtacaagggtttcaaaaactacgaaatagaaatattgaattcagatcaatgtttatattgcctccatcaattgaagagttaagaaaaagaattcaaaaaagaggtcttgattcagaggatgttattgaaaaaaggatgaaaaatgcactaaaagagttaggtgaagcagaagaatatgattatttggttataaatgatgtttttgaacaagccattgaagaattgcttgaaatagtcataaataaggactttaaagaccaaacacatgataaaaaactaaagatattgcaagatttgttgtcttaaa

SEQ ID NO: 252641 - DNA, 616 bp, Unknown
  Bacterial polypeptide expressing nucleotide sequence isolated from the Sargasso Sea
atgaaagataaaactggaaaattagtggtgatttctgctccctctgggactggaaagacgacagtagttaaaaaactattggagaaaattcctaatattgttgcctctgtttccttcactacaaggccaatgcgtgaaaatgaacgggaaggcattgattatttttttgttaataaaagaaaatttgaagccatggttgataacgaccaatttattgagcatgcaactgtattcggtaattactatggtacacaaaaagagaaccttttcagcaatcttaaaaaaggaaaaaatgtaatccttgaaattgattggcaaggcgcacagcaggtcaaagaaaaaatgccttcgtgtattatgatctttttaattccaccgtccaaagaggttcttctgtcacgattaaaaaataggggcacggattctgaaggagaaattgagaatcgcttcaatcaggcggtttcagatttaaatgagtcaaataaatttgatcacgtgttagttaatgatcaaattgaagtagctgttgagaatatctctcattgtatagatggaaacttgaatcaattaaaaaaatctcaattggtcgacaaagctctagaaagtttctatgaaa

SEQ ID NO: 252642 - DNA, 625 bp, Unknown
  Bacterial polypeptide expressing nucleotide sequence isolated from the Sargasso Sea
catgaaagacaaaactggaaaattaattgtgatttccgctccgtctgggactggaaaaacgacagtggtaaaaaaattattagagaaaattcctaatatcattgcctctgtttcctttactacaagacctatgcgagaaaatgaacgagagggcgtcgactatttttttgttgataaaagaaagttcgaaaccatggttgatgataaccagtttattgagcatgcaactgtatttggcaattattacggtacacaaaaagagagtcttacgagtaatctaaaaaaaggaaaagatgtaatccttgagattgattggcaaggtgcgcagcaggtcaaagaaaaaatgccttcgtgtattatgatctttttaattccaccgtccaaagaggttcttctgtcacgattaaaaaataggggcacggattctgaaggagaaatagagaatcgcttcaatcaggcggtttcagatttaaatgagtcaaataaatttgatcacgtgttagttaatgatcaaattgaagtagctgttgagaatatcgctcattgtatagaaggaaactttaatcaattaaatcaatcagaattggttgataacgctttgaaaagtttctatgaaacaaattga

SEQ ID NO: 252643 - DNA, 634 bp, Unknown
  Bacterial polypeptide expressing nucleotide sequence isolated from the Sargasso Sea
catgaccgataatcatgaagggataatagtaatattatcatctccatcgggtgctggaaaaacttcattagtaaaagaaatctcttcaaaaaataattattctatatctatttctcacaccacaagaaaaccaagatctaatgaaattgatggaaaggattatttttttgtagatcaggatgaatttaaaatgctaatttctcaaggaaaatttctagaatatgcaaacgtatttaataattattatggatcatcagcagatgttgtttttgataaattaaacaatggtcaaaatataatttttgatattgattggcaagggactgagcaaataaaagaaaaaaaactaaattataaaataattactatattcatacttcctccatctagaaaagaattattcaatagacttttaaatagagataaaaatgataaaaaaaatgctacagaaagaatgaagcagtttgacaaggacgtaattcattggaaaaattatgacttagttgtaattaatgatgattttaataagtgttatgacaaaataatcaaatatattaattcaaaaaaaaacaataattcaattaattatgataaaaatgaaattagtgaacacgttttagatctacttaagtaa

SEQ ID NO: 252644 - DNA, 631 bp, Unknown
  Bacterial polypeptide expressing nucleotide sequence isolated from the Sargasso Sea
atgtcgaatgaaaaaggccaacttatagttatttcagctccctcaggagctggaaagacatctattattaagaatgttataagaaaactaaatgatgagaacaaaaaatcaacattttctatttctcatacaacaagattaccaagagatggtgatatagatggtagcgattatttttttgtatcaaatgaaatatttgatgagctttatgaagctggaaactttatcgagaccgctgaggttcatgactataaatatggaacatcaaaagactttattaatgagaatataaatcaaggaataaatgtctttctcgaaatagatgttcaaggatttcaaaaactacgaagtaaaaatgttgaattcaggtcaatgtttatcctgcctccatcaattaatgagcttagagagcgaatacaaaaaagaggtcttgattcagaagtcgttattgaaaaaaggatgaaaaatgctttaaaagagttaggtgaagcagaggaatatgattatttagttataaatgatgtttttgaacacgctattaaagaattgcttgaaatggttgtaaataatgagtttatagacaattcacgtgataaaaaactaaagatattgcaagatttgttgtcttaga

SEQ ID NO: 252645 - DNA, 241 bp, Unknown
  Bacterial polypeptide expressing nucleotide sequence isolated from the Sargasso Sea
atgagtaattcaaagctaataattttttccgcaccatcaggagctggcaaatcgtctttaattaagaaacttatcgaattaagtgaaagtacaattgaattatctgtttctgtaactactcgagaaccaagagacggcgaagttcatggcgttgattatttttttatatctaagcaagaatttttgaagcttgaaaaacaaaatgcttttttggaatcagctaatgtacacggctttcatt

SEQ ID NO: 252646 - DNA, 498 bp, Unknown
  Bacterial polypeptide expressing nucleotide sequence isolated from the Sargasso Sea
aatgtccggaaataatgaggggataattgtaatattatcatctccctctggtgcaggtaaaactaccttagttaacgaaatttcaaaaagaaataattttcaaatttcaatatcccacacaacaagaaaacctcgtccaaacgaaacagagggtaaagactattattttgtcagcaaacctgaatttaaaaatttaattgatgaaaataaatttctagaatatgcaaaagtttttcaaaattattatggctcatctaaagatgttattttcaaaaaacttaacaatgcacaaaatgttatttttgatattgattggcaaggaacggaacaaattaagagccaaaaacttaattataaaatagttacaatatttattttaccaccaagtcgagatgaactttacactagactattaaatagagatagaaatgatgaaaaaatagctaaagaaagaatgacccaatttaatgaagatgtgttacattggaaagactataa

SEQ ID NO: 252647 - DNA, 631 bp, Unknown
  Bacterial polypeptide expressing nucleotide sequence isolated from the Sargasso Sea
aatgaaagatgctaagctttttttagtttctgctccatctggtgctggcaagtcatcattgatagatgctgttctagccagagcaaataagtctgatttacccttagaactatctgtatcttatacaacaagattacctagaaaaggagagtctaatgccaatgagtatttttttgtttctaaaaaagactttctagataaaaaaaattcgaatttttttcttgagtttgccgaagtccatggcaatttgtatggtacctctgttgattttgtagaatcaaaactgtctttgggagtaaatttaattcttgaaatcgatgtacaaggatttcgacaaattaatgatttatcaatgaattatgagtctatttttattctccctccttcgattcattctttagaagagcgcataagaaacaggggagacgaggatctaaatgcaattgatttaagattaaaaaatgcaaaagatgagttgacgtatgcaagtgaatacaagcaccttatagtcaatgactcttttaataaagcggctgatgaattattcaatatcattgctcaaaatgagtccttgaatgagataaataacgaagaagtgcaacagtttttagctcagctattgtcttattag

SEQ ID NO: 252648 - DNA, 625 bp, Unknown
  Bacterial polypeptide expressing nucleotide sequence isolated from the Sargasso Sea
atgaatgacaaaactggaaaattaattgtgatttctgctccatctgggactggaaaaacgacagtggtaaaaagattattagagaaaattcctaatatcattgcctctgtttcctttacaacaagacctatgagagaaaatgaacgagagggcatcgactatttttttgttgataaaagaaagttcgaaaccatggttgatgataaccaatttattgagcatgcaactgtatttggcaattattatggtacacaaaaagagagtctttcgagtaatcttaaaaaaggaaaaaatataatccttgagattgattggcaaggtgcacggcaggtcaaagaaaaaatgccttcctgcattatgatcttcttaattccgccatccagagaggttcttctatctagattaaaaaaaaggggtactgattctgaaggagaaatagaaagtcgcttcaatcaggccgtttctgatctaaatgagtcaaacaaatttgatcacgtattagttaatgatcaaattgaagtggctgttgagaatattgctcattgtatagaaggaaacttaagtctattgaatcaatcagggttggtcgataaggctctgaaaagtttctatgaaacaaattgac

SEQ ID NO: 252649 - DNA, 622 bp, Unknown
  Bacterial polypeptide expressing nucleotide sequence isolated from the Sargasso Sea
atgtcgagtagagctaaagctagattgattattttttctgctccatcaggggcaggaaaatcttctttaatacaagaagttatatcgcaaagttctggaaatattcaactgtcaatttctgcaaccacgagaccaccaaggactggtgaagagcatggaagagattatttttttatatccgatgaagaatttaatgaactaaagaaacaaaactcttttgttgaacatgcaaatgtttatggttatcaatatggaactttaagatctttcgtagatgaaaaaattgaaaataatattaacgttattcttgatatcgatgttcaaggttttgatctgataagaaattctataaaagatgacatatcaatttttataataccaccctcaatatcagagttagaaaaaagactagtttcaagaggattagattcagatgaagttataaaaaagaggttaaagaatgtaaagactgaacttaaatatgctgaattatatgactatattattttaaatgatcagtttgaagatactcttaatgaattaacctcaataatttataatgaaaattacaactataataaagaaaccaatgtaaacttgttgaaagatttattggattaat

SEQ ID NO: 252650 - DNA, 337 bp, Unknown
  Bacterial polypeptide expressing nucleotide sequence isolated from the Sargasso Sea
ctcaggaataagcgtaatacttgatattgatgtacaaggttttaaacaagtaaaacaaacctcgcaagataatgtctcaatttttatcctacctccgtcattggaggagcttgaacaaaggttatttaatcgtggttcagaatctgcagaaagcattaaaaaaagacttaaaaatgcacttattgaattaagatctgctgaaatatttgattatgttgtagttaatgacgaatttgacaaaactattaaaattttaagttcaattctttttgataaaaacattgaatataatgatgaaaatgcaaaaaatatattaaaagaattattggataattaa

SEQ ID NO: 252651 - DNA, 556 bp, Unknown
  Bacterial polypeptide expressing nucleotide sequence isolated from the Sargasso Sea
atgatcaattttattactatttcagcaccttcagggtcaggtaaaacaacattgtgcaaagcactaaggaaagtaaaatctgatattgaatggtcagtttcttatacaactcgattaaaacgagataatgaaaaaaatggtatagattatcattttatcacaattaataaatttgaagagtttatattgaatgaaaaatttgtggagtgggaaaatgttcatggaaattattatggtactgcaaaagacactcttaaagctgctattgcaattgaaaaaacattattgttagaaatggatgtaaaaggttcaatgtctataaaaaaactttacccggataatacattctccatatttattttacctccgagcctggaagacttaagggctcgattaaaaaaacgaggtacagattctgatgaaagaattgaaattagattaaaaagatatcagcaagaaatagagtttcaagatagatttgatgcagttatgattaatgaagatcttgaatcagcaaagtttgaattaattaatattgttaaccaacttaactaag

SEQ ID NO: 252652 - DNA, 634 bp, Unknown
  Bacterial polypeptide expressing nucleotide sequence isolated from the Sargasso Sea
atgccctcaaaaaaagaaggggtgatgatagttttgtcctctccttcaggagctggtaaaacaactttagtaaatatgttatctgagttagataactttgaaatatcaatctcacataccacacgtcaaccaagacccaacgagactgctaataaagattatttttttgtaaaagatgaagaatttaaaaaactaatcaaaaaccaagaatttcttgaatatgcaaaagtttttaataatttttatggaacaactagaacaccagtaattaatagattagatcaaggtaaaaatattttatttgatattgattggcaaggtgcagatcaaattaagaacaaaaaacttgattataagttgataactttttttatattacccccaagcaaaaaagaactgtttgaaagactctctaatagagacatgaaagataagcttattgttgaagaaagaatgaagcaatttgaaagagatgttttgcactggataaattatgactacgtagtaataaatgataatcttaaaaaatgcttttctagaataaaaaatttaatagaagctgaaataagtaatggctcaaaagactacgatttagaatatataagaagtcatataaataaattaacttcttaaa

SEQ ID NO: 252653 - DNA, 631 bp, Unknown
  Bacterial polypeptide expressing nucleotide sequence isolated from the Sargasso Sea
atgaaagatccaaaactatttttggtttctgctccgtctggtgctggcaaatcttcattaattgatgcggttttagctaaagcaaatcagtctcatttactcctagagttatctgtctcttacaccacaagatctccaagaaaaggtgaatcaaatggtaatcaatatttctttatttcagaagaagagtttatagagaaaaaaaattctaatttttttcttgaacatgccaaagttcatgacaattggtatggaacttctctagattttgtgcagttaaagctaggctcaggagtaaatttaattcttgagattgatgtgcaagggtttaggcagattaatgatttatcttttagttatgattcgatttttattctccctccatccatgcattctctagaagaaagaataaaaagtaggggagacgaagatctagagtcaattaatttaagattaagaaatgcaaaagacgaattagcctatgcgaatgagtataggcatattattatcaacgattcttttgatgatgcagaaaatgagctttttggaattattgctcaagaaaagtcgtttaataggcaaaatactgaagaagtccaacagtttttagctcagctattgtcttattagg

SEQ ID NO: 252654 - DNA, 610 bp, Unknown
  Bacterial polypeptide expressing nucleotide sequence isolated from the Sargasso Sea
atgataattttatcttctccttccggagctggtaaaactactctagtaaaaaaattgtctgaaaaagataattttgaaatctccatatcacataccacaaggcaaccaaggcctaacgaaaatcaaaataaggattatttttttgttgatgagctagagtttagaagattaattaaaaatgaagaatttttagaatacgcaaaagtttttaataatttctatggcacaactagaacaccagtaatagataaattaaataaaggcaaaaatgtactttttgatattgattggcagggagctgatcaaattaagaataaaaaattagattataaattgatcaatttttttatactccctcctagtagagaagttttatttgaaaggctatctaagagacatgcaagtgataaattaatagccgaagagagaatgaaacaatttgaaagagatgtgttacattggataaactatgattatgtagttataaataatgacctaaatgaatgtcataacaaaataactaatttgattgatgcagtaataaataatggctccaaagattatgatctagattacattagaggccatgttgataaactaacttcttaaa

SEQ ID NO: 252655 - DNA, 640 bp, Unknown
  Bacterial polypeptide expressing nucleotide sequence isolated from the Sargasso Sea
atggccgagagaaaagctgggataatcgtaatattatcatctccttcaggcgcaggcaaaacgacgctagtaaagaaaatttcttcaagaaataatttcaaaatatctatttcacatactactagaaaaccaagaattaatgagaaagatgggaaacattatttctttgttaaaaataaacaatttaaaaaactcataaaacaaaaaaaatttttagaatatgcaaaagtttttaaaaattattatggctccctcaaagaaaatgttgtggagaaacttgaaaaaagtgagaatgttatttttgatatagactggcagggaactcagcagattaaaaatattaaattaaaatataaaattataactatttttattcttccaccatctaaagaagaattatttaacagattattaaaaagagataagaaagatcaaagaattgcaagtgagcgaatgaaacaatttaaaacggacatcactcattggaaagattatgattatacagtaatcaatgataaaattgaaaaatgttataaacaaatattaaagttttatagccaacaaaaccataaattaaaaaaaaatccaaatattaataagcaactttataaaaatcacataaagaaattgttaaactaaa

SEQ ID NO: 252656 - DNA, 622 bp, Unknown
  Bacterial polypeptide expressing nucleotide sequence isolated from the Sargasso Sea
tttggtcattaaaagtaataatttttgtatagttctatcatcaccctctggtgctggtaagacgactatatcaaaaatgcttttaaaaaaagacccttctatatctttatcaatatcttgtacaacaagacctaaaagaaaaggggagatcaataaaaaagattatatttttgtatcagatgcagagtttaaagagagcataaaactaaataaatttattgagcatgcacaagtgtttggttttaaatatggtactttaaaaaaaactattaaaaattttttcatcaaaaagaaagatgtattatttgatattgattggcaagggtatcaacaattaaaacaaagtaacatggaggttgttgggatatttatattaccacctagtaaaaaagaattaattaaaaggttaaaaattagagatagagacacaaaggatgagatgaaaaaaagaatgagtttagtacaaaatgaaatatctcactttccagagtatgattatgttgtagtaaataaaaatttaaataaatgtgttgatcagataaaaaatataattgactctgaaaggttaaagaggtctagattatccaacattactaattttgtaaataaatttagaagttag

SEQ ID NO: 252657 - DNA, 631 bp, Unknown
  Bacterial polypeptide expressing nucleotide sequence isolated from the Sargasso Sea
aatgtcgagtgataaaggacaactcatagttatttcagccccctcaggagctggaaaaacatctattattaagaatgttataaaaaaactaaatgatgaaaatagaaaatcaaagttttctgtttctcatacaacgagattaccgagagaaggtgatattgatggcagcgattatttttttgtatcaaatgaaatatttgatgagctttatgaagctggaaactttatagagaccgcagaggttcatgattataaatacggaacatcaaaagactttattgatgagaatataaaccaaggtataaatgtctttcttgaaatagatgtacaggggtttcaaaaacttcgaaatagagatattgaatttagatcaatgtttatattgcctccatcaattgaagagctaagaaaaagaattcaaaaaagaggtcttgattccgaggatgttattgaaaaaaggatgaaaaatgcattaaaagagttgggtgaagcagaagaatatgattatttagttataaatgacgtttttgaaaacgccattgaagaattgcttgaaatagtcctaaatatgggttttaaagaccatatacatgataaaaaactaaagatattgcaagatttgttgtcttaa

SEQ ID NO: 252658 - DNA, 535 bp, Unknown
  Bacterial polypeptide expressing nucleotide sequence isolated from the Sargasso Sea
aatgataattttatcctctccctctggagcaggtaaaactacattagtaaaaatgttatctaagttagataactttgaaatctccatatctcatacaaccagacaacctagacataacgagactcctaataaagattatttttttgttgatgagaaagaattcaaaaggttcattaaaaatgaggaatttcttgaatatgcaaaagtttttagtaatttttatggaactacaaggacaccagttatcaataaacttaataaaggtaaaaatgttttatttgatatcgattggcaaggcgcggaccaaataaagaacaagaatttagattataagctaatttctttttttattttaccaccaagtaaagagatattgtttgagagactctccaatagagacatgaaagataaattaattgctgaggaaagaatgaagcagtttagtagagatgttttgcattggattaattatgattacgtagttataaatgactctattgaaacttgttactccaaaataaaaaatttaattcat

SEQ ID NO: 252659 - DNA, 631 bp, Unknown
  Bacterial polypeptide expressing nucleotide sequence isolated from the Sargasso Sea
atgtcgaatgaaaaaggccaacttatagttatttcagctccctcaggagctggaaaaacatctgttattaggaatgttataaaaaaactaaatgatgagaacataaaatcaacattttctgtttctcatacgacaagactaccaagagatggtgatatagacggtagcgattatttttttgtatcaaatgaaatatttgatgagctttatgaagctggaaactttattgagaccgccgaggttcatgactataaatatggaacatcaaaagaatttattgataacaatattaatgaaggaataaatgtctttcttgaaatagatgttcaaggatttcaaaaactacgaagtaaaaatgttgaatttaggtcaatgtttatcttacctccatcaattaatgaacttagagagcgaatccaaaaaagaggtcttgattcagaaggcgttattgaaaaaaggatgaaaaatgctttaaaagagttaggtgaagcggaggaatatgattatttagttataaatgatgtttttgaacatgctattgaagaattacttgaaatggttacaaataatgactatttagatcattcacgtgataaaaaactaaagatattgcaagatttgttgtcttaga

SEQ ID NO: 252660 - DNA, 595 bp, Unknown
  Bacterial polypeptide expressing nucleotide sequence isolated from the Sargasso Sea
aatgtcatcaaaagatggtataatgataattttatcatcaccatctggtgcaggcaaaacaacgcttgttaaattactagctgaaaacaagaattacaaaatatctatttcccacaccacaagaaaacctagagaaaatgaagtttcaggtgaagattatttttttacgaatgaaaaaaattttcaagatttaataaaaaaaaacgaatttctggaacatgccaaagtttttaataatttttacggaactagtttaaaacccgtaagcgaaagccttgataaaggcttaaatgtaatatttgatatagattggcaaggagctcaacaaattaaaaataaaaaacttaaatataaacttattacattttttgtattaccacctagtaaagaagttttatttaatagactttcaaatagagatatgaaagacaaggttattgtcgaggaaagaatgaaagaatttaacaaagatatattacattggaaagattatgactatgttgtaataaatgataaattagaagactgttttgagcaaattagcttattagtcgattcagaattaaataatactaagaataattataattttaaa

SEQ ID NO: 252661 - DNA, 476 bp, Unknown
  Bacterial polypeptide expressing nucleotide sequence isolated from the Sargasso Sea
aatgataattctatcatcaccgtcaggagcaggtaaaactaccctagtcaaaaaaatctcaaaggaaaaaaattttaaagtttctatatctcataccacgagagagccaagagagaatgagataaatggagttgattactattttacatcactagataattttaaaaaattggtcgaagaaaatgcttttctagaatatgcaaaagtatttcagaatctttatggatctacgaagaaacaagtttttaactatctagaaaatggttacaatgtgttattcgatattgactggcaaggtgctcaacaaataaaaaatcaaactttaaatcatcaattaatctcatatttcattttaccaccctctagagaaatactatataaaagattaatttctcgaggtgaaacaaatgatgaaacaatacaaatgagaatgaaacaattcgatagagacgtacttcattggattgattatgatt

SEQ ID NO: 252662 - DNA, 613 bp, Unknown
  Bacterial polypeptide expressing nucleotide sequence isolated from the Sargasso Sea
aatggtaatactatcttctccttcaggcgcaggtaaaacgactttagtaaagaaaatcgccctaaaaaaaaactttaacatttcaatttctcatacaacaagaaagccaagatcaaatgaaaaggatggaaaggattaccattttgttaatcataatcaatttaaaaagttaataaaaaataacaaatttttagagtacgcaaaagttttcaaaaattattatggatcattaaaagagactgttataaaaaaattgaaaaaaggtgagaatgtaatatttgatattgattggcagggtactagacagattaaaagaaaaaaattaaaatataaaattataactgtttttattttaccaccttcaaaaaaagaattatttaaaagactactaaaaagagatcagaaagataaaaaaattgctaaagaaagaatgaaacaattcaaagatgatgtattgcattggaaagattatgattttacagtaataaatgacaagttagataaatgctacgagtcgataaatgattttataaatcaacaaaaaaaaaataataaaacttttaaatatgatagaaaatttataaaaaaacatattaattatttaattaattga

SEQ ID NO: 252663 - DNA, 664 bp, Unknown
  Bacterial polypeptide expressing nucleotide sequence isolated from the Sargasso Sea
tatgaatataaatttagctagacaaaaaggtgttatgataatcatatcatcaccttctggcgcagggaaaactaccttaacaagaaagttagtttcagatctcaagaatgcggtattatcgatatctgttacaacgcggaagaaaagagacaatgaagaggatggcttacactattatttcgtagatgatgaagtttttaataaaatggttgatgaaggcaacctcttagaacatgcgaatgtttttggttttaattatggcaccccaaaagagcgggtaattgaaaatatccaaattggaaatgatgtgatttttgatattgactggcaaggcgcacttcaattaaaaaataattatgaggataatatcatttcggtattcatactgccaccaacggcaactgaattgatgggcagattgataaagagggaccaagactcaattgatacaataaaaaatagactgaatgcggcatatgacgaaataaagcactggaatgaatatgattacgtaattatcaatgatgatctcgatgtggcatattcagaattaaaatctatagttacttctgaaaaaatgaaaataactaaggcaaacactactaacattagtaagcatgtcgatcatttgcttgaagagttatcagacagattaaaagactag

SEQ ID NO: 252664 - DNA, 634 bp, Unknown
  Bacterial polypeptide expressing nucleotide sequence isolated from the Sargasso Sea
atgtccgcagaaaaagacggaataatagttgtattgtcatctccgtctggtgctggaaaaaccacactagtaaaaaaaatttcaatagaaaataattttaaaatttcaatttctcatacaacaagaaaacccagaactaatgaagtaaatggcaaagattatttttttgtaaacaaagaggaatttaaaaatttagttgataaaggtgagtttttagaacatgcaaaagtctttgaaaattattatggatctacaaaaagcaaagtaattgagcggttgaagaaaggtgaaaatgtaatctttgatatagattggcaaggaaccgaacaaataaaaaaaaagaacttaaattataagttgattactttttttattttgccacccagtaaaactgaattatttaatagactaaaaaatagagatatgaaggataaaaatattgtcgaagaaagaatgaaacaattcaatgaagatattaaccattgggaaaactacgactttgtagttataaatgataatattgatagatgttataaagaaattattgagtttattaataagaagattgaaaaatcagatcatacttttgataagaaaaatatccaaaatcacatagtaaatttaagaggataat

SEQ ID NO: 252665 - DNA, 586 bp, Unknown
  Bacterial polypeptide expressing nucleotide sequence isolated from the Sargasso Sea
aatgtcgaatgatttagctgaaaatctatttataattactgctccttcaggcgctggaaaaacaactttgataaaaaatgttatcgaatttgctcaaataaatgatgaaaaagtttttatgtctgtatcacatacaacacgcactcctagatcaaatgaactagatgggacagattattcttttataagtgaagaagaatttaaatccaaaataaatgatcaagtctatttagagcatgcaatagtgcatggcaatctatatggaacaccaaaacaaccaattgagcagcacttacatgatggatttaaagtacttcttgagattgattggcaaggtgcagttgagatcttaaaaacttatcctgatgctcaaagtatttttatttctcctccatcaattgaagaattgcataaaagattacatgaccgaggccttgattcagaagaagttatagcagaaagaatagatggagcaaaactagaaatggaaaaatcctctgaatttaaatatcaaattattaacaattcacttgaaacagcgttcaaaaaccttttaaatatcatcttcagagaaaagcatggctag

SEQ ID NO: 252666 - DNA, 625 bp, Unknown
  Bacterial polypeptide expressing nucleotide sequence isolated from the Sargasso Sea
atgtcgaataatgcaaaaagtgcaaaattattcatctttgcagctccatcaggagcaggtaaatcatctattattaaaaaaattatcagtaaagataaagataatattcaattgtcagtgtcggtaacaactagaccacctcgagatggagaaattcatacaaaggattatttttttgttgatgaaaaagaatttagtgagttaaaagaaaaaaatgcattcattgaatttgcagatgttcatggccaccaatatggcactttaagaaattttgtcaatgaaaaacttaagagtggcataagcattattttagatattgatgttcaaggatacactcaaataaaagatagcatacaagacacaatatcaatatttattattccaccaagtttggaagaattaaaaaacagactcattgcaagaggcctagattcaaaagaagttattgagaagagaatgattaatgcaaaaaaagaacttaatcatgctttttcatttgattatgttgttttaaatgataattttaataaagcattggatgatatttcgaatattatatttatagatgactttgaatatgctaatgataagaacttaaatatattaaaggatttattggattaaa

SEQ ID NO: 252667 - DNA, 637 bp, Unknown
  Bacterial polypeptide expressing nucleotide sequence isolated from the Sargasso Sea
atggccgagaacaatgtaggggtaattgtcatattatcttctccctcgggcgcaggtaaaacaacattagttaaaaaaatttcaaaaagaagaaaatataaaatatcaatttctcatacaactagaaatcctagacttaatgaaaaaaatggtagggattatttttttgtaaataataataaatttaagaaactaatagaggataaaaaatttttagaatatgccaaagtattcaaaaattattatggttcattaagagaaaatgtggtcaagaaattagaaaaaggtgaaaatgttatttttgatattgactggcagggaaccaggcaaataaaaaaaaaaaaacttaagtataagattataactatatttatccttccaccctcaaaaaaagaattatttaaaagattacttaaaagagatcataaagacaaaaagattgcttctgaaagaatgaaacaattcaaaaatgatgtgaaacattggaacgaatatgactttacagtaataaatgacaaattagagaaatgttatgaattaattattaattttataaattcaaaaacaaaatcacccaaatctataaattataataaaaaatttataagggatcatattaaacaattgctaaattgaa

SEQ ID NO: 252668 - DNA, 586 bp, Unknown
  Bacterial polypeptide expressing nucleotide sequence isolated from the Sargasso Sea
aatgtcgaataatttagctgaaaatctatttattattactgctccttctggtgcaggcaaaactactctgattaaaaatattattgaatttgctgaaaccaataatgaaaaagttttcttctctgtatctcatacaacaagaagtccaagaggaaatgaatcagacgaaactgattatttttttattagcgaagaagaatttaaatcaaatattgatgaaggagtatatttagaacatgcattagtgcatggcaatctatatggaacgccaaaaaaggcaattaatgatcatctacaaagaggatataaagtattacttgaaattgactggcaaggtgcagtggaaattttgaagacttatcctgatgctcaaagtatttttatttctcctccttcaattgaagaattgcataaaagattacatgagcgtggacttgattcagaggaggttatagcaaataggatcgaaggagcaaaactagaaatggaaaaatcctctaaatttaaatatcaaattatcaataattcacttgaaacagcgctcaaaaaccttttaaatatcatcttcagagaaaagcatggctag

SEQ ID NO: 252669 - DNA, 637 bp, Unknown
  Bacterial polypeptide expressing nucleotide sequence isolated from the Sargasso Sea
atggccgaaaaaaaagcagggataattataatattatcttctccttcaggcgcaggaaaaactactttagtaaaaaaaatttcattgagaaaaaaatacaatatttcaatttctcacacaactagaaaacctagattgaatgaaaaaaatggtaatgactacttttttgttaaaaataaagattttagaaagttaattaaagataaaaaatttttagaatacgcaaaagtttttaaaaattattatggctctttaaaagagacagtaataaataagttaaaaaaaggagagaatgttatttttgatattgattggcaaggcactaagcaaattaaaagtaaaaaattaaaatttaaaataataactatatttattctacctccatcaaaaaaagaattatttaaaagattattaaaaagagatcaaaaagataaaaaaattgctatagagagaatgaaacaatttaaagatgatgtaatgcactggaaagattacgattacgcagttgtaaataataaaattgaggaatgttaccagtcaataattaaatttattaatatacaaaaaaaacaaaaaaaagtatttagatatgatagaaaactaattaaaaatcatatcaaatatttaataaattgac

SEQ ID NO: 252670 - DNA, 655 bp, Unknown
  Bacterial polypeptide expressing nucleotide sequence isolated from the Sargasso Sea
aatggattctaatttattatcgtcggaggggacgctcttcataatctcgtctccatcgggagctgggaaaagtagcgtttcaaaaaggatattagaaaatgacattaaggtcacgttttcgatctctgctactacaaggccagcacgcgccggtgagattgatggtcgagaatattattttaaaagtcatgcacaatttgatcaaatgatccagtctggggaacttcttgagtatgctgaggtttttgggcaaagatatggcacgccaaagataccggtagaaaaatcattagaaaaaggtttggatgtactatttgatgtagattggcagggcggaatcaaaattagaaactctcacctcagaaaatttgttgtttccatatttattttgcctccctcgatcagtgaattggaaagccgtctaatatcgcggggtctagactcaaatgaggtagtaaattcgcgtatgcttaaatcaaaagaagaaataagtcattggtcggaatatgattatattttgattaataaggatttggaaaaagtccattgggatatcagttcgataattagggctgagagattgaaaagggtaaatcgccaatcactggtagaatttgtaaataaattaaattcagagtttgaagggcgctattaa

SEQ ID NO: 252671 - DNA, 610 bp, Unknown
  Bacterial polypeptide expressing nucleotide sequence isolated from the Sargasso Sea
tatgataattttatcttctccttctggggcaggtaaaactacattagttaaaatgttatctaaattagataactttgaaatctctatatcccatacaacaagacaacctagacccaacgagacgcctgataaagactatttttttgttgatgaaaatgaatttaaaagattcattaaaaatgaggaatttttggagtatgcaaaagtttttagtaatttttatggaacaacaagaacgccagttattgataaacttaataaaggtaaaaatgttttatttgatattgattggcaaggtgctgaccaaattaagaataaaaatttagattataagttaatttcattttttattctaccaccaagtaaagagattttgtttgagcgactttcaaatagggatatgagagataaattgattgccgatgaaagaatgaaacagtttggaagagatgtgctgcattggattaactacgattacgtagttataaatgatagtattgaaacttgttatttaaagataaaaaatttgattgatgcagaaataaacgatggttcaaaagactatgatgctgagtatgtcagaaatcatattgaaaaattaacttcttaa

SEQ ID NO: 252672 - DNA, 625 bp, Unknown
  Bacterial polypeptide expressing nucleotide sequence isolated from the Sargasso Sea
atgtccagctttaaaagaggtggaatgtttgtactttcttctccatctggtgcaggcaaaactacattagtaaaaaaaattgcaagaaataaaaagttttcgatttctatatcacatacaacaagaacccctagaccaaatgaaattaatggtaaagactatttttttattaaaaaaaatcattttaaaaaactcataaaaaaaggaaagtttttagaacatgcccgagtttttgaaaactattatggctcatcaaaagatattgtaataaataaacttaaatccggtaaaaatatcatttttgatatagattggcagggcactaggcaaattagaaataaaaaacttaaatataaattgcttactatattcatattaccaccatcaaaaaaagaattattaaaaagattaattaaaagagaaaaaaaaaacatgagcactgtaaaaaaaagaatgaaaggatttaaaaaggacttatctaaatggagagagtatgattatgtggtaataaatgacgatttaaacgcttgttataaaaaaattttaaaagtaataaataataaaaataaaaatacttttgatagcaatttaattagtaatcacgttaaaaagttactatcttaaa

SEQ ID NO: 252673 - DNA, 637 bp, Unknown
  Bacterial polypeptide expressing nucleotide sequence isolated from the Sargasso Sea
aatggccgaaaaaaaagcagggataattgtaatattatcctcaccttcgggcgcaggaaaaacaactttagtaaaaaaaatatcatcgagaaacagctacaacatttctatttcacataccacaagaaaaccccgagttaacgaaaaaaatggcaaagactattttttcatcaacaatcagaaatttaaaaatcttataaaaaaaaaaaaatttttagagcacgccaaagtattcaaaaattattacggatctcttaaagagacagtaattgaaaatctagaaaaaggcgaaaatgtaatttttgatattgactggcaggggactaaacaaataaaaaataaaaaattaaattataaaataattactatttttattttaccaccttcaaaaaaagaattatttaaaagattattaaaaagagacaaaaaagacaaaaaaattgctagtgaaagaatgaaacaatttaaagatgatgttttgcactggaaagactacgacttcactgtaataaacgataaaattgagaagtgctatagacaaatcatctcttatataaaaaaacaaaaaaaaacaaaaaaaactttaaaattaaaaaaagaacatattaaaaatcatattaataaattaattaattaa

SEQ ID NO: 252674 - DNA, 631 bp, Unknown
  Bacterial polypeptide expressing nucleotide sequence isolated from the Sargasso Sea
atggaccatcccggaaatctatttgtcgtgtcggcacccagcggtgccggcaaatcctccctggtacgcgccctgcgtgaattcgacgcacgcgtctacccctccgtctctcacaccacgcgcgcgccgcgcggccaggaaaagcatggccgtgagtactacttcatctcggacgccgaattcgacgccatggtcgccaacaacggctttgtcgaatgggccaatgtgcacagccgccgctacggcacggccaagaggtctctggaagagcgcatccagagcggcaccgatgtgctgctcgagatcgactaccagggtgccctgcaggtcaagcaggcctttcccaatgccgtgctgatcttcatcctgccgcccagctgggacgagctgcgcgcgcgcctggaaaatcgcggcgaggatgcacccgaagtcattgagatgcgcctgaagaacgccgaagaggaaatggcgcaggtcgcaaaattcgacttcgttataatcaacgaactgtttgagagtgcgctctttgatctcaaggcgatcattcacgcgcaacgcctcaaatatgcggcccagcggcgccttcgcgccgacaccttcgagtcgctcaatatccctgaatccaactgac

SEQ ID NO: 252675 - DNA, 628 bp, Unknown
  Bacterial polypeptide expressing nucleotide sequence isolated from the Sargasso Sea
atggaagaattaaaccgctctggtataccatttattttatcatctccatctggtgccggaaaaacaagtattgctcgaaacataataagtaaagataaaaatattcagttgagtgtttcctatacaacaagaaaaaaaaggaaaaatgaaaatgatggtttggattataaatatatatcaaaaaattcatttaaagaaaaaattgaaaaaaattactttttagaatgggcaattgtttttgagaactattatggtacttcacgtgaaaaagttcaaaaagttattgcagaaggtaaggatgtgctttttgatattgactggcaaggtgcccaacaactctcaaataataaaagttttgatgtggtgaaaatttttattttaccaccttcaaataattctcttgaaaataggttaaacgctcgagcacaagataccctaattgaagtaaagaaaagaatgtctcaagcaaatgatgaaattagtcactatatggaatatgattatattattataaataatgatcttgaggtttcctcaaatgaagttttgaatattataaatgctgaaagaatgaagaaaaaaagattaattaaccttgataaatttataagttatttaaggtcataat

SEQ ID NO: 252676 - DNA, 574 bp, Unknown
  Bacterial polypeptide expressing nucleotide sequence isolated from the Sargasso Sea
atgaaaacctcaagtaagcctctcatgcttgtcttatcttcaccttctggtgcgggaaagaccaccttgtctaaaaagatacaacagtcggataacacctttaaaatttctgtatcacacaccactagaaaacccagacctaatgaagttaatggtgttgattatcactttgtaaatgaagaaaaattcaaatctttattaaaagaaaacgccttttatgaacacacaaagatctttgataatctttatggaacttctaaaaattcagtgaatgaaatcactaagaaagattttaatgttttatttgacatagactggaaaggggcaaaacaactaagtgaatttaaagaattgaatttaattagaatatttatattgccaccaagcaaggaggagctggaaaaaagacttattagtagaaaccaggatgataaagattctataaaaaaaaggctacaagcatattcagaagaaattcaacactcaaaagattatgattttgttttggtaaacgacaatgttgaaaattgctttaaaaaaataaaaaaaataatttcagatcgtttaaaataaa

SEQ ID NO: 252677 - DNA, 571 bp, Unknown
  Bacterial polypeptide expressing nucleotide sequence isolated from the Sargasso Sea
ctgttaatcgtgtctgcgcccagtggcgcgggcacgacgtcgctgatcaaagcattgatggagcaggatcagcgggttgaagtgtccgtgtcgcacacgacccggccgcagcgccccggcgaagtggagggcgtcaattatttctttgtctcgacagaaacttttcctgagatgcgtgaggcgggcgcattctttgaatctgcagaagtcttcgatcattggtacggcaccagcttgacccaactggaggccaggctgtccgacggcgcagacgtgattctcgaaattgactggcaaggcgcccagcaagtgaggaagctgctgccggatagtgcttggctcttcatcctgccgccctcgctggaggcgctcaagtctcgactgcaggcgcggggtcaggacgcagaagacaccatcgacctcagaatgcgtgccgcgcgggatgaaatgtcgcactgggatgaggccgactatctgatcatcaatgatcagttcgacgtggcggtggaagccctgcaggcgctggtgcgctctctgcgcctgcgcaccggtcagcagcagtcggcgctta

SEQ ID NO: 252678 - DNA, 553 bp, Unknown
  Bacterial polypeptide expressing nucleotide sequence isolated from the Sargasso Sea
tatgattgttttgtcttccccttcaggcgcaggaaaaactactctttcgaaaaaaattcaacagtcagataattcttttaaaatttcagtctcacatacaacaagaaaagcaagagcaaacgaagtagacggggttgattatcactttgttacaaaagaaaaatttaagcaattgttaagcgaagatgctttttatgagcactctgagatttttggaaattactatggaacttcaaaatcttcagttaacaaaattataaaagataaatacaacgtattgttcgacatagattggaaaggagctcaacaattaagtggatacaaagagttaaatttacttaaaatatttatattaccgcctagcaaagaggaacttgaaaaaagattggtagccagaaatcaagatgataaagaatctataaaaaatagacttttggcctattctaaagatatagaacattctaacgaatatgatcatgtcattataaatgataacgttgagaactgttttaattcaattaaaaaaataatctctattcgcttaaatacctag

SEQ ID NO: 252679 - DNA, 568 bp, Unknown
  Bacterial polypeptide expressing nucleotide sequence isolated from the Sargasso Sea
aatgataattttatcatcaccgtctggagcgggaaaaactactctagttaaaaaaatttcaaaagaaaaaaactataaaatttcaatatcacataccacaagagagccaagaaataatgagatagatggtgtagattatttctttgtaaaacaagaaaattttgaaacacttattcaagaaaacgcatttcttgaacatgcaaatgtctttgaaaatatgtatggatcaacaaaagaacaggtatttaaaaatttaaaaaacggttttaatgtattgtttgatattgattggcaaggagcgcagcagataaaaaaacaaacattagattataagcttatttccttttttattctccctccatctaaagagatacttttggaaagactagttactcgaggagaaactaataacgagataattcaaatgagaatgaaacaatttgataaagatgtattacattgggaagaatatgattatgttgtcattaatcaagatttggacaaatgttacaatgagataataggatatcttgaaaatactttaaaatatgacaagtcaaaaattgaa

SEQ ID NO: 252680 - DNA, 553 bp, Unknown
  Bacterial polypeptide expressing nucleotide sequence isolated from the Sargasso Sea
atgctagtgttatcatcaccgtctggcgctggaaaaactactctctctaaaaaaattcaacaatcagatagttcttttgaaatttcagtttctcacacaacacgaaaacccaggccaaatgaagtagatggtttagactatcatttcgtaagtaaagaaaaatttgagtcattactaaaaacaaatgcattttatgaatatgcacaaatttttggaaattattatggaacttctaaatcctcaataaacaaaataacagggaataaacataatgttttatttgatattgattggcaagggagtcagcaattaagtaaatataaagaattaaatttggtaaaagtttttattctaccaccgagtaaagaggaattagaaaaaagacttatagcaagaaatcaggatgataaagatgctattaggagaagaatgtttgtttattctcaggatatagcacatcaaaaagattacgattatgtcttaataaatgataatgttgaaaaatgtttcttggagattaagaacattatagataaacatttaaagaaataga

SEQ ID NO: 252681 - DNA, 586 bp, Unknown
  Bacterial polypeptide expressing nucleotide sequence isolated from the Sargasso Sea
tatgaacaacttaagcagtaaagctcttatgattgttttatcatctccttcaggtgctgggaaaacaacaatttcaaaaaaaattcaacaatctgataattcattcaaaatatcagtttcacatactacaagaaaggctcgagcaaacgaagtagacggtgtagattattattttgtttctgaagaagagttcaaagatttattgaagaaaggtcatttctacgaacatacaaaaatattcggtaatttttacggaacttcaaaatcatcggtgaatgacattataaataaaaaattaaatgttcttttcgatatagattggattggtgctcaacaattaagtaagtttaaagaattgaatttacttaaaatttttatactgcccccgagcaaagaagaacttaaaaagaggcttattgcaagaaatcaggatggggatgagtcaattaaaaaaaggcttttagcttattcacaagatatacaacattcaaaagaatatgatcatgtaataattaacgataatgttgaggactgttttaataaaattaaaaaaataatatctgatcgattaaagataaaattttaa

SEQ ID NO: 252682 - DNA, 634 bp, Unknown
  Bacterial polypeptide expressing nucleotide sequence isolated from the Sargasso Sea
atgcaggacttattaggtaacttatttattatttcagcacccagcggagcgggaaaatccacgctgattaatgcgcttttaaagcaagatgccgatatgcagttgagtgtttcgcacacgacccgctcaccgcgtccaggcgagactaacggtgtgcaataccatttcaccgacgtgtccagctttaaacaattaattgcagaggatcagtttatcgagtgggctgaagtcttcggcaattactacggtacatccaaagcagccctggccgataagctggcgcaaggcatagatgtatttttggatatcgactggcagggtgcccgccagatcaaacagcaactgccttttgtcaccagtatttttattctgccacccagtgtcggggcgttagaacaacgcttgaatcagcgcgggcaagacagtgcagaagtgatagcgggtcgtatggccaaagcccgcgacgaaatcagccatgccaatgaatatgactattgggtggtgaatgatgatctggagctggcggtacagcaattttccggcattatccagagccaacgcttaaaacagcagaagcaggcgatacggcaacacaagttactttctggcctgttggcgaacgaaacgaaataga

SEQ ID NO: 252683 - DNA, 631 bp, Unknown
  Bacterial polypeptide expressing nucleotide sequence isolated from the Sargasso Sea
atgtcgaatgaaaaaggccaacttatagttatttcagctccttcaggagccggaaaaacatctattattaagaatgttataaaaaagctaaatgatgagagcaaaaaatcaacgttttctgtttctcatacaacaagactaccaagagatggtgatatagatggcagcgattatttttttgtatcaaatgaaatatttgatgagctttatgaaggtggaaactttattgagaccgctgaagttcatgactataaatatggaacatcaaaagaatttattgataacaatattaatcaaggaataaatgtctttcttgaaatagatgttcaaggatttcaaaaactacgaagtaaaaatgttgaattcaggtcaatgtttatcttgcctccatcaattgatgaacttagagagcgaatccaaaaaagaggtcttgattcagaaggcgttattgaaaaaaggatgaaaaatgctttaaaagagttaggtgaagcggagaaatatgattatttagttataaatgatgtttttgaacatgctattgaagaattgcttgaaatggttataaataatgactatttagatcattcacgtgataaaaaactaaaagtattgcaagatttgttgtcttaga

SEQ ID NO: 252684 - DNA, 643 bp, Unknown
  Bacterial polypeptide expressing nucleotide sequence isolated from the Sargasso Sea
tatggctttacaacttggcaatctcttcattcttgctgcgccttctggggcgggtaaatcaagtctcataaaagcattgatggaaaagtacgagggtaatacccattcacctatgcaggtgtctgtatctcataccactcgtcagcctcgacccggtgaagtcgacggtgttcattatcactttgtaagccgtgaagaatttgaagcgcttatcgagcagggtgtcttttttgaatacgctgaggtgtttggtaactattacggcacgtcacgcgtgacaattgagcaaacgttgcatcgcggtattgatgtatttctagatattgattggcagggcgcacgccaagtaaaagcgttaatgccagatacttgtggtatctttatccttcctccttctttagaggtgttggagcaacgcttgactaatcgtggtcaagacagtgaagaagtgattgcggggcgcatgtctcaagccgtgtctgaaatgtcacacttcaatgaatttgattatgtgatagtaaatgatgatttcgcaacggccctaaatgatctcgaggctattgtgacgtctcagcgtttgagaagcattaaacagcaaatgcgttttcaacctttgttagatgaattattgggtactgcttaa

SEQ ID NO: 252685 - DNA, 556 bp, Unknown
  Bacterial polypeptide expressing nucleotide sequence isolated from the Sargasso Sea
atgaatgattcaaagcttataattttttctgcaccatcaggagctggtaaatcgtctttaattaagaaacttatcgaattaagtgaaagtacaattgaattatctgtttctgtaactactcgagaaccaagagatggcgaagttcatggcgttgattatttttttatatctgagcaagaatttttgaagcttgaaaaacaagattcttttttggaatcagctaatgtccatggcttccattatgcgaccttaaaatcttttgttgatgaaaaaacaagctcaggaataagcgtaatacttgatattgatgttcaaggttttaaacaaataaaacaaacctcgcaagataatgtctcaatttttatcctacctccgtcactggaggagcttgaacaaaggctatttaatcgtggttcagaatcttcagaaagcattaaaaaaagacttgaaaatgcacttattgaattaagatctgttgaaatatttgattatgttgtagtaaatgacgaatttgacaaaactattaaaattttaagttcaattctttttgataaaa

SEQ ID NO: 252686 - DNA, 573 bp, Unknown
  Bacterial polypeptide expressing nucleotide sequence isolated from the Sargasso Sea
aaaaagatgaaggtattttggttatactttcatcaccatcaggggcaggcaaaacaacaataagcaaaaaaattcaacaaaaacaccaaaactttaaaatttccgtatctcacacaacaagaaaaccaagaccaaatgaagtagagggtatcgattatttttttattagccaagaagagttccaagataaaataaaaaaaggtgaattttatgaatatgccaagatttttggtaattactatgggacatctagaaaggctgttttggacttgttagaaaaaaaaaatgatattttatttgatatagattggcaaggcacacaacaactatcaaagtttaaagagcttaaattaataaaaatatttatattgcctccaagcaaagaagagttaaaaaaaagacttatacaaagaaatcaagacaagccagaagttgtttcagaaagacttaaagcatatgataaagacgcttcacatcaaaaagaatatgattatgttgtagtaaatgataatttagataattgttttaaagaagttgaaaaaataataataaaatcaaaaaaaaaaaattaaa

SEQ ID NO: 252687 - DNA, 631 bp, Unknown
  Bacterial polypeptide expressing nucleotide sequence isolated from the Sargasso Sea
atgtccttaaacaaaaggggaattatggttgttctatcttccccttctggagctggtaaaactacattagttaaattattatcaaaaaaaaaaaatttttatacttcaatttcgcacacgactaggaagcccagggtgaatgaggtagatggcgtagattacttttttgttaaagagaaaaaatttaaaaatttaattaaaaataataaattcttagagtatgcaacggtatttaaaaatttgtatggtacaactaaagagcaagttattatgaaattaagcaatggtgaaaacgttttatttgatatagattggcaaggtacggagcagattaaatctcaaaaacttaattttaaattaataacttttttcattctaccacctagtaaaaaggttctttttcaaagattatcaaaccgagacatgaaagataaactgatagtagaggagagaatgaggcaattcgacaaagatattttacattggaaaaaatataattataccgtagtaaatgataatctccaaaaatgtttgcgtaaaattacaaatattataaataaagaaattaaaaataaaaaatataaatacaataaattaactattgaaaagtatattcaaaaattaatttaga

SEQ ID NO: 252688 - DNA, 616 bp, Unknown
  Bacterial polypeptide expressing nucleotide sequence isolated from the Sargasso Sea
aatgaatgattcaaagcttataattttttctgcaccatcaggagctggcaaatcgtctttaattaagaaacttatcgaattaagtgaaagtacaattgaattatctgtttctgtaactactcgagaaccaagagatggagaagttcatggcgttgattatttttttatatctgagcaagaatttttgaagcttgaaaaacaagatgcttttttggaatcagctaatgtacacggctttcattatgcgaccttaaaatcttttgttgatgaaaaaacaagctcaggagtaagtgtaatacttgatattgatgttcaaggttttaaacaagtaaaacaaacctcgcaagacaatgtctcaatttttattctacctccgtcattggaggaacttgaaaaaaggctatttaatcgtggttcagaatcttcagaaagcattaaaaaaagactagaaaatgcacttattgaattaagatctgctgaaatatttgattatgttgtagtaaatgacgaatttgacaacactattaaaattttaagttcaattctatttgatgaaaacattgaatataatgatgaaaacgcaaagaatatattaaaagaattattggataattaa

SEQ ID NO: 252689 - DNA, 517 bp, Unknown
  Bacterial polypeptide expressing nucleotide sequence isolated from the Sargasso Sea
catggtaattttatcttccccttccggagcagggaaaactacgataagtaaaaaaattcaacaaaaacatcaaaactttaaaatttctgtttctcatacaaccagaaaaccaagaccaaacgaaatagagggaatagattattattttacaaataaaaatgattttgaaaacaagataaagaataatgaattctatgaacatgctaaaatttttggaaattattacggtacgtctaaagattctgtaattaatttattaaataataaaaacgacgttttgtttgatattgattggcaaggcactcaacaactctctaaatttaaagaactaaatttattaaaaatttttattcttcccccaagcaaagaagagttaaaaaaaaggctaattcaaagaaatcaagataaaccaaatgttgttgaggaaagattaaaagcttacgatagagactcagctcataagaaggattatgactttgttgttataaacgataatcttgaaaactgttttaaagag

SEQ ID NO: 252690 - DNA, 476 bp, Unknown
  Bacterial polypeptide expressing nucleotide sequence isolated from the Sargasso Sea
aatgcgtatcctatcaagctctaatcaaatctttgttatttcagcgccttctggcgctggtaaaactagtctggttgatgcattgctaaataaagatacgaatattgttggctgcacttcgcataccacacgacccataagggagggcgaaatagatggtgaaaactaccatttcgtcaacgaaagcgaattcgtaaacctcataaaaaataattatttcgtagagcatgcaaatgtttttggttatagatatggaacgtctgagttggagctagagaatactctgaatgctgggcttgacgtcatcctagaaatagactggcaaggggcagaacaagttaggaaagtttacgataactgtagctctatctttatcctgccacctagcctatcagagctagaagagcgactgcgctctagggggaaagatacacctgaagttatcaaggcacggtcccaagaggccgttaaggaaa

SEQ ID NO: 252691 - DNA, 454 bp, Unknown
  Bacterial polypeptide expressing nucleotide sequence isolated from the Sargasso Sea
atgaataatctaagcagtaaacctcttatgcttgttttatcatccccttcaggtgcaggcaaaacaacattgtcaaaaaaaatacaacaatctgacagcacttttagaatatcagtatctcacacaacaagaaaagctagaccaaatgaggtcgacggagtcgattatcattttgttagtgaggaagaatttaaaattttattaaaaaaagaaaccttctatgaacattcaatcatatttggaaattattatggtacatccaaaacatcagtcgacgaaattataaaaaaaaaatttaacgtgttatttgatattgattggaagggtgcaaaacagctaagtttgtttaaggagctaaatttacttaaaatttttattttaccacctagcaaaaaagaattggaaaaaaggcttatagcgagaaatcaagatggaaaagagtcgataaagagaa

SEQ ID NO: 252692 - DNA, 466 bp, Unknown
  Bacterial polypeptide expressing nucleotide sequence isolated from the Sargasso Sea
atgaataatataagcagtaaacctcttatgcttgttttatcttccccatcaggcgcaggcaaaacaacactttcaaaaaaaattcaacagtcagatagcacgtttagaatatcagtctcacacacgacaagaaaagccagacctaacgaggtagacggtgtcgattatcattttgtttctgaagaagaatttaaaatcttattaaaaaaaaaggctttttatgaatattcaattatatttggaaactattatggcacttctaaaaattcagttgacgaaattataaaaaaaaatttcaacgtgttatttgatattgattggaaaggagcaaaacaactaagtggttttaaagagttaaatcttctcaaaatttttatattaccacctagcaaggaagagttggagaaaagacttgtagcaagaaatcaggatggaaaagagtcgattaaaaaaaagggttttggca

SEQ ID NO: 252693 - DNA, 625 bp, Unknown
  Bacterial polypeptide expressing nucleotide sequence isolated from the Sargasso Sea
atggctcaaggcacgctttatattgtttctgcccccagtggcgcgggtaaatccagcctgattcaggctttattaaagacccaaccgttgtatgacacccaggtttctgtttcgcacaccacgcgcgcaccgcgcccgggggaagtgcacggtgaacactatttttttgtgaaccatgatgaattcagaaccatgattggcagagacgcgttcctggaacacgcggaggttttcggtaattactacggcacctcacgtgaaaccattgagcaagtattagcatccggcgtagacgtctttttagatatcgactggcaaggtgcgcagcaaattcgcgaaaaaatgccgcatgcgcgcagtatttttattttgccgccatctaagattgagctggaccgccgtctgcgtggccgcggtcaggatagcgaagacgtgatcgcaaaacgtatggcgcaagctgttgcagaaatgagccattacgccgaatatgattatcttattgtgaacgatgatttcgataccgccctgggcgatttgaaaaccatcattcgcgccgaacgtctgcgcatgagccgccaaaagcagcgtcatgacgctttaatcagcaaactgttggcagactaac

SEQ ID NO: 252694 - DNA, 583 bp, Unknown
  Bacterial polypeptide expressing nucleotide sequence isolated from the Sargasso Sea
aatgattcaaagaactctcttcatagttactgctccctcaggagcaggtaaaaccactttagtaaaagaggtactgcaacgaatcaccgacttgtcggtttctgtttcatatacaacaaggccaattagaccaggtgaaatagaaggggaaaattatcactttgtggatgagaaaaaatttttgaatatgtattcaaataatgactttcttgaagttgcagaagtttatgggcacaaatacgggacttccagattatttgtaaccagagcatttgaacaaggtaatgatgtaattttagagatagattggcagggagctgaacaaataaaaagactatttcaaaaagcttgctctattttcatattgcctccatcccttcgggcattaaccgaccgcctttataaacgtcaacaagacgacagtgaaactattgaagttcgtatggctgaagctaaggaggtaatttcgcactttacagatgcggactatgtcgtagttaatgataaatttgatgagacggttgaagatattgtcacaataattagatcgcaaaggcttcgagtccaaactcagagagaaaat

SEQ ID NO: 252695 - DNA, 574 bp, Unknown
  Bacterial polypeptide expressing nucleotide sequence isolated from the Sargasso Sea
atgaacaacttaagcagcaagccacttatgcttgttttgtcttcaccctcaggcgcaggtaaaacaaccttgtcaaaaaaaattcaagaatcagatacttcttttagaatttcagtatcacacacaactagaaaatctagagtaaacgaagttgatggaatagattaccattttgtaaatcatgaaaaattcaaaaagttagttaaagaaaattcattttatgaacacactaaaatttttggaaactactatggaacttcaagattatctgtagataaaattataaaaaataattgtaatgtaatatttgatatagattggaagggagctcagcaattaagcaattataaagaactcaatttacttaaaattttcatactacctccaagcaaagaagaattagaaaaaagacttatagctagaaatcaagatggaaaagattcaatcaagaacagacttcttgcatacacagaggatataaaacattcagatgaatacgatcatgttatagtaaacgataacgttgaaaaatgttttaacgatataaaagaaatcatttcaaaacgtcaataaa

SEQ ID NO: 252696 - DNA, 556 bp, Unknown
  Bacterial polypeptide expressing nucleotide sequence isolated from the Sargasso Sea
tatgctaatactttcatctccttcaggtgccggcaaaactacaattacaaaaaaaattcaacaaaaatataaaaattttaggatttcggtttcacatactacacgaaaaccaagaacgaatgaaattgatggtgtagactattattttattgataaaaaaacttttgaaaaaaaaattaaagataatgagttttatgaatatgctaatattttcggaaattattatggaacttcaaaaatatcaattaatcaattaaaagaaaaatatgacatagtttttgatattgattggcagggaactaaacaattaacaaaatttaaagaattaaatttagtaaaaatatttattctcccaccaagcaaaaaggaacttgaacgaagattaatcgagagaaacaaaggtaaaaatgaaaaaatttcagagagattagctgcgtttgaaaaagacgctacacattggaatgactatgactatgtcattataaatgataacttagaaaattgttttaaacaaatagagaaaattatagagtcacaccaaatcaaatctttttaa

SEQ ID NO: 252697 - DNA, 625 bp, Unknown
  Bacterial polypeptide expressing nucleotide sequence isolated from the Sargasso Sea
catgaccgcacgcggaaatttatttattgtttcagccccgagtggtgctggtaaatcctcgctgatttcggcgctgctgaaagacaaacccgccgacatgcaggtttcagtgtcgcacaccacccgtgcgcctcgccccggcgaagtgaatggtcagcactaccattttgttaatgttgaagaatttaaagcgctgatcgagcaaaatgcctttttcgagtgggccgaagtgttcggtaactactatggcacgtcgcgccacgtcattgagcacactttgactcaaggtatcgatgtcttcctcgatatcgactggcaaggcgctcagcaggttaaagccgtgatgcctgaggccgttggcgtgtttattctaccgccctcaagggatgagctagaacgacgcctgaccggccgtggccaagacagtgctgatgtgatcgctagccgtatggcacaggcggtttctgaaatgtcgcactataaagaatatgattttattatcgtcaatgacgattttgacacagcactggcggatctgcaggcgatcattcgcagccaacgcttaacgggtgctagtcagatccacgcgcaaaatgatatgcttaacgatctgttggcaggctaa

SEQ ID NO: 252698 - DNA, 619 bp, Unknown
  Bacterial polypeptide expressing nucleotide sequence isolated from the Sargasso Sea
ttgataatcctttcctcaccatccggcgcgggaaagtctacattagcccagcgtattaagtcatggggtgaaaattgcgtattttcgatttcagcgacaactcgcaaaccccgagagggcgaacaagacggaaaagactattattttatttcccaggaagaatttagcagcaaagtttctaacggcgaaatgctagaacacgcggaggtgtttggaaactggtatggaagccctgtgtctccagtactgtcttcaattgataacggaaatgatgttttgtttgatgtcgactggcagggaagccaacaaataaaaaactcgagcttgggaaaatatgttttatcaatttttattctacctccttccattaaggaattggaaagtcgattaaaattaagaaatcaggacagtgacgaagttatttcgaataggatggctaaatctgttgaggagataagtcactggcccgaatatgattatgtagttgtaaatgatgacgttgataaaaccgaagaaaaattaaaaattattataactgcagaaagattgcggctctcccaacaacccggaattgttgaatttgttcgcagtttgaataatgagtttggagaaaggtaat

SEQ ID NO: 252699 - DNA, 634 bp, Unknown
  Bacterial polypeptide expressing nucleotide sequence isolated from the Sargasso Sea
atgcaggacttattaggtaacttatttattatttcagcacccagcggagcgggaaaatccacgctgattaatgcgcttttaaagcaagatgccgatatgcaactcagtgtctcccacaccacccgctcaccgcgtccgggcgagactgacggtgtgcagtaccatttcactgacgtatccagctttaaacaattgattgcgcaggatcagtttattgagtgggctgaagtctttggcaattactacggtacatccaaagcagccttagctgataagctggcgcaaggcatagatgtatttctggatatcgactggcagggtgcccgccaaatcaaacaacaactaccttttgtcaccagcatttttattctgccacccagtgtcgaggcgttagaacaacgcttgaatcagcgcgggcaagacagtgcagaagtgatagcgggtcgtatggccaaagcccgcgacgaaatcagccatgccaatgaatatgactattgggtggtgaatgatgatttagagctggcggtacagcaattttccggcattatccagagccaacgcttaaaacagcagaagcaagcgatacggcaacacaagttactttctggcctgttggcgaacgaaacgaaataga

SEQ ID NO: 252700 - DNA, 562 bp, Unknown
  Bacterial polypeptide expressing nucleotide sequence isolated from the Sargasso Sea
atgaccgaccacacacgcgaaaccagcgcaccgcgcaacccttacgccggtgcttatcccggcaacctgttcatggtggtcgcgccttcgggcgcgggcaagtcgacgctcgtgaacgcgctgctcgccggcgatgacgcgatccgtctgtcgatttcgtacaccacacgcccgccgcgtccgaaggagcaggacggcgaacactatcacttcacgacggtcgacgatttcctgacccgtcacgcggccggcgagtttctggaaagcgcggaagtgcacggcaactactacgcgacgtcgcgcgtgtggatcgaagagcaaatgaaaagcggccatgacgtgctgctcgaaatcgactggcaaggcgcgcaacaggtcaagaagcagtttcacaacgcagtggaaattttcatcctgccgccgtctctcgacgcgctcgaagagcgtttgaaaaagcgtggccaggacgagccgaacgtgatcacgcgccgtttgctcgcagccggcagcgagatggcgcacgcggccgaggcggagtacgtcgtgatcaacgacagctcga

SEQ ID NO: 252701 - DNA, 581 bp, Unknown
  Bacterial polypeptide expressing nucleotide sequence isolated from the Sargasso Sea
tatgaataatgtgagaaattcagaaaaaaaattagtagttttatctgcaccctctggtgcaggtaaaagtagtttattgaataatgtaattagtcaacatcatgatattggcttaacaatatctcatacaacaagagatatcagaccaaatgaaaagaataatattgattactattttatttctaaagaaaagtttcaagctatgattaatgaagaagaatttattgaattcgctgaggtgcatggaaatttttatggtacgacgaaaaaagaaattgatgaaaaacttatgaattttgaaattgttattttagaaattgatactaatggagcaaaacaggttttaagtaacatcgcaaattgcagatcgatatttattttaccgccaagctattcctctttagagaagagattgcttgcaagaaaaactgaaaatgaagagcagctagaaaaaagactgagagctgcaaaaactgaaattaaagaagcaactggcttcgattatgttatgataaatgatatttttgaggagtcggtgacaaacctcactgaaatcctctacgatgttgatatgaggctga

SEQ ID NO: 252702 - DNA, 628 bp, Unknown
  Bacterial polypeptide expressing nucleotide sequence isolated from the Sargasso Sea
atggcgcaacaaggcactctctatatcatctcctccccgagcggagcgggtaaatccagcctgctcaatgccttgctgacccagcacaacagcgcaggcaagatgcagctgtcggtttcccacaccacccgcgccacccgtcccggtgaagagcacggtgtccactaccacttcgtcaaggtggaagagttcaaggcgctgatcgagcgcggcgactttctggagtgggccgaggtgttcggcaactactacggcacctcccgcgcggccatcgaagcctgcctggcgcaggggatcgacgtgttcctcgacatcgactggcagggtgcccgccagatccgcgagcagatgccgaccaagtccatcttcatcctgccgcccagccgcgaagagctggagcgtcgcctgatcggccgcggccaggacagtgccgaggtgatcaagggccggatggagaaagccattgccgaaatggtgcactatgacgagtatgactatgtcatcatcaacgaagactttgagcaggcactgttccagctgagggccgtcatcgagtgccaacggctggaattgcgccagcagcagcaggcccaacaaaacttgctgcaacagctactggcagaatagg

SEQ ID NO: 252703 - DNA, 510 bp, Unknown
  Bacterial polypeptide expressing nucleotide sequence isolated from the Sargasso Sea
aaaaaatacaagagtctgatagttcatttaaagtctcagtttcacacactaccagaaaagccagagtaaatgaggtagatggagtcgattatcattttgtttctgagcatgtatttaaaaatttaatcaaaaataatgcattttatgagcacgcaaaaatttatggtaattactatggtacttctaaatcctcaatcaataaaattactcaaaaggggaacaatgtgttatttgatatagattggcaaggagctgaacaactttcggcttacaaagaattgaatctattaaagatttttattcttcctccgagtgcagaagaacttaaaaaaagattaatttcaagaaatcaggacaatcaagaagcaattaaaagaagactcgacgcatacaatacagatatatctcattcaaagaattacgatcatgttttaataaatgataaagttgaagtttgttataataaaataaaagatattatttcaatgtacttagcaaacaaaacttaga

SEQ ID NO: 252704 - DNA, 577 bp, Unknown
  Bacterial polypeptide expressing nucleotide sequence isolated from the Sargasso Sea
aatgagtgatcgttttaagcctcttctgcttgttctatcatccccttcaggtgctggcaaaacaacactgtcaaaaaagatacagcaatccgataacacttttaaaatttcagtctctcacacaacacgaaagccaagagcaaatgaagtagatggtgtagactattattttattaataaggagaagtttgaaaaattaattagctcaaattctttttttgaatattgtaaaatatttggaaattattatggaacatcaaagtcttctgtaaatcaaattacacgaaaaggcttaaacgttttatttgatatagattggcaaggttcaaaacaactaggtaaatttaaagaattgaatttagtaagaattttcattttaccaccaagtaaagaagagttggaaaaaagactgatagagagaaaccaagatgaccaagaatctataaaaaaaagacttttggcatattcagaggatattaagcacacaaaagaatatgatcatgtaatcgttaacgacaacgttgaagattgttttaaaaaaattaaaaaaataatttcagaaagaataagatcctaa

SEQ ID NO: 252705 - DNA, 616 bp, Unknown
  Bacterial polypeptide expressing nucleotide sequence isolated from the Sargasso Sea
atggccgaaaaaaaagtaggagtgattgtaatattatcttctccttcaggcgcaggtaaaacaactctcgtaaaaaaaatatcattaagaaataattataaaatatccgtttcacatacaacaagaaaacctagaattaatgagagaaatggtagagattatttttttgttaatcatcatgagttcaaaaaattaatcaaaaataaaaaatttttagagtatgcaaaggtatttaaaaattattatggctcacttaaagaaacagttataaaaaaaatcaaaaaaggagaaaatgttatttttgatattgattggcaaggaacacagcaaattaaaaaaaaaagattaaactataaaataataactatctttattttgccaccttctaaaaaagaactatacaaacgactgcttaaaagagatcaaaaagataaaaaaaatgtgaacgaaagaatgaagcaatttaaagaggatgttaagcattggaaagattatgattttacagtaataaacgataagatagaaaaatgttataagctaataataaattatattaatcttcaaaaaaaacaaaaacaaactttaaaatacaacaaagcattgataaaaaaacata

SEQ ID NO: 252706 - DNA, 463 bp, Unknown
  Bacterial polypeptide expressing nucleotide sequence isolated from the Sargasso Sea
atgtcgaatgaaaaaggccaacttatagttatttcagctccctcaggagccggaaaaacatctgttattaagaatgttataaaaaaactaaatgatgagaacataaaatcaacattttctgtttctcatacgacaagactaccaagagatggtgatatagacggtagcgattatttttttgtatcaaatgaaatatttgatgagctttatgaagctggaaactttattgagaccgccgaggttcatgactataaatatggaacatcaaaggaatttattgataacaatattaatcaaggaataaatgtctttcttgaaatagatgttcaaggatttcaaaaactacgaagtaaaaatgttgaatttaggtcaatgtttatattgcctccatcaattgatgaacttagagagcgaatccaaaaaagaggtcttgattcagaaggcgttatgaaaaaaggatgaa

SEQ ID NO: 252707 - DNA, 643 bp, Unknown
  Bacterial polypeptide expressing nucleotide sequence isolated from the Sargasso Sea
tatgacttcactactcggcaacttattcattcttgcagctccttctggagcaggaaaatcaagccttataaaggcgctaatggaaaagtatgaaagcaatacagctacgccaatgcaggtgtctgtatctcatacaacacgtcaacctcgtccgggtgaagtcgacggtgtgcactaccattttgtgagccgagagcagtttgaagcgctgattgaacagggtgtgttttttgaatacgcagaagtatttggcaattattacggcacatcccgcgtgacgattgaacaaactttgcaccgtggtattgacgtatttttagatatcgattggcagggcgcgcgccaagtcaaaaagcttatgccagacacatgcggtattttcattcttccgccttcactcgacgtgctagagcagcgtttaaataatcgcggtcaagatagtgaagaagtcattgcagggcgtatggcgcaagccgtagctgaaatgtctcatttcaatgaattcgatagcgtaattatcaacgacgactttgcgactgcgttaaatgatttggaagccatcgtgacagcacagcgacttcgcacaggaaaacaacaaatgcgccatcaagtgctattggacgaactgctcggtagcgcgtaa

SEQ ID NO: 252708 - DNA, 376 bp, Unknown
  Bacterial polypeptide expressing nucleotide sequence isolated from the Sargasso Sea
aatgtcgagtaatttatttatcattacggcaccatcaggagctggaaagacaacacttattaaaaaagttttagagtatgcacaagaacataataaaaatgttgtattatcagtctctcatactactaggccacctcgagacggtgaagaagacggcgtagactacttatttatttcagaagatgactttaaacaaaatattgagaatggggagtacattgaatatgccaatgtccatggaaattactatggaacacccagatcagaattagataaaaatcaaaatataaattctaaaatattattagagattgattggcaaggagcactgcaaataatgaaccattatccagatgcagaaagtgtttttatctcc

SEQ ID NO: 252709 - DNA, 628 bp, Unknown
  Bacterial polypeptide expressing nucleotide sequence isolated from the Sargasso Sea
aatggataaattaaagcgccgaggtattctttttgttttatcctcaccatcaggagcaggaaaaacaagtattgctagatacattttagataaagataaaaatattaaactaagcgtttctttaacaacaagaaaaaaaagaaaaaacgaaaaagctggtattgattatgattttatctcaaaggatgtatttgaaaaaaaaataaaaaataatttttttttagaatgggcaactgtatttggaaattattatggaacatcacgcgaaaaagttaaaaaaacattacaagatggaaatgatgtgttatttgatattgactggcaaggtacacagcagttatcagataataaagactttgatttagtaactattttcatattgcctccatcaaaaactgttcttgaaaaaagattaaataatagagctcaagatagtaaaattgaagtaataaaaagaatgtctcaagcaagcgatgaaattagtcattatatggaatacaattatatagttatcaacaataatcttgaagaatcttcaaatcaggttttgagtattttaaaagctgagcgacttaagagaaaaagactgattaatcttaatgaatttataacttttttgagatcataa

SEQ ID NO: 252710 - DNA, 625 bp, Unknown
  Bacterial polypeptide expressing nucleotide sequence isolated from the Sargasso Sea
catgaccgcacgcggaaatttatttattgtgtcagcgccaagtggtgcgggtaaatcctcgctaatttcggcattgttaaaagacaaacctgccgatatgcaggtttcagtatcgcacaccacccgcgcgccacgcccaggtgaagttgatggtcaacactaccattttgttaatgttgaagaatttaaagcactgatcgcgcaaaatgccttttttgagtgggccgaagtgtttggcaattattacggcacttcgcgccatgtgattgagcacaccttaactcaaggtattgatgtgttcctcgatatcgactggcaaggtgcacagcaagtcaaagctttgatgccagaagccgtgggcgtatttattctgccaccctcacgggatgagctagagcgtcgcctgactggccgcggccaagacagccaggatgtgatcgccagccgtatggcacaggcggtttctgaaatgtcgcactataaagaatatgattttattatcgtcaatgacgattttgacacagcactggcggatctgcgggcgatcattcgcagccaacgcttaacgggtgctagtcagatccacgcgcaaaatgatatgcttaacgatctgttggcaggctaa

SEQ ID NO: 252711 - DNA, 619 bp, Unknown
  Bacterial polypeptide expressing nucleotide sequence isolated from the Sargasso Sea
atgaataaaggattactcatcctgatctccgcgccttcaggggccggaaaaaccagcttagtcaacgaaatcatcgctagagacgatcgcttgattaaatccgtatcgcacactactagagcaaaacgtccgggagaagaagagagcatagattattttttcactacagaaaaagaatttaaacagatggtctcgaatagtgattttatcgagcatgcagaggtattcggaaactactatgggacctctaaaaattatgtagaggaaaatctggattctggattagatgtcatcctggaaatcgattggcaaggggcccgacaaatacaatcacttaagcgcgaagcaatatctatctttatagcaccgcctgcaaagcaggagctcgaaaacaggctaaggaaaagaggcaaggattcagaggagactatttcgattcgaatgtctcaagcaacatcagatataaaaaaagcccagagctacaactacgtcgttgtcaacgattcgtttgaaaccgcaactaaccaacttctaacaattattagcgcggagagacttagaacgagtcatcaaataaaaagaaatgaagcactagcctttctattgtcacccaaataaa

SEQ ID NO: 252712 - DNA, 685 bp, Unknown
  Bacterial polypeptide expressing nucleotide sequence isolated from the Sargasso Sea
catgaccgaatcccaccgcgacggccacgcgtcgcattcgctgcacggcggcgtctatcccggcaacctgttcatggtcgtcgcgccgtcgggcgccggcaagtcgacgctcgtgaatgcgctgctgtcgaaggacagcgacatctgcctgtcgatctcgtacacgacgcgcaagccgcgtccgggcgagcaggacggccagcactatcacttcacgacggtcgaggatttccgtgcgcgtcacgcggcgcacgaattcctcgagagcgcggaagtgcacggcaactactacggcacgtcgcgcgtctggatcgaagagcagatgaagaatggccacgacgtgctgctcgagatcgactggcagggcgcgctgcaggtgaagaagcagttccgcaacgcggtcggcatctttatcctgccgccgtcgctcgacgcgctcgaggagcgtctgaagaagcgcggccaggacgaaccgaacgtgatcacgcgtcgcctgctggccgccggcagcgagatcgcgcacgcatccgaagcggaatacgtggtgatcaacgagaatttcgagcgtgcgctcgcggagctcgaatgcatcgtcgcggccacgcgcctgcgctttgcttcgcagtacgcgcgacatacggagctgttcatcgacctcggcgtccatctgccccacgcggaatga

SEQ ID NO: 252713 - DNA, 829 bp, Unknown
  Bacterial polypeptide expressing nucleotide sequence isolated from the Sargasso Sea
aatgaaaaaaatcatttcaatgttatttgcagttgcaatggtatttggatttatttcaaatgctaatgctgcaaaaacactaaaatgtcagacagttcttaacactaaagctgatgaagttaagatgttaaaggattttactgacactgttacaacgttaacagctggatctctaaagtttgaaattttacctgcaggagctgttgttggtgtaaaagaaactttagatgcagttgataaaggtctaatcgattgtggtttcgcatggactcactattggtcaggagatcaccctgcagctatgttatttggttcgccagtagctggtggtggagtaggtattgataatatcgcattcttatcttggttccaatacggtggtggtaaagaactatatgaccaattatggaaagaaatgggaagagacattaaaggatttatgattcaaccagttggaccagaagctttaggttggtttccaaaaccaattaaagacatggctgactttagaaaatataaattcagaactcctccaggaattccaggacaaacttataaagacatcggtatcgcatctgtagctatgggtggtggagacattctaccagctttagaagcaggcacaattgatgctgctgaatggtgttgtccaaaaccagacttaacttttggtttccaaaaagtattaaagcactactacttacaaggtttacaccaagtagtcgtaaatgctgacttctatattactggaaaaacttacaatgcaatgtctgatcatgagaagaagtctcttgaagtagctgctaatgcgtcattagcaaaatcttaa

SEQ ID NO: 252714 - DNA, 640 bp, Unknown
  Bacterial polypeptide expressing nucleotide sequence isolated from the Sargasso Sea
atgaaaggaaaatttatcgttattgagggtattgatggatgtggtaaaactacccaaatagatgaactatctaaatggcttcctaatagtggtctaataaagaaagggtctaaattaatcacaactagagagcctggaggcagtcttttaggaaaaaaacttagaggactgattcttgataataatgaaaataacaagccttcatctcttgcagaattattgctttattcagcagatagagctgaacacgtttccaaaattatttcacctgctttaaataacaatgattgggtaataagtgatagattttccgattccacactggcttatcaaggttatggaagaaatataaatttagaaataattaaaaatattgaatctattgtgtgtcaaggagtatctccagatctcactttcttcttagaaatttctccagaagagagcatattccgaagaaaaaatgaaattccagacagaatagaatcagaaggtattagatttttagaaaaagtaaatgaaggcttcaaacttattgccaaacaaaaaaactggaaagtaatatctgcttcacaaaatattaaaactatttctaatcaaattaaagagactttgctaaacaatttttctaataacaaatgat

SEQ ID NO: 252715 - DNA, 688 bp, Unknown
  Bacterial polypeptide expressing nucleotide sequence isolated from the Sargasso Sea
tatggtatttggatttatttcaaacgctaatgctgcaaaaacactaaaatgtcagacagttcttaacactaaggctgatgaagttaaaatgttaaaagactttactgacactgttacaactttgacaggtggatctcttaagtttgaaattatgcctgcaggagcagttgttggtgtaaaagaaactttagatgctgttgataaaggacttatcgactgtggatttgcctggacacactattggtcaggtgatcaccctgccgctatgttatttggttcgccagtagcaggtggtggtgttggtattgacaacatcgcattcttatcatggtttcagtatggtggaggaaaagagctatacgacagactatggaaagaaatgggaagagatattaaaggatttatgattcaaccagttggtcctgaagctttaggttggtttccaaaaccaattaaagatatggctgattttagaaaatataaattcagaactcctccaggaattccaggacaaacttataaagacatcggtatagcatctgttgctatgggtggtggagatattctaccagctttagaagcaggaactattgatgctgctgaatggtgttgtccaaaaccagacttaacgtttggtttccaaaaagtattaaagcactactacctacaaggtttgcaccaagtagtc

SEQ ID NO: 252716 - DNA, 406 bp, Unknown
  Bacterial polypeptide expressing nucleotide sequence isolated from the Sargasso Sea
atgtttatcacttttgaaggaattgagggatccggtaaaacaacccaaataaattttttaaaagatttttttaaagaaaaatcaattaaagctgtatttacaaaagaaccaggatcatcaaaaattggtggtgaaataagaaatatcttattgaataaaaatctagatttatcaccctatgctgaactatttttaatttttgctgacagatcacaacatgttgaagagataattaaaccaaacttaagtgctgatttcttagttatctctgatagatatattgattcgacatttgcttatcaaggcgagggcaggtctataggacatgaagaaatatcaaaaataatcaaaaaaatgaatttacctttgcccgataagacttttttattagatcttcctgtgactg

SEQ ID NO: 252717 - DNA, 658 bp, Unknown
  Bacterial polypeptide expressing nucleotide sequence isolated from the Sargasso Sea
atgcttcaaccagtcggtccagaggctttaggttggtttccaaaaccaattaagaatatggctgactttagacaatataaattcagaactcctccgggaattccaggacaaacttataaagatattggtatagcatctgttgcaatgggtggaggagatattcttccagcacttgaagcaggaacaattgatgccgctgaatggtgttgtcctaaaccagatttaacatttggtttccaaaaagtcttaaaacattattacctacaaggtttacaccaggtggtagttaatgcagacttttacattactggaaaaacttacaaagcgatgacagcccacgagaaaaaatctctagaggttgccgcaaatgcttcattagctaaatctttaagctacagaatctatgaaaatggaaaagctttacaagaactaactactaagcatggagttattttagaggatactcctacggactactttaaagaatacatggctgcagctaaagcaactttaaacaaaaatgctgaaaaaaatgcatttttcaaaaaagtttatgattctatgaaagaatttgctgatgtagctgttccattctggagtggtgctcaaatgtctaatgctaagctaggaatggctcacgcagcaacattaaagtaat

SEQ ID NO: 252718 - DNA, 468 bp, Unknown
  Bacterial polypeptide expressing nucleotide sequence isolated from the Sargasso Sea
gatgaaatttaattcaaatggtttatttataagttttgaaggtccagaagctagcggtaaatcaactcaaattaaactattagcatattttttaaaaaaaaataaaattccttttctcataacaagagaaccgggaggaactaaaatagcagaaaagttaagaagaatcattttagataagaaagcaaatattaccgctacagaagaaatattactactgatgtcagctagaatgaatcatattaacaatataattaaaccagcacttaaagaaggtaaaattgtaatttcagatcgttttgcagattctacatttgtatatcaaggacatgttaacaaatatggaatgaaaaaaaccatagatcttcatcgaatattattaaataattttttacctattaaaacttttttatttattctcccagttaatcaaattattaaaaggttaaaaaaaagaaatgtaacaaa

SEQ ID NO: 252719 - DNA, 631 bp, Unknown
  Bacterial polypeptide expressing nucleotide sequence isolated from the Sargasso Sea
atgcgggggcgtttcatcgtcctcgacggcctggatggctgcgggaaatcaacgcagatgcaacatctgtcgcagtggttgccggccagcaggctgatgccacccggcgcccgactgatcggcacccgcgagccgggtggaaccgagctgggccgggcggtgcgggagctgctgctgcagacctccagggagcgggctccggctccgacagcggaactgctgctttatgcggccgatcgtgcccagcatgtcgagactctgatccgacctgccctcgagcggggggactgggtgctcagcgatcgcttcagcggctcgaccatggcctatcagggttacggccgcggcctggatcgccggttgatcgagcaactagaggcgatcgccaccaccggcctgcagccggatctcacgctctggttatcgcttcctttggcgcagagcatccaacgacgggagggatccaggcaggaccggatcgaagcggaaggccaggcgtttctgggcagagtcgccgatggattcgctgcggtggcccggcagcgcggctggagtgcggtggcagccgacggaacggtggagcaggtcagccgttccctggaacagctgttgcaggaccggttcgggtgaa

SEQ ID NO: 252720 - DNA, 484 bp, Unknown
  Bacterial polypeptide expressing nucleotide sequence isolated from the Sargasso Sea
atgaagataataagtttcgagggaattgaaggggttggaaaatcaactcaaattaaactcttaacaaactactttcaatcaactggaatttcatatgagcaattcagagagcctggttcgtctgatgctggtgaaaaaatcagagaactccttttagataaatctttgcagttaagctcatctacagaattattactgatgtttgcagctcgcagtgaacttattaatcaaaaaattaataattcttcagctgaatttgtaatcctagatagatattttcatgcctcagttgcatatcaaggttatggaagaggaatttatctcgatagcatttatcagctaatcgagataacagaatgcccaaccccatcattaacaataattcttgatattgatgttgaaactggatttaaaagaaaagctgctgataaaaaggataggattgaaagtgcaggtgatgacttttttgagaaggtcaggacag

SEQ ID NO: 252721 - DNA, 727 bp, Unknown
  Bacterial polypeptide expressing nucleotide sequence isolated from the Sargasso Sea
atgaaaaaaatcatttcaatgttatttgcagttgcaatggtatttggatttatttcaaatgctaatgctgcaaaaacactaaaatgtcagacagttcttaacactaaagctgatgaagttaagatgttaaaggattttactgacactgttacaacgttaacagctggatctctaaagtttgaaattttacctgcaggagctgttgttggtgtaaaagaaactttagatgcagttgataaaggtctaatcgattgtggtttcgcatggactcactattggtcaggagatcaccctgcagctatgttatttggttcgccagtagctggtggtggagtaggtattgataatatcgcattcttatcttggttccaatacggtggtggtaaagaactatatgaccaattatggaaagaaatgggaagagacattaaaggatttatgattcaaccagttggaccagaagctttaggttggtttccaaaaccaattaaagacatggctgactttagaaaatataaattcagaactcctccaggaattccaggacaaacttataaagacatcggtatcgcatctgtagctatgggtggtggagacattctaccagctttagaagcaggcacaattgatgctgctgaatggtgttgtccaaaaccagacttaacttttggtttccaaaaagtattaaagcactactacttacaaggtttacaccaagtagtcgtaa

SEQ ID NO: 252722 - DNA, 640 bp, Unknown
  Bacterial polypeptide expressing nucleotide sequence isolated from the Sargasso Sea
atgaaatattttattacttttgagggtggtgaaggttctggtaagtccactcaagcaacattgctttcaaggtctttatcaaaagttaaagaaaagaatatattaacacgagaaccaggggggacaattttttctgaaaaaataagaagattattagttaataaaaataaatatgatatttcatctgatacagaattattacttatttatgcctctaggcatgaacatttaagagaaaaagtaattccttcattaaaaaaaaaaacagttatttgtgatagatttattcattcaacactaagttatcagataaatattaaaaattttaggcaaaagataaattttgttcataaaaattttgcatacaatctaaatccagatttaacatttcttcttgatatatcacctgaagagggtatcaagaggagtttaagaataaaaaaatcagaaacaagatttgaagaaaaatcaaaaaattttcatataaaggtaagaaatactctcttaactctaagtaaaaaagataaaaaaattttaaaaattgatgcttctcaatcaaaaaagacagttcattacagcattattgatcatattaattcaaaatctttttttaagaaattaataccttattcagtttgaa

SEQ ID NO: 252723 - DNA, 658 bp, Unknown
  Bacterial polypeptide expressing nucleotide sequence isolated from the Sargasso Sea
tatgattcaaccagttggacctgaagctttaggttggtttccaaaaccaattaaagacatggctgactttagaaaatataaattcagaactcctccaggaattccaggacaaacttacaaagacatcggtatagcatctgttgcaatgggtggtggagatattttaccagctcttgaagcaggaactattgatgctgctgagtggtgttgtccaaaacctgacttaacatttggttttcaaaaagtattaaagcactactatttacaaggtttacaccaagtagtcgtaaatgctgacttttatatcactggaaaaacttacaaagcgatgagtgctcatgagaagaagtctcttgaagtagcagctaatgcttcattagcaaaatctttaagttacagaatctatgagaatggtaaagctttaagagagttaactactaaacatggagtaattttagaagatacaccttcagattatttcacagagtatatggctgcagcaaaagcttctttaaataagaatgctaaagataataaatttttcaacgaggtttatacttcaatgaaagaatttgctgacatagccgttccattttggagtggtgctcaaatgtctaatgcgaagctaggaatggctcacgctgaaacattaaagtaa

SEQ ID NO: 252724 - DNA, 722 bp, Unknown
  Bacterial polypeptide expressing nucleotide sequence isolated from the Sargasso Sea
cggcggtggtaaagaactttacgaccaactttggaaagagatgaaaagagatattaaaggatttatgcttcagccagtaggtccagaagctcttggttggttcaaagagccaattaatagcatggatgactttagaaaatataagttcagaactcctccgggaattccaggacaaacttataaagatattggcgtagcatctgtagcaatgggtggtggagatattcttccagctcttgaagcaggtactattgatgctgctgaatggtgctgtccaaagcccgacatgacatttggtttccaaaaagttcttaaacactattatctacaaggtttacaccaagttgttgtaaatgctgatgtatatataaatggtaaagtttatagaagcttaactgatcttcaaaagaaagcttttgaagttgcgtctaatgcttctttaagtaagtcaatgagctacagaatatacgaaaacggaaaagctcttgcagaacttactggtaagcatggagtaattttacatgatactccagctgactattttccagcatatatggcagcagcgaagaaaagtttagaaacgaatgctgcaaagaataaattctttgctaaagtatggcaatctcaaaaagactttgctgatatagctgttccattttggagcggagctcaaatgtcaaatgctaagctaggaatggctcacgcagcgacattaaaatagt

SEQ ID NO: 252725 - DNA, 844 bp, Unknown
  Bacterial polypeptide expressing nucleotide sequence isolated from the Sargasso Sea
atgaaaaaaatcatttcaatgttatttgcagttgctatggtatttggatttatttcaaatgctaatgctgcgaaaacacttaaatgtcagacagttcttaacactaaggctgatgaagttaaaatgttaaaagactttactgacactgttacaactttgacaggtggatctcttaagtttgaaattatgcctgcaggagcagttgttggtgtaaaagaaactttagatgcagttgataaaggacttatcgattgtggatttgcttggacacactattggtcaggtgatcaccctgcagctatgttatttggttcgccagtagcaggtggtggtgttggtattgacaacatcgcattcttatcatggtttcagtatggtggaggaaaagagctatacgacagactatggaaagaaatgggaagagatattaaaggatttatgattcaaccagttggtcctgaagctttaggatggtttccaaaaccaattaaagatatggctgattttagaaaatataaattcagaactcctccaggaattccaggacaaacttataaagacatcggtatagcatctgttgctatgggtggtggagatattctaccagctttagaagcaggaactattgatgctgctgaatggtgttgtccaaaaccagacttaacgtttggtttccaaaaagtattaaagcactactacctacaaggtttacaccaagtagtcgtaaatgctgacttttatattactggaaaaacatatgaagctatgagcgctcatgagaagaagtctctagaagttgcagcaaatgcatctctagcaaaatctctaagttacagaatctaga

SEQ ID NO: 252726 - DNA, 646 bp, Unknown
  Bacterial polypeptide expressing nucleotide sequence isolated from the Sargasso Sea
gttggaaaggataaagacagtgtctacttctaagggtctattcatatcctttgaaggaattgatggctgtgggaaatcaacccaaatcaaaatgctttgttcttatttaaaagatagaaataaagaatttcttatggtaagagagccaggtggcactgatatatcagaacaaatacgtaagatattacttcatagtcatgatcaagaaatttctgatagaactgaagcattgctgatgacaggtagtagagcacagcttatcgatgaaaagatattaccttttttaaatcaaggtaaaatagttattgctgatagattcttagattctactttagcttatcaaggaggaggaagagaattaaatcttaattggttgatcgacttgaataattttgcaactaataatacttttcccgatattactttttttatagatattgaaccagaggtcggcgctaaaagaagcggatctagcaaagatagaatagaaagcgctggattagaatttcagtcaagagttaggaaatcttatattaaattatccacactttttaatgatagatatttaactttagatggaaatcaggaaaaaaaaattattcataaaaaaattgtttcacatttattagaaaaggattcgtggtga

SEQ ID NO: 252727 - DNA, 756 bp, Unknown
  Bacterial polypeptide expressing nucleotide sequence isolated from the Sargasso Sea
tttgaatgcaaaaagtgatgaagcaagactattaaaagaagagtttactgacagagtaacacttttaactggtggatctttagaatttgaaataatgccagcaggtacagttgttggtggaaaagaaacactagacgctattgataaaggtttaatcgactgtggttttgcttggactcactattggtcaggagaacacccagctgcaatgctttttggctcacctgtagcaggtggcggtgtaggtattgataaccttgcttttttatcttggtttaatgctgctggtggaaaagaattatacgaacaactttgggatgaaatgggtagagacataaaaggttttatgcttcaacctgttggaccagaagctcttggttggtttaaagaaccaattaatagtatggaagatttcagaaaatatcgttttagaactcctccaggcattccaggtcaaacatataaagatattggcattgcatcagtagcaatgggtggaggagatattcttcctgcacttgaagctggtacaatagatgcggcagaatggtgttgtccaaaacctgacagtgtatttggttttcaaaaagtattaaaacactattatcttcaaggtttacatcaagttgtcgtaaatgcagatttttacatgaacggtactctatatgatagtttaaccgatcatgaaaaagcttcattacaggtagcagctgatgcatcattgatgctaactttgtctgatagaatttatgaaaa

SEQ ID NO: 252728 - DNA, 625 bp, Unknown
  Bacterial polypeptide expressing nucleotide sequence isolated from the Sargasso Sea
gtttccaaaaaccaattaaaagatatggctgactttagaaaatataaattcagaactcctccaggaattccaggacaaacttacaaagacattggtatagcatctgttgcgatgggtggtggagatatcttaccagctcttgaagcaggaactattgatgccgctgaatggtgttgtcctaaaccagacttaacatttggtttccaaaaagtattaaagcactattatctacaaggtttacaccaagtagtagtaaacgctgacttttatattactggaaaaacttataatgctatgagtgatcatgagaaaaagtctcttgaggttgcagctaatgcttcattagccaagtctttgagttacagaatttatgaaaatggaaaagcattacaagaacttactactaaacatggagtaaaattagaagatactccatcagactactttacagaatatatggcagctgcaaaagctacattgaataaaaacgctgcgaagaataaattcttcaatgaagtttatacttcaatgaaaaactttgcagacgttgcggttcctttctggagtggcgcacaaatgtcaaatgcgaagctaggaatggctcacgctgcaacattaaagtaat

SEQ ID NO: 252729 - DNA, 571 bp, Unknown
  Bacterial polypeptide expressing nucleotide sequence isolated from the Sargasso Sea
atataaaaaattaaaaaaattaaaacttgcttctattttaacaagagagccaggtggaacaaaaaatgcagaacgaataagaaaattaatacttgaagattattttgatcaaaattctggagaaaaatttgacaaatatactgacactttgctttatcttgcagcaagaaatgaacacattttaaaagtaataaagccagcccttactaaaaaaaaaattgttatctgtgatcgatttattgactcgacgctagcttatcaagtttatggcaaaaaagttgataaaaaactagttaatgagatacacaagcatattttaaataacataaatccaaacattaccttcatattgaaagttaatattaatgcagcactaaaaagattaaataaaagaaaaataaaaaatagatatgataaattttctaaaaatttttatattaatgttcaaaaagcgtttctcaatattgctaaaaaaaataaaagaaaatattttgttttagataattcagaagatactaaagaaactgagaacgttatacttaaaaaaactatgaaactattaggtgtatga

SEQ ID NO: 252730 - DNA, 759 bp, Unknown
  Bacterial polypeptide expressing nucleotide sequence isolated from the Sargasso Sea
tactgatacagtaaccacattaacagctggttcacttaagtttgaaattttacctgctggtgctgtagttggagtaaaggaaactctagatgctgtcgataaaggtttaattgattgcggatttgcttggacacactattggtcaggtgaccatcctgcagctatgttatttggttcgccagtagctggtggtggtgttggtattgataatatcgcattcttatcttggttccaatatggtggtggtaaagaattatacgaccaattatggaaagaaatgggaagagatattaaaggatttatgattcaaccagttggtccagaagctttaggttggtttccaaaaccaattaaagatatggctgattttagaaaatataaattcagaactcctccaggtatccctggacaaacttacaaggacatcggtatagcgtctgttgctatgggtggtggagatattctaccagcacttgaagcaggaactattgatgctgctgagtggtgttgtccaaaaccagatttaacatttggtttccaaaaagtattaaagcactactatctacaaggcttacaccaagtagtggtaaatgctgatttttacattactggaaaaacttataatgctatgagtgatcatgagaagaagtctcttgaggttgcagctaatgcttcattggctaaatctttaagttacagaatctatgagaacggaaaagctttacaagaactaactactaaacatggagtaattttaga

SEQ ID NO: 252731 - DNA, 748 bp, Unknown
  Bacterial polypeptide expressing nucleotide sequence isolated from the Sargasso Sea
gtaaaagaaactttagatgcagttgataaaggtctaatcgattgtggtttcgcatggactcactattggtcaggtgatcaccctgcagctatgttatttggttcgccagtagctggtggtggagtaggtattgataatatcgcattcttatcttggttccaatatggtggtggtaaagaactatatgaccaattatggaaagaaatgggaagagacattaaaggatttatgattcaaccagttggaccagaagcattaggttggtttccaaaaccaattaaagacatggctgactttagaaaatataaattcagaactcctccaggaattccaggacaaacttataaagatataggtatcgcatctgtagctatgggtggtggagacattctaccagctttagaagcaggtacaattgatgctgctgaatggtgttgtccaaaaccagacctaacttttggtttccaaaaagtattaaagcactactacttacaaggtttgcaccaagtagtcgtaaatgctgacttttatattactggaaaaacttacaatgcaatgtctgatcatgagaagaagtctcttgaagtagctgctaatgcgtcattagcaaaatcattaagttacagaatctatgagaatggtaaagctttgaaagaactaacagaagttcatggagtaattttagaagatacaccttcagattatttcacagaatatatggctgctgcaaaagcttctttaaacaaga

SEQ ID NO: 252732 - DNA, 413 bp, Unknown
  Bacterial polypeptide expressing nucleotide sequence isolated from the Sargasso Sea
gatgaagtttaagaatagtttatttattacttttgaaggtcctgaggcaagtggaaaatcttcacaaataaaattattatcaaaattttttttaaaaaataagattccatacttaattacaagagaacctggaggtagcaaggtaggtgaaattcttagaaaaataatattagataaaaaaaattcaatttcaaatgctgaggaaattttattgttaatggctgcacgtttaaatcatataaataatattatcaaaccagcattaaaaaaaggtaaagtagtaatttctgatcgttttgctgactcaacttttgtttatcaaggttatgttaacaattatggattaaaagaagctataaatttgcataaaaaatttttaaataattttttaccaaataaaacttttttatttt

SEQ ID NO: 252733 - DNA, 967 bp, Unknown
  Bacterial polypeptide expressing nucleotide sequence isolated from the Sargasso Sea
aaaggactttactgatacagttaccgagttaactggtgggtctctgaagtttgaaatcttacctgctggagctgttgttggagttaaagaaactctagacgctgtagacaaaggtttgatcgattgtggatttgcttggacacactattggtcaggtgaacatcctgctgcaatgctatttggttctccagtagctggtggtggaataggaatagataatttagcatttttatcatggtttcaatatggtggtggaaaagcactttatgatcaattatggaaagagatgaacagagacattaaaggatttatgcttcaacctgtcggaccagaagctttaggttggtttccaaaaccaatcaaagatatggctgactttagaaaatataaattcagaactcctccaggaattccaggacaaacttataaagacattggtatagcatctgttgcaatgggtggtggagatattttgccagctctagaagcaggaactattgatgctgctgaatggtgttgtccaaaaccagacttaacatttggtttccaaaaagttttaaagcactattacttacaaggtttacaccaagtagtcgtaaatgctgacttttatattactggaaaaacatacgatgctatgagcgatcatgagaagaagtctctagaagttgcagctgatgcgtctttgataaaatctctaagttatagaattttatcaaacggtgaggctttacaggaacttactacaaaacatggagttattttagaagatactccatctgactacttcacagagtacatggcagctgctaaagcaactttaaataaaaatgcagagaaaaacgcattttttaaagaagtttatgactctatgaaagtatttgctgataaagcagttcctttctggagtggtgctcaaatgtctaatgcgaaagctagaatggctcacgcagcgacattaaagtaa

SEQ ID NO: 252734 - DNA, 362 bp, Unknown
  Bacterial polypeptide expressing nucleotide sequence isolated from the Sargasso Sea
tatgaaattaatatcatttgaaggaatcgagggtgttggtaagtctacccaaattaatctaattcaagagtggttaaaaataaaaggttttagttcaaaattaattcgagagccagggtcaactgggtttggagaaaaaataagagatttattattatcaaatgattctgatatttcagctcatactgagttgttattaatgtttgctgctagagcagagatggtcaatgagcatatgtttaactcaaaagaagacattattctctgtgacagatactttcatgcatcaattgcttatcaaggctatggaagaaagctctcacttgaactaaatgagaaattaattcagaacataaattgcc

SEQ ID NO: 252735 - DNA, 202 bp, Unknown
  Bacterial polypeptide expressing nucleotide sequence isolated from the Sargasso Sea
atgaaccgtaagggcaaatttatcgttgtcgaaggcctggaaggggccgggaaaagcagcgctattgctactgtgaagcagtatctgcagcgcgctggccacgaggtcgtgtgcacccgtgagccgggcggtactgcgctggcagaaagcctgagaacgttagttaaacaggttcaggatgacgaggtcgtcgccccgcaaa

SEQ ID NO: 252736 - DNA, 682 bp, Unknown
  Bacterial polypeptide expressing nucleotide sequence isolated from the Sargasso Sea
gatgggaagagatatcaaaggatttatgattcaaccagttggacctgaagctttaggttggtttccaaaaccaattaaagatatggctgactttagaaaatataaattcagaactcctccaggaattccaggacaaacttacaaagacattggtatagcatctgttgctatgggtggtggagatatcctaccagcattagaagcaggaactatcgatgctgctgaatggtgttgtccaaaaccagatttaacatttggtttccaaaaagttttaaagcactactacctacaaggtttacaccaagtagtggtaaatgctgacttttacattactggaaaaacttataatgctatgagtgatcatgagaagaagtcccttgaagtagctgctaatgcttcattagctaaatctttaagttacagaatctatgagaacggaaaagctttacaagagctgactactaaacatggggtaattttagaagacacaccttctgattatttcacagaatatatggctgccgcaaaagcttctttaaacaagaacgctgcagaaaataaatttttcaatgaagtttatacttcaatgaaaaaatttgctgatatagctgttccattctggagtggtgctcaaatgtctaatgcgaagctaggaatggctcacgcagcaacattaaagtaa

SEQ ID NO: 252737 - DNA, 598 bp, Unknown
  Bacterial polypeptide expressing nucleotide sequence isolated from the Sargasso Sea
aatgaaaataatttcatttgaaggaattgaaggtgttggtaaatctacacaaattaatctattgaaggattatcttgaatctaaaaattacttggtagaagtatatagagagcctggatcaacatttgttggtgaaaaaataagagatatattgttagattcgaataatgatttatcaaatgaaacagaactattgttaatgtttgcagcaaggtcagagctaatagataaaaaattaaatacttctcaatgcgattatttattattagataggttttatgatgcatcgatggcatatcaaggttatggaagaaaattatcgaaagactttataacttcattaacattatttataaattgtccaattccagatttatcttttttattagatatatccgtaagtgaaggctttaaaagaaaaaatagcgatgtaagagatagaatcgaatcatctagtaacgatttttttaataaagttagaagaggctataaggcaattgcaaaggcaaacaagaatagatttgaaataattaatgctgttaatgatatagataaaattcatcaaattgtaattaacaaacttcaatctaaaaaatga

SEQ ID NO: 252738 - DNA, 578 bp, Unknown
  Bacterial polypeptide expressing nucleotide sequence isolated from the Sargasso Sea
cctactggcccacggagtcaccgtgcatctcacgcgtgaaccaggtggcacccctgttgcagaagccattcgcgccattttgcttgaggatcatgatgaaatgattgacccgaaaaccgaggcattgctgatgagtgccagccgggcccaacacatcgcacgggtgatcgaaccgagccttaccaatgaacactgggttttgtgtgatcgtttttttgatgccagtctcgcctaccaaggaggcgggcgtggcttgtccatgccggacatgcagcagcttcaaaactgggttgtgggcaccaatgtgcccgatttgaccatcctactggatgcaccggtatcggtgtgcctctcacgcatcgaaaatcgcacccatcgtgatcgcattgaacaagaaacacacgatttctttgaacaggtccgccaaacctacctggccctggcacaagcgcagcccgagcggattcatatcatcgatgcctcgcaatcattcgaagcggtggcccaggataccaaagcgctcatccaccgtcattttgtggatcatttaggaatgcttgcccgtgactctgcatgac

SEQ ID NO: 252739 - DNA, 259 bp, Unknown
  Bacterial polypeptide expressing nucleotide sequence isolated from the Sargasso Sea
gatgtatagaaaaaaatctctttttataacatttgaaggtattgaaggatctggcaaaacttatcaaagtaaaaaactatataataaattaaaaaaaaagaatcttcctgtaattttcacaagagaacctggcggatcaaaaagcgctgaaataataagagatattatattaaatggagcaaaaaataagttcaataaatatactgacgcattactatatttagcgtcaagatcagagcatataaaaaatttattagct

SEQ ID NO: 252740 - DNA, 694 bp, Unknown
  Bacterial polypeptide expressing nucleotide sequence isolated from the Sargasso Sea
ctttggaaagaaatggaaagagacatcaaaggatttatgcttcaaccagttggaccagaagctttaggctggtttccaaaaccaattaaagatatggctgattttagaaagtataagttcagaactcctccaggaataccaggacaaacttataaagacattggtatagcgtctgttgctatggggggtggagatattctaccagctttagaagcaggtacaattgatgcagctgagtggtgttgtccaaaaccagatttaacatttggttttcaaaaagtattaaaacattattacttacaaggtttacaccaagtagtcgtaaatgctgacttttatattactggaaaaacttataaagcgatgagtgctcatgagaagaaatcacttgaagttgctgctaatgcttcattagcaaaatctttaagctatagaatctatgagaatggtaaagctttacaagaacttactactaagcatggagtaaaattagaagatactccatctgactacttcacagaatatatggcagctgcaaaagctacattgaacaaaaatgctgcaaaaaataaattttttgcagaagtttatgattcaatgaaagactttgctgatgttgctgttcctttctggagtggtgctcaaatgtctaatgcgaagctaggaatggctcacgcagcaacattaaagtaat

SEQ ID NO: 252741 - DNA, 568 bp, Unknown
  Bacterial polypeptide expressing nucleotide sequence isolated from the Sargasso Sea
atgcttaaagactttactgatacagttactaaattaacaggtggttcattaaaatttgaaattatgccagcaggtacagttgtaggagttaaagaaactcttgatgctgttgataaaggtttaattgattgtggttttgcttggactcactattggtcaggtgaacacccagctgcaatgttatttggatctccggtagcaggtgcaggtgttggtattgacaacattgcattcttatcttggttcctatcaggtggtggagagcaactatatgatcaactttggaaagaaatgaaaagagacatcaaaggtttcatgcttcaaccagttggaccagaagctttaggatggttcccggagccaatcaaaaatatggatgatttcagaaaattgaaattcagaactcctccaggaattccaggacaaacttataaagatatcggaattgcatcagttgctatgggtggtggagatattcttccagcacttgaagcaggaactattgatgctgctgaatggtgttgtcctaagccagacatggtttttggtttccaaataggttcttaaa

SEQ ID NO: 252742 - DNA, 663 bp, Unknown
  Bacterial polypeptide expressing nucleotide sequence isolated from the Sargasso Sea
aatgaaaaaaatcatttcaatgttatttgcagttgcaatggtatttggatttatttcaaatgctaatgctgcaaaaacactaaaatgtcagacagttctaaacactaaagctgatgaagttaagatgttaaaggattttactgacactgttacaacgttaacagctggatctctaaagtttgaaattttacctgcaggagctgttgttggtgtaaaagaaactttagatgcagttgataaaggtctaatcgattgtggtttcgcatggactcactattggtcaggagatcaccctgcagctatgttatttggttcgccagtagctggtggtggagtaggtattgataatatcgcattcttatcttggttccaatacggtggtggtaaagaactatatgaccaattatggaaagaaatgggaagagacattaaaggatttatgattcaaccagttggaccagaagctttaggttggtttccaaaaccaattaaagacatggctgactttagaaaatataaattcagaactcctccaggaattccaggacaaacttataaagacatcggtatcgcatctgtagctatgggtggtggagacattctaccagctttagaagcaggcacaattgatgctgctgaatggtgttgtccaaaaccagactt

SEQ ID NO: 252743 - DNA, 184 bp, Unknown
  Bacterial polypeptide expressing nucleotide sequence isolated from the Sargasso Sea
ttgttcatcacgtttgagggaatcgagcattgtgggaagacgacgcaatcccgcctgattgcggatcgactccggaatacgcgtcgctccgtcgtcctgactcgcgagcccggagggacgccgctcgggacagccatacgggagctggtcctccagccttcaaccgacccaatcgacacgacgg

SEQ ID NO: 252744 - DNA, 694 bp, Unknown
  Bacterial polypeptide expressing nucleotide sequence isolated from the Sargasso Sea
gatgttaaaggactttactgatacagtaactgaattaacgagtggatcgttaaagtttgaaattcttcctgcaggagctgttgttggagttaaagaaactctagacgcagttgataaaggattgattgattgtggtttcgcatggactcactattggtcaggagatcaccctgctgctatgttatttggttcgccagtagctggtggtggagttggtattgataacttagctttcttatcttggttccaatatggtggtggtaaagaattatacgaccaactttggaaagaaatgggaagagacatcaaagggtttatgttacaaccagttggacctgaagctttaggttggtttccaaaaccaattaaagacatggctgactttagaaaatataaattcagaactcctccaggaattccaggacaaacttacaaagacattggtattgcgtctgtagcgatgggtggtggagatattcttccagctcttgaagcaggtacgattgatgctgctgaatggtgttgcccaaaacctgatatggtatttggtttccaaaaagtattaaagcactactatctacaaggtttacaccaagtagtggtaaatgctgacttttatattactggaaaaacttataatgctatgagtgctcatgagaagaagtctcttgaagttgctgctaatgcttcatta

SEQ ID NO: 252745 - DNA, 298 bp, Unknown
  Bacterial polypeptide expressing nucleotide sequence isolated from the Sargasso Sea
aatgaaagtaatcagttttgaaggttttgaatattctggaaaatcgacacagataaaacttttaaaaaaatattttataaaaaataatattaaatctacttttactagagagcctggaggtaataaagatctagaaaaaataagaaatgtgattttaaaatctaattttgataatttaagtttaataatgtttttcttttcatctagatttgcattattatcttcaattaaaaagaatgattttattgtatttgatagattttttgactctacttatgcttatcaaaaatataattct

SEQ ID NO: 252746 - DNA, 805 bp, Unknown
  Bacterial polypeptide expressing nucleotide sequence isolated from the Sargasso Sea
aatgaaaaaaatcatttcatttgtgtttggtgcagttttagtatttggttttatgtcaaatgctagtgcgaaaacactaaaatgtcagacagtccttaacactaaagctgatgaagttaaaatgttaaaagactttactgatactgtaacaactcttactgatggttcattaaaatttgaaattttaccagcaggtgcggttgttggagttaaagaaactttagatgcggtagataaaggtctaattgactgcggatttgcatggactcactattggtcaggcgaccatccagcagccatgttatttggttcgccagtagctggtggtggagttggtatagataacttagctttcttatcatggttccaatatggtggtggtaaagagttatatgatcaattatggaaagaaatgggaagagacatcaaaggatttatgcttcaaccagttggaccagaggctttaggttggtttccaaaaccaattaaggatatggctgactttagaaaatataaatttagaactcctccgggaattccaggtcaaacatataaagatattggtatagcgtcagtagcaatgggtggtggagacattttgccagctttagaggcaggtacgattgatgctgctgagtggtgctgtccaaaacctgatttaacatttggtttccaaaaagtattaaaacattactatttgcaaggtttacaccaagtagtggtaaatgctgacttttatattactggaaaaacatataacgcaatgacagctcatgagaaaaaatctcttgaagtagctgcaaat

SEQ ID NO: 252747 - DNA, 196 bp, Unknown
  Bacterial polypeptide expressing nucleotide sequence isolated from the Sargasso Sea
atgaaaggaaaatttattgttattgaagggattgatggatgtggaaagactacccaaatagatgaactatctcaatggcttccaaatagtggtctattaaagaaagaatctacgttaatcacaacacgagagccaggaggcagtctcctaggcaaaaaactaagagaactgattcttgataacaatgagaataaca

SEQ ID NO: 252748 - DNA, 844 bp, Unknown
  Bacterial polypeptide expressing nucleotide sequence isolated from the Sargasso Sea
ttgtggtttccatggactcactattggtcaggcgatcaccctgcagctatgttatttggttcgccagtagctggtggtggagtaggtattgataatatcgcattcttatcatggtttcaatatggtggtggtaaagaactatatgaccaattatggaaagaaatgggaagagacattaaaggatttatgattcaaccagttggaccagaagctttaggttggtttccaaaaccaattaaagacatggctgactttagaaaatataaattcagaactcctccaggaattccaggtcaaacttataaagacatcggtatcgcatctgtagctatgggtggtggagacattctaccagctttagaagcaggcacaattgatgctgctgaatggtgttgtccaaaaccagacttaactttcggtttccaaaaagtattaaagcactactacttacaaggtttacaccaagtagtcgtaaatgctgacttctatattactggaaaaacttacaatgcaatgtctgatcatgagaagaagtctcttgaagtagctgctaatgcgtcattagcaaaatctttaagttacagaatctatgaaaacggtaaagctttgaaggaacttacagaagttcatggagtaattttagaagatacaccttcagattatttcacagaatatatggctgctgctaaagcttctttaaacaagaatgctgcagataacaaatttttcaatgaagtatatacttcaatgaaagaatttgctgatatagcagttcctttctggagcggttctcaaatgtcaaatgctaagctaggaatggctcacgcagcaacattaaagtaat

SEQ ID NO: 252749 - DNA, 694 bp, Unknown
  Bacterial polypeptide expressing nucleotide sequence isolated from the Sargasso Sea
atgcttaaagactttactgacaatgttactaaattaacaggtggttcactaaaattcgaaattatgccagcaggtacagttgtaggggttaaagaaactcttgatgctgttgataaaggtttaattgattgcggatttgcttggactcactattggtcaggagaacatcctgctgccatgctatttggatctccagttgcaggcgcgggtgttggtatagataatatcgctttcttatcttggtttttatcaggtggtggagagcagctttatgaccaactttggaaagaaatgaaaagagacattaaaggctttatgcttcaaccagttggaccagaagctttaggatggtttccagagccaatcaagaatatggatgattttagaaaactaaaattcagaactcctccaggaattccaggacaaacttataaagatattggaattgcatcagttgcaatgggtggtggagatattcttccagctcttgaggcaggaactattgatgctgctgagtggtgttgtccaaagcctgacatggtttttggtttccaaaaagttcttaaacattactatttacaaggtctacaccaagtagtggttaatgctgacttttatgtgaatggaactaaatataatgcattaactgatcatgaaaagttttctttaaaaatggctgcagatgcttcttaaa

SEQ ID NO: 252750 - DNA, 868 bp, Unknown
  Bacterial polypeptide expressing nucleotide sequence isolated from the Sargasso Sea
cgcagttgataaaggacttatcgattgtggatttgcttggacacactattggtcaggtgatcacccagccgctatgttatttggttcaccagtagcaggtggtggagttggtatagacaatttagcatttttatcatggtttcagtatggtggtggaaaagagctttatgatcaactatggaaagaaatgggaagagacatcaaaggatttatgcttcaaccggttggcccagaagctttaggttggtttccaaaaccaattaaaaatatggctgacttcagaaaatataaattcagaactcctccaggaattccaggtcaaacatataaagatattggaattgcatctgtagcaatgggtggtggagatattttgccagcattagaagcaggtacaattgatgcagcagaatggtgttgccctaaaccagatttaacatttggtttccaaaaagtcttaaaacattactatctacaaggacttcaccaagtagtagttaatgctgacttttatattactggaaaaacatataatgctatgagtgcccacgagaaaaaatctatagaagtagcggctaatgcttcattagctaaatctttaagttacagaatctatgaaaatggaaaagctttaagagagttaactactaagcatggagttattttagaagatactccttctgactacttcacagaatatatggctgcagctaaagcaactttaaacaaaaatgctgagaaaaatgcatttttcaaaaaagtttatgactctatgaaagagtttgctgatgttgctgttcctttttgggctggtgctcaaatgtcaaatgctaagctaggaatggctcacgcagcgacattaaagtaa

SEQ ID NO: 252751 - DNA, 881 bp, Unknown
  Bacterial polypeptide expressing nucleotide sequence isolated from the Sargasso Sea
aggagttaaagaaactcttgatgctgttgacaaaggtttaattgattgtggatttgcttggactcactattggtcaggtgaacatcctgctgctatgctatttggatctccagttgctggtgcaggtgttggtatagacaatatcgctttcttatcttggttcttatcaggtggtggagagcaactttatgaccaactttggaaagaaatgaaaagagacatcaaaggttttatgcttcaaccagttggaccagaagctttaggatggtttccagagccaatcaaaaacatggatgatttcagaaaattgaagtttagaactcctccaggaattccaggacaaacttataaagatattggaattgcttcagttgctatgggaggtggagatattcttccagctcttgaagcgggaactattgatgctgctgaatggtgttgccctaagcctgatatggtttttggtttccaaaaagttcttaaacattattacttacaaggtttacaccaagtagtggttaatgctgacttttacttaaatgggactaaatataatggcttaactgaccatgagaaaacttctttaaaagttgcagcagatgcttctttgatgaaatctttagcaagaagaattcttgtaaacggagaagcattacatgaattgactactaaacatggtgttcaattgcatgatactccaaaagattactttgttgagtacatggcagcagctaacgctactttagaaaagaactcaaaagaaaatgcgttctttaaaaaagtatgggactctcagaagaaatttgctgatacagcagttcctttttgggcaggtgctcaaatgtcaaatgcgcagctaggaatggctcacgcggcgacat

SEQ ID NO: 252752 - DNA, 812 bp, Unknown
  Bacterial polypeptide expressing nucleotide sequence isolated from the Sargasso Sea
tattttagtaattggatttacttcaagcgctaatgctgcaaaaacactaaaatgtcagacagtacttaacactaaagctgatgaagttaagatgttaaaagattttactgatactgtaacaactttaactggtggatctctaaaatttgaaatcttacctgcaggtgcggttgttggagtaaaagaaactttagatgctgttgacaaaggtctgattgattgtggattcgcatggactcactattggtcaggagatcaccctgcagctatgctatttggttctccagtagctggcggtggagtaggtattgacaatatcgctttcttatcatggtttcaatatggtggtggtaaagaattatacgaccaactttggaaagaaatgggaagagatattaaaggatttatgattcaaccagttggtccagaggctttaggatggtttccaaaaccaattaaagatatggctgactttagaaaatataaattcagaactcctccaggaattccaggacaaacttataaagatatcggtatagcttctgttgctatgggtggtggagatattttaccagcacttgaagcaggaactattgatgctgctgaatggtgctgtccaaaaccagacctaacatttggtttccaaaaagtattaaagcattattatctacaaggtttacaccaagtagtggtaaacgctgacttttatattactggaaaaacttataatgccatgagtgatcatgagaagaagtctcttgaagtcgcagctaatgcttcattagctaagtctctaagttacagaatctaga

SEQ ID NO: 252753 - DNA, 696 bp, Unknown
  Bacterial polypeptide expressing nucleotide sequence isolated from the Sargasso Sea
aactttggaaagaaatgggaagagacataaaaggatttatgattcaaccagttggaccagaggctttaggttggtttccaaaaccaattaaagatatggctgattttagaaaatataaattcagaactcctccaggaattccaggacaaacatacaaagacattggtatagcatctgttgcaatgggtggtggagatattctaccagctcttgaagcaggaactatcgatgccgctgaatggtgttgtccaaaaccagatttaacatttggttttcaaaaagttttaaagcactactatttacaaggtttacaccaagtagtggtaaatgctgacttttatattactggaaaaacttataaagcgatgagtgctcatgagaagaagtctcttgaagttgctgctaatgcttcattagcaaaatctttaagttacagaatctatgaaaacgggaaagctttacaagagcttactactaaacatggagtaattttagaagatacaccttctgattatttcacagaatatatggctgctgcaaaagcttctttaaataagaacgctgcagagaacaaatttttcaatgaagtttataattctatgaaaaaatttgctgatatagctgttccattctggagtggtgctcaaatgtctaatgctaagctaggaatggctcacgcagcaacattaaagtaat

SEQ ID NO: 252754 - DNA, 628 bp, Unknown
  Bacterial polypeptide expressing nucleotide sequence isolated from the Sargasso Sea
tttgtttatttcttttgaaggaggcgaaggtgtaggaaaaagtacacaaatagatttacttaaaaaatttctttcaaaaaaaaacacaaaggtaacctctaccagagaacctggtggtactagagaaggtgaatatattagaaaacttttagtgtctggagataaaaatacttgggacagttattctgaagcattaatatttaatgcattgagaagagagcatattaacaagttaatcaaccctgcaattcaaaatggtgaaattatactatgcgatagatatatagactcaacagttgtatatcaggggctagttggcaaaattgatgaacagaaattacttaatttacataacacttattgttatggactatatccagatttaacattgtttttacatttaaatcctaagattggattggatagaactatcaatagaaataacaaaaatgaaaatagatttgaaaaactaggtttagattatcatcaaaaaatacttgatgggtttaattctttatataaaaaatatccaaaaagaataataaaaattgatgcaagtgaaagtaaacaaagtatatctgataaaataaatttacatgttttggaattacttaatataaatgattaa

SEQ ID NO: 252755 - DNA, 418 bp, Unknown
  Bacterial polypeptide expressing nucleotide sequence isolated from the Sargasso Sea
gatgcaggggcgtttcatcgtcctcgacggcctggatggctgcgggaaatcaacgcagatgcaacatctgtcgcagtggttgccggccagcgggctgatgccacccggcgcccgactgatcggcacccgcgagccgggtggaaccgagctgggcagggcggtgcgggagctgctgctgcagacctcaagggagcgggctccggctccgacagcggaactgctgctttatgcggccgatcgtgcccagcatgtcgagactctgatccgacctgccctcgagcggggggactgggtgctcagcgatcgcttcagcggctcgaccatggcctatcagggttacggccgcggcctggatcgccggttgatcgagcaacttgaggcgatcgccaccaccggtctgcagccggtctcacgctct

SEQ ID NO: 252756 - DNA, 797 bp, Unknown
  Bacterial polypeptide expressing nucleotide sequence isolated from the Sargasso Sea
tttgggtacacttcttcttactgttttttcagtaactggtgctaacgcaaaaacacttaaatgccaaactgttatcaatgcaaaagctgacgaagttgtaatgcttaaggacttcgggcaaactgttactgatttaacaggtggttcaattcaatttgaaattcttcccgctggtacagttgttggagtaaaagaaacattagatgctgttgacaaagggttaatcgattgtggttttgcttggacacactactggtctggtgaacacccagcagctatgttatttgggtctccagtagcaggcgcaggtgtaggaattgataacatcgcatttttatcttggttccaatatggtggtggtaaagaattatacgaccaactgtggaaagagatgaaaagagatattaaaggatttatgttacaacctgttggtcctgaagctttaggttggtttaaagaaccaattaatagcatggatgacttcagaaaatataaattcagaactcctccaggaattcctggtcaaacatataaagatatcggtgtagcttctgttgctatgggtggtggagatattttaccagctcttgaagcaggaactattgatgctgcagaatggtgttgtccaaaacctgatagtgtatttggtttccaaaaagtattgaaacattactaccttcaaggtttacaccaagttgttgtaaatgctgatttatatgtgaacggaaaagtttacagaagcatgactgatcacgagaaaaaagctatggaagtagctgctaatgcatctttatcaa

SEQ ID NO: 252757 - DNA, 640 bp, Unknown
  Bacterial polypeptide expressing nucleotide sequence isolated from the Sargasso Sea
atgaaaggaaaatttatcgttattgagggtattgatggatgtggtaaaactacccaaatagatgaactatctaaatggctacctaatagtggtctaataaataaagggtctaaattaattacaactagagagcctggaggaagtcttttaggtaaaaaactcagaggactgattcttgataataatgaagataacaagccttcatctcttgcagaattattgctttattcagcggatagagctgaacacgtttctaaaattatttcacctgctttaaataacaatgattgggtaataagtgatagattttccgattccacactggcttatcaaggttatggaagaaatataaatttagaaattattaaaaatattgaatctattgtatgtcaaggagaatctcctgatttaacttttttcttagaaatttctccagaagagagcatattccgaagaaaaaatgaaatcccagataggatagaatcagaaggtattagatttttagaaaaagttaatgaaggtttcaaaataattgccaaacaaaaaaactggaaagttatatctgcctcacaaaatattaaaactatttctaatcaaattaaagaaaccatactaaataatctttctaataataaatgat

SEQ ID NO: 252758 - DNA, 488 bp, Unknown
  Bacterial polypeptide expressing nucleotide sequence isolated from the Sargasso Sea
aatgaagggaaaatttattgttattgagggtattgatggatgtggtaaaactacccaaatagatgaactatctaaatggcttcctaatagtggtctaatgaagacaggggctaaattaatcacaacaagagagcctggaggcagtcttttaggaaaaaaacttagaggattgattcttgataataatgaaaataacaagccttcatctcttgcagaattattgctttattcagccgatagagctgaacacgtttccaaaattatttcacctgctttaaataacaatgattgggtaataagcgatagattttccgattccacactggcttatcaaggttatggaagaaatataaatttagaaataattaaaaatattgaatctattgtgtgtcaaggagtatctccagatctcactttcttcttagaaatttctccagaagagagcatattccgaagaaaaaatgaaattccagatagaatagaatcag

SEQ ID NO: 252759 - DNA, 238 bp, Unknown
  Bacterial polypeptide expressing nucleotide sequence isolated from the Sargasso Sea
gatgtataaaaagaggaatttttttattacttttgaaggcatagagggatctggaaagtcttttcaaagtaaaaaattatttaaaaaaattaaaaatttaggacttccagcaatttacacaagagaacctggcggaaccgtaggtgctgaaaaaataagaaaaattttacttgatgattattttcattcaaaattaaaagaaaaatttgataaaaatacagatactttattgtattta

SEQ ID NO: 252760 - DNA, 385 bp, Unknown
  Bacterial polypeptide expressing nucleotide sequence isolated from the Sargasso Sea
atgagaggaaaatttattgttatcgaaggaatagatggttgcggaaaaacaacccaaattgatgagatttctaaatggctacctactagtggtcttatgggcgataatgcgaaattagtaacaactagagagccaggaggaagcttattaggtaaaaaacttagaaatttaatacttgataataataaaaataataaaccttcttcacttgctgaattattactttactctgctgatagagcagaacatgtttctaaaataatttctccttcattagaaaaaaaggactgggtacttagcgatagatttgctgactctacacttgcttatcaaggatatggcagaaatataaatctagaaataataaaaaatatcgaatcaattg

SEQ ID NO: 252761 - DNA, 889 bp, Unknown
  Bacterial polypeptide expressing nucleotide sequence isolated from the Sargasso Sea
ggagttaaggaaactcttgatgctgttgataaaggtttgattgatgtgggattcgcatggactcactattggtcaggtgatcaccctgctgctatgttatttggttcgccagtagctggtggtggtgttggtatcgacaacttagcgtttctatcatggtttcaatatggtggtggtaaggaattatacgaccaactttggaaagaaatggggagagacatcaaaggatttatgcttcaaccagtaggcccagaagctttaggttggtttccaaaaccaattaaagatatggctgactttagaaaatataaattcagaactcctccaggaattccaggacaaacttacaaagacattggtatagcgtctgttgcaatgggcggtggagatatcttaccagctcttgaagcaggaactattgatgctgctgaatggtgttgtcctaaaccagacttaacatttggtttccaaaaagtattaaagcactattatctacaaggtttgcaccaagtagtagtaaatgctgacttttatattactggaaaaacttataatgctatgagtgatcatgagaagaagtcccttgaagttgcagctaacgcttcattagctaaatctttaagttacagaatctatgagaatggaaaagctttacaagaacttactactaaacatggagttaaattagaagatactccttctgactactttacagaatatatggcagctgcaaaagctacattgaataaaaacgcagcgaagaacaaattcttcaatgaggtttacacttcaatgaaaaactttgctgatgttgctgttcctttctggagtggtgctcagatgtctaatgcgaagctaggaatggctcacgctgcaacattaaagtaat

SEQ ID NO: 252762 - DNA, 608 bp, Unknown
  Bacterial polypeptide expressing nucleotide sequence isolated from the Sargasso Sea
attgtttataacttttgaaggaatagagggctcaggtaaatctactcaggtagaacttttacaagaatctttgaaaaaaatacattttgatgttgttgctactcgtgaacccggatggggaaaagtggggaaactcataagaaagatcattcttgactatgatgatattgaaattgagcccattgcagaattatcattattttgtgcggatagagcacagcatatacaagagttaattagacctaaattagcagaggggaaaattgttttgtgtgataggttttatgactcaacaatagcttatcaaggctatggcagaggaattgatacagaattagtaaaaaagcttggagtacatgcggctttaggtgttaaccctacaattacctttttaattgatatttctgtaaatacagctctaagtagaatagtttcaaggcctggtagaaatagaattgatgatgaatcatttgaatttcattcaagagtgagaaaggcctatttgtccttacagcaaaatcagcctaatagaattttcataataaatggtgaacaagagattcatgatgttcatgaagaaatcaaaaaaatattaaaagaaaagttta

SEQ ID NO: 252763 - DNA, 725 bp, Unknown
  Bacterial polypeptide expressing nucleotide sequence isolated from the Sargasso Sea
tggtggtggtgttggtatcgacaatatagcgttcctatcatggttccaatatggtggtggtaaagaattatacgaccaactttggaaagaaatgggaagagacataaaaggatttatgattcaaccagttggcccagaagctttaggttggtttccaaaaccaattaaagatatggctgattttagaaaatataaattcagaactcctccaggaattcctggacaaacttacaaagacatcggtatagcatctgttgcaatgggtggtggagatattctaccagctcttgaagcaggaactattgatgccgctgaatggtgttgtccaaaaccagatttaacatttggtttccaaaaagtattaaagcactattatctacaaggtttacaccaagtagtggtaaatgctgacttttatattactggaaaaacttataatgctatgagtgatcatgaaaaaaagtctcttgaggttgcagctaatgcttcattagctaaatcattaagttacagaatctatgagaatggtaaagcattacaagaactaactactaaacatggagtaattctagaagatacaccttcagattatttcacagaatatatggctgcagcaaaagcatctttaaataaaaatgcaaaagaaaataaattctttaacgaagtttataattcgatgaaagaatttgctgatattgcagttccattctggagtggtgctcaaa

SEQ ID NO: 252764 - DNA, 619 bp, Unknown
  Bacterial polypeptide expressing nucleotide sequence isolated from the Sargasso Sea
gatgaataaaaaaaaaggtttatttataacttttgaaggtcctgaggctagcggtaaatcatcacaaattttactgttggaaaaatatttaaaaaaaaacaaaattccatttataagaacaagagaacctggtggaactaaaattgcagagtcactcagaaaacttattttaaaagttaagtcagatattaatatacaggaagaaatattaatgctcatggcagcgagatcacatcatattaataatgttatagtcccatctctcaaaaagggtatgttagttatatcggatagatttgcagactctacatttgtttaccaggggtacgtaaataaatttggtatacaaaaagctaaaaatttacataaaaatctattaaataattttttaccacataaaacttttctgtttgaattatctaccaagttaataatatcaaggttaaagcaaagaaaatttaaaaataaatacgataaattagatagaaaattccatgatactgttaataaaggctataaattaatttataataacaaaagatttgtaaaaatagatgcatctaagcctattactcaaattaataatgaaattataaattatataaattcattgctatga

SEQ ID NO: 252765 - DNA, 631 bp, Unknown
  Bacterial polypeptide expressing nucleotide sequence isolated from the Sargasso Sea
atgaccggtcgcttcatcgttctggagggcatcgacggctgcggcaagaccacgcagatccggcatctggttgagtggttgcccaacagcggtctgatgccgaagggcgctgctgtggtctgcacccgtgagccgggaggcactcccctggggcgctcgatccgggagctgctgctgcacacgtcagaccaggaggcaccagctcccaccgctgaactgttgctgtatgccgccgatcgggcgcagcatgttgaaacgttgattcgccctgctctggagcgtggtgattgggtgatcagcgatcgtttttctggatcgacccttgcctatcaaggctatggccgtggtttggatcgggacttgattcagcggctcgaacagatcgccaccgcggggctgcagcccgatctcaccctgtggctgcgcctttccgttcaagagagcctgcagcgtcgtctcggggataaggaggaccgcatcgaagccgagggagccgcattcctggagagggttgcgcagggttttgcccagttggctgagcagcgctcctggtgcgcaatcgctggagatcagtcagccagtgctgttcgtgctgctctggaacgtcagcttatggagcatctggcttgag

SEQ ID NO: 252766 - DNA, 643 bp, Unknown
  Bacterial polypeptide expressing nucleotide sequence isolated from the Sargasso Sea
gctgaataaaaataaggtagaaaagggcactcttattacttttgaaggtatagatggctctggaaaatctactcaaataagaagattaaaaagctatttaaaaaaaaataatattaaaaactttttctttaccagagaacctggaggcagtgaattagggaatagagttaaaaattttttaataaataataaaaacaatagtttatctaaacaaactcagattttgctattaattgctgctcgttatgaacattatgtaaaattaattttgcctctattaaaaaaaaataaaatagtagtatcagatagatttcaagactcaacttttgcataccaatgtggaaataataaagatttacataatttattaactaattttaatcatttattatttaaaaagtttcaacctaatttaaccttcctattagatattaatccaaatgtatcgttaaaaagaattagtataagaaaaactaataatgctttcgataaaaaaaccttatccttttataaaaatgtaagagcaaattatttaaaactagccgagaaaaatagtagaataaaagtattaaatgctgaaaaaaaccaagatgagattttcaataatattactaaaacaatttttaaatatataaaattataa

SEQ ID NO: 252767 - DNA, 568 bp, Unknown
  Bacterial polypeptide expressing nucleotide sequence isolated from the Sargasso Sea
cctggctgagcgcctgcgtgaacagggtattgatgtgctgctgacccgtgagccgggtggcacgccactggctgagcgagtgcgcgagttgctgctggctcccagcgatgagccgatggcggccgacaccgagctgctgctggtgttcgcggcgcgtgctcagcacctcgcacaggtcatccgtccggcgctggcccgtggcagtgtggtgctgtgcgatcgctttaccgatgccacctatgcctatcagggcggcggtcgggggctttccgaagcgcgtattgcagagctggaaaccttcgttcaaggctcgctacgtcctgatctgaccctgatattcgacttgccggtggaagtgggtctggcccgtgcggcagcgcgcggtcggctggatcgtttcgagcaggagggccggcagttttttgatgccgtgcgccaggcttatctgcgtcgcgcagctgagcagccgcagcgctaccgtattctggatgccgcgcaatccttgagtgaggtgcagcaggcactgaacgcattgctgccacagctgctggagctgcagcgtggctga

SEQ ID NO: 252768 - DNA, 415 bp, Unknown
  Bacterial polypeptide expressing nucleotide sequence isolated from the Sargasso Sea
atgaaaggaaaatttatcgttattgagggtattgatggatgcggtaagaccacccaaatagatgagctatctaaatggctacctaaaagtggtctaataaataaagggtctaaattaatcacaacaagagagccgggtggcagtcttttagggaaaaaacttagaggacttattcttgataataatgaaaataacaagccttcatcgcttgcagaattattactctattcagctgatagagctgaacacgtctcaaaaattatttcacctgctttaaataaaaataattgggtaattagtgatagattttccgattcaacccttgcttatcaaggttatggaagaaaaatagatttagaaataataaaacaaattgaatctattgtatgtcaaggagaatatcctgacataactt

SEQ ID NO: 252769 - DNA, 695 bp, Unknown
  Bacterial polypeptide expressing nucleotide sequence isolated from the Sargasso Sea
actttggaaagaaatgggaagagatattaaaggatttatgattcaaccagttggaccagaggctttaggatggtttccaaaaccaattaaagatatggctgactttagaaaatataaattcagaacacctccaggaattccaggacaaacttacaaagacatcggtatagcatctgttgcaatgggtggtggagatattctaccagctcttgaagcaggaactattgatgctgctgaatggtgttgtccaaaaccagatttaacatttggttttcaaaaagtattaaagcactattatctacaaggtttacaccaagtagtggtaaatgctgacttttatattactggaaaaacttataatgctatgagtgatcatgagaagaagtctcttgaagttgctgctaatgcttcgttagcaaaatctttaagttacagaatctatgagaacggaaaagctttacaagagctaactactaaacatggggtaattcttgaagatacaccttcagattatttcacagaatatatggctgcagcaaaagcttctttaaacaagaacgctaaagaaaataaattctttaacgaagtttataattcgatgaaagcatttgctgatattgctgttccattctggagtggtgctcaaatgtctaatgcgaagctaggaatggctcacgcagcaacattaaagtaat

SEQ ID NO: 252770 - DNA, 629 bp, Unknown
  Bacterial polypeptide expressing nucleotide sequence isolated from the Sargasso Sea
aatgaaaggaaaatttattgttattgagggcattgatggatgtggtaaaactacccaaatagatgaactatctaaatggctccctaatagtggtctaataaagaaaggttctaaattaatcacaacaagagagccaggaggaagtcttttaggaaaaaaaattagaggactaattcttgataataataaaaataacaagccttcatcgcttgccgaattattgctttattcagctgatagagctgaacacgtttcaaaaattatttcacctgctttaaataacaatgattgggtaataagtgatagattttccgattccactctcgcttatcaaggttatggaagaaatatcaatttagaaataattaaaaatattgaattaattgtgtgccaaggagagtctcctgatctaactttcttcttagaaatttctccagaagagagtatattccgaagaaaaaatgaaattccagatagaatagaatccgaaggtattagatttttggaaaaagtcaatgaaggcttcaaactgatagccaaagaaaaaaactggaaagtaatatctgcctcacaaaatattgaaactatttcagatcaaatcaaagagactctactaaacaatttttcta

SEQ ID NO: 252771 - DNA, 295 bp, Unknown
  Bacterial polypeptide expressing nucleotide sequence isolated from the Sargasso Sea
atgaaagatggtttatttataacatttgaaggtggggaaggatctggcaaaactactcagattgctttgttatctgactatttagtttctaaatctttcaaagtctatgttacacgtgagccaggaggatctataggagccgagagtataagaaatcttctagttactggtaatccagataaatgggactctgaaacagaagcccttttaatgtatgctgccagacgcgataattatataagagtaattagacctaatttaaatgaaggaaaaattgttattagtgatagatttt

SEQ ID NO: 252772 - DNA, 601 bp, Unknown
  Bacterial polypeptide expressing nucleotide sequence isolated from the Sargasso Sea
aatgaaagtaatcagttttgaaggcttcgaatattctggaaaatcgacacagataaaacttttaaaaaaatattttataaaaaataatattaaatctacttttactagagagcctggaggtaataaagatctagaaaagataagaaatgtgattttaaagtctaatttcgataatttaagtttaataatgtttttctttgcatccagatttgcattattatcttcaattaaaaagaatgattttattgtatttgatagattttttgactctacttatgcttatcaaaaatataattctagagaaaaaaaacttattatcagtttaattaagttaattgataagaaatttatcccaaagataactttttatttgaagttagataaaaaaaatttaataagaaggaaaaataaaagattatattcaaataaatttgataaaaaatattttggacaattctcaagaattcaaaaaaattatgaagaaatatctaaaataaaaataggtgaacgtaagtttgttactattgatgcatcattatctgctaatgaagtacatgacaaaatcataataaatttaaaaaaatgcaaattgataaaatag

SEQ ID NO: 252773 - DNA, 332 bp, Unknown
  Bacterial polypeptide expressing nucleotide sequence isolated from the Sargasso Sea
gatgactaaaaaaaaaggtttatttataacttttgaaggtcctgaggccagtggtaaatcatcacaaattttacttttggaaaagtatctaaaaaaaaacaaaattcaatttatcacaactagagaacctggtggcactaaaattgctgagtcacttcgaaatcttattttaaaagttaagactgatattaacattcagcaggaaatattattactcatggcagcgagatcacatcatatcaataatgttataattcctgctctaaaaaaagggaagttagttatatctgatagatttgctgactctacttttgtttatcaaggctatgtaa

SEQ ID NO: 252774 - DNA, 423 bp, Unknown
  Bacterial polypeptide expressing nucleotide sequence isolated from the Sargasso Sea
gatggcggataggcagggttactttatttccttcgagggcggtgagggcagcggcaaatcaacacagatccgactgcttgtcgagtgggtcgagcaggttgcgcctaaatggcggccgcttaccacgcgtgagccgggcggcactgaagctgccgagaatatccgcacacttctggtgaccggctcagccgataaatggcgcccggctaccgaggccatgctgatgtcggcctcacgtcacgaacatgtggaaaatgtgatccgcccagcacttgctgagggccgcattgtgataagtgaccggtatagtgactcgacgacggtctatcaggggctggtgggcggcgttgacagcgcctcgatcgccgctctgcatcacctcgcctgtaacgggcttgttcccgatatcacctttcttctcga

SEQ ID NO: 252775 - DNA, 541 bp, Unknown
  Bacterial polypeptide expressing nucleotide sequence isolated from the Sargasso Sea
atgacaaaatttattacatttgaaggaattgatgcttccggtaaatcaacacaagcaaaaattttatacaaaatacttaaaagacaaaaaaaaaaagtaattataactagagaaccaggaggaactaaattttcagaaaaaatccgcaaaatagttgttaaagacgaaatacaacctttaacagaactatttttattttatgctgcacgaaacgaacattttgataaaattaaaaattatttaaaaaaaaattacatagtaatatgtgatagatatattcattcaacgtatgtatatcaacaacatcaacaaaaaatagaaagaaaatttatacatttattacaaaataagattagtagatattcatatccggatgtgactttttttattgatataagtgctgttgaagcaaaaaaaaggttaaaattgagaaaaaataaagataaatttgacaattacagtttaaaacaaatgaatttcttgaggaaggcatattatgaagaatataaaaaaggaaaaaatatatttaaattaaatggta

SEQ ID NO: 252776 - DNA, 628 bp, Unknown
  Bacterial polypeptide expressing nucleotide sequence isolated from the Sargasso Sea
atgtctatttctaaaggtagttttattacatttgaaggtatagatggttgtggaaaaagcacccaggtaaaaatgctagttgaatcaatgaatagcgttgaaaaaaacactattcttgttcgagagccaggcggtactaccatttcagaggaaataagagaaattttactccatcgtcacttgtcggatatttctgatagaacagaagcattgctgatgacaggaagtagagcacaacttacctatgaaattgtaatgcctaacttgataaatggaaaaaatgttgttgctgatcgtttttatgattcgactctagcatatcaaggtggtggtaggaagcttgatcttgattggttaattaagctaaatcattttgctacatatgaattagaacctgatgtaacatttttggttgatattttaccagaagaagcatcaaagagaaaaagtaaagaagaagatcgaattgagcgggctggaattgaattgcaaacattagttagaaatacatatctagaattatcaattaaatttaaagaacgatttgttgttattgatggtcatgaaactattgaaaatattcatacgtcaatacttaaggagctaaggagaagacagataatataag

SEQ ID NO: 252777 - DNA, 332 bp, Unknown
  Bacterial polypeptide expressing nucleotide sequence isolated from the Sargasso Sea
aatgaagatcatctcatttgagggtatagaaggtgtaggtaagtctacacaaattagattattaaaagattttcttgaatcaaaaaatcttgatgttgaagttttaagagagcctggttcaactttagcgggcgaaaaaatcagagatatattgttagacaataataataaattatcaaatgaaacagagcttcttttaatgtttgctgcaagatcagagcttgtaaataaaacaattttagataatcaatctgattatttattgttagatagattttttgatgcttcaatggcttatcaaggttatgggcgtgaaatatcaaaaaaattta

SEQ ID NO: 252778 - DNA, 682 bp, Unknown
  Bacterial polypeptide expressing nucleotide sequence isolated from the Sargasso Sea
aatgggaagagatatcaaaggatttatgattcaaccagttggaccagaggctttaggttggtttccaaaaccaattaagactatggctgactttagaaaatataaattcagaactcctccaggaattccaggacaaacttataaagatatcggtgtagcttctgttgctatgggaggtggagatattcttccagctcttgaagcaggaactatcgatgctgctgagtggtgttgtccaaaaccagatttaacatttggttttcaaaaagtattaaagcactattatctacaaggattacaccaagtagtggtaaatgctgacttttacattactggaaaaacttataaagctatgagtgctcatgagaagaagtctcttgaagttgctgctaatgcttcattagcaaaatctttaagctacagaatctatgaaaacggtaaagctttaagagagttaactactaagcatggagttaaattagaagatactccttctgattatttcacagaatatatggctgcagctaagaaaagtttggaaacaaacgctgctaaaaatgcattcttcaaagaagtttgggattctatgaaagaatttgctgatgttgcagttcctttctggagtggtgctcaaatgtctaatgcgaagctaggaatggctcacgcagcaacattaaagtaa

SEQ ID NO: 252779 - DNA, 326 bp, Unknown
  Bacterial polypeptide expressing nucleotide sequence isolated from the Sargasso Sea
aatgaaaggaaaatttatcgttattgagggtatcgatggatgtggtaaaactacccaaatagatgaactatcaaaatggctacctaaaagtggtctattaaaaaaagggtgtaatttaatcacaacaagagagccaggaggcagtcttttaggaaaaaaacttagaggactgattcttgataataatgaaaataacaagccttcatcgcttgcagaattattgctttattcagcggatagagcagaacacgtttcaaaaattatttcacctgctttaaataacaataattgggtaattagcgataggttttccgattccactctgg

SEQ ID NO: 252780 - DNA, 496 bp, Unknown
  Bacterial polypeptide expressing nucleotide sequence isolated from the Sargasso Sea
gatgattgatttggtggcgcgatttatcactattgagggaggagagggagcagggaagtcgacggcacaggttcggttgaaagcgacattggagagcagaggcatctcggttgtctgcactcgagagccgggtggaacacctctggcagagtccattcgacagacgctgctcgacgtcgagggggaggcgccagtggaaatggctgagctcctattgatttttgcttccagagcacagcatttggagaaagtcattgaacccgcgctcgctgcgggtaaatgggttatctgcgaccgctttactgatgcgactttcgcctatcagggttcagcccgcggtctgtccagcgaactgatctcaacacttgagcaactcgtccagggagggcgacagccagatgcggtgattctaatggatcttaagccacacatcggcatgaagagagccaagtcccgcggccccttggaccggtttgagcaggagcataatcacttt

SEQ ID NO: 252781 - DNA, 736 bp, Unknown
  Bacterial polypeptide expressing nucleotide sequence isolated from the Sargasso Sea
gaaatcttaccggctggagcagttgttggtgtaaaagaaactttagatgctgttgacaaaggtttgatcgattgtggattcgcatggacacattattggtcaggagaccatcctgcggctatgctatttggttcgccagtagctggtggtggagttggtatagataacatagctttcttatcatggtttcaatatggtggtggtaaagaattatacgaccaactttggaaagaaatgggaagagatattaaaggatttatgattcaaccagttggaccagaggctttaggttggtttccaaaaccaattaaagatatggctgattttagaaaatataaattcagaactcctccaggaattccaggacaaacttacaaagatattggtatagcatctgttgctatgggtggtggagatattctaccagctttagaagcaggaactatcgatgctgctgagtggtgttgtccaaaaccagacttaacatttggtttccaaaaagtattaaagcactattacttacaaggtttacaccaagtagtagtaaatgctgacttttacattactggaaaaacttataatgctatgagtgatcatgagaagaagtctcttgaagttgcagctaatgcttcattagctaaatctttaagttacagaatctatgagaacggaaaagctttacaagagctaactactaaacacggagtaatcttagaagatacaccttctgattatt

SEQ ID NO: 252782 - DNA, 831 bp, Unknown
  Bacterial polypeptide expressing nucleotide sequence isolated from the Sargasso Sea
gatgttaaaagactttactgatacagtaactgagttaactagtggatcgttaaagtttgaaatactacctgcgggtgctgttgttggagttaaagaaactcttgacgcagttgacaaaggattgatcgattgtggatttgcatggactcactattggtcaggtgatcaccctgctgctatgttatttggttcgccagtagctggtggtggagtaggtattgataacttagcgttcttatcttggttccaatatggtggtggtaaagaattatacgaccaactttggaaagaaatgggaagagacattaaaggatttatgttgcaacctgttggacctgaagctttaggttggtttccaaaaccaattaaagatatggctgactttagaaaatataaattcagaactcctccaggaattccaggacaaacttataaagacattggtatagcgtctgtagctatgggtggtggagatattctaccagctcttgaagcaggtactatcgatgctgctgaatggtgttgtccaaaaccagacatggtatttggtttccaaaaagttttaaagcactactatctacaaggtttacaccaagtagtcgtaaatgctgacttttacattactggaaaaacatataacgctatgactgctcatgagaagaagtctcttgaagttgctgctaatgcatcattagctaaatctttaagttacagaatctatgagaacggaaaagctttacaacaattaactactaagcatggagtaatattagaagacactccatctgactacttcgttgaatatatggctgctgcaaaggccactttaaa

SEQ ID NO: 252783 - DNA, 658 bp, Unknown
  Bacterial polypeptide expressing nucleotide sequence isolated from the Sargasso Sea
tatgcttcaaccagttggaccagaagctcttggttggtttcctagaaaaattaaaaatatggatgactttagaacattcaaatttagaacacctccaggaattccaggacaaacttataaagacataggtattgcatctgttgcgatgggtggtggagatattctgccagctttagaagcaggtacaattgatgcagctgaatggtgttgtccaaaaccagacatggtatttggtattcataaagtactaaaacattactacttacaaggtttacaccaagtagtggttaatgcagacttttatatcaatggatcaaaatacaaaaaactttcagatcatgagaaaaatgctcttaaagttgcagcagatgcatctttaatgagatctttagcttacagaatcaaagtaaacggagaagctctaaaagaacttacaacaaaacatggtgtaattcttgaagacactcctgcagattactttccagaatatatggctgctgcaaaagcaactttagagaaaaactctaaagaaaatgctttctttaaagaagtttacgactcaatggtaaactttgcgaacgttgcagttcctttctggtctggagctcaatcttcaaatgctaagctaggtatggcttatgcgaattctttgaagtaa

SEQ ID NO: 252784 - DNA, 592 bp, Unknown
  Bacterial polypeptide expressing nucleotide sequence isolated from the Sargasso Sea
ctgtttatcggatttacggtatcagctaatgctgcaaagacattaaaatgccaaactgttatcagtgcaaaagctgatgaagttaaaatgttaaaagattggggtaatgatattaccgctcttacaaatggcgaaattaaatttgaaattcttcctgcaggtactgtagttggagtaaaagaaacattagatgcggttgacaaaggactgatcgattgtggatttgcttggacacactactggtcaggtgaacatccggcagctatgttatttggatctccagtagcaggtgcgggtgtaggaattgataatatcgctttcttatcatggttccaatatggtggtggtaaagaactttatgaccaactttggaaagaaatgaaaagagatataaaaggttttatgcttcaaccggttggtccagaagctcttggttggtttaaagaaccaattaatagcatggatgactttagaaagtataagttcagaactcctccaggaattccaggacaaacttataaagatattggtgtagcatctgttgcaatgggtggtggagatattcttccagctcttgaggcaggaacaattg

SEQ ID NO: 252785 - DNA, 898 bp, Unknown
  Bacterial polypeptide expressing nucleotide sequence isolated from the Sargasso Sea
acatctggatctctaaagtttgaaattttacctgcaggcgctgtagttggagttaaagaaacattagatgcagtggacaaaggtctaatcgattgtggtttcgcatggactcactattggtcaggtgatcaccctgctgctatgttatttggttcgccagtagctggtggtggtgtaggtattgacaatatcgcatttttatcatggttccaatatggcggtggtaaagaactatacgatcaactatggaaagaaatgggaagagatatcaaaggatttatgattcaaccagttggaccagaggctttaggttggtttccaaaaccaattaaagacatggctgactttagaaaatataaatttagaactcctccaggaattccaggacaaacatacaaagatattggtatcgcatctgtagctatgggtggtggagacattctaccagctttagaagcaggtacaattgatgctgctgaatggtgctgtccaaaaccagacttaacatttggtttccaaaaagtattaaagcactactacttacaaggtttacaccaagtagtcgtaaatgctgacttttatattactggaaaaacttacaatgctatgtctgatcatgagaagaagtctcttgaagtagctgctaatgcatcattagcaaaatctttaagttacagaatctatgaaaatggaaaagctctgaaagaacttacagaagttcatggagtaatcttagaagatacaccttctgattatttcacagaatatatggctgctgcaaaagcttctttaaacaagaatgctgcagaaaacaaatttttcaatgaagtttatacttcaatgaaagaatttgctgatattgcagttcctttctggagtgttcccaaatgtctaatgc

SEQ ID NO: 252786 - DNA, 307 bp, Unknown
  Bacterial polypeptide expressing nucleotide sequence isolated from the Sargasso Sea
aatgaaaggtaaatttatcgttattgagggtattgatggatgtggtaagactacccaaatagatgaactatctaaatggctgcctaatagtggtctaataaagaaagggtctaaattaattacaacaagagagccaggaggcagtcatctaggaaaaagacttagaggactgattttagataataataaaaataacaagccttcgtcacttgcagaattattgctttattcagctgatagagctgaacacgtttcaaaaattatttcacctgctttaaataataatgattgggtaataagtgataga

SEQ ID NO: 252787 - DNA, 199 bp, Unknown
  Bacterial polypeptide expressing nucleotide sequence isolated from the Sargasso Sea
atgaaaggaaaatttatagttattgagggtattgatggatgtggaaaaactactcaaatagatgaactatctaaatggcttcctaatagtggtctaataaagaaggggtctaaattaatcacaactagagagcctggaggtagtcttctaggaaaaaaacttagaagactgattcttgataataatgaaaataacaagc

SEQ ID NO: 252788 - DNA, 604 bp, Unknown
  Bacterial polypeptide expressing nucleotide sequence isolated from the Sargasso Sea
aatgtttgcagcattcttagttcttggttttatatcaaatgctaatgctaaaacattgaaatgtcagaccgtccttaacactaaggctgatgaagtcaaaatgttaaaagactttactgacacggtaacaactcttactgatggttcattgaagtttgaaattttgccagcaggagcagttgttggagtaaaagaaacactcgatgcagttgacaaaggtttaattgactgtggatttgcttggacgcactattggtcaggtgatcaccctgcagctatgttatttggttcaccagtagcaggcggtggagttggtattgataacatcgcgttcttatcatggttccaatatggtggtggtaaagaattatatgaccgactttggaaagaaatgggaagagacataaaaggatttatgattcaaccagttggcccagaagctttaggttggtttccaaaaccaattaaagatatggctgactttagaaaatataagttcagaactcctccaggaattccaggacaaacttataaagacattggtatagcatctgttgcaatgggtggtggagatattcttccagccttagaagcaggtacaatt

SEQ ID NO: 252789 - DNA, 676 bp, Unknown
  Bacterial polypeptide expressing nucleotide sequence isolated from the Sargasso Sea
tagagacataaaaggatttatgattcaaccagttggaccagaagctttaggttggtttccaaaacctattaaaaatatggctgactttagaaaatataaattcagaacacctccaggaattccaggtcaaacctataaagacattggtatagcatctgttgcgatgggtggtggagatattcttccagctctagaagcaggtacaattgatgctgctgagtggtgttgtccaaaaccagatttaacatttggtttccaaaaagtattaaagcactactatctacagggtttacaccaagtagtagttaatgctgacttttatattactggaaaaacatataacgcaatgactgctcatgagaagaaatctcttgaagtagctgcaaacgcttcattagctaaatctttaagttacagaatctatgaaaatggaaaagcacttagagagctaactactaagcatggagttattttagaagatactccaacagactatttcagtgagtacatggctgctgcaaaagcttctcttaacaaaaatgctgcagaaaatgcatttttcaatgaagtatatacttctatgaaagagtttgctgatatagcggttccattctggagcggtgcacaaatgtcaaatgctaagctaggaatggctcacgcggcgacattaaagtaa

SEQ ID NO: 252790 - DNA, 229 bp, Unknown
  Bacterial polypeptide expressing nucleotide sequence isolated from the Sargasso Sea
aatgaaaggaaaatttatcgttattgaaggtattgatggatgtggtaagactacccaaatagatgaactatctaaatggctgcctaatagtggtctaataaagaaaggatctaaattaattacaacaagagagccaggaggcagtcttttaggaaaaaaacttagaggacttattcttgataataatgaaaataacaaaccttcatcacttgcggaattattgctttat

SEQ ID NO: 252791 - DNA, 568 bp, Unknown
  Bacterial polypeptide expressing nucleotide sequence isolated from the Sargasso Sea
tatgggaagacttctagttttcgaaggaatagatggttcagggaagagtacccaaattgagatgcttagtaattttcttaaatcacagaaacagaaagtttttgtgactcgtgaacctggaggaaccgagtttggagaaaaatgtagagaattatttttggcggaaaaattagatggtttaacagaggcatgtttagcttttgcgtcaaggaatgagcatattttgcaaaaaattaaacccgctttgagactcggttattgggtcttgtgcgataggttctcggattcaactattgcttatcaggggtatggaagaggggtagagataaattttttgcgagaaatggctacgaatatcgaaagacaattaagtgacataagaataatatatgttcacactagcctagaaaaatgtttagaacgaataaaaaagagaagtggagttaaaaataaatttgataattcctcgaaaatattttatgaaaaggtcatctacgggtactcgaatattgtcaaagaaagagcgggtaaaattactcaagttgatgggaatgacgaaataaaaaag

SEQ ID NO: 252792 - DNA, 724 bp, Unknown
  Bacterial polypeptide expressing nucleotide sequence isolated from the Sargasso Sea
atgaaaaaaatcatttcaatgttatttgcagttgcgatggtatttggatttatttcaaatgctaatgctgcaaaaacactaaaatgtcagacagttctaaacactaaagctgatgaagttaagatgttaaaggactttactgatacagtaactgaattaactggtggatctttaaaattcgaaatcttgcctgctggagcagttgttggagttaaggaaactctggatgctgttgacaagggtttgattgactgcggatttgcatggactcactattggtcaggtgaacaccctgctgcaatgctatttggttctccagtagctggtggcggaataggtatagacaacttagcgtttctatcttggttccaatatggtggtggaaaagcgctttatgatcaattatggaaagagatgaacagagacattaaaggatttatgcttcaacctgttggaccagaagctttaggttggtttcctaaaccaattaaagatatggctgactttagaaaatataaattcagaactcctccaggaattccaggacaaacttataaagacatcggtatagcatctgttgcaatgggtggtggagatattctaccagcattagaagcaggaactattgatgctgctgaatggtgttgtccaaaaccagacttaacatttggtttccaaaaaagttttaaagcactattacttacaaggtttacacccaagtagt

SEQ ID NO: 252793 - DNA, 592 bp, Unknown
  Bacterial polypeptide expressing nucleotide sequence isolated from the Sargasso Sea
atgattgaaaacaagtcaccccccttttttattacgtttgagggaggtgagggagttggaaaaactacccagatcacccgtctgtctaagtttcttagtaaattgtctgttggacatatagttacgcgagagcctggtggatctaaaacagccgagattataagagagatcttggtaaatggagatccagatcaatgggactcaaaaacagaactcctactccattttgctgcaagacgtgatcatctggctcgtaaaatcaaaccagcgttagatgatggtctttgggtattatgtgaccgcttcgtggactctacatatgcttatcagggatacggccatggaattgctactaccttaatagacaatctttatagttttgtcgcggatgaggtgtttccagatttaactttcattttagatttaagtcctgagaaagggattgaaagaacgaaaaaacgatcgttggcaaataaagaggttttattagaagatagatacgagaaaatggagattgcatttcataaacgtattagagatggctttaaagagatagctcttgctgatagcgaacgttgcgtacttatagatg

SEQ ID NO: 252794 - DNA, 214 bp, Unknown
  Bacterial polypeptide expressing nucleotide sequence isolated from the Sargasso Sea
atgagtagaaaaaaaggtttatttataacttttgaaggccctgaggctagtggtaaatcttcacaaattttacttttggaaaaatatctaaaaaaaaacaaaatttcatttattacaactagagaacctggtggcacaaaaatagcagaatcacttcgaaaacttattttaaaagttaagtcagatattaacatcaagaggaaatattatgctt

SEQ ID NO: 252795 - DNA, 313 bp, Unknown
  Bacterial polypeptide expressing nucleotide sequence isolated from the Sargasso Sea
atgtttattacatttgaaggtatagagggctctggaaaatctacccaaataaaaatgctaaaggaagctcttcttggtaagggccatgaagtaattgttttaagagagcccggaggaacaattcttggtgaaaaggtacgtgaagctttcttagaaaagacaattgaaaaaatttctgttgaaactgaaaccttccttctttatgcctcaagaaaacatttggatcaaaatcttcttaagcctagcctagctgaaaaaaaattcgtcatttgtgatagatattatgatgcaactgaggcttatcaatgttagg

SEQ ID NO: 252796 - DNA, 791 bp, Unknown
  Bacterial polypeptide expressing nucleotide sequence isolated from the Sargasso Sea
atttggttctccagtagctggtggtggagttggtatcgacaatatagctttcttatcatggttccaatacggtggtggtaaagagttatacgaccaattatggaaagaaatgggaagagacattaaaggatttatgattcaaccagttggaccagaagctttaggttggtttccaaaaccaattaaagatatggctgactttagaaaatataagttcagaactcctccaggaattccaggacaaacttataaagacattggtatagcatctgttgcaatgggtggtggagatattctaccagctcttgaagcgggaactatcgatgctgctgaatggtgttgtccaaaaccagacttaacgtttggtttccaaaaagtattaaagcactactatctacaaggtttacaccaagtagtagtaaatgctgacttttatattactggaaaaacttataaggctatgagtgctcatgagaagaaatctcttgaagttgctgctaatgcttcattagctaaatctttaagctacagaatctatgagaacggaaaagctttacaagagcttactactaaacatggagtaattttagaagatacaccttcagattatttcacagaatatatggctgcagctaaagcttctttaaacaagaatgctaaagaaaataaattcttcaacgaagtatataattcgatgaaagaatttgctgatattgctgttccattctggagtggtgctcaaatgtataatgcgaagctaggaatggctcacgcagcaacattaaaataat

SEQ ID NO: 252797 - DNA, 688 bp, Unknown
  Bacterial polypeptide expressing nucleotide sequence isolated from the Sargasso Sea
atgaaaaaaatcatttcaatgttatttgcagttgcaatggtatttggatttatttcaaatgctaatgctgcaaaaacactaaaatgtcagacagttcttaacactaaagctgatgaagttaagatgttaaaggattttactgacactgttacaacgttaacagctggatctctaaagtttgaaattttacctgcaggagctgttgttggtgtaaaagaaactttagatgcagttgataaaggtctaatcgattgtggtttcgcatggactcactattggtcaggtgatcaccctgcagctatgttatttggttcgccagtagctggtggtggagtaggtattgataatatcgcattcttatcttggttccaatatggtggtggtaaagaactatatgaccaattatggaaagaaatgggaagagacattaaaggatttatgattcaaccagttggaccagaagcattaggttggtttccaaaaccaattaaagacatggctgactttagaaaatataaattcagaactcctccaggaattccaggacaaacttataaagatataggtatcgcatctgtagctatgggtggtggagacattctaccagctttagaagcaggtacaattgatgctgctgaatggtgttgtccaaaaccagacctaacttttggtttccaaaaagtataaa

SEQ ID NO: 252798 - DNA, 395 bp, Unknown
  Bacterial polypeptide expressing nucleotide sequence isolated from the Sargasso Sea
aatgtctataggcaagtttattactattgaaggttgcgagggaacgggtaaatcaactcaaattaaaattttagaaaaaaatttaaaaaaaaatataaaaattaaaactactagagaaccaggtggaagttataatgctgaacaaataagaaaactaatttttaaatcaagtataaaaaatttatctcctatgaccgaagctcttttacatataagtgctagaagcgatcatttggaaacactaattaaaccaaatttaagaaaaggtatatgggtaatatgtgatagattccgtgactcaactatagcatatcaaggttatggcaatgggttaaaaacaaatgttttagaaataatgcaaaattccatatttaataattttcatgctgatttaa

SEQ ID NO: 252799 - DNA, 833 bp, Unknown
  Bacterial polypeptide expressing nucleotide sequence isolated from the Sargasso Sea
gataaaggtcttatcgattgtggttttgcatggacacactattggtcaggagatcaccctgctgctatgttatttggttcgccagtagctggtggtggagttggtattgacaacttagcgttcctatcatggttccaatatggtggtggtaaagaattatatgaccaactttggaaagaaatgggaagagatattaaaggatttatgcttcaaccagttggtcctgaagctttaggttggtttccaaaacctattaaaaatatggctgactttagaaaatataaattcagaactcctccaggaattccaggacaaacgtataaagatattggtatagcttcagtagctatgggtggtggagatattttaccagcacttgaagcaggaactattgatgctgcagaatggtgttgtccaaaaccagatttaacatttggtttccaaaaagtattaaagcactattatctacaaggtttacaccaagtagttgtaaatgcagacttttatattactggaaaaacattcaatgctatgagtgctcatgaaaaaaaatctattgaagtagcagctaatgcgtcgttagctaaatctttaagttacagaatctatgaaaatggaaaagctttaagagaattaactacaaaacatggggttattttagaagatactccatctgactatttcacagaatacatggctgctgcaaaagcaactttaaacaaaaatgctgagaaaaacgcatttttcaaaaaagtttatgactctatgaaagagtttgctgatgttgctgttcctttctgggctggtgctcaaatgtcaaatgcgaagctagg

SEQ ID NO: 252800 - DNA, 634 bp, Unknown
  Bacterial polypeptide expressing nucleotide sequence isolated from the Sargasso Sea
ttgattaaaaattttttcataacatttgaaggtattgatggctctggtaaatcaacacaggcaaaattattagttgataaattagcttctattaatttagaaacgttatttcttcgcgagcctggaggaacatctatatctgaagaaatacgatctgtattgctaaacaatagaaaagacgaaatgtcctcaaggactgaggctcttttgatgtgcgcaagtagggctcaattaacaaaggatattataattcctgaaatgaaagctggtaagtggatagtagctgatagatatgcagattcaactttggcctatcaaggtggtggaagaggaatagacttagactggttgatcaaggttaaccattttgcaacgtatgaaactcaaccagatttgactttttatattgatgtagatcctgaaattggtgctaaaagacgtgagactatggtgtcagatcgtatagaaaatgcaggtttagagtttcaaaaaaatataagagctaaatatttagaaatagttgataaatttagtaaaaggtgtgtcacagtggatggaaatttgagtattgatgaaattagtcaaataatttggagaataacgaaagataggacttcaattgaaaaaacataat

SEQ ID NO: 252801 - DNA, 544 bp, Unknown
  Bacterial polypeptide expressing nucleotide sequence isolated from the Sargasso Sea
ttgagtaaagcgtattttataacatttgaagggatagatggttcaggcaagtcaacacaggctaaattgttgatagataaacttaactctttatctattaaaacctgttttgtaagagaaccaggaggtacggaaattgcagaggaaataagatctgttcttttgtcaaatagagatgaggaaatgtcaagcaggacagaagcgcttttaatgtgcgctagtagagcgcaattaacgaagaatattattgtacctgaattaaaatcaggtaagtgggtgattgcagacagatattcagactcaactctagcttatcaaggaggaggaagagaaattaatacggattggcttatagaactgaatgaatttgctaccttcagtactttgcccgatattaccttttacattgatgtagatgaatctactgggcttcaaagaagaaaaaataattctgcagacaggattgaaggtgctgggttgcaatttcaaagagcaataagagaaaaatatctagaaattattgataattttagtgaccgttgtg

SEQ ID NO: 252802 - DNA, 508 bp, Unknown
  Bacterial polypeptide expressing nucleotide sequence isolated from the Sargasso Sea
aatgagtttatttattacttttgaaggtggtgaaggtactggcaaaagcacccagattgaattactacgcctttcgcttgaaggtttaggtcgaaaggtattacagcacagagaacctggagggtctcccttgggtgagtatcttcgagcttggttgatggataacacccgatctctagaaccagcatctgaattattattattcaccgcagctcgagcagagctagttcggactgttctaaaaccgaaactaaatgcaggtttcgacatattattagacagatatgccgattctacgactgcctatcaaggatttgcgcgaaatgtccctatgcgttatgtaaattcggcaaataatctggcgaaagatgggctaactccagaccttacaatactacttgatgtgccacctgaaatcagccttcaacgtgcttctcaacgagatggagcaaaggcaaatcaaccaagatttgaaaatgccgacattgcattccatcataaagtccga

SEQ ID NO: 252803 - DNA, 1078 bp, Unknown
  Bacterial polypeptide expressing nucleotide sequence isolated from the Sargasso Sea
tatgttgtttgcaactgttttggtgcttggattcacatctagtgctaatgctgcaaaaacactaaaatgtcagacagttcttaacactaaagctgatgaagttaaaatgttaaaggactttactgatacagtaacagaacttacatctggttcgttaaaatttgaaattttaccggcaggtgcagttgtgggagttaaagaaactctagatgctgttgataaaggtttgattgattgtggtttcgcatggacacactattggtcaggtgatcatcctgctgctatgttatttggttcgccagtagctggtggtggagttggtatcgacaacttagcgtttctatcatggtttcaatatggtggtggtaaagaattatacgaccaactttggaaagaaatgggaagagatattaaaggatttatgcttcaaccagttggtccagaagctttaggttggtttccaaaaccaattaaagatatggctgactttagaaaatataagttcagaactcctccaggaattccgggacaaacatacaaagacattggtatagcatctgtcgcaatgggtggtggagatattctaccagctcttgaagcaggaactattgatgctgctgagtggtgttgtcctaaaccagacttaacatttggtttccaaaaagtattaaagcactattatctacaaggtttacaccaagtagtagtaaatgctgacttttacattactggaaaaacttataatgctatgagtgctcatgagaaaaagtctcttgaagttgcagctaatgcttcattagctaaatctttaagttacagaatctatgaaaatggaaaagcattacaagaacttactactaaacatggggtaaaattagaagatactccatcagactactttacagagtacatggcagctgcaaaagctacattgaataaaaacgcagagaagaacaaattcttcaatgaagtttatacttcaatgaaaaactttgctgatgttgctgttcctttctggagcggtgctcaaatgtctaatgcgaagctgggaatggctcacgctgcaacattaaagtaa

SEQ ID NO: 252804 - DNA, 973 bp, Unknown
  Bacterial polypeptide expressing nucleotide sequence isolated from the Sargasso Sea
atgttaaaagactttactgacactgttacaactttgacaggtggatctctgaagtttgaaattatgcctgctggagctgttgttggtgtaaaagaaactttagatgcagttgataaaggacttatcgattgtggtttcgcttggactcactattggtcaggtgatcaccctgccgctatgttatttggttcgccagtagctggtggtggtgttggtattgacaacatcgcattcttatcatggtttcaatatggtggaggaaaagagctatacgacagactatggaaagaaatgggaagagatattaaaggatttatgattcaaccagttggaccagaagcattaggttggtttccaaaaccaattaaagatatggctgactttagaaaatataagttcagaactcctccaggaattccaggacaaacatataaagacatcggtatagcatctgttgctatgggtggtggagatattctaccagctctagaagcaggaactattgatgctgctgaatggtgttgtccaaagccagacttaacgtttggtttccaaaaagtattaaagcactattatctacaaggtttacaccaagtagtcgtaaatgctgacttttatattactgggaaaacatacaatgctatgagtgctcatgagaagaagtcactagaagttgctgcaaatgcatctctagcgaaatctctaagttacagaatctatgaaaacggaaaagctttaaaagagcttactgaagttcatggtgtaaaattagaggatactccttctgattacttcactgaatacatggcagctgctaagaaaagtttggaaacaaatgcagctaaaaatgcattctttgctgaagtttgggactctatgaaagaatttgctgatattgcagttcctttctggagcggtgctcaaatgtctaatgcgaagctaggaatggctcacgcagcaacattaaagtaat

SEQ ID NO: 252805 - DNA, 631 bp, Unknown
  Bacterial polypeptide expressing nucleotide sequence isolated from the Sargasso Sea
atggataatttatttataacttttgagggaggagagggttcaggtaaatcaactcaggttggtttattaaaagattatcttgatagtcaaagtttaaatacaattataactagagaacctggaggcacaccatctgctgaaattttaagagatttactaactagaggaaaagtagataaatggacagctatgtcagaagctcttttaatgtgggctgcaagatatgagcacatcgttgatgttattgatcctgctctaaaggccggaaaaaatgtaatctgtgatagattttacgactcaacatacgcttatcaagggattgcccataatttaggtattgataaaatggaaaaattaaaagaattaataattggagatatagaaccagatttaacttttattttagatattgatcctaaaattggtcttaaaagatcactagaaagatctaatttagaaaatagatttgaaagttatgatattgattttcataataaaattagaaatgcttttttgaatatttctaaacaaaataaagatcgttgcattgttattgatgcttcaataagtaagcaagaaattaacaaaattattataagtgaaattaatcaattaatttctaataattaat

SEQ ID NO: 252806 - DNA, 1078 bp, Unknown
  Bacterial polypeptide expressing nucleotide sequence isolated from the Sargasso Sea
aatgttatttgcagtaactttagctttaggttttattactaatgcaaatgctgcaaaaacacttaaatgtcagactgtcttaaatgcaaaaggcgatgaagttattatgcttaaagactttactgatacagttactaaattaactggtggttcattaaaatttgaaattatgcctgcaggaacagtagtaggagttaaagaaactcttgatgcagttgacaaaggtttaattgattgtggttttgcttggacacactattggtctggtgaacacccagcagctatgctttttggttctccagtagcaggagcgggagttggtattgataatatcgctttcttatcttggttcttatcaggtggcggtgagcaactttatgatcaactttggaaagaaatgaatagaaacatcaaaggctttatgcttcaacctgttggaccagaagctttaggatggtttccagagccaattaaaaatatggatgatttcagaaaattaaaattcagaactcctcctggaattcctggacaaacatataaagatatcggtattgcatctgtagcaatgggtggtggagatattctaccagctcttgaagcaggaacaattgatgctgctgaatggtgttgtccaaaacctgacatggtttttggtttccaaaaagttctaaaacattactatttacaaggtttacaccaagttgtggtaaatgcagacttttatattactggaacaacttatgagaaattctcagatcatgagaaaaattctattaaagttgcagctgatgcatcattaatgaaatcattagcaagaagaattcttgttaacggtgaagcattacatgaacttacaactaaacatggtgttcaacttcatgatactccaaaagattattttgttgaatatatggcagctgctaacgctactttaaataaaaatgctgagaaaaacgcattctttaaaaaagtatgggactctcagaaaaaatttgctgatacagcagttcctttctggtcaggtgctcaaatgtcaaatgcacagctaggaatggctcacgcagcgacattaaagtag

SEQ ID NO: 252807 - DNA, 1147 bp, Unknown
  Bacterial polypeptide expressing nucleotide sequence isolated from the Sargasso Sea
ttgagagggtactttttttacaaaaaaacaatgagagggaaaaacaatatgaaaaaaatcatatcattagttgtaggaactcttcttttaactgtcatgacagttacaggagcaaattctgcacaaactcttaagtgtcaaacagtaattagtgcaaaagcagatgaagtgaaaatgttaaaagatttcactgacacagtttctgaactaactcaaggttcacttaagtttgaaattatgccagccggagcagtagtaggtgtaaaggaaactttagacgcagttgataaaggtcttatcgattgtggtttcgcttggactcactattggtcaggtgatcatccagcagctatgttattcggttcgccagtagcaggtgcaggtgttggtattgataatatcgcattcttatcttggttccaatatggtggtggtaaagagctttacgaccaattgtggagtgagatgggaagagacatcaaaggttttatgttacaaccagttggtccagaagctctaggttggtttaaagagccaattaatagtatggctgactttagaaagtataagttcagaactcctccaggaattccaggacaaacttataaagatattggtgtagcatctgttgcaatgggtggtggagatattctaccagctcttgaagcaggaacaattgatgcagctgaatggtgttgtccaaagcctgacatggttttcggtttacacaaagttctaaaaaattactacttacaaggtcttcaccaagtagtagtaaatgctgacttctatttaaatggtagcaaatataagaaaatgtctgctattgagaagaaagctttagaagttgctgcaaacgcttctttatcaaaatcaatgagttacagaatatatgaaaatggaaaagctcttgctgagttaacaactaagcatggtgtaattttacaagacactccagctgactatttcccagcatatatggctgctgctaagaaaagtttagaaacaaatgctgctaagaatcctttcttcaaaaaagtatgggactctcaaaaagcatttgctgatatagcagtacctttctggtctggatctcaaatgtctaatgcgaagctaggaatggctcacgcagctactcttaagtagt

SEQ ID NO: 252808 - DNA, 1039 bp, Unknown
  Bacterial polypeptide expressing nucleotide sequence isolated from the Sargasso Sea
atgaaaaaaatcatttcaatgttatttgcagtgactttattattaggtttcgtatctaatgctaatgctgcaaaaactctaaaatgtcagactgttttaaatgctaagggtgacgaagttgtcatgcttaaggattttacagatacagttactaaacttacacaaggttcattgaagtttgagattatgcctgctggaacagttgttggagtaaaagaaactctagatgctgttgacaaaggtttaattgattgtggatttgcttggacacactattggtcaggtgaacacccagctgcaatgttattcggttctccggtagcaggtgctggtgttggtattgataatattgcgtttctatcttggtttttatcaggtggtggagagcaattatatgatcaactttggaaagaaatgaacagaaacattaaaggctttatgcttcaaccagttggaccagaagctttaggatggtttccagagccaattaaaaatatggatgatttcagaaaattaaaattcagaactcctccaggaattccaggacaaacttataaagatattggtattgcatcagtagctatgggaggtggagatattcttccagctcttgaagcaggtacaattgatgctgctgaatggtgttgtccaaaaccagacatggtatttggtttccaaaaagttttaaaacattactacttacaaggtcttcaccaagtagtggtaaatgctgacttttatattacaggaacaacttatgagaagttctcagatcatgagaaaaactcaattaaagttgcagctgatgcatctttaatgaaatcgctagcaagaagaattcttgttaatggtgaagcattacatgaactaactactaaacatggtgttcaacttcatgatactcctaaagactactttgttgagtacatggcagcagctaatgctactttaaataaaaatgcaaataaaaatgcatttttcaaaaaagtttgggactctcaaaagaaatttgctgatacagcagtgcctttctgggcag

SEQ ID NO: 252809 - DNA, 220 bp, Unknown
  Bacterial polypeptide expressing nucleotide sequence isolated from the Sargasso Sea
aatgcgcggaaagtttattgtagttgagggccttgaaggggcaggaaaaagctcagtaatagggctaattgttcaagcattaaaagatgcgggaaagcgcgttgagcaaactcgtgagccgggcggtacacctatggctgaagcaattcgagaatgtgtaaaacacgactgggatgagaccgttagtgaggagactgaactacttcttatgtatgcggcg

SEQ ID NO: 252810 - DNA, 631 bp, Unknown
  Bacterial polypeptide expressing nucleotide sequence isolated from the Sargasso Sea
atgaataatttatttataacttttgagggaggggatggctcaggtaaatcaactcaagttaatttattaaaagattacttagataatttaaattttgaaacaattaaaacgagagaacccggaggaactccttctgctgagattttaagagatttacttactactggaaagttagaaaggtggactcctatgtctgaagctttattaatgtgggcttcaagatatgagcatttaattcatgttattgaacctgctcttaattcaggaaagaatgtaatttgtgacagattttatgactcaacatacgcttatcaaggagtggctcataacttaggtattgataagatgaagaaacttaaaaaaataataattggtgacattgaacctgatgtaacttttgtcttagatatcgatcctaaattagggcttaaaagatctcttgatagacccaacgatgagaatagatttgaaaattatgatattgattttcataataatattaggagtgcatttttagaaatagcaaaaaaaaataaagatcgttgtgttgttgttgatgcttcacttaatgaacaggaaattaataatttaataataaatgtaattaacaatctcataactgataaataag

SEQ ID NO: 252811 - DNA, 232 bp, Unknown
  Bacterial polypeptide expressing nucleotide sequence isolated from the Sargasso Sea
tatgaaactgataacgtttgaaggaatagagggggtaggtaaatcaactcaaattaacttagtattggattggctaaaaactaaaggcttttctactaaacttcttagagaacctggatccactattttcggtgaaaaaattagagaattacttttatctaaggattccgacatatctgctcatacagaattattgctaatgtttgcagcaagatccgagatgattaaagag

SEQ ID NO: 252812 - DNA, 1078 bp, Unknown
  Bacterial polypeptide expressing nucleotide sequence isolated from the Sargasso Sea
aatgttatttgcaacggttttagtactagggtttgtctctaatgctaacgctgcaaaaacactaaaatgtcagacagttcttaacactaaagctgatgaagttaaaatgttaaaggactttactgatacagtaactgaattaacgagtggatcgttaaaatttgagatattacctgcaggcgctgttgttggagttaaagaaactctagacgcagttgataaaggattgatcgattgtggattcgcatggacacactattggtcaggagatcaccctgctgctatgctatttggttcacctgtagctggtggtggagttggtattgacaacttagctttcttatcttggttccaatatggtggtggtaaagaattatatgaccaactttggaaagaaatgggaagagacatcaaaggatttatgcttcaaccagttggaccagaagctttaggttggtttccaaaaccaattaaagacatggctgattttagaaaatataaattcagaactcctccaggaataccaggacaaacttataaagacattggtatagcatcagttgctatgggtggtggagatattctgccggctcttgaggcaggaactatcgatgctgctgagtggtgttgtccaaaaccagatatggtatttggtttccaaaaagtattaaagcactattacctacaaggtttacaccaagtagtagtaaatgctgacttttatattactggaaaaacttataatgctatgagtgctcatgagaaaaagtctcttgaagttgctgctaatgcttcattagctaaatctttaagttacagaatctatgaaaatggaaaagcattacaacagttaactactaaacatggagtaatattagaagatactccatctgactacttcgtagaatatatggcagctgcaaaagctacattgaacaaaaatgctgagaaaaataaatttttcaaaaaagtatatgattcgatgaaagactttgctgatgttgctgttcctttctggagtggtgctcaaatgtctaatgcgaagctaggaatggctcacgcagcaacattaaagtaa

SEQ ID NO: 252813 - DNA, 592 bp, Unknown
  Bacterial polypeptide expressing nucleotide sequence isolated from the Sargasso Sea
atgaagattctatcttttgaaggaatagagggtgttggaaaatcaacacaaataaatcttttaaaagattttctagaaaaaaataaatatacagttgaggttttaagagagccaggttcgacactaacgggtgaaaatattagaaatatattattagacaaaggtagtgatatatcagataagaccgaattattgttaatgtttgctgcaagatctgaactcatatcaaaaaaaataaacagcctatcttgtgattatcttcttcttgatagattctttgacgcttcattagcatatcaaggatacggtagaaatttaccactatcattaataaaagatttaatatccttcactgattgtcctatgcctgaattaactattcttatagacatttctgtagaagaggcttttgcaagaaaaattaatgatcaaaaagatagaattgaatcctctggaatagaattttttaataacgtaagaaacggttacttggaaatagctaaaaataatgtaaatagatttttagtcatagatggaactttaagtattaatgaaattcataatgccatcataaaaaaattaaatacataaa

SEQ ID NO: 252814 - DNA, 1093 bp, Unknown
  Bacterial polypeptide expressing nucleotide sequence isolated from the Sargasso Sea
aatgaaaaaaatcatttcatttatatttagtgtggctctagtgcttggctttatgtcaaacgctaatgctaaaacactaaaatgtcagacagtccttaacactaaagctgatgaagttaaaatgttaaaagattttactgacactgtaacgactcttactgatggatctttaaaatttgaaattttaccagcaggagcggttgttggagtaaaagaaactttagatgcagtggataaaggacttattgactgtggatttgcatggactcactattggtcaggtgatcaccctgcagcaatgttatttggttcgccagtagctggtggtggagttggtattgacaacatagcgttcttatcatggttccaatatggtggtggtaaagaactatatgacagactatggaaagaaatgggtagagacataaaaggatttatgattcaaccagttggaccagaagctttaggttggtttccaaaaccaattaaaaatatggctgactttagaaaatataaattcagaacgcctccaggaattccaggtcaaacttataaagacattggtatagcatctgttgcaatgggtggtggagatattcttccagctctagaagcaggtacaattgatgctgctgagtggtgttgtccaaaaccagatttaacatttggtttccaaaaagtattaaagcactactatttacaaggtttacaccaagtagtcgttaatgctgacttttacattactggaaaaacatacaacgcaatgactgctcacgagaaaaaatctcttgaggtagctgcaaacgcttcattagctaaatctttaagctacagaatctatgaaaatggaaaagcacttagagagttaactactaagcatggagtaattttagaagatactccaacagactatttcagtgaatatatggcagctgcaaaagcatcattaaataaaaatgcaaaagaaaatgctttttttaatgaggtatatgactctatgaaagagtttgctgatattgcagttccttattggagtggtgcacaaatgtctaatgctaagctaggaatggcccacgcggcgacattaaagtaa

SEQ ID NO: 252815 - DNA, 1051 bp, Unknown
  Bacterial polypeptide expressing nucleotide sequence isolated from the Sargasso Sea
atgactgtatcagccaaagctgcaaagacactaaagtgccaaacagttttaaatgctaaaagtgatgaagcacgcttattaaaagaagaatttacagatagagtgacagagttaactggcggttctttgaattttgaaattttaccagcaggtacagtggttggaggcaaagaaacacttgatgcaatcgataaaggtctaattgattgtggatttgcttggactcactattggtcaggagagcatccagcagcaatgctatttggttcgccagttgcaggtggaggtgtaggaattgataaccttgcttttttatcttggtttaatgcagcaggtggaaaagaattatatgaacaactttgggatgagatgggaagagacataaaaggatttatgcttcaaccggttggaccagaagctcttggttggtttaaagaaccaatcactagtatggaagattttagaaaatatcgttttagaacacctccaggtataccaggtcaaacatacaaagatattggtattgcatcagtagcaatgggtggaggtgacatacttcctgcacttgaagctggtactattgatgctgctgaatggtgctgtcctaaacctgatagcgtgtttggttttcaaaaagtactaaagcactactatcttcaaggtttacaccaagttgttgtaaatgcagacttttatatgaatggtacgctgtatgatagtttaaccgatcatgaaaaagcttctcttcaggtggcagctgatgcatcattgatgttaactttatctgatagaatttatgaaaatggaaaagcactcagaatgttaacagaagaagcgggtgttatactgcatgatacaccaacagattatttttctgaatacatggcagcagctttagctaccctaaataagaacgctgaagaaaatgaattctttaatgaagtttatacttctatgaaagaatttgctgatattgcagtaccattctggagtggagctcaaatgtctaatgctaagttaggtatggctcacgctgcaacacttaaataat

SEQ ID NO: 252816 - DNA, 607 bp, Unknown
  Bacterial polypeptide expressing nucleotide sequence isolated from the Sargasso Sea
aatgaaaataatttcatttgaaggaattgaaggtgttggcaaatctacacaaattaatctattgaaggtttatcttgaatctaaaaattacttgatagaaatttatagagagcctggatcaacacctgttggcgaaaagataagagatattttattagattcgaataatgatttatcaaacgaaaccgagcttttgttaatgtttgcagcaaggtcagaacttatagataaaaaaataaatacttctcagtgtgattatttattactagataggttttatgatgcatcgatggcatatcaaggttatggaagaaaattatcaaaagactttataaccacattgacaacatttataaattgcccaattccagacctatcttttttattagacatatctgtaaaagagggctttcaaagaaaaaataacgatgtaaaagatagaatagaatcatctagtaatgatttttttaataaagttagaaaagggtataagacaattgcaaaagcaaacgagaatagatttgaaataattaatgctgctaatgatatagataaaattcatcaacttataattaaaaaaattcaatcgaagaatgaacatatctaa

SEQ ID NO: 252817 - DNA, 1096 bp, Unknown
  Bacterial polypeptide expressing nucleotide sequence isolated from the Sargasso Sea
tatgaaaaaaatcatttcaatgttatttgcagttgcgatggtatttggatttatttcaaatgctaatgctgcaaaaacactaaaatgtcagacagttcttaacactaaagctgatgaagttaagatgttaaaggactttactgatacagtaactgaattaactggtggatctttaaaattcgaaatcttacctgcaggagcagttgttggagttaaagagactctagatgctgttgacaaaggtttgattgactgtggatttgcatggactcactattggtcaggtgaacaccctgctgcaatgctatttggttctccagtagctggtggcggaataggtatagataatttagcgtttttatcttggttccaatatggtggtggaaaagcgctttatgatcaattatggaaagagatgaacagagacattaaaggatttatgcttcaacctgttggaccggaagctttaggttggtttccaaaaccaattaaagatatggctgactttagaaagtataaattcagaacacctccaggtattccaggacaaacttataaagatattggtatagcatctgttgcaatgggaggtggagatattctgccagctttagaagcaggaactattgatgctgctgaatggtgttgtccaaaaccagacttaacatttggtttccaaaaagttttaaagcactattacttacaaggtttacaccaagtggtggtaaatgctgacttttatattactggaaaaacatatgatgctatgactgcacatgagaagaagtctcttgaagttgcggcagatgcgtcattgataaaatctttaagttatagaattttatcaaatggtgaagctttacaagaacttacaacaaaacatggagtgattttagaagatactccatctgactacttcactgagtatatggcagctgctaaagcaactttgaacaaaaatgctgaaaaaaatgcatttttcaaagaagtttatgactctatgaaagtatttgctgataaagcagttcctttctggagtggtgctcaaatgtcaaatgcgaagctaggaatggctcacgcagcgacattaaagtaa

SEQ ID NO: 252818 - DNA, 1096 bp, Unknown
  Bacterial polypeptide expressing nucleotide sequence isolated from the Sargasso Sea
atgaaaaaaatcatttcaacgttatttgcggtatttcttgtatttggatttgtttcaaatgctaatgcagcaaaaacatttaaatgtcagactgttttaaatgcaaaaggtgacgaagttgtcatgcttaaagactttactgacaacgttactaaattaacaggtggttcactaaaattcgaaattatgccagcaggtacagttgtaggggttaaagaaactcttgatgctgttgataaaggcttaattgattgcggatttgcttggactcactattggtcaggagagcatcctgccgctatgttatttggatcaccagttgctggtgcaggtgttggtattgataacatcgctttcttatcttggttcttatcaggtggtggagagcaactttatgatcaactttggaaagaaatgaagagagacataaaaggtttcatgttacaaccagttggaccagaagctttaggatggtttccagagccaatcaagaatatggacgattttagaaaactaaaattcagaactcctccaggaattccaggacaaacttacaaagatattggaattgcatcagttgcaatgggcggtggagatattcttccagctctagaggcaggaactattgatgctgctgagtggtgttgtccaaagcctgacatggtttttggtttccaaaaagttcttaaacattactatttacaaggtcttcaccaagtagtggttaatgctgacttttatgtgaatggaactaaatataatgcattaactgatcatgaaaagttttctttaaaaatggctgcagatgcttctttaatgagatctctagctagaagaattcttgtaaatggtgaggctttacatgaactaactacaaaacatggtgttcaacttcacaatacaccagaagattattttaaagagtatatggcagctgctaatgctactttaaataaaaatgcagagaaaaatgcattcttcaaaaaagtttgggactctcagaaagcatttgctgatacagcggtacctttctggtcaggagctcaaatgtcaaatgctcagcttggattagctcacgcagcgacattgaagtagt

SEQ ID NO: 252819 - DNA, 663 bp, Unknown
  Bacterial polypeptide expressing nucleotide sequence isolated from the Sargasso Sea
aatgagaaaaatcatttcaatgttatttgctgttactatagtatttggatatatttcaaatgcatcagcaaaaacactaaagtgtcaaacagttcttaatcctaaagccgatgaagttgtaatgttaaaagatttcactgatactgttacaacacttacaggagggtctctaaagtttgaaattatgccagctggaaccgtagttggtggtaaagaaactttagatgcagtcgacaagggattaatagactgtggatttgcttggacgcactactggtcaggtgatcatcctgcagcaatgttatttggttcaccagttgctggtggaggtgttggtatagataacttagcatttctatcatggtttcaatacggtggtggaaaagaattgtacgatagactttgggacgaaatgggtagagacataaaagggtttatgcttcaacctgttggtccagaagctttaggttggtttccaaaaccaattaaaaatatggctgatttcagaaaatataagtttagaactcctccgggaattccaggtcaaacctacaaagatattggtatagcatcagttgctatgggaggtggagatattcttccagctcttgaagcgggtacaattgatgcagctgagtggtgttgtccaaagcctgatttagt

SEQ ID NO: 252820 - DNA, 613 bp, Unknown
  Bacterial polypeptide expressing nucleotide sequence isolated from the Sargasso Sea
gatgaaattaaatagaggtttgttcattacttttgaaggacccgaagctagtggaaagtcatctcaaatattacttttatcaaaatatttaaaaaacaataaaattccttttattgtcactagagaacccggaggtactaattttgcagaaaagttaagaaaattaattttggataataaatctacaatcaataatttagaagaattgcttcttcttatggcagctagatcaaatcatataaataaagtaattattcctaatcttaaaaaaggaaagattgttatttcagatcgatatgcagattcatcctttgtttatcaaggatatgtaaataaatttggaattaaaagaattcaaaaacttcacaaagaacttctaaacaatttttttcctgactatacttttatttttaaaattaatccaaaagaaataattaaaagattaaaacagaggaaagttaaaaacaagtatgataaatctaatttattatttcatcaaaaagtaattcaaggttacaaaaaaatagcaaatccaaaaagatacattatggtggatgcttcattgtcaaaagatattattcataaaaatattattaaaaaattgaatttatag

SEQ ID NO: 252821 - DNA, 679 bp, Unknown
  Bacterial polypeptide expressing nucleotide sequence isolated from the Sargasso Sea
aatgaaaaaaatcatttcaatgttatttgcggttgcaatggtatttggatttatttcaaatgctaatgctgcaaaaacactaaaatgtcagacggttcttaacactaaagctgatgaagtgaagatgttaaaagactttactgacactgttacaactttgacatctggatctctaaagtttgaaattttacctgcaggcgctgtagttggagttaaagaaacactagatgcagtagacaaaggtttaatcgattgtggtttcgcatggacacactattggtcaggtgatcaccctgctgctatgttatttggttctccagtagctggaggtggtgttggtattgataacatcgcatttttatcatggtttcagtatggtggaggaaaagaactatatgacagactatggaaagaaatgggaagagatatcaaaggatttatgatacaaccagttggaccagaagctttaggttggtttccaaaaccaattaaagatatggctgactttagaaaatataaattcagaactcctccaggaattccagggcaaacatataaagatatcggtattgcatctgtagctatgggtggtggagatattctaccagctttagaagcaggaacaattgatgctgctgaatggtgttgtcctaaaccagatttaacattggttccaaaa

SEQ ID NO: 252822 - DNA, 748 bp, Unknown
  Bacterial polypeptide expressing nucleotide sequence isolated from the Sargasso Sea
tatcgcattcttatcttggttccaatacggtggtggtaaagaactatatgaccaattatggaaagaaatgggaagagacattaaaggatttatgattcaaccagttggaccagaagctttaggttggtttccaaaaccaattaaagacatggctgactttagaaaatataaattcagaactcctccaggaattccaggacaaacttataaagatataggtatcgcatctgtagctatgggtggtggagacattctaccagctttagaagcaggtacaattgatgctgctgaatggtgttgtccaaaaccagacttaacttttggtttccaaaaagtattaaagcactactacttacaaggtttacaccaagtagtcgtaaatgctgacttttatattactggaaaaacttacaatgcaatgtctgatcatgagaagaagtctcttgaagtagctgctaatgcgtcattagcaaaatccttaagttacagaatctatgagaatggtaaagctttgaaagaactaacagaagttcatggagtaattttagaagatacaccttcagattatttcacagaatatatggctgctgcaaaagcttctttaaacaagaatgctgcagataacaaatttttcaatgaagtatatacttcaatgaaagaatttgctgatatagcagttcctttctggagcggttctcaaatgtcaaatgctaagctaggaatggctcacgcagcaacattaaagtaa

SEQ ID NO: 252823 - DNA, 544 bp, Unknown
  Bacterial polypeptide expressing nucleotide sequence isolated from the Sargasso Sea
gatgaataatttatttataacttttgagggaggggatggctcaggtaaatcaactcaagttaatttattaaaaaactatttagataatttaaattttgaaacaattaaaacgagagaacctggaggaaccccttctgctgaaattctaagagatttgcttactactggagaggtagaaaaatggacccctatgtctgaagctctattaatgtgggcctcaagatatgagcatttaattcaagtcattgaacccgctctcaattcgggaaagaatgtaatttgtgatagattttatgactcaacttacgcttatcaaggagtagctcataatttaggtattgataagatggagaaattaaaaaaaataataattggagacattgagcctgatgtaacttttgtcctagatattgatcctaaagtgggacttaaaagatctcttgatagatctaatcaagaaaatagatttgaaagttataatattgattttcataataaaattaggagtgcatttttagaaatagccaaaaaaaataaaaatcgt

SEQ ID NO: 252824 - DNA, 718 bp, Unknown
  Bacterial polypeptide expressing nucleotide sequence isolated from the Sargasso Sea
tatgttatttgctgctactctagttttaggatttatttctaatgctaatgctgcaaaaacacttaaatgtcagacagttcttaatactaaggctgatgaggttaaaatgttaaaagacttcactgacactgttacaactttaacaagtggatctcttaagtttgaaattatgcctgcaggagctgttgtaggtgtaaaagaaactttagatgccgttgataagggacttatcgattgtggatttgcttggacacactattggtcaggtgatcaccctgccgctatgttatttggttcgccagtagctggtggtggtgttggtatcgacaacattgcatttttatcatggtttcaatatggcggtggaaaagagctatatgacagactatggaaagaaatgggaagagatattaaaggatttatgattcaaccagttggtcctgaagctttaggttggtttccaaaaccaattaaagatatggctgactttagaaaatataaattcagaactcctccaggaattccaggacaaacatacaaagatatcggaattgcgtctgtagcaatgggtggtggagatattctgccagctttagaagcaggtacaattgatgctgctgaatggtgttgccctaagccagacttaacgtttggtttccaaaaaagtattaaagcactactacctacaaggtttacaccaagtagtcgtaaatgctga

SEQ ID NO: 252825 - DNA, 592 bp, Unknown
  Bacterial polypeptide expressing nucleotide sequence isolated from the Sargasso Sea
atgaaaataataagctttgaaggcatagaaggggttggaaaatcgactcaaataaatttactgcaaagttacttagaaaaacaagattttactgttgacgttctaagagagcctggctcaacgacttccgcagaacatataagagaaatacttttaaacaaagaaaatgatatctcaaaagaaacagagttattacttatgtttgcagcaagatctgatttaatcaataaaagaattcataataatgattcagactttgtccttcttgatagatattacgatgcatcaatagcttatcaggggtatggcagaggtattccattagattttatagaaaatcttattaagctaattcaatgcccaaaaccagatgttagtttcttgtttgatttaagtgttgaagatagttttagtagaaaaaaacttgatgtgaaagatagaattgaatcatctggaaatagtttttttgagagagtaaaaaatggttatttagagattgccaaaaatcaaaatgaaagatttcacataattgatgctacaaaagaaatcaatgaaattcacaacatcattaaaaaggtactagagttttgat

SEQ ID NO: 252826 - DNA, 505 bp, Unknown
  Bacterial polypeptide expressing nucleotide sequence isolated from the Sargasso Sea
tatgaaattaatatcatttgaaggaattgagggtgttggcaaatctacgcaaattaatttaattcaagagtggttaaaaacaaaaggtctaagtacaaaactaattcgagagccaggctcaactgagtttggagaaaaaataagagagctattattatcaaatgattctgatatttcagcccatagtgaattattattaatgtttgctgctagagcagagatggtcaatgagcatttgttaaattcaaaagaagacattctcctttgtgacagatactatcatgcatcaattgcttatcaaggctatggaagaaggctttcccttgacctaattgagaatttaattcagaagataaattgcccaattccagacttaacaataatatatgatcttgatgtaagacttggctttaaacgaaaagctaatgatgatatcgatagaattgaatctgctggagtaaatttctttgaagatgtaagaaaaaggttatcagcaaatagctaa

SEQ ID NO: 252827 - DNA, 640 bp, Unknown
  Bacterial polypeptide expressing nucleotide sequence isolated from the Sargasso Sea
aatgaggggtcgttttctggttttggagggcattgatggctgcggcaagaccacgcagttgcaggccttggcggattggttgccagtcagtggcttaatgcctgctggagcccagctgatcaccacccgcgagccgggtggcactgcccttggccaggccttgcggcaactgctgttgcatccgccccaagatcaggcgccagccaccagggctgagctgctgctgtatgcggctgatcgcgcgcaacatgtgcagacccgtttggagccggtcttggctgctggcaactgggtgctcagtgatcgctatggcggctcaacggaggcctatcagggctatgggcgcggattggatcttgatctgattgggcagttggagcagttggcgacagcagggctgcagccggacctttgcctttggctggaacttccacctgagctcgctgcagcgaggcgctccggccagcagcaagaccgcatcgaagccgagggcttggcgtttttgcagcgggtgcatcagggctttgcagccctcagccaacggcctgcttggcgccgtgtggatgcggcagcctcgcctgagcaggtgcaccagcaggtgcagcaactggtgcgtgaaggcctggagttagcccagtga

SEQ ID NO: 252828 - DNA, 1053 bp, Unknown
  Bacterial polypeptide expressing nucleotide sequence isolated from the Sargasso Sea
gcgcttggctttgtgtcaatgcaaatgcaaaaacattaaaatgtcagactgttctgaatgctaagggtgacgaagttgtcatgcttaaggattttacagatacagttactaaacttactcaaggttcattgaagtttgaaattatgcctgctggaacggttgttggagtaaaagaaactctagatgcagttgacaaaggtttaattgattgtggatttgcttggacacactattggtcaggtgaacacccagctgcaatgttattcggttctccggtagcaggtgctggtgttggtattgataatattgcattcttatcttggtttttatcaggtggtggagagcaattatatgatcaactttggaaagaaatgaacagaaatattaaaggctttatgcttcaaccagttggaccagaagctttaggatggtttccagagccaattaaaaatatggatgacttcagaaaattaaaattcagaactcctccaggaattcctggacaaacatacaaagacattggtattgcatcagtagctatgggaggtggagatattcttccagctcttgaagcaggtacgattgatgctgctgagtggtgttgtccaaaaccagatatggtatttggttttcaaaaagtccttaaacattactacttacaaggtttacaccaagtagtagtaaatgctgacttttatataactggaactacatatgagaagttttcagaccatgagaaaaactcaattaaagttgcagcagatgcatctttaatgaaatcattagcaagaagaattcttgttaatggagaagcattgcatgaactaactacaaaacatggtgttcaactacatgatactccaaaagattactttgttgagtacatggcagcagcaaatgctactttaaataaaaatgcagaaaaaaatgcatttttcaaaaaagtttgggactctcaaaagaaatttgctgatacagcagttcctttctgggctggtgcacaaatgtcaaatgcacagctaggaatggctcacgcagcaactttgaagtaaa

SEQ ID NO: 252829 - DNA, 625 bp, Unknown
  Bacterial polypeptide expressing nucleotide sequence isolated from the Sargasso Sea
ttgtttttaacttttgaaggtatagaaggatcaggaaagtccactcaaattaaaattcttaaatctgccttggagaaagtacattttgatgttgaaataacacgagaaccaggctggggagcagttggtcagctcataaggaaaataatacttgatgtacccgacttagatcttgattcattctcagagctatctttgttttgtgctgatagagctcaacacgtaagagagttgattagaccaatgctcaacaaagggaaaattgtattatgtgacagatattgtgattctacattggcttatcaaggctatggaagaaaattagatattgatttggtaaaaaaaatgtctatagcatctactttgggcttgatgccaaatgtaacaattcttcttgatatatctgttaatactgcattgagtagaatagttgaaagacctggaagaaataaaattgatgatgaatcttttgactttcatactagagttaaaaaggcatatcttggtatagcaaaggattcaccaagagttcatgtaattaatggtgaagatgaagagggcaatgtgcaccaggaaataaaaaactgtttatcaaagaattttagtatattttccaggctttaat

SEQ ID NO: 252830 - DNA, 601 bp, Unknown
  Bacterial polypeptide expressing nucleotide sequence isolated from the Sargasso Sea
atgaaagtgattagttttgaaggttttgagtattcaggtaaatctacacaaattaaattattaaaaaaatattttataaaaaataaaattaaatctacctttactagagaaccagggggtaataaagatttagaaaaaattagaaatataattattaaatctaattttgataatttgagtttaataatgtttttctttgcttctaggttttcacttctatcttcacttaaaaataatgatttaattgtatttgataggttttttgactcaacatatgcctatcaaaaatataatttaaaagaaaaaaaactaataattagtttaatcaatttaattgatcaaaaatttatcccaaatattactttttatctaaaattagataaaaaaaatttaatggaaagaaaaaataaaagagtttattcgaatacgtttgataagaagtattttggacaattttcaagaattcaaaaaaattataatgaaatatcaaaaatgaaaataagaaaacgaaagtttgttacaattgatgcttcgttatcagctaatgaaatacacgaaaaaattattgtacatctaaagaaatgcaaattaataagataat

SEQ ID NO: 252831 - DNA, 658 bp, Unknown
  Bacterial polypeptide expressing nucleotide sequence isolated from the Sargasso Sea
tatgattcaaccagttggcccagaagctttaggttggtttccaaaaccaattaaagatatggctgactttagaaaatataaattcagaactcctccaggaattccaggacaaacttataaagacattggtatagcatctgttgcaatgggtggtggagatattcttccagctcttgaagcaggaactatcgatgctgctgagtggtgttgtccaaaaccagacttaacatttggttttcaaaaagtgttaaagcactattacttacaaggtttacaccaagtagtcgtaaatgctgacttttatattactggaaaaacatacaatgctatgagtgctcatgagaaaaagtcacttgaagtagctgctaatgcttcattagcaaaatctttaagttacagaatctatgagaatggtaaagctttaagagagctaactactaaacatggagtaattctagaagatacaccttcagattatttcacagaatatatggctgcagcaaaagcatctttaaataagaatgctaaagataataaattttttaacgaagtttacacttcaatgaaaaattttgctgatgttgctgttcctttctggagtggtgctcaaatgtctaatgcgaagctaggaatggctcacgcggcaacattaaagtaa

SEQ ID NO: 252832 - DNA, 157 bp, Unknown
  Bacterial polypeptide expressing nucleotide sequence isolated from the Sargasso Sea
aatgaggggtaaatttattgttattgaaggaattgatggttgcggtaaaacaacccaaattgatgaaatttctagatggatccctactagtggtcttttgagaggaaagcaaaaattagtaaaaactagagaacctggaggaagcttattaggtaaa

SEQ ID NO: 252833 - DNA, 631 bp, Unknown
  Bacterial polypeptide expressing nucleotide sequence isolated from the Sargasso Sea
atgtctatttctaaaggcttatttattacctttgaaggtattgatggttgtggaaaaagtacgcaggcaaagatgttggtcgattatttaaatcaattgggggataaagccattatggttagggaacctgggggaacaaaaatatctgagaaaattagagatattttactaaaccgacacctagatgatatttgcgataggaccgaagcattgttaatgactggaagtagatctcaattaacctatgaaataatattacctaaattagaaaaaggtataaatgttgttgctgacagatattacgattcaacattagcgtaccaaggcgggggtagaaagctagatttagaatggctaattaagcttaattattttgctacctataatctagacccaaatataacattttttattgatattgatccaaatgaggcgcaaaaacgtagagatcaagaagaagatagaattgaaagggcaggaatagatctacaaaatcgagtaagaagtgcttatgtaagtttagcaaagcgatttaatcgcagatatgtaagcatcaatggtgacgattctattgaaagcatacacaacgcaataattgataaaatgaaaaagaaaaatcttattaaatgaa

SEQ ID NO: 252834 - DNA, 616 bp, Unknown
  Bacterial polypeptide expressing nucleotide sequence isolated from the Sargasso Sea
atggaaggtaaatttatcaccttagaaggcattgagggctcaggaaagtcaactaatctaagtttcattaaacaaatactagatgacaatcaaatcaattatatagtcactagagagcctggaggaggacctttaggacccagtttaagagagatattattagacaaaagtaccgtcatttcaccgactgttgaaatgttattgatgatggcagataggaaagatcatgttgataatgtaattaaacctaatttaaaaaaaggtaactgggttatttcagataggtatttagactccactattgcttatcaaggaggtggtagacaactagacgtaaatttaataacttttttaagtgcagagttagatttgccgacacccgatttaactttattattcgacttacctgtaaatgaagctttggaaagagcaaaagaaagatctgaattagacaggtttgaaagtgaacctgaagattttcataacagaataagagattcttacctagaacaagcatctaaaaatgatagatttaaaattgttaatagctcaaaagagaaagaatcagtatctgaacaggttaaaaattacgttaataaattcttagatgaataaa

SEQ ID NO: 252835 - DNA, 258 bp, Unknown
  Bacterial polypeptide expressing nucleotide sequence isolated from the Sargasso Sea
aatgaaaggaaaatttatcgttattgagggtattgatggatgtggtaaaactacccaaatagatgaactatctaaatggcttcctaatagtggtctaataaagaaagggtcaaaattaatcacgactagagagcctgggggcagtcttttaggaaaaaaacttagaggactgattcttgaaaataatgaaaataataagccttcatctcttgcagaattattgctttattcagcggatagagctgaacacgtttccaa

SEQ ID NO: 252836 - DNA, 631 bp, Unknown
  Bacterial polypeptide expressing nucleotide sequence isolated from the Sargasso Sea
catgagcggtcgcttcattgttctcgatgggattgatggctgcggcaagtcgacgcagctcgatcatcttttgggctggctgccaggcagcggactgatgccggcaggtgccgagctgatcagcaccagggaaccgggagggacaccgctgggccgttccgtgcgcgagcttcttctgcatacacgggcggagcaggctccggcgccaacggcggaattgttgctctacgcagcggatcgcgcccaacacgtggagcggctgatccgcccagccctggaacggggcgattgggtgatcagcgatcgcttctccggctcgaccatggcgtatcagggccatggccggggcttggatcgccagctcatcgatcagctggagcggatcgccaccgctggtgtgcaaccggatctcaccctgtggctgaccctgccgctggaggagagtctgcggcgccggcagggtgatcaggccgaccgcatcgaagcggaggggcaggtctttctgcagcgcgtgattgacgggtttgcggccattgccgagcagcgaggatggtcggccattgcggcggatcgcccgccggaggccgtgagccgcgccttggagggggaactgatggaccgcctgggatga

SEQ ID NO: 252837 - DNA, 1075 bp, Unknown
  Bacterial polypeptide expressing nucleotide sequence isolated from the Sargasso Sea
attggtgttcgctacgtttttagttcttggttttatatcaaatgctaatgcgaaaacacttaaatgtcagacagttcttaatactaaggctgatgaagttaaaatgttaaaagactttactgacactgttactactcttactgacggatctctaaagtttgaaatattgccagcaggtgcagttgttggtgtaaaagaaacactagatgctgttgataagggattaattgactgcggatttgcatggacgcactattggtcaggtgaccatcctgcagctatgttattcggatcacctgttgcaggtggtggagttggtatagataatatagcatttttatcatggttccaatatggcggtggtaaagagttatacgacagactttggaaagaaatgggtagggacattaaaggatttatgatccaacctgttggtccagaagctttgggttggtttccaaaaccaattaagagtatggccgactttagaaaatataagttcagaacacctccaggaattccaggtcaaacttataaagatatcggtatagcatctgttgctatgggtggtggagacattcttccagcgcttgaagcaggtacgattgatgctgctgagtggtgttgtcctaagccagatttaacttttggtttccaaaaggttcttaaacactattacctacaaggtttacaccaagtagtcgtaaatgctgatttttatataactggcaaaacttataacgctatgactgctcacgagaaaaaatctcttgaagtagctgctaatgcttcattagcaaaatctttaagctatagaatctatgaaaatggaaaagctttaaaagaattgactactaagcatggagttattttagaagatactcctacagactactttacggagtacatggctgcagcaaaagcatctctaaataaaaatgctaaagaaaatgcatttttcaacgaagtttataattcgatgaaagagtttgcagatattgccgttccattttggagtggtgctcaaatgtcaaatgctaagctaggaatggctcacgcagcaacattaaaataa

SEQ ID NO: 252838 - DNA, 538 bp, Unknown
  Bacterial polypeptide expressing nucleotide sequence isolated from the Sargasso Sea
atgaataatttatttataacttttgagggaggggatggctcaggtaaatcaactcaagttaatttattaaaagactatttagacaatttaaattttgaaacaattaaaacgagagaacccggaggaactccttctgctgaaattctaagagatttacttactaccggagaggtagaaaaatggactcctatgtctgaagccctattaatgtgggccgcaagatatgagcatttaattcaagtcattgaacctgctcttaattcgggaaagaatgtaatttgtgatagattttatgactcaacatacgcttatcaaggaatagcccataatttaggtattgatgagatggagaaattaaaaaaaataataattggaaacattgaacctgatgtaacttttgtcctagatattgatcctaaagtagggcttaaaagatctcttgatagacccaatcaagaaaatagatttgaaagttataatattgattttcataataaaattaggagtgcatttttagaaatagccaaaaaaaaataaa

SEQ ID NO: 252839 - DNA, 619 bp, Unknown
  Bacterial polypeptide expressing nucleotide sequence isolated from the Sargasso Sea
atgtttatcacatttgaaggaatagaaggttcaggtaaatcaactcaaattgagctattgcgatcctcactaaaagaggagggcaatgcagttgaaatactaagagagccaggaacaactcaattaggtgaaaagattagagacatctttcttgaaaagactaatgagaaggtggacccaattactgaggcatttttactctatgcttcacgcaagcatctggatcagaattttttgcaagagcatttgaaaaatagatctattgttatagcggatagatactcagatgcaacgatagcttatcaatgttttggtaaaggcctatcagaagattttgttcaatatatacatgaaaaatcagatcttttatctccagatttaaccttctatctcgatataacagctgaggcctctaaggccagaattaatgatagagagctggacagaatggagagcgaatcgttagattttttcaataaagtcagagcaggctatctagaaatagcaaaattaaatgcagatagagttattgttttagatgctgagctttcagtgaaagatttacaagatcaaattttcaaagaggttaaaaatagattagatgcttccttgggttaaa

SEQ ID NO: 252840 - DNA, 1099 bp, Unknown
  Bacterial polypeptide expressing nucleotide sequence isolated from the Sargasso Sea
aatgaaaaaaatcgtttcagcgttgtttgctgcattcttagtatttggatttatttcaaatgcgaatgctgcaaaaacgttaaagtgtcagacagttattagcgctaaaggtgatgaagcggtaatgttaaaagactttactgacaacgtaacaaaactaacaggtggatctctaaaatttgaaattatgccagcaggaacagtagttggagttaaagaaactcttgatgctgttgataaaggtttgattgattgcggatttgcttggactcactattggtctggagaacatccagctgctatgttatttggttcgccagtagcaggtggtggtgtaggaattgataacatcgcattcttatcatggtttttatatggtggtggagaacaactatatgacagactttggggagaaatgaaaagagacattaaaggtttcatgcttcaaccagttggtccagaagctttaggatggttcccaagaaaaatcaaagatatggatgatttcagaacatttaagttcagaactcctccaggaattccaggtcaaacttataaagacattggaatagcttcagttgcaatgggtggtggagatattcttccagcattggaagcaggaactattgatgctgctgagtggtgttgtcctcaaccagataaagtgtttggtatacataaagtattaaaacactactatctgcaaggtttacaccaagtagtcgtaaatgctgacttttacttaaacaaaagcacttacgataagttcactgaccatgagaaattttcaatgaagatggctgctgatgcatcgttgatgagagctttagcttacagaatcaacactaatggattagcacttaaagatctaactgaaaatcatggtgtgatacttgaagatacaccagctgattatttcccagcttatatggctgcagcgaaagcaactttagagaaaaatgcaaaagaaaatgcattctttaaagaagtttatgactcaatgataagctttgctaatactgctgtaccattttggtctggtgcacaaacatcgaatgctaagctaggaatggcttatgctaattcgttgaagaaataa

SEQ ID NO: 252841 - DNA, 1096 bp, Unknown
  Bacterial polypeptide expressing nucleotide sequence isolated from the Sargasso Sea
tatgagaaaaatcatatctttgtttttaggtatagctgtatttatcggatttacggtatcagcaaatgctgcaaaaacattaaaatgtcaaactgttattagtgcaaaagcagacgaagttgtaatgttaaaagactttggtcaaactgtaactgatttaacaggtggttcagttaaatttgaaattttaccagcaggtactgtagttggagtaaaagaaacattagatgcagttgacaaaggactgatcgattgtggatttgcttggacacactattggtctggtgaacacccagcagcaatgttatttggatctccagtagcaggcgcaggtgtaggaattgacaatatcgcatttttgtcttggtttcagtacggtggtggtaaagaactttacgaccaactttggaaagaaatgaaaagagatgttaaaggtttaatgcttcaaccggttggtccagaagctcttggttggtttaaagaaccaattaatagtatggatgactttagaaagtacaagttcagaactcctccaggaattccaggacaaacttataaagatattggtgtagcatctgttgcaatgggtggtggagatattcttccagctcttgaagcaggaactatcgatgcagctgaatggtgttgtccaaaaccggacatgacatttggtttccaaaaagttcttaaacactattacttacaaggtttacaccaggttgttgtaaatgctgatgtatatataaatggtaaagtttacagaagcttaacagatcttcaaaagaaagcttttgaagttgcgtctaatgcttctttaagtaaatcaatgagctacagaatatatgaaaatggaaaagctcttgcagaacttactggtaaacatggagtaattttacatgatactccagctgactacttcccagcatatatggcagcagcgaagaaaagtttagagacaaatgctgcaaagaataagttctttgctaaagtatggcagtctcaaaaggactttgctgatatagctgttccattctggagcggtgctcaaatgtcaaatgctaagctaggaatggctcacgcagcgacattaaaatag

SEQ ID NO: 252842 - DNA, 960 bp, Unknown
  Bacterial polypeptide expressing nucleotide sequence isolated from the Sargasso Sea
tatgaaaaaaatcatttcaatgttatttgcagttgcgatggtatttggatttatttcaaatgctaatgccgcaaaaacactaaaatgtcagacagttcttaacactaaagctgatgaagttaagatgttaaaggactttactgatacagtaactgaattaactggtggatctttaaaatttgaaatcttacctgcaggagcagttgttggagttaaggaaactctagatgctgttgacaaaggtttgattgactgtggatttgcatggactcactattggtctggtgaacaccctgcagcaatgctatttggttctccagtagctggtggtggaataggtatagacaacttagcgtttctatcttggttccaatatggcggtggaaaagcgctttatgatcaattatggaaagagatgaacagagacattaaaggatttatgcttcaacctgttggaccggaagctttaggttggtttccaaaaccaattaaagatatggctgactttagaaagtataaattcagaacacctccaggtattccgggacaaacttataaagatataggtatagcatctgttgctatgggtggtggagatattctaccagctttagaagcaggaactattgatgctgctgaatggtgttgtccaaaaccagacctaacatttggtttccaaaaagttttaaagcactattacttacaaggtttacaccaagtggtagttaatgctgacttttatattactggaaaaacatatgatgctatgactgcacatgagaagaagtctcttgaagttgctgctgatgcatctttgattaaatctttaagttatagaattttatcaaatggtgaagctttacaagaacttacaacaaaacatggagtgattttagaagatactccatctgactacttcactgagtatatggcagctgctaaagcaactttaaacaaaaa

SEQ ID NO: 252843 - DNA, 1093 bp, Unknown
  Bacterial polypeptide expressing nucleotide sequence isolated from the Sargasso Sea
atgaaaaaaatcatttcaatgttatttggtgtggtcctagttgcttcttttgcttctagtgcttatgctaaaacattaaagtgtcagacagtacttaacactaaggctgatgaagttaaaatgttaaaagactttactgatacagtaacaacactaactgatggttctttaaaatttgaaattttaccagcaggagctgttgtcggagttaaagaaactttagatgcagttgataaaggtcttattgactgtggtttcgcttggacacactattggtcaggcgatcatccagcagctatgctattcggttcgccagtagcaggtggtggagttggcatcgataacttagctttcctatcatggtttcagtatggtggaggtaaagagttatacgaccaattatggaaagaaatgggaagagatataaaaggatttatgcttcaaccagttggcccagaagctttaggttggtttccaaaaccaattaaaaatatggctgattttagaaaatataaattcagaactcctccaggaattccaggtcaaacatataaagatattggaattgcatctgttgcaatgggtggtggagatattttaccagcattagaagcaggtacaattgatgcagcagaatggtgttgccctaaaccagatttaacatttggtttccaaaaagttttaaaacattactatctacaaggacttcaccaagtagtagttaatgctgacttttatattactggaaaaacatacgatgctatgagcgctcatgagaaaaaatctcttgaagtagcagcaaatgcttcattagcaaaatctttaagctacagaatctatgaaaatggaaaagctttaagagagttaactactaagcatggagttattttagaagatactcctactgactatttcacagaatatatggctgcagcgaaggcaactttaaacaaaaatgctgaaaaaaatgcatttttcaaaaaagtttatgactctatgaaagagtttgctgatgttgctgtacctttctgggcaggtgctcaaatgtcaaatgctaagctaggaatggctcacgcagcgacattaaagtaat

SEQ ID NO: 252844 - DNA, 1096 bp, Unknown
  Bacterial polypeptide expressing nucleotide sequence isolated from the Sargasso Sea
atgaaaaaaatcatttcaacgttatttgcagtattctttttaatggggctatttaatagcgctaatgctgcaacaacatttaaatgtcagaccgtcttgaatgcaaaaggtgatgaagtaaaaatgcttaaagactttactgataacgtaacaaaacttacaagtggttctctaaaatttgaaatcatgcctgctggaacagtagttggtgtaaaagaaactctagacgctgttgacaaaggattaattgattgtggatttgcttggactcactactggtcaggagagcatcctgcagcaatgttatttggatctccagtagcaggtggtggagtaggtattgacaacattgctttcttatcatggtttttgatgggaggtggtgaacaactttacgatagactttggaaagaaatggacagagacatcaaaggttttatgcttcaaccagttggaccagaagctcttggatggtttcctagaaaaataaaaaatatggatgactttagaacattcaaatttagaacacctccaggaattccaggacaaacttataaagatataggtattgcatctgttgcaatgggtggtggagatattctaccagctttagaagcaggtacaattgatgcagctgaatggtgttgtccaaaaccagacatggtatttggtattcataaagttctaaaacattactacttacaaggtttacaccaagtagtggttaatgctgacttttatatcaatggatcaaaatacaaaaaactttcagatcatgagaaaaatgctcttaaagttgcagctgatgcatctttaatgagatctttagcttacaggatcaaagtaaatggagaagctttaaaagaacttactacaaaacatggtgtaattcttgaagatactcctgcagattacttccctgaatatatggctgctgcaaaagcaactttagataaaaactctaaagaaaatgctttctttaaagaagtttacgactcaatggtaaactttgctaacgttgcagttccgttttggtcaggagctcaatcttcaaatgctaagctaggtatggcttatgcgaattctttgaagtaaa

SEQ ID NO: 252845 - DNA, 1041 bp, Unknown
  Bacterial polypeptide expressing nucleotide sequence isolated from the Sargasso Sea
aatgatatttggtgtgatcctagtagcttcatttgcttctagtgctaatgccaaaacattaaagtgtcagactgtccttaacactaaggctgatgaagttaaaatgttaaaagactttactgatacggtaacaactctaactgatggttctttaaaatttgaaattttaccagccggtgctgttgttggagtaaaagaaacattagatgcagttgataaaggactaattgactgtggatttgcttggactcactattggtcaggagatcatcctgctgctatgttatttggttcaccagtagctggtggtggtgttggtatagacaacttagcttttttatcatggtttcaatatggtggtggtaaagagctttatgatcaattatggaaagaaatgggaagagacatcaaaggatttatgcttcaaccagtaggtccagaagctttaggttggtttccaaagccaattaaagatatggcagactttagaaaatataaattcagaactcctcctggaattccaggacaaacatacaaggatattggtatagcgtctgtagctatgggtggaggagatattcttccagctctagaagcaggtacaatcgatgctgctgagtggtgttgtcctaaaccagacatggtttttggattccaaaaagtattaaagcactattacttacaaggtttacaccaagtagtggttaatgctgatttctatattactggaaaaacttacaatgctatgagtgatcatgagaaaaagtctcttgaagtagcagctaatgcatcattagctaaatctttaagttacagaatctatgaaaacggaaaagcattacaacagttaactacaaaacatggggtaatattagaagatactccatctgactacttcgttgagtatatggctgctgcaaaagccactttaaacaaaaatgcagagaaaaatgcatttttcaaaaaagtttatgattcaatgaaagagtttgctgatgtagctgtttctttctggagcggtgctcaaatgtctaatgcgaa

SEQ ID NO: 252846 - DNA, 688 bp, Unknown
  Bacterial polypeptide expressing nucleotide sequence isolated from the Sargasso Sea
atgaaaaaaatcatttcaatgttatttgcaacttttttagtgtttggatttatttctaacgctaatgctgcaaaaacactaaaatgtcagacggtccttaacactaaagctgatgaagttaaaatgttaaaagactttactgacactgttacagagttaacagctggttcattaaaattcgaaatcttacctgcgggagctgttgttggagttaaagaaactctagacgctgttgacaaaggtctgattgattgtggattcgcatggactcactattggtcaggtgatcatcctgctgctatgttatttggttcgccagtagctggtggtggagtaggtattgacaatatagcttttctatcttggttccaatatggtggtggtaaagaattatacgaccaactttggaaagaaatgggaagagatattaaagggtttatgattcaaccagttggacctgaagctttaggttggtttccaaaaccaattaaagatatggctgattttagaaaatataaattcagaactcctccaggaattccaggacaaacttacaaagacattggtatagcatctgttgcaatgggtggtggagatattctaccagctcttgaagcgggaactatcgatgccgctgaatggtgttgtccaaaaccagacttaacatttggtttccaaaagtattaaa

SEQ ID NO: 252847 - DNA, 973 bp, Unknown
  Bacterial polypeptide expressing nucleotide sequence isolated from the Sargasso Sea
atgttaaaagatttcactgatactgttacaacacttacaggagggtctctaaagtttgaaattatgccagctggaaccgtagttggtggtaaagaaactttagatgcagtcgacaagggattaatagactgtggatttgcttggacgcactactggtcaggtgatcatcctgcagcaatgttatttggttcaccagttgctggtggaggtgttggtatagataacttagcatttctatcatggtttcaatacggtggtggaaaagaattgtacgatagactttgggacgaaatgggtagagacataaaagggtttatgcttcaacctgttggtccagaagctttaggttggtttccaaaaccaattaaaaatatggctgatttcagaaaatataagtttagaactcctccgggaattccaggtcaaacttacaaagatattggtatagcatcagttgctatgggaggtggagatattcttccagctcttgaagcgggtacaattgatgcagctgagtggtgttgtccaaagcctgatttagtatttggtttccaaaaagttttgaaacactactatttacaaggtttgcaccaagtagttgttaatgctgacttttatataacaggtaaaacatatgatgctatgactgatcatgagaaaaaatctttagaagtagcagcaaatgcatctctaaataagtcgttaagtagaagaatatatgaaaacggattggctttgagagaactaacaactaagcatggagtaatcttggaagatacaccaacagattactttactgaatatatggctgctgcaaaagcaacattgaataaaaatgctgcagaaaacgcattttttaaagaagtttacgactcaatgaaagagtttgcagatatagcagtaccattctggagtggagcgcaaatgtcaaatgcgaaacttggaatggctcacgcagctactttaaaataaa

SEQ ID NO: 252848 - DNA, 1093 bp, Unknown
  Bacterial polypeptide expressing nucleotide sequence isolated from the Sargasso Sea
tatgaaaaaaattatttcaatcttgtttaccgcttttttagtttttggttttgtatcaaacgctagcgctaaaacattgaaatgtcagaccgttcttaatactaaagcagatgaagtaaaaatgcttaaagacttcactgatactgtaacagctttaactgatggatctttaaaatttgaaattttaccagcaggagcagttgttggagttaaagaaactttagatgcggttgacaaaggtttaattgactgtggatttgcttggacacactattggtcaggtgatcacccagcagctatgttatttggttcacctgtagcaggaggtggagtaggtatagataacttagcatttctatcatggttccaatacggtggtggtaaagaactttacgaccaattatggaaagaaatgggaagagacataaaaggatttatgcttcaaccagttggaccagaggctttaggttggtttccaaaaccaattaaagatatggctgactttagaaaatataaattcagaactcctccaggaattccaggacaaacttacaaagacattggtatagcatctgttgctatgggtggtggtgatattttaccagcacttgaagcaggtactattgatgcagctgagtggtgttgtccaaaaccagatttaacatttggttttcaaaaagtcttaaaacattactacttacaaggattacaccaagttgtagttaatgctgacttttacataactggaaaaacttataatgcaatgacagctcacgagaaaaaatctcttgaagttgctgctaatgcatcactagcaaaatctttaagctacagaatttacgaaaatggtaaagctttacaagagcttactactaagcatggggttaaattagaagacactccatctgattatttcgtagaatatatggctgcagcaaaagctactttaaataaaaatgctgagaaaaacgcatttttcaaaaaagtatatgactctatgaaagagtttgctgatgttgctgttcctttctggagcggtgctcaaatgtcaaatgctaagcttggaatggctcacgcagcgacattgaagtaa

SEQ ID NO: 252849 - DNA, 689 bp, Unknown
  Bacterial polypeptide expressing nucleotide sequence isolated from the Sargasso Sea
aatgaaaaaaatcatttcaatgttatttgcatctgttttggtacttggtttcatatcaaatgctaacgctgcaaaaacactaaaatgtcagacagtacttaacactaaggctgatgaggtcaaaatgttaaaagactttactgacacagtaacaactttaacaagtggttctttaaagtttgaaattttacctgctggtgcggttgttggagttaaagaaactctagatgctgtagataagggtttaattgattgcggatttgcttggacacattattggtcaggtgatcatcctgctgctatgttattcgggtcaccggtagctggtggtggagttggtattgacaatatagcgttcttatcatggttccaatacggtggtggtaaagagttatacgaccaactttggaaagaaatgggaagagacataaaaggatttatgattcaaccagttggcccagaagctctaggttggtttccaaaaccaattaaagatatggctgactttagaaaatataagttcagaactcctccaggaattccaggacaaacttacaaagacattggtatagcatctgttgcaatgggtggtggagatattttgccagctcttgaagcaggaactatcgatgctgctgaatggtgttgtccaaaaccagatttaacatttggtttccaaaaagtattaa

SEQ ID NO: 252850 - DNA, 1306 bp, Unknown
  Bacterial polypeptide expressing nucleotide sequence isolated from the Sargasso Sea
ttttcctattcgattagccaaaacacatcccgccgagcccgcaccatttataataaaatcaaatttttccattttgagttttatagcaaaatttttgagtatttatcacttaattaaagctttttttaataccaataaagtcaaatgcaacttgtatatcctcattttttttggttggatatggcttattaaatttaacttaagagaggaaataatgaaaaaaatcatttcattaatgtttgcggcattcttagttcttggttttatatcaaatgctaatgctaaaacattgaaatgtcagactgttcttaacactaaggctgatgaagttaaaatgttaaaagactttactgacactgtaacagctcttactgatggctcactaaaatttgaaattttgccagcaggtgcagttgttggagtaaaagaaacattagatgcagttgataaaggtttaattgactgtggatttgcttggacacactattggtcaggtgatcaccctgcagctatgttatttggttcgccagtagcaggtggtggagtaggtatcgataacttagcgtttttatcatggttccaatatggaggtggtaaagagttgtatgatcaattgtggaaagaaatgggaagagacatcaaaggatttatgcttcaaccagttggcccagaagctttaggttggtttccaaaaccaattaaagatatggctgactttagaaaatataagttcagaactcctccaggaattccaggacaaacttacaaagatatcggtatagcatctgttgcaatgggtggtggagatattcttccagccttagaagcaggtacaatcgatgcagctgagtggtgttgtccaaaaccagatttaacatttggttttcaaaaagttttaaaacattactacctacaaggattacaccaagtagtagttaatgctgacttttatataactggaaaaacttacaaagcaatgacagctcacgagaaaaaatctcttgaagtcgctgctaatgcttcattagctaaatctttaagctacagaatatatgaaaatggaaaagctttacaagaattaactacaaagcatggagttattttagaagatacaccttcagattactttaaagagtatatggcagctgcaaaagctacattgaataaaaatgcggaacaaaacaagttcttcaaagaagtatacgattcaatgaaagagtttgcagatgttgctgttccattctggagcggtgctcaaatgtcaaatgctaagctaggaatggctcacgcagcgacattgaagtaa

SEQ ID NO: 252851 - DNA, 1063 bp, Unknown
  Bacterial polypeptide expressing nucleotide sequence isolated from the Sargasso Sea
tttgcaaatatgccgttcgttaaatttaacaataagagggataataatgaaaaaaatcgtttcaatgttatttgcggtaactctagtttttggttttatatcaaatgcaaatgctgcaaaaacatttaaatgtcagactgttcttaatgcaaaaggtgatgaagttatcatgcttaaagactttactgatacagttactaaattaacaggtggttcattaaaattcgaaattatgccagcaggtacagttgtaggagttaaagaaactcttgatgctgttgataaaggtttaatcgattgcggatttgcttggactcactattggtcaggagaacatcctgctgccatgctatttggatctccagttgcaggcgcgggtgttggtatagataatatcgctttcttatcttggtttttatcaggtggtggagagcagctttatgaccaactttggaaagaaatgaaaagagacatcaaaggctttatgcttcaaccagttggaccagaagctttaggatggtttccagagcctatcaaaaacatggatgattttagaaaactaaaattcagaactcctccaggaattccaggacaaacttataaagatattggaattgcatcagttgctatgggaggtggagatattctgccagctcttgaagcaggaactattgatgctgcagagtggtgttgtcctaagccagatatggttttcggtttccaaaaagttcttaaacattactacctacaaggtttacaccaagtagttgttaatgctgacttttatataaatggaactaaatacaataaattatctgaccatgagaaaacttcattaaaagttgcagcagatgcttcgttaatgaaatctttagcaagaagaattcttgtaaacggggaagcattacatgaattgactactaaacatggtgttcaattacatgatactcctaaagattactttgttgagtacatggcagctgctaatgctactttgaataaaaatgcagaaaaaaatgcattttttcaaaaaagtatggggattctcagaaaaaattgctga

SEQ ID NO: 252852 - DNA, 1156 bp, Unknown
  Bacterial polypeptide expressing nucleotide sequence isolated from the Sargasso Sea
ttgttttggatttcaatatttgagaagctaatttttttaaaaataaagagagggaaaaaaatgaaaaaaatcatttcaatgttatttgcagttgcaatggtatttggatttatttcaaatgctaatgctgcaaaaacactaaaatgtcagacagttcttaacactaaagctgatgaagttaagatgttaaaggattttactgacactgttacaacgttaacagctggatctctaaagtttgaaattttacctgcaggagctgttgttggtgtaaaagaaactttagatgcagttgataaaggtctaatcgattgtggtttcgcatggactcactattggtcaggagatcaccctgcagctatgttatttggttcgccagtagctggtggtggagtaggtattgataatatcgcattcttatcttggttccaatacggtggtggtaaagaactatatgaccaattatggaaagaaatgggaagagacattaaaggatttatgattcaaccagttggaccagaagctttaggttggtttccaaaaccaattaaagacatggctgactttagaaaatataaattcagaactcctccaggaattccaggacaaacttataaagacatcggtatcgcatctgtagctatgggtggtggagacattctaccagctttagaagcaggcacaattgatgctgctgaatggtgttgtccaaaaccagacttaacttttggtttccaaaaagtattaaagcactactacttacaaggtttacaccaagtagtcgtaaatgctgacttctatattactggaaaaacttacaatgcaatgtctgatcatgagaagaagtctcttgaagtagctgctaatgcgtcattagcaaaatctttaagttacagaatctatgaaaacggtaaagctttaagagagttaactactcaacacggagtaattttggaagatacaccttctgattatttcacagaatatatggctgctgcaaaagcatctttgaataaaaatgctgcagaaaataaatttttcaatgaagtttatacttcaatgaaaaactttgctgatattgctgttccattctggagtggtgctcaaatgtctaatgcgaagctaggaatggctcacgcagcaacattaaagtaat

SEQ ID NO: 252853 - DNA, 624 bp, Unknown
  Bacterial polypeptide expressing nucleotide sequence isolated from the Sargasso Sea
gacgaggattttttatatctcttgaaggggcggaaggtgttggtaaatcgactaacctcgaatttataagaactatcctggaggataacggccaaaaagttgtcgtgacaagggagcccggaggaactccactagctgaggacattcgtcagcttttgttaactaatcgggatgaaaccgtggatgttcataccgaaacattgttgatgtttgctgctcgagcccaacacgcgaggactgtcatcgaaccgttagttcaacgtggagatacggtcttgtgtgatcgatttacgcactctacctatgcttatcagggcgggggtcgaggggtcttaataagagaattagaatttcttgcccaatttgctcacagtaacttatggccagatctgacaatatatttggatgctccagtggatcgagcgtttgcgagaattagggatagagaacaggatcgaatagagcagtccggaagggaatttttcgaacgcgtacgctacaaatacctagaaatggcggagaatgactcacgtatttccgtagtcgatgcaaatcaagaactgtcgacggtgcaggatgacttaagatctcttctgagctcttttctttcggaacaaaagtgaa

SEQ ID NO: 252854 - DNA, 458 bp, Unknown
  Bacterial polypeptide expressing nucleotide sequence isolated from the Sargasso Sea
tatgaaaaaatttataacatttgaaggaattgacgcatccggaaaatctacacaaattaaaataatttataaaattttaaaaaaaaaaaataaaaaagttttcataactagagagcctggcggcacaacttttgctgaaaaaattagaaatttaataattaataataatttaactccaataacagaattaatgcttttttatgctgccagatatgaccattttaaaaaaattaattattatttgaaaaaaaaatatatagtactttgtgatcgatatatccattcaacgtatgcttatcagcatcatgagcaaaaaatagataagaatcttataaattttttacaaaatattattggaaaaaattcatatcccgatttaacttttttaattgatttgcctacagttttagcgaaaaaaaggatcaaattaagaagaaaaagtaaagataaatttgata

SEQ ID NO: 252855 - DNA, 634 bp, Unknown
  Bacterial polypeptide expressing nucleotide sequence isolated from the Sargasso Sea
gatggaaacttcgagtcgatttatcaccattgaaggcgcagaaggtgtaggcaaatccacctgcatcgctgtggtggaaagctggcttgaaggtcagggcctctcttatgtctcgacgcgagaacctggtggcacaccactcggtgagaaactgagggctctgctgctagatccagcgtcgggtaccatcgatacccttgccgagctgatgatgatgtttgcgtcgcgcgctcagcatgtgagcgaagtcatcaaaccggcgctggcgcgtggccaatgggtcgtttgtgaccgtttcactgattcgacctatgcctaccagggtgggggtcgaggactgtcgatggaggtcatcagacaaatcgagcaggttgctttacagggatttaccccagatttgacactcgttctggatctacctgtggatgacggcctggaacgggtcgttaatcgaggagagagagaccggtttgaacgtgagcagagggtttttttcgaaagagttagaaacgcatttatgcagagggcagccgggggtgatcattatcgtgtgattgatgcctcgggtactgagaaagtggttggctcccgggtccggcgtactcttaaagaatttttggggagtgttgactga

SEQ ID NO: 252856 - DNA, 589 bp, Unknown
  Bacterial polypeptide expressing nucleotide sequence isolated from the Sargasso Sea
gatggctgccagaggccgttttattacctttgagggcaccgagggggttggtaaatccacccagttgcagaacgcggcagacacgctgacatcgctggggattgatgtggtggttacccgtgaaccgggtggcacgcccatggcggaaaagatccgggagctgttgctggcccccagggaagaaccggtgcatgaaaccaccgaactgctgctgatgttcgccgcccgtgcccagcacctgcacaaccggattctgccggcactggccgcaggcaagtgggtgctgtgtgaccgctttaccgatgccaccttcgcctatcagggagggggcaggggggtgcctgaggagcgcatagcgctgctggaaaccttggtgcagggcgatgtgcggccggaccatgttgtccttctggacgcaccggtagaaaccggcatggcccgcgcaaagaaacggggcgaactggaccggtttgagcaggaagagctggcctttttccagcggattcgagatacctacctggcccgggcgaccgctgcacccatgcaataccatgttgtgaatgccgccttgcccctggcgcaggttcgg

SEQ ID NO: 252857 - DNA, 600 bp, Unknown
  Bacterial polypeptide expressing nucleotide sequence isolated from the Sargasso Sea
tatgaaaacaaaagttaaaagaggaaaatttataaccattgaaggaggggagggatcaggtaaatccactcaaatctcaattttagtaaatcgtctacaagaagaaggggtcagtgcagtaaagacacgtgaaccaggtggtgcaccaacctctgatgctattcgctcattattagtttcaggcgaaatttctttttgggagccaatatcagaaacgatgttacattttgcagcaaggcatgaacacattataaaaacgattaatccttctttagataaaggcctttgggttatatctgatcgtttttctgattcaactatggcgtatcagggttacgggcaaggtgttagtaaaagtattattgattccttatatacgattaccgctgataatatagaaccagatttaacacttattttagacctcgaaccagaagttggcttaaaaagggctgtggataggaatgtttcactttcatcaaatgaagatagatacgagcgaatggatattgaattccatagaaagttgcgtaagggctttttagacattgcgaaaaacaatcctacgaggtgccgtgtaataaaagctcaaggttcatt

SEQ ID NO: 252858 - DNA, 337 bp, Unknown
  Bacterial polypeptide expressing nucleotide sequence isolated from the Sargasso Sea
gacttatcgtcgcaggcgtatcaagggggcgggcgtggcattagctcaaatacactagcgtcgttatcgtctatggtattaaaaggcctaaagcccgacttaaccatttacctcgatatagacccagtaattggccttgaacgtgctaaagggcgaggtgaacttgaccgaatagagcaagaagctattgagttttttcagcgtacacgcatgcgctacctagagcttgcaagcgacgacaactcaattaaaaccgtagatgccaaccaagaaattgataaagtacatcgcgatatcacaaatgtattacgtactttttttgaagagctaaaataac

SEQ ID NO: 252859 - DNA, 361 bp, Unknown
  Bacterial polypeptide expressing nucleotide sequence isolated from the Sargasso Sea
aatgacaggtgtatttgtcaccctggaagggcctgagggtgcaggcaagtcaaccaacctcggttatgttgccgacgcattgcgccgcgcaggctgtgaaccgctgttgacccgtgagccgggtggtacgccgattgccgagcggatgcgcgggattctgctcgagcaccatgaagagccgatggacccggatgcggagttgttgctggtttttgctgcgcgcgcccagcatctgaatcgggtgatcaagccggcgttggcgcaggggcgtgtagtcatcagtgatcgctttaccgatgcgacctacgcctatcagggcggcgggcgggggatcgacgctgctcgcattgctgcgcttgaa

SEQ ID NO: 252860 - DNA, 328 bp, Unknown
  Bacterial polypeptide expressing nucleotide sequence isolated from the Sargasso Sea
atggataaacttaattataaaaaatcaaataaaaaaggtctttttattacctttgaaggcggagaaggatctggtaaatctacacaaattaaattaatttcaaaaactttaagtaaagataaattatcttatattttgacaagagaaccaggtggtactccagttagtgaagaaataagaaaaattctagtttctggtaaagttgaaaaattagatagctattccgaattattgtgttttactgctgcacgcagacaacatttaaaagaaattattattccagcgttagattctggtcaaattgttatatgtgacaaggtatattgat

SEQ ID NO: 252861 - DNA, 625 bp, Unknown
  Bacterial polypeptide expressing nucleotide sequence isolated from the Sargasso Sea
ttgtttattacatttgaaggaggtgaggggactggcaaatcaacccaaataaacttactatccaaatttctaatttcaaatttatataaagtatttgtaacaagagaacctggggggtctattggagcagagactataagaaaacttcttgtaacaggaaatcccaatcgttgggatgctcatacagaagctttgttaatgtatgcggctagaagagataattttaaaagaataattaagcctaaattagctgaagggaatattgttattagtgacaggttttcagattcaactaaagtataccaaggacatgttggaggtatttcagatactaatattgacttactccataaattttcattagataacttttacccagaccttacttttgttcttgatttagatgttagcgaaggtcttaaaagagcaaataccaggaaatctaatgaaaaaagatttgaatcaaaaggctttgaatttcatgaaaatgttcggaaatcttatttaaaactagcatcagatgaaccaaacaggatatatattatagacgcgtcaaaatctatttctaaaattcaaaatgaaataatcaaagttgtagaaaaatttcttaccaaaaataaatgaa

SEQ ID NO: 252862 - DNA, 622 bp, Unknown
  Bacterial polypeptide expressing nucleotide sequence isolated from the Sargasso Sea
tatgagtagaggatgtttttttagttttgaaggtattgatggctgtggtaagtctacacaaattgagtatctttcagagtctcttctaaattcgggaaaagaaattataaagatacgagaaccagggagtacagatatatcagaagaaattcgctctattcttttaaatccaaataacgaaatgattaacgatgcttgtgaagcactccttatggcggcaagcagagttcaacttgttaaagaaattattgttccggaaattatttctggtaagataattctttgtgatagatatgttgattcttctttagcatatcaagtaggtggccggggcttatctgaatcttgggttagagaaataaaccggtattcttttcaattggcaatgccagataaaactttttttctcaatatttctgtacaagatgcaattgaccgattaaaagatcgtgatcgagatcgaattgagttgtctggaataaaattcctcgagaaggtaaatgattgttttgtcgcacttgcagaagaagagcctagcaggtatattactcttgatggtagcaaggagcctgatttattggcaaaggaaatatttgatgaggtgagaaagtttgttgaatga

SEQ ID NO: 252863 - DNA, 125 bp, Unknown
  Bacterial polypeptide expressing nucleotide sequence isolated from the Sargasso Sea
attgtttattacatttgaaggcggtgagggttctggtaaatctacacaaataaacttattatcaaaatatctaatctcaaaatcatataatgtttttgttactagagaacctggaggttctttgg

SEQ ID NO: 252864 - DNA, 628 bp, Unknown
  Bacterial polypeptide expressing nucleotide sequence isolated from the Sargasso Sea
tatgaaaccaaaatttatagtagtagaaggcttagaaggcgcgggtaaatcaaccgctatttcactttgccaagactttttaaacaaaaaacaaatagattacattaacgtacgcgaacctggcggcacgccattggccgagtcgttacgcacattggtaaaagccgaacacgaagaagaaatagccttcgaaaccgagctgcttattatgtacgccgcacgttcgcagctaatgcataacgtaataaaccctgcactagagcaaggtaaatggatattagccgaccgtcacgacttatcgtcgcaggcgtatcaaggcggcgggcgcggcattagctcaaatacactagcgtcgttatcgtctatggtattaaaaggcctaaagcccgacttaaccatttacctcgacatagacccagtaattggccttgaacgtgctaaagggcgaggtgaacttgaccgaattgagcaagaagccattgagttttttcagcgtacacgcatgcgctacctagagcttgcaagcgacgacaactctattaaaaccgtagatgccaatcaagaaattgataaagtacatcgcgatatcacaaacgtattacgtactttttttgaagagctaaaataa

SEQ ID NO: 252865 - DNA, 619 bp, Unknown
  Bacterial polypeptide expressing nucleotide sequence isolated from the Sargasso Sea
gatgtttattacatttgaaggtatagagggctctggaaaatctacccaaataaaaatgctaaaggaagctcttcttggtaagggccatgaagtaattgttttaagagagcctggaggaacaattcttggtgagaaggtacgtgaagctttcttagaaaagacaattgaaaaaatttctgttgaaactgaaaccttccttctttatgcctcaagaaaacatttagatcaaaatcttcttaagcctagcctagctgcaaaaaaattcgtcatttgtgacagatattatgatgcaactgaggcttatcaatgttatggaaaaggcctctcccatgatttttttaaatcacttaataaagtttgtaatctatcaatacctgaaattactttctatattgatattacgtctgaaatctcgaaggagagaatatcaaacagagaaagggatagaatggaagcagaagagatagatttttttaataaagtgagggaaggatatctaaaaatcgctgaagagaatagagaaagaatatataaggttaatggaatagatactatcgaaaatattcacaaaagaatactagaacatgtaggagaaaaaattggttcttccctgggataa

SEQ ID NO: 252866 - DNA, 619 bp, Unknown
  Bacterial polypeptide expressing nucleotide sequence isolated from the Sargasso Sea
atgtttattacatttgaaggtatagagggctctggaaaatctacccaaataaagatgctaaaagaagctcttcgtgttgagggccatgaagtaattgttttaagagagcctggaggaacaattcttggtgaaaaggtacgtgaagctttcttagaaaagacaattgaaaaaatttctgttgaaactgaaaccttccttctttatgcctcaagaaaacatttagatcaaaatcttcttaagcctagcctagctgcaaaaaagttcgtcatttgtgatagatattatgatgcaactgaggcttatcaatgttatggaaaaggcctctcccatgatttttttaaatcacttaataaagtttgtaatttatcaatacctgaaattactttctatattgatattacgtctgaaatctcgaaggagagaatatcaaatagagagagggatagaatggaagcagaagagatagatttttttaataaagtgagggaaggatatcttaaaatcgctgaagaaaatagagaaagaatatataagattgatggaatagatactatcgaaaatattcacaaaagaatattagaacatgtaggagaaaaaattggttcttccttgggataaa

SEQ ID NO: 252867 - DNA, 258 bp, Unknown
  Bacterial polypeptide expressing nucleotide sequence isolated from the Sargasso Sea
aatgtctaaatttatcgtgattgaaggactggaaggagcagggaagagctccgcggtgcgttatgtgaccgactatctgcatggccacggcgtggcgcggatcgagtgtacccgcgagccgggcggcaccccgctggccgagcggatgcgggccatcgtcaaggaggtgcacgacgagcgcctcaccatcgaagccgaactcttgctgatgtacgcctcccgggtccagctggtcgagacccgcatcaagccggcgct

SEQ ID NO: 252868 - DNA, 400 bp, Unknown
  Bacterial polypeptide expressing nucleotide sequence isolated from the Sargasso Sea
attgtttattacatttgaaggaggtgaggggtctggcaaatctacccaaataaacttactttccaaatttctgctttcaaatttacataaagtatttgttacaagagagcctggtgggtctgttggagcagagactataagacaacttcttgtaacaggcaatcctaaccgttgggacgctcatacagaggctttgttaatgtatgcggctagaagagataattttattagaataattaagcctaagttatctgaagggaatattgttattagtgacaggttctcagattcaacaaaagtatatcaaggatacgttggaggtgtttcagatgcaaatattgacttgcttcataaattttcattagataacttttaccccagaccttactttttttcttga

SEQ ID NO: 252869 - DNA, 571 bp, Unknown
  Bacterial polypeptide expressing nucleotide sequence isolated from the Sargasso Sea
atgcgcggaaagtttattgtagttgaaggccttgaaggggcaggaaaaagctcagtgattgggctgattgttcaagcattaaaaggtgcaggaaagcgcgttgagcaaactcgtgagccaggcggcacaccgatggcagaagccattcgagaatgtgtaaaacacgactgggatgagaccgtgagtgaggagactgaactacttcttatgtatgcggcgcgtgtgcaattacttgccaataaaatcttaccatcacttgatgcgggtgcgtgggtggtaggtgacagacacgacctgtcatctcaagcctatcaaggcggtggtcggggcgtcagtggaaaaacaatgtcggccatcagcgatatcgcccttaaagggtttaagccagatttaactttatatctggatgtcgagcctgcggttggactagagcgcgcccgtgggcgaggggagcttgaccgcattgagcaagcggggctcgcctttttcgaacgaactcgtgcaaaatacttgtcgcttgctaagcaagatgaatctatcgtcgttgtcagtgcaatgcagcctatggaaa

SEQ ID NO: 252870 - DNA, 676 bp, Unknown
  Bacterial polypeptide expressing nucleotide sequence isolated from the Sargasso Sea
aatgcgcggaaagtttattgtagttgaaggccttgaaggggcaggaaaaagctcagtgattgggctgattgttcaagcattaaaaggcgcaggaaagcgcgttgagcaaactcgtgagccaggcggcacaccgatggcagaagccattcgagaatgtgtaaaacacgactgggatgagaccgtgagtgaggagactgaactacttcttatgtatgcggcgcgtgtgcaattacttaccaataaaatcttaccttcacttgatgccggcgcgtgggtggtaggtgacagacacgacctgtcatctcaagcctatcaaggcggtggtcggggcgtcagtggaaaaacaatgtcggccatcagcgatatcgcccttaaagggtttaagccagatttaaccctatatctggatgtcgagcctgctgttggactagagcgcgcccgcgggcgaggggagcttgaccgcattgagcaagcggggctcgcctttttcgaacgaactcgtgctaaatacttgtctcttgctaagcaagatgaatctatcgtcgtggtcagtgcaatgcagcctatggaaaaggttcagcaagacgtgattgcggttatcaatgactatgtgacgaacacaagtagcgaaagcagtagcatggcgcgaaacgaaagccagcaggggaaaggctaa

SEQ ID NO: 252871 - DNA, 519 bp, Unknown
  Bacterial polypeptide expressing nucleotide sequence isolated from the Sargasso Sea
tatgacagcgaaatttatagtgattgaaggcctagaaggtgccggaaaatcaacggccattgccgtatgccaagcttatttagaaaacaagcaagtcgattttattaatgtacgtgagcctggcggtacagctatggctgaagagctgcgtaatatcgtcaaacaggctcaccaagaaacagtgacgggtgaaacagagctgttaatcatgtatgcagcacgctcacaattagttgctaatgttattaatccggcacttgaaaagggcacttgggttttaggtgatcgccatgatctttcatcacaagcatatcaaggtgggggtcgcggtattgaacagactaaactctcttttttagctgatatggtgctaaatggtttaaaacctgatttaaccatttatttagacattgaccctgcagttgggcttgcccgtgcaaaaggccgtggtgaacttgatcgtatcgaacaagaagcgttaggtttttttgagcgcacgcgcgcacgctaccttgaaat

SEQ ID NO: 252872 - DNA, 670 bp, Unknown
  Bacterial polypeptide expressing nucleotide sequence isolated from the Sargasso Sea
atgcgcggaaagtttattgtagtagaaggccttgaaggggcaggaaaaagctcggtaatcgggttgattgtaaaagcgttaacagacgctggaatgcgcgtggagcaaactcgtgagccgggcggtaccccaatggctgaagcgattagagagtgtgttaagcacgactgggacgaaacagtaagcgaagaaaccgaattactgcttatgtatgcggctcgcgttcagttactgaccaataaaatttacccttcgcttaacgcaggtgcttgggtggtgggagacaggcatgatctttcttcgcaggcttatcaaggcggaggccgaggtgtcagtgaaaaaaccatgaccgcaattagcgatattgctcttaacgggttcaagccagatttaaccctttatctagacgtagacccagccgtgggtttagaaagagcgcgtggtcgcggcgagcttgatcgaattgagcaagcgggtttaggcttttttgagcgtacgcgggccagatatttatccttggctgaaaatgatgagagcatcattgttgttaatgctatgcagcccatggaacaagtgcatcaagatgtcatttccattattgctaattatgtaagccagcacattgacgaaggtagcgagtcgcacaaaaccgatcaggggaataactaat

SEQ ID NO: 252873 - DNA, 592 bp, Unknown
  Bacterial polypeptide expressing nucleotide sequence isolated from the Sargasso Sea
actggaaggcgccggtaaatcgagtgcgattgcccttattcgcgattttattgaaaagcacaccgggctcgcgcctgtttgcacccgcgagccaggcggcacgccgctggccgagcgcattcgtgatttagtgaaaattgccgacccaaacgatcctttatgtgatgagtctgaatgtttattgatttatgccgccagagctcagctcgtcgccaatgtgatcaaacccgcgctggctgaaggcaaatgggtgttaggggatcggcacaatctgtcatctttagcgtaccaaggcggcggacgtggcttaatgcctttagtcgaagccgtaagtaacgcaacgctcaaagggtttaaacccgatttaaccctctatcttgatcttgaccctaagcttgggctgcaacgtgcagcaaagcggggcgaacttgatagaattgagcagcaagccatcgacttttttgaacgggcgcgcgcaacttacctcaagcttgccagcgaagatgagcggattgtcgttatcgacgccagccaaaccatggccgaagtgcataaagatattctggccgtgttacaggcgatggcatggtag

SEQ ID NO: 252874 - DNA, 661 bp, Unknown
  Bacterial polypeptide expressing nucleotide sequence isolated from the Sargasso Sea
aatgacaactttaggtcgttttattgtggtggaagggctggaaggcgcaggtaaaaccagcgctatccgtactatccagcaatggctgaacgaacatcacatcaagtttatcagcacccgtgagcctggcggcactcctttagccgaacaaatccgcaccctcgtcaaacaggtgcaggatgaattagtggcgccagaaaccgagttattactaatgtatgcatcccgtgtgcagctggtaaaaactgtgatccagcctgccttacagcaaggcagctgggtgctgggtgatcgtcacgatttatcgtcccgcgcttatcaggggggcggtcgtcaactggatgaaagtttgattaacagcattcggcaggtggtattgggtgatttaaagccggatttaacactgtatttagatatagacccggctataggcttacaacgtgctcaggctcgcggtgaattggatcgcattgagcaggagcaactggcgtttttccaacgcacccgggctaagtatctgcaaatcgcggccactgaggccaatatagtcaccatagatgccagtcagtctatggagcaggtgcagcaacaaatactgaatgctctgcaacaggcttatcaaagcggatccttaaacccaggtctactctctgatgtctga

SEQ ID NO: 252875 - DNA, 631 bp, Unknown
  Bacterial polypeptide expressing nucleotide sequence isolated from the Sargasso Sea
atgacccaagcatccgccaaattcattgttgttgaaggactggaaggcgcaggcaaatcgagtgcgattgcccttattcgcgattttattgaaaaacatactggccttgcacccgtgtgcacccgcgagccaggcggtacgccgctggccgagcgcattcgtgacttagtcaaaattgccgacccaagcgatcctctgtgtgatgagtccgagtgtttattgatctacgccgccagagctcagctcgtcgccaatgtgatcaaacccgcgctggcagaaggtaagtgggtgttaggggatagacacaatctttcatccttagcttaccaaggtggtggacgcggcttaatgcccttagtcgaagccgtgagtaacgcgacacttaaggcctttaaacccgatttaaccctctatcttgaccttgatcctaagcttgggctgcagcgcgcagcaaagcggggagagctagataggatcgagcaacaagccatcgacttttttgaacgggcgcgcgcaacttatctcaagcttgccagcgaagatgagcggattgtcgttatcgatgccagccaaaccatggccgaagtgcataaagatattctggccgtgttacaggcgatggcatggtaac

SEQ ID NO: 252876 - DNA, 673 bp, Unknown
  Bacterial polypeptide expressing nucleotide sequence isolated from the Sargasso Sea
atgacaattcaggggcgttttatcgtagtggaagggctggaaggtgcaggtaaaaccagtgctatcctaactatccagcagtggctgagtgaacacaacatcaaatttatcagcactcgtgaaccaggtggtacagctttagctgaacaaattcgaaccctcgtcaaacaagtgcaggatgaaatagttgcgcctgaaactgaattattattgatgtatgcttcccgtgtgcagctgataaaaactgtgatccagcccgccttaaagcagggtatttgggtagtaggggatcgtcacgatttatcctccagagcttatcagggcggtggtcgtcaactggatgaaagcctgatcaacagcattcgtcaggtggtgttaggtgatttaacaccggatttaacgctgtatttagatatagacccggctatagggttacaacgtgctcaggctcgcggtgaattggatcgaattgagcaggagcaactggcgtttttccagcgtaccagggccaagtatctgcaaatcgcagccgctgagcctaatatagtcactattgatgccagtcagtctatggcgcgggtgcaacaacagatcctgaatgcactgcaacaggcctatcaaagcggttctttaaacactggtgtaagcgcggatctaagcagcaatgtctgat

SEQ ID NO: 252877 - DNA, 538 bp, Unknown
  Bacterial polypeptide expressing nucleotide sequence isolated from the Sargasso Sea
gatggcgcggggcaaattcataacgtttgagggcatcgacggtgccggcaagaccacccatctgagctggtttcgcgagcgcctcgaagagaaggtggcgagcaccggccgctcggtcgtgatgacgcgcgagccgggcggcacggcgctcggcgaacagattcgcgagatcgtcctgcatcagaaaatggacctcgaaaccgaggcattgctgatgttcgcgctgcgccgccagcatctggccgaagtgatcgagccggcgctggcgcgcggcgactgggtgctgtccgaccgtttcacggatgcgaccttcgcctatcagggcggcggccgcggcctgccgcgcgacaagctggaaacgcttgaacgctgggtgcagggcggttttcagccggacctgaccgtgttgttcgatctggcgccggaaatcgccaacgaacggcgcagtgccgcgcgcgacccagaccgtttcgaaagcgaatcggaggcgtttttcaaccgcacccgtaccgaatatctgcgccgcgcggaagaagca

SEQ ID NO: 252878 - DNA, 622 bp, Unknown
  Bacterial polypeptide expressing nucleotide sequence isolated from the Sargasso Sea
aatggcgagcggtaaattcatcacgttcgaaggcatcgacggggcggggaagactacccacctgcaatggttctgcgaacgcctccagggcaagctggccgcggccggccggcaagtcgtcgtcacccgcgagccgggcggcacgcagctcggcgagaaactgcgcgagatcctgctgaaccagccgatggacctcgagacggaggcgctgctgatgttcgccgcgcgccgcgagcatctcgcgctcgtgatcgagccggcgctcgcgcgcggcgactgggtcgtctccgatcgcttcaccgatgcgacgttcgcataccagggcggcggccgcgggctgccgcgcgacaagctcgagacgctcgagcgctgggtgcagggcggtttccagcccgacctgacggtgctgttcgacgtcgcgccgcaggtggcgagcgagcgccgcggcgccgcgcgcatgcccgacaagttcgagagcgaatccgacgcgttcttctcgcgcacgcgcagcgaatacctgcggcgcgcggaagaggcgccgcaccgcttcgcgatcgtcgatgcgacgcagacgattcccgagatccgccagcagctcgaacgcgtgctcgccgcgctgtaa

SEQ ID NO: 252879 - DNA, 190 bp, Unknown
  Bacterial polypeptide expressing nucleotide sequence isolated from the Sargasso Sea
tatgaataatacattaaaaatatttagtggaagaagtaatccaattctctcaaaaagaattgttgatcacctaggattaaagctaggggatgttacaatacgcacatttgctgatggggagttatgggtaaaattcgaagaaaatattagaggtaaagatgtatttataattcaatctacaaatggccca

SEQ ID NO: 252880 - DNA, 802 bp, Unknown
  Bacterial polypeptide expressing nucleotide sequence isolated from the Sargasso Sea
gccatatattaaaactgaaaaaaaagtattcccagacggagaaagtaaaataacaattaatcagattccaaaaaaaagtatagtagtagtagtccaatcaacctatccaccagttgattcaaatcttttagaattattgagtattgtttcaaaagtacaaaaattttcatcaaaagtatatgcagttattccttacatgggatatgcaagacaagatagagagtttcttggaggagaaataatcaccataggagttgttggaaaattactcaaagcagcaggtgtaaaaaaagttctcacagtagatattcacagtaaattagcattaaaagaactaaaaatttcatcagaaaatgtttcagcaatggaagttctagtcaaacattttaagaaaatgaagatgaaaaatccggtaatcgtgtcaccagatttaggtggaaaagaaagagctgtaaagttttctgaacttttaaaaacagatttcatcgcgttaaagaaacagagagacagaaaaactggtaaagtgaaaattctttcaggaaaagttgatgttaaagacagagatttgattttggtagatgatatgattagtactggtggaagtattatcaaagcaactcaatttttaaagaaacaaaaatgtaggcgtgtttttgtagcatgcacacatgcattattagtcaatgatgctgcaaaaaagatcaaaaatgcaggcgtatcccaaataattagcacaaataccataccgggtgaatctgcaaaagtggatgtatcaaaagttatttctgatgcattaaagtga

SEQ ID NO: 252881 - DNA, 880 bp, Unknown
  Bacterial polypeptide expressing nucleotide sequence isolated from the Sargasso Sea
ttggcgagtgagttaggatgggaacaccattcattagaagttaggaggtttcctgattctgaaggctatatccgtattccagagaatgcgattaatgcagttaggtctgagccggtagttttggtatccaacacatttccagattcaggaatcgttgaaacactactattgctagaagcattaaatgatgtccgcaagggcaatatggcaaatcttagggaaatagagccgcaaaaaatggaacctattggccctggcctctttctagcaatcccgtattttggttattcgcgtcaagataagaggttcaaaccaggggaagcgattagtgctaaagccataggccgcttattgagttcacattgtgatggaatcgttgtctttgatttacacgctccagtcgctttggaaaacatgtcagtaccagtcgcctttacttcagcaatgcctgaaattgcatcccatctaaaagagacagttaatcctgattttattttgtctccagataaaggggcaatagagagggcatcgcaagtggctgaaacaatcggtcttccgttttcgtatctagaaaaaacacgtatcgatgctcacactatcgttcataaggcaaaaaatcttgatgtcgaggggaaaatcgttgcaatcgtagatgacatgattgcaaccggtggaacgatctgtaaagctgcagatgctttacgaaaccagggtgccaaagaagtacatgcagcatgtactcatggtttgtttactggtggagcgataaagcgcctcattgggcatgtagatggagtgcatgcaacctcttcgctcagtaactcaaggtcggtaattagcgggggcccagcactcgctagaggggttagagaacttcttg

SEQ ID NO: 252882 - DNA, 734 bp, Unknown
  Bacterial polypeptide expressing nucleotide sequence isolated from the Sargasso Sea
aatgagtgatctattatctataggttctggggcggcgcacttatacaggcaggcactagccactgtaagtaataatattgctaacctaaacactgacggttattcccgtcaggatgtgtcgatggcgcagaacaatccgagtcaaaaaggtacgatgtttttagggacaggagcccgtgtggaaggggtgtctagagcctatgatgaattcgtcgaaaatagcctaagagatagcggaagcgaatattcgacgcaagcccctataattgagtacgccaatagggtagttgacttacttggatcggagtcttctgggttatccaacgtgcttgataaatttttcgcgtcagcacatgaactgagcacgaatgctgcgtctaccacacatagaacagtttttttacgagatgcagattctgtggcagatagatttcgagagctttcgacacacttggattccttggatctgacggttcaggaaaatattaaataccaagtcgattctataaataactacgccgagaagttattagctgttaacaagcagctaggtcggaagaccgaggcttctcagcaatctccagctcttttggacgaacgagacaagttgttacgcgagctttcgaatgttgcgaaaattaacgtcttagaggatcaatctggccaagtcaccgtgagtttagacgggggtaattctcaatcggctatcgtgaggaaggattccactacgatta

SEQ ID NO: 252883 - DNA, 220 bp, Unknown
  Bacterial polypeptide expressing nucleotide sequence isolated from the Sargasso Sea
aatgaaacttcttacagggaatagcaataaaaatcttagtgtaaaaatatcaaaattccttaagactaaactcgtacattcaagtattaaaaaattttcagatggtgaaatttatattgaaataaaagaaaacattagaggaaatagtatttttattgttcaatcagttagttcaccagcaaatgataatcttatggaacttttattgtgtatagatgca

SEQ ID NO: 252884 - DNA, 217 bp, Unknown
  Bacterial polypeptide expressing nucleotide sequence isolated from the Sargasso Sea
tatgaaaataatcgcctgtaatagtagcaaatccctagcagaaaaaatttctaaacatattgatgttccattagcagatgcatctgttagaacttttaatgatagagaaatatttgtggaaataaatgaaaatattagaggtgaagatgtttttattattcaatctacatcacatccagcaaatgaccattttaatggaacttttaattacaattga

SEQ ID NO: 252885 - DNA, 358 bp, Unknown
  Bacterial polypeptide expressing nucleotide sequence isolated from the Sargasso Sea
agatgaagcgaacaaatccgaggtaatgaatgtaattggagatgtttcaaaaaaagattgtttgctttatgacgatatggcagacacatgtggaacattgtgcaatgccgcagatgcattaaaagccaaagacgctagaagtgtgagtgcttatattactcatcctgtattatcaggtgaagcaatagaaaaaataaatcaatcttcacttgatcaattagttgtaacagatactataccgctctcggaagaagctaaatcctgtaaaaagataagatgtatatctttggcaccgactttagctgaagccataaagagattaaataaagaggaatcaataagtgaaatgcttatgtga

SEQ ID NO: 252886 - DNA, 220 bp, Unknown
  Bacterial polypeptide expressing nucleotide sequence isolated from the Sargasso Sea
gatgtttatgtttatatcactcatgcggtattgagtggccaagcagttgataaaattgaaaagtcaaaaatcaaaaaattaattactacggatactattgataactcgaaaaaaataggcaaaagcaaaaaaatagaaataatttccatagcaccaatgatttcagaagctatgaaaagaattgctaactccacatctgtttctagtctttttaaataat

SEQ ID NO: 252887 - DNA, 217 bp, Unknown
  Bacterial polypeptide expressing nucleotide sequence isolated from the Sargasso Sea
gttaaggcatatataacccatccagtgctgtcaggccctgttattgaaagactaaacaattcatcaattgatgaattagtagtaactaattcaattcctttgaacaaagaagctcaaaaatgcagtaaaatacgcgtcatttcactagcatcaacaatagctgagtgtataaaacgattaagtaatgaagaatcgctaagtgaaatgtttttataga

SEQ ID NO: 252888 - DNA, 247 bp, Unknown
  Bacterial polypeptide expressing nucleotide sequence isolated from the Sargasso Sea
atgaaaattttatcaggaacaagcaacccttctttaagtaaaagtatttcaaagcacctcaaactaaaactagtcaacacgaatattaagaattttgctgatggtgagatttatgttgaaataaacgagaatattagaggaaatagtgtttttgtaattcaatctaccgcaacgcctgccaatgataatctaatggagcttctcttgtgtatagatgcattaaggaggtcttctgcaaaaaatatta

SEQ ID NO: 252889 - DNA, 255 bp, Unknown
  Bacterial polypeptide expressing nucleotide sequence isolated from the Sargasso Sea
aatgaaaattttatcaggaactagcaatctttctctaagcaagagtatctctaaacaccttaagttaaaattggtgaatactaatattaaaaattttgcagatggcgaaatatatgttgaaataaatgaaaatattaggggtaatagtgtttttgtgattcaatctacagcaacgcctgcaaatgataaccttatggaacttttattgtgtattgatgctcttaaaagatcttcggcaaaaatattactgctgtt

SEQ ID NO: 252890 - DNA, 181 bp, Unknown
  Bacterial polypeptide expressing nucleotide sequence isolated from the Sargasso Sea
aatttatatagaaattaatgaaaatattagaggaaacagtatctttgtaatacaatcagtatcgtcacctgcaaatgacaatttaatggaacttcttctttgtatagatgctttaaaaagatcttcatgcaaaaaatattactgctgtcattccttattttggatatgcaagacaagatag

SEQ ID NO: 252891 - DNA, 403 bp, Unknown
  Bacterial polypeptide expressing nucleotide sequence isolated from the Sargasso Sea
ggtaaatttcttaatgcaggattagcaataattgataaaagaagacctgccccaggaaaatcagaagtaatgaatgttgtaggatatgttaaaggcaaaacatgtatcgtggttgatgatataattgactcaggtggtacaatcgtaaatgcttctaaggctttgatagagagaggagcaaaagaagtccacgtttatgtaactcatggagtgcttagtggaaaggctgtagaaaaaattaaaaattctagaataaagagattaattataacagatactattgataactcgcacagggtaaaagcagcaaaaaatattgaaattttaacaatttcacatctagttggagaagcaattaaaagaatttcaaactctacgtctgtatctgatttatttaggtaat

SEQ ID NO: 252892 - DNA, 298 bp, Unknown
  Bacterial polypeptide expressing nucleotide sequence isolated from the Sargasso Sea
aatggcaaaatttacagttgttgggggagaagcatcatcagatctagccaaaagaattgctagaaaaataaaatcgccatatattaaaactgaaaaaaaagtattcccagacggagaaagtaaaataacaattaatcagattccaaaaaaaagtatagtagtagtagtccaatcaacctatccgccagttgattcaaatcttttagaattattgagtattgtttcaaaagtacaaaaattttcatcaaaagtatatgcagttattccttacatgggatatgcaagacaagatagagag

SEQ ID NO: 252893 - DNA, 382 bp, Unknown
  Bacterial polypeptide expressing nucleotide sequence isolated from the Sargasso Sea
ctagcaataatagataaaagaagaccgactccaggtaaatctcaagttatgaatgtaattggaaatgtcaaaggtaaaacttgtataatagttgacgatataattgattcaggtggtacaattgtaaatgctgcagctgcattaataaaaagaggagcaaaagaagctcatgtatatgttactcatggcgttttaagtggtgatgcagttgaaaaaattaaaaaatctaaaataaaaaaattgattgttacagatacgataaacaacttagaaaaagtaaaaaaagctaagaatattgaggtattatctatatccaatttattagcagaagcaataaaaaggatttctaattcaacttcagtatctgatctattcaaataat

SEQ ID NO: 252894 - DNA, 175 bp, Unknown
  Bacterial polypeptide expressing nucleotide sequence isolated from the Sargasso Sea
tatgaaaataatcgcctgtaatagtagcaaatccctagcagaaaaaatttctaaacacattgatgtgccattagcagatgcctcagttagaacttttaatgatagagaaatatttgtggaaataaatgaaaatattagaggtgaagatgtgtttattattcaatccacatcacat

SEQ ID NO: 252895 - DNA, 214 bp, Unknown
  Bacterial polypeptide expressing nucleotide sequence isolated from the Sargasso Sea
atgaagattttatctggaactagcaacctaaagctcagtaaggatatttccaaacaattaaaacttaagttagttaatacaaacataagaaggtttgcagatggagaaatttatatagagataaatgaaaacataagagggaatagtgttttcgtaatacaatctacttcaaatcctgcaaatgataatttaatggaacttcttttagttatcg

SEQ ID NO: 252896 - DNA, 481 bp, Unknown
  Bacterial polypeptide expressing nucleotide sequence isolated from the Sargasso Sea
gcaaaaaaaaatattaaaagtaaaaacataatttgtgttgcacctgacgttggtggtactgaaagagcgagggctcttggaaaatatttgaatgcaaatcttgctatagttgacaaaagaaggcctgcgcctggtaaatcaaaggtaatgaatgtaataggaaatgttagagataaaacatgtataatagttgatgatataattgactcaggaggaacaattgtaaacgctgctaaagctttaaaggatagaggtgctagagaagtttttgtatatattactcatggagttttaagtggagaagcagttcaaaaaatcaaaaaatcagtaatcaagaaattagtaataacagatagtattgataatggcgaaagagtaaagaaagcaagaaatattgaagttttaacaatatcaaacttaatgggagaagcgattaaaagaatttcaaattcaacatcagtttcagatctattcaaataat

SEQ ID NO: 252897 - DNA, 244 bp, Unknown
  Bacterial polypeptide expressing nucleotide sequence isolated from the Sargasso Sea
cgccacgcttgcaaagccgcgcaggtgctgaaggagcgcggtgccaagcaagtgttctcgtattgcacgcatccggtgctgtcgggtggcgcggccgcccgcattgcagactcggcgctcgacgaagtggtcgtgaccgacaccatccccgctgcgcgaagacgccatcaagtgcggcaagatccgtcagctctcgaccgccccgctgctggccgagaccttcacgcgcatcgtgcgcggtgat

SEQ ID NO: 252898 - DNA, 709 bp, Unknown
  Bacterial polypeptide expressing nucleotide sequence isolated from the Sargasso Sea
tcaatcaacctacccacctgttgattcaaacctcttagaattgttgagtattgtttctaaggttcagaaattttcttcaaaagtttatgcagtcatcccttacatgggatatgcaagacaagatagagaatttcttggaggagaaatagttaccataggcgtagttggaaaattactcaaagcagcaggagtaaaaaaagtcctaacagtagacatacatagcaaattagcattaaaagaattgaaaatttcttcagaaaatgtttcagctatggatgttttggtaaaacatttcaagaaattaaaaatgaaggaaccattggttgtatctccagatatgggaggtcaagaaagagcaaagaaattcgcaaatcttttgaaaactgattatattgcattaaagaaacatagagatagaaaaaccggtaaagtaaacatactttcagatagggttaatgtgaaaaatagagatttggttttggttgatgatatgattagtacaggaggtagtatcgtaaaagccactcaattcttaaaaaaacaaaagtgtagacgtgtttttgttgcatgtactcacgcattgttagttaatgatgctgcaaaaaagatcaaaaaagcaggagtttcccaaattgtcagcacaaatacaatcccaagcgaatcagcaaaggttgacgtatcaagagttattgctgatgcattaaaatga

SEQ ID NO: 252899 - DNA, 686 bp, Unknown
  Bacterial polypeptide expressing nucleotide sequence isolated from the Sargasso Sea
tccatattcaagacaagataaaaaagcattaccaagagaaccaattactgcaagattaattgcagatatgtatatagcggctggtgtcgatagattagtttcaatagacttacacacacaacaaattcaaggatttgttgatcaaccttttgatcacttgacagctatgccattatttgtagattattttaaagaaaaattcaatggaccaatatcaataatttctccagatgctggtggtgttggaagagctacaactttcgcaaaacatttgggagcttatgtaggtttcgtacacaaaaagagggatccaaaaatccataatgaagtaaagtcatttacagttattggagaagttgaagataggcatgtaattatattggatgacatcatagacactggcggaactattgctgctgcttcaagaatcataaaagaaaaaggagttaagtcggtaaacgtagttgccacacacggtattttctccgatgggtctgttgaagagttaaaggatgcaccgattgataaaataattgtcacagatacattaactcaaaatggaaattcaaaacaaattggtaaagtagaagtcctaagcgtttcaacaataatcgctaatgcactaacatctatatttactgatgattcagtctcagctttgtttatgggtgaaaacgttttatagg

SEQ ID NO: 252900 - DNA, 352 bp, Unknown
  Bacterial polypeptide expressing nucleotide sequence isolated from the Sargasso Sea
acctggtaaatcagaagtaatgaatatagtcggtaatgtaaaaaataaaacatgcgttatagtagacgatataatagattcaggaggcaccattgtaaatgcagcacaagctttgatggataagggagccaaggatgtttatgtttatataactcatgcagttttaagtggatcggctgtcgaaaaaatagaaaaatcaaaaattaaaaaattgatgacgactgatacaattgataattctaaaaaaattaataaaagtaaaaaaatagaaataatttctttagcaccaatgatttcggaagcaatgaaaagaattgcgaactctacgtcagtttctagtctttttaaataa

SEQ ID NO: 252901 - DNA, 817 bp, Unknown
  Bacterial polypeptide expressing nucleotide sequence isolated from the Sargasso Sea
aatgattgagagagctggcaaaaagaaaatgctcttattttcaggttcatcaaactctgaattagccgacaaagttgcaaaagaacttggtactgagcttgctgaagtagataaaactcagtttgctaatggagaaatttatattcgtttacaagaaagtgtgagaggtgctgattgttttgtaatgcaaagtcattcaggccaagtcaactttacaattatggaacagcttttacttgtggatgccttaaaaagagcatctgcaaaaagaattactgctgtgcttccgttttacccatattcaagacaggataaaaaagcattacctagagagccaatatctgctcgattagttgccgacctatttattgcagctggggccgataggattgtttcaattgatttacacacacaacaaattcagggatttattgatcagccatttgatcatttgacagctatgccattgtttgtaaattactttcaagaaaaatttcaagagcctataacaataatttccccagatgcaggaggagtgagaagagcaacaacttttgctaaaaacatggaggcttatgttggttttgtacacaagaagagagatccaaaaatacataacgaagtaaaggcatttactgtcatcggtgaagttgaggatcgacatgcgatattatttgatgacataattgatacaggaggcacaattgctgctgcatcaagagctctaattgagagaggtgcaaaatctgtgagcgtagcagcaactcatggaattttttctgatgaaagtgtcgagaaactaaagacacccctatag

SEQ ID NO: 252902 - DNA, 406 bp, Unknown
  Bacterial polypeptide expressing nucleotide sequence isolated from the Sargasso Sea
ctcttggaaacttcttggagtaggtctagctatagttgataaaagaagaccgaaacctggccaatcaaaagtaatgaatgttataggagatgtgaaaaatcaaacttgtattattgtagatgatataattgattctggtggcacaatagttaatgcagctagggctttaaaagaaagaggggcaaaagaggtttatgtatatattacccatggagtattaagtggagatgctgttaaaaaaattaaaaattcagtgatcaaaaatttagtaattacagatacaatcgataatggtgcaaaaactataaatgtaaaaaatattgaagttttacctatttctggcctcatgggagaggcaataaaaagaatttccaactcaacctcagtttcagatttattcaaataa

SEQ ID NO: 252903 - DNA, 256 bp, Unknown
  Bacterial polypeptide expressing nucleotide sequence isolated from the Sargasso Sea
tatgcagcaaaagcattaaaagataaaggtgcaaaagctgtaaaagcatatattactcatccagttctatctggaccagcaatagaaagattgaataaatctgaaattgatgaattaattgttacaaattcaattcctttgaacaaagacgctaaaaaatgcagtaaaatacgcgtcatttcaattactaacataattgctgagtgtataacacgtctaagtaatgaagagtcattgagtgaaatgtttttataga

SEQ ID NO: 252904 - DNA, 584 bp, Unknown
  Bacterial polypeptide expressing nucleotide sequence isolated from the Sargasso Sea
attgtcaaaatatgtggtagttggaggtaattcttctcaagcattggctaggaaaatagcaaaaaaactcaaagctggctatgtgaatacttcaactcgtacttttcctgatggagaaagcaaaataacaataaagaaaattcctaagaaaaaaattattgttgtagttcaatcaacatttccaccagttgattcaaatcttttacaactactttctattgtatctcaagcaagaaaatactcctcaaaagtttatgcagtgattccatatttgggatatgcaaggcaggatagagaatttttaggtggtgaagtagttactgtctcaatagttgggaagatgttaaaatcagttggtgcaaaaaaagtcattgttgttgacatacacagtaaattagcattaaaacagataggaatttcatcggaaaatattagtgcagtgtctaatttagcaaattacattaaaaggttaaaactaaaagacccacttgtagtatctcctgaccaaggcggaacagaaagagcaaagaaatttgcacatgtattaaaaacagattttattgcgttgaaaaaaaatagggacc

SEQ ID NO: 252905 - DNA, 177 bp, Unknown
  Bacterial polypeptide expressing nucleotide sequence isolated from the Sargasso Sea
tatgaaaataatcgcctgtaatagtagcaaatccctagcagaaaaaatttctaaacatattgatgtgccattagcagatgcctctgttagaacttttaatgatagagaaatatttgtggaaataaatgaaaatattagaggtgaagatgtgtttattattcaatctacatcacatcc

SEQ ID NO: 252906 - DNA, 268 bp, Unknown
  Bacterial polypeptide expressing nucleotide sequence isolated from the Sargasso Sea
cggtctatagtgaatgcagcgaaagcactaaaagaaaagggagcaaaagatgtgtatgtttatattacacatgctgtattaagcggtgaggcagtccaaaaaattgaaaggtctagaatcaagaaattaataacaacagatacaattgacaactcaaaaaaaattggaagaagtaaaaaaatagaaataatttctctagctcctatgatctctgaagctatgaagagaatagctaactcaacctcggtttctagcctttttaaataat

SEQ ID NO: 252907 - DNA, 229 bp, Unknown
  Bacterial polypeptide expressing nucleotide sequence isolated from the Sargasso Sea
aggagcaaatagcgtctcagcctatattactcacggagtactatctggccccgctaccaaaagaatccaaaattctaaactaaatgagttagtaattacagatagtatagcacctacgaaattaatccttgacgcaagtaacatacgtatattaaacctagctccactaattgcggaagctataagaagaattagttcacataattcagtttctagcttatttgattaa

SEQ ID NO: 252908 - DNA, 811 bp, Unknown
  Bacterial polypeptide expressing nucleotide sequence isolated from the Sargasso Sea
atgggatttcgtgtcctaacgggtttgttcgcccatgaaaccaataccttcagccaatggaacacgacccttgagaactaccgggattttgtgctcgcattcggcgacgacgtgccggatgcgatcgctggctccatgctggagcctaatggggtcatccaggtggccgaggaggcggactgggaccttgtgcacacggtagccggctgggcaacgccttcagggccagtagagcgagaggtctgggatgtgggtgctggcgccatctttgaagcggctcagacccaaggcccctttgacggcatcgtgcttgcgctgcacggggccatgacgacggtggaccatgccgacgcggaaggcgtgttgctgcaggaattgcgcgacatcgttggtcccgacataccaatcgccattaccttggacctgcatgccaacgtgacccgcctgatggcgcggcacgccaacatcatctgtgcgttccgcacctatccgcacacggatcaggtggcgactgcagcgcgcgcgtcgaggattctggaccggacgatgaagggcgaggtcgttccccgcgtgcacctggcgcggcgcaacatgctggttgggttggatcacggtcgtacaaccgtcgacaaccccatgactcagctcatggcccgggccgaggctctagaggaaaaagatcccggtgtactgaccgtcagcctgcacgctggtttcacccccgccgatttccccgaggtgggcccgtcggtggcggttaccggcgacggaccggcggccagataccggactatcgccgaggcctatatgc

SEQ ID NO: 252909 - DNA, 208 bp, Unknown
  Bacterial polypeptide expressing nucleotide sequence isolated from the Sargasso Sea
catgaaaattttatctggaactagcaatttaaaacttagtaaaagtattgctaaaaatctaaaattaaaacttattaatactaatattagaagatttgctgatggagagatttatatagaaataaatgaaaatattaggggtaatagtgtatttgtaattcaatctacttctaaccaagcaaacgataatttaatggagttactttta

SEQ ID NO: 252910 - DNA, 784 bp, Unknown
  Bacterial polypeptide expressing nucleotide sequence isolated from the Sargasso Sea
attggtcgttagatcagtgcaaaaattaaatcaatcttatattaaatctttagtaaaaaaagccttggacgaggaccttaaacctagaggggatattacaacaaaactaataaaatttaaaaataaaaaggtcaaagctcaaatcatagcaaaacaaagtggtgttatttcaggtttagatttttgtaaaactgcttttgagctcataggtaaggaaacagtttttgtaggcaaagttaaagatggttcaaaagtaaaaaaaaataaagccattgcagaaataaaagcaaaaactaaaacaatattaattgctgaaagaactgcattaaattttttaaatcacgcatcaggtatatccactctaacaaacttatttgttcaaaaagttaataaaaaaactaaaatttgttgtacgagaaaaactactcctaatttgagactattagaaaaatatgcagtcaaaatagggggaggtcacaaccatagatacaatttaagtgatgaaattttaattaaagataaccacataaacattgaggaaagtttaaaaaacttagtaaaaaaagctattaagaccaaaaaaattgttactgtagagatagaaaatgtaaagcagctaaatcaggtactagggcttaaatttaaaagaattttattcgataatatgagtattaaacaattaagaaaatgtcttaaactttgtaaaaaaaaatatgaaactgaatattctggtaacgctaatttaaaaaatgtaaaaaaaatatctaatacaggagttaaaaga

SEQ ID NO: 252911 - DNA, 463 bp, Unknown
  Bacterial polypeptide expressing nucleotide sequence isolated from the Sargasso Sea
aacaaaaagttaatttgtgtttcaccagatgttggtggtgttgctaggaccagggatttagccaatagaattaaagctgatctagcaattatcgacaaaagaagaccggctccaggaaagtctgaagttatgaatattttaggaaacgtaaaaaataaaacttgtataatagttgatgatataattgacagtgggggaacgatagtaaatgctgtaaatgctctcaaaaaaagtggcgctaatgaggtctatgtttttatttcccacggtgtattaagtggagatgcgtcaaaaaaaatcaaaaactcaaagatcaagaaacttatcgttacggatacgattgataatacaaaaaaaattcataataacaataaaatagaggttttatctatatcttcgctaatgtctgaagcaattaaaaggatagctaactctaactcagtgtctgatctatttaattaat

SEQ ID NO: 252912 - DNA, 385 bp, Unknown
  Bacterial polypeptide expressing nucleotide sequence isolated from the Sargasso Sea
aatgattgaacagcctggtaagaaaaaaatgcttcttttttcaggttcatcaaatgatgaacttgcacagaaagtagcatcaaatctaggaactcagttgtcagacgtagagagaaaagaatttgctaatggggaaatttatttgagaataggtgaaagtgtaagaggtgcagattgttttgttatgcaaagtcattctggagatataaatagaacaatcatggagcagcttttaatgatagatgcactaaaacgtgcatcagcaaaacgcatcactgctgtacttcctttttatccctactcaagacaagataaaaaagcacttccccagagaaccaatatctgcaagattaataagcgatatgtttgttgcagctggagttga

SEQ ID NO: 252913 - DNA, 665 bp, Unknown
  Bacterial polypeptide expressing nucleotide sequence isolated from the Sargasso Sea
aagtattgtttctaaagttcaaaaattttcttcaaaagtttatgcagtcataccttacatgggatatgcaagacaagacagagagtttcttggaggagaaatagttaccatcggagtagtgggaaaattactcagagcagcaggagtaaaaaaagttctaactgtagacatacatagtaagatggcactaaaagaattgaaaatttcttcggaaaatgtttcagcaatggatgttttggtaaaatatttcaaaaaattaaaaatgaaagaaccattgattgtatctccagatatgggaggtcaagaaagagctaagaaattcgcaaatcttttgaaaactgattttattgcattaaaaaaacatcgagatagaaaaacgggtaaagtgaatatactttcagatagggttaatgtgaaaaatagagatttgattttggttgatgatatgattagtacaggcggtagtatcgtaaaagccactcaattcttaaagaaccaaaagtgcagacgtgtttttgttgcatgtactcacgcattgttagttaatgatgctgcaaaaaagatcaagaaagcaggagtttcccaaattgtcagcacaaatacaatcccaggcgaatcagcaaaggttgacgtatcaagagttattgctgatgcattaaaatgaa

SEQ ID NO: 252914 - DNA, 336 bp, Unknown
  Bacterial polypeptide expressing nucleotide sequence isolated from the Sargasso Sea
ttatgaatatcattggtgaagttaaaaataaagattgtgtaatagttgatgacataattgatagtggcggaactattgttaatgctgcagaagctttaattaaaaaaggtgctagagatatttatgttttcatcacccatgctgtattaagtggggaggccataaacaagataaaaaaatctaaaataaaaaaattaataattaccgatagtatagataatgcaaaaagagtaaaaaatattaataaaattcaagtattgtctattgcgccgctaatggcagaagctattaaaaggatatcaaactcaacttcagtatcagatctgtttaattagc

SEQ ID NO: 252915 - DNA, 301 bp, Unknown
  Bacterial polypeptide expressing nucleotide sequence isolated from the Sargasso Sea
ttgtctaattgttgatgacatggctgatacttgcggaactttatgtaatgccgctaaagctttaaaagaaaagggagcaaaaacagtaacagcttatataactcatccggttttatcaggaaacgcaattaaaaaaataaatgaatcaactcttgatcaattagttgtaacagataccataccgctttcaaaagaagcagaggactgtgaaaagataagagttatgactttagcccccacgttagcagaagctattagaagaataaataaggaacaatctataagtgcgatgatgcgctaa

SEQ ID NO: 252916 - DNA, 539 bp, Unknown
  Bacterial polypeptide expressing nucleotide sequence isolated from the Sargasso Sea
aggcttttttgatatgccagtagataatttatataccgccccactatttgcaaaatatattaaaaaaaagttgagtaataaaaaacttatatgcgtttcacctgatgttgggggtgtggcaagaactagagatctagccaatagaataaaagctgatctcgcaattatagataaaagaagaccggctcctggtaaatctgaagttatgaatattttaggagatgttaaaaataagacatgtataattgttgatgatataattgacagtggaggtacgattattaatgctgttaatgctttaattaaaagtggagcaaatgaagtttatgtatttatttctcatggtgtgttgagcggagatgcggcaaaaaaaatcaaaaattcaaagattaagaaacttgtagtaactgacactatagataatagtaaaaaaattaataataatagtaaaattgaggttttatctatatcttcattaatgtcagaagcaattaaaaggattgcaaattcaaattcggtatctgatttatttaattaat

SEQ ID NO: 252917 - DNA, 250 bp, Unknown
  Bacterial polypeptide expressing nucleotide sequence isolated from the Sargasso Sea
aatgaagattctcactggaaatagcaataaacagctaagtaataaaatttcaaaaaatctaaaaaataaattagtaaataccagtattagaaaatttgcagacggtgagatttatattgaaattaacgaaaatataagaggtaacagtattttcataattcaatcagtgtcctcgccagctaatgataatttaatggagttacttctttgtatagatgcacttaaaagatcatctgcaaaaaatataacg

SEQ ID NO: 252918 - DNA, 209 bp, Unknown
  Bacterial polypeptide expressing nucleotide sequence isolated from the Sargasso Sea
aatgaaaattctcacaggaaatagtaataaacttctcagcgaaaaaatatctaaatatcttaaaaataaattagttaattctagtattagaaagttttctgatggtgaaatttatatagaaataaatgaaaatatcagaggtaatagtatatttattatccaatcaatctcatctcctgcgaatgataatttaatggaattattattgt

SEQ ID NO: 252919 - DNA, 235 bp, Unknown
  Bacterial polypeptide expressing nucleotide sequence isolated from the Sargasso Sea
ggcgcggttcaggtcaaggcctgctgtacccatccggtgctctcgggccaggcgattgagcggatcgaggcctctgaactggacgaagtcgttgtgacaaactcgattcccctcagcgatgaggcacgcaagtacagcacgaagatccgacaaatcagtgtcgccagccttttggccgaatcaatccgacgtatcgctaccggcgattccgtcagttcactatttatggaataag

SEQ ID NO: 252920 - DNA, 254 bp, Unknown
  Bacterial polypeptide expressing nucleotide sequence isolated from the Sargasso Sea
taatgcagcagtaactgcaattgataatggagctacttctgttactgctattgctactcatcccgtattatctggagcagcagtgcagagattagaagaatctccaatagacaaagtaatagtgagtgatacaattgcattatctaaagacaaaatatttaaaaaaattgagattatttctatagctcaaatttttgctgaaacaattaaacgaattaattctggtgagtcagtaagctcattatttaaataaa

SEQ ID NO: 252921 - DNA, 388 bp, Unknown
  Bacterial polypeptide expressing nucleotide sequence isolated from the Sargasso Sea
tatgaatattaaatcaccacaaactcttatttctgaagcatcagaacaaatcaaaactatatctgctgatgaagcattaaaattaaataatgaaaataaatgtaatttaatagatttaagagaggaaagcgaattaattaactctggtagtatcgaaaattctactcacataccaaggggattattggaattttccttgaattctaatagtcctttaatacaaaataatgtaattgatattaataaagaaattgttttattttgtgcagctggaggaagatcagctctagcagcaaagacattaaaggatatgggatttaaaaatgtatctcatattgatggtggatttggagctatgaggaacgatggttttaaagttaagaaatga

SEQ ID NO: 252922 - DNA, 763 bp, Unknown
  Bacterial polypeptide expressing nucleotide sequence isolated from the Sargasso Sea
agaaagtaaaataacaattaatcaaattccaaagaaaagcgtagttgtagttattcaatcaacatacccaccagttgattcaaacctcttagaattactaagtattgtttctaaagtgcaaaaattttcttcaaaagtttttgcagttattccttacatgggatatgcaagacaagatagagaatttcttggaggagaaatagtcaccattgaagtagtcggacgattattgaaggcagcaggagtaaaaaaagtcctaacagtagacatacacagtagattagcattaaaaaaattgaaaatttcttcagagaatgtttcagctatggatgtgttggtaaaacattttaagaaattaaaaatgaaggagccgctagttgtatctccagatatgggcggccaagaaagagccgaaaagtttgcaaatcttttgaaaacagattttattgcattaaagaaacatagagatagaaaaactggcaaagtaaacatactttcagataaggttgatgtgaaaaatagagatttgatcttagtagacgatatgattagtactggtggaagtatcgtaaaggctactcaattcttaaagaaacagaaatgtagacgtgtttttgttgcatgtactcatgcattgttggttaatgatgctgcaaaaaagatcaaaaaagcaggagtttctcaaattgtcagtacaaatacgatcccaggtgaatcagcaaaggtagacgtatcaagagttattgctgatgcattaaaatga

SEQ ID NO: 252923 - DNA, 247 bp, Unknown
  Bacterial polypeptide expressing nucleotide sequence isolated from the Sargasso Sea
atgaagcttcttacaggaaacagtaataaaagcctcagtcaaagaatatcaaaacatttaaaaacgaagttggttcactctagtattagaaaattcgctgatggtgaaatctatattgagattaatgaaaatattagaggcaacagtatatttttaattcaatctagttctgctccagccaatgataatttaatggaacttttgttgtgtatagatgcattaaaaagatcctctgcaaaaaatataa

SEQ ID NO: 252924 - DNA, 256 bp, Unknown
  Bacterial polypeptide expressing nucleotide sequence isolated from the Sargasso Sea
atattttttttgttgtcatggattattttcaagaaatgcgttagaaagaatagaacattcttgttttaccaaagtaattgtaacgaatactataccaaataataatattattaataaatctgaattaattgatattatagatgtatcatggttatgttcacaatcagtttatagacatttaaatggaatatctattagtgaattatacgatgaacagatgtttaataagcgacttaaagatatcacattaatataa

SEQ ID NO: 252925 - DNA, 769 bp, Unknown
  Bacterial polypeptide expressing nucleotide sequence isolated from the Sargasso Sea
attggaagccagacgctttccagatacggaaggatattttagagttccagaaaagagtatagaaaaaattcgttcttctcccgtaatcttagtttcaaatacatttccagatagttgtattattgaaaccattttgttattagaagcgataaatgatgtaagggaaggtaaacttgaagatattagaggtaaaggtattgattgtgaacctacaggacctggtatttttttagcaataccatattttggttattctagacaagataaaagatttaatcagggagaagcagtatctgcaagagcgattggaatgttattatcttcaaagtgtgatgggattacagttctagatttacatgcacctgaagttttagaaaatttacctgtacaggtttcttttgcatcatcaatgtccgaaatagcattttatcttcaatctgaaattaatcctgattttattctttcaccagataaaggtgcaatagaaagagcaagttttgttgcagaaactattggatgtaaattttcatatttagaaaaaacaagaattgatgctcatacaattgtccacaaagcaaaagatttggatgttaaaaatgcaattgtaactattgtagatgatatgatttcaacgggtggcactatttgtagagcgagtgaagcgttaagagatcaaggtgcaaaagctgtatatgcggcttgctctcatggattgtttactggcggagcaatttcaaagttagataaattcgttgatggtataattgct

SEQ ID NO: 252926 - DNA, 739 bp, Unknown
  Bacterial polypeptide expressing nucleotide sequence isolated from the Sargasso Sea
ttgtcaaaatatgtggtaattggaggtaattcttcccaagatttgggtagaaaaatagcaaaaaaactgaaagctggctatgtgagtacctcaacacgcacatttcctgacggtgaaagcaaaataacaattaaaaaaattcccaagaaaaaaattatggttgtggtacaatcaacatttcctccagttgattcaaatcttttacatcttctttctattgtatcacaagcaagaaagtattcttcaaaaatttatgcgataattccatatttaggatacgcaagacaggatagggaatttttgaatggagaagttgttacagtttcagtagtaggtaaaatgctaaaatcagtaggtacaaaaaaagtcattgttgttgacatacatagtaagttagctttaaaacaactaggaatttcagcagaaaatgttagtgcagtatctaatttagcaaattatacaaaaaaattaagattaaaagatcctcttgtagtatcacctgatcaaggtggaaaagagagagccagtgagtttgcaagtgaattaaaaactgattttatagcattaaaaaaacatagagaccgaaaaaatggaaaaattaacattctgacatcaaaggtttcagttaaaaatcgagatttaattttagttgatgatatgataagtactgggggaagcataatcaaagcagtacgttttcttaaaaaacaaaaatgtcgacgtatctatgttgcatgta

SEQ ID NO: 252927 - DNA, 400 bp, Unknown
  Bacterial polypeptide expressing nucleotide sequence isolated from the Sargasso Sea
agcgctccaggcgaaatcaactccatgaccattattggggaagtatcaggccaaacttgcattctggttgatgatatttgtgatacagcgggtactttaattaaatcagccgaactacttattgaaaagggtgccaaagaggttcatgcatatattactcacggagttctgtccggagaagcaatagatagaatttcgaactccaaccttagttcaatggttataaccgataccattgaaccaaccgaagttgtatcaaagtgtcctaaaattcgcataatcactgctgcgcctcttttggctcacgcaatgttaaatatatctaacgaaagttctgtttcttcgctatttagcgaagagtctctaaaacctatttatgagggtctttattcaaactgac

SEQ ID NO: 252928 - DNA, 475 bp, Unknown
  Bacterial polypeptide expressing nucleotide sequence isolated from the Sargasso Sea
aaagaaaataaaaagtaaaaaaataatttgtattgttcctgatgtaggtggtacagaaagggctagggcgcttggaaaacttctaaacgttggtttggcaattgttgacaaaagaagaccgaagcctggtcaatctcaagtcatgaatgttattggagatgtcaaagataagacatgtgtgatagttgacgatataattgattctggtggaaccatagtaaatgctgcaaaagcactaaaagctagaggtgcaaaagaggtttatgtatatataacgcatggagttttaagtggtgaagccgtcaaaaaaattaaaagttcagtaatcaaaaatttagtaatcacagatacaatcaataatgttgaaaaaactaaaaatgttaaaaatatcgaagttttaccaatttcaggcctaatgggtgaggctattaaaagaatatctaattcaacatctgtatcagatttattcaaataa

SEQ ID NO: 252929 - DNA, 757 bp, Unknown
  Bacterial polypeptide expressing nucleotide sequence isolated from the Sargasso Sea
atgcttatatatgctgatgatatttcatatgatcaagaaaataatattatagctaaagggagtgcaaaaatactttacaaaaataatatcatttcatcaaaattaattatttattctcaaaaaaatgactctataaccttaccaacagagtttagtttaaaagatgaaggcaataattattattatggatctagtgggtttctggagtctaatttaaaatatggcaatataaataatgtaaaaattttattaaatgatggatctagaattgttggcaaaactgttaaaagagaaaataatatagatataataactaaagctgtctattcaccttgcaaaagtaaaataaaatttggaaattttatatgtcctatttgggaagtagaaggagagaaaattttacatgattatgatgatctttttctttaccaaaaacatgctaaaataaatattttaaacactccagtattttatactccatatttagtcacaccatcaccattaagaaaaaaaagaaaaagtgggtttctaactccttcaataaatttaaatttttttgatacaaaaatatctcaatctacatcttttccgtattattttaatttatcaattgataaagaactaacttttactcctactattaattatggtggcggagttgattcctcacaaagatttaattttgattataatcaaatactttctggtggtgagttaaaaacaaacttaacatttgattcaagttttgaaaatcaaa

SEQ ID NO: 252930 - DNA, 229 bp, Unknown
  Bacterial polypeptide expressing nucleotide sequence isolated from the Sargasso Sea
aatgaagattctcactggaaatagcaataaacagctaagtaataaaatttcaaaaaatctaaaaaataaattagtaaataccagtatcagaaaatttgcagatggtgagatatatattgaaattaatgaaaatataagaggtaacagtatttttataattcaatctatatcttcgccagcaaatgataatttaatggagttgcttctttgtatagatgcactaaaagat

SEQ ID NO: 252931 - DNA, 216 bp, Unknown
  Bacterial polypeptide expressing nucleotide sequence isolated from the Sargasso Sea
aatgaaaataattgcttgcaatagtaataaacaacttgctgaagcgatatcttcctacattggcgtaaaattatcagatgcttcaattagaaagtttgcagatgatgagattttcgttgaaataaatgagcacataagaggtgaagatgtttttattatccaatcaacatcacatccagctaatgaccatcttttagaactcttaatagctataga

SEQ ID NO: 252932 - DNA, 562 bp, Unknown
  Bacterial polypeptide expressing nucleotide sequence isolated from the Sargasso Sea
atgcgaataattagtggaaaacttaaaggaaagaaatttgaattttttaaatctacttcaacacgacctattaaagactctgttaaagaaaatatattcaacattttaaaacattcaaatcaaataaatattaacattgaggaatcaaaagttcttgatctatattctggctttggttcatttggtttagagtgtatctcaagattagcagataaagtaatatttatggagaaagataaaaaagtagtgagtgtaattaaaaaaaatttaaaaaatttaagtattgagaataaagcccaaattattgaaggtgatataaatcttagtctaaaagaatttaaaaaaaataagtttaatatttttttctttgaccctccgtatgcagataacaattatttggcaaatctcgaaataattaaaaataaaaaatatttcagcaaaaatcatattgttgtcattcatagagatagaaaatcgaatgaggatttacaatttttactagatattcttttaatcaaaaattacggtagatctaaaattatatttggtaaatttaattgag

SEQ ID NO: 252933 - DNA, 288 bp, Unknown
  Bacterial polypeptide expressing nucleotide sequence isolated from the Sargasso Sea
aatgaaattactagcaggaaatagcaataaaaatcttagtcaaaaaatatcaaaatatcttaaaactagattagtaaactctaaaattaaaaaattttcagatggtgaaatttatgtagaaataaatgaaaatattagaggtaataatatttttataattcaatctatatcgtcaccagcgaatgataatcttttagaaatgttactttgtatagatgctttaaaaagatcttctgctaaaaatattacagcagtaattccttattttggttatatgcagacagaccg

SEQ ID NO: 252934 - DNA, 334 bp, Unknown
  Bacterial polypeptide expressing nucleotide sequence isolated from the Sargasso Sea
tatgaatatcattggagatgtgaaaaataaaatatgtattatggttgatgacataattgactctggaggaacaattgtaaacgctgcaaaaatgttaaaaagtaaaggtgccaaagaaattcatgtttacattacccatggagtacttagtggagatgcggtcaaaaaaattagaaattctccaataaaaaatttagtaataacagatacaattgataattctaaaaaattaaaaaatgcaaaaaacattgaagtattgagcatatctaatttacttggagaggctttaaaaagaatttcaaattccacatcggtttcggatttgttcaaataa

SEQ ID NO: 252935 - DNA, 226 bp, Unknown
  Bacterial polypeptide expressing nucleotide sequence isolated from the Sargasso Sea
atgaaattattatccggaaatagcaacaaacctttaagcaaaaatattgctaaatatctaaaatctaaattagtcaactctagcattagaaatttttctgacggagaaatctatgtagaaattaatgaaaatattagagggaatagtatttttttaattcaatctatttcatctcctgcaaatgataacctaatggaactgctattatgtattgatgcactcaaaa

SEQ ID NO: 252936 - DNA, 233 bp, Unknown
  Bacterial polypeptide expressing nucleotide sequence isolated from the Sargasso Sea
tatgaaaatactaactggtaatagtaataaaaaacttagtcaaaaaatttcaggttttcttaaaaacaaattaattaactccagcataagaaagttttctgatggtgaaatttatatcgaaataaatgaaaacatcagaggcaatagtatttttttaatccagtcaatttcttcacctgcaaacgataacctgatggaacttttattgtgcattgatgcattgaaaagatcgt

SEQ ID NO: 252937 - DNA, 563 bp, Unknown
  Bacterial polypeptide expressing nucleotide sequence isolated from the Sargasso Sea
aatgagaaataacatatttaaaataacaggattaacaatagcaagcgctttgctttcatatgttttaatcacttactttgatgaattaaacaaagctgatgaatttaatcaattcctatcagacgcagcaacaatttctgaaatacacaattcaaactcagcaaactttaaggaccttctcgacttttcagaagttagcagagaaagatttgaaaataacatcaataatattcgcacaaactctcaagaagcatatcaacttttaaactcaagcaacactagatatacttccaaggaaaaacaattattagaaatagctgttaatagttggttagagggaatagagttattcgaagtttcaataatcacacttattgataatccaaactctatcaatattgaggaatcaatagcgcaaagcatcatcgatctttctattggtgatgaagcgtattctgaatttctatttcttttaagacagaatgcttcaattgatggaacttttttaccaaatttttaccaaattgaatatataggaattgaagataattcatatcaatttg

SEQ ID NO: 252938 - DNA, 595 bp, Unknown
  Bacterial polypeptide expressing nucleotide sequence isolated from the Sargasso Sea
tataaacattgaggaatcaatagcgcaaagtatcatagatctctctattggtgatgaagcgtattctgaatttctatttcttttaagacagaatgcttcaattgatggaacttttttaccaaatttttaccaaattgaatatataggaatcgaagataattcatatcaatttgcagacctacttgttgataaagcaaaaagaagtacaggtggtttattcttacagaaaaatctcgctgttgcaggaactgaatttgttccaatgccaatcgcttttacggaagacaatgtagctgttctccttgacgaaccggctgttcttcaagttgtcatatcaaatgagggaaatattgattcttacgatattgtggtattaattttagtgacagacgagttcggtgaaactgtatatgaatctcagaataaaatcagttcaataggacccaaagaaagtaaaatttttcttaccgaccccattaatatagaaaaaggtatccaacacgaatggtttataaaaattgaagaaattgaagacgaagaagaacttactgacaacttgttatcagtttatggtttcataccaccagaaagctaa

SEQ ID NO: 252939 - DNA, 1111 bp, Unknown
  Bacterial polypeptide expressing nucleotide sequence isolated from the Sargasso Sea
atggaaaaactcgacttatttattgaggaatctctcagtaattattccactagaagaaattatgattatgggccagataatagatccaatacttcatgtttgtctccatatatcactcatggtgttctatctgaaagtgaaattattaagaaagcacttaataaatactcttattcaaaaatagaaaagtttattcaagaagttttatggagaacatattggaaaggatggttagagagaagacctactgtttggacttcttatgtgaatgattttaattctttaattagtaagtataaaaatgatgaaacttataacaaagtaataaactcagaatctagtattgagtgtatgaatgattgggtttcagaacttaaagagacaggctatcttcataaccacacaagaatgatatttgccagcatatggatttttacactaaagctaccctggcaactaggagcagggttgtttctaaaatatttatttgatggtgatcccgcatctaacactttatcttggagatgggtagggggtattcaaacaaaagggaagcattatattgctcagaattggaatatagaaaagtttacaaatggtaaatattcaaatgtagaactaaatgaatctccggaatgtttagttgaagaaattagtcacgaaccaattgaaccagttatgataaatgctgattttaagctttttaaggacttaattatctttgaaaatacactatacccagaactagtagactttattaatgaaaattttaagcaaattactgtaataatgtctgaatcatcagatgattatgatacaatttcagagaatttactaaattttaaagcaaaacttataacaaattttttaagtaaaattaataaagatatatctataaatatcttaaaaattgaacaattacaatattttaaggatacaaatctatgtgctatctatcctcaaattggaaaaaatctcaactatatcaaatcaaaagacctcaattttaattatttatataagaaaatagatattatcagcaataaatactgtaaaaaaggctattttgtctttaaaaagaacataaatacaattttaaaggcattataag

SEQ ID NO: 252940 - DNA, 1156 bp, Unknown
  Bacterial polypeptide expressing nucleotide sequence isolated from the Sargasso Sea
aatgatactaaacatgggcccacagcacccatcaactcatggcgttctaagctttcaagtggagcttgaaggtgaagtagttagaagagtccagcctgtgatcggttatttacatactggaatggaaaaaacaggagaagagctaaattattttcaaggtccgacaaacactacaagaatggattatttatcaccattttttaatgaacttgttttttctttagcaactgaaaaattgcttgatatagaagttcccgaaagggcatcaacaataagaattcttatgacagagctcaatagagtttcttcacaccttgttgctttagctactggaggtatggatattggagctttatcaatgatgatttttggattcagggagcgagaattaattttagatttttttgaaaaaacaactggtctaagaatgaatcataacttcattagacctggtggcgtcgcagcggacctaccagacaattggcaaaaagatgttgagcaaatattaaaaataattcctgaaaaactaaaagattatgatgagatgcttttagataatccaatctggcagggtagattaaaaaatgttggaattttaacaactgaagaatgctttgcttatggaattacaggcccaagtcttagagcaagcggttatgcgtgggacttaagaaaaatgcaaccttattcaggcatagataaatatgaatttgatgttccggtattaaaagaaggggatgtttttgctcgttggagaattaaagtcctcgaaatatttgaaagtcttaaaattgtcgaacaggttatgggagatatgccaaaagggcctttcaaaattcaagataaaaaaattacacctcctcctcgtaaaagattagatgaatcgatggaagcattaattcaccatttcaaaatctatacagaaggatttaaagttccgccaggtcaggtttacacaacagtagaatctccaagaggagaattaggttgttttattgtttctgatggatcaccaaaaccctacagaatgcatgtcagaggtccttcgttttgtaatctccaggctttaccagtagttatgtcggacagcccgatagcagatgctgtagctgcgatagcatctcttgatccagttttaggagatgttgatcgatga

SEQ ID NO: 252941 - DNA, 649 bp, Unknown
  Bacterial polypeptide expressing nucleotide sequence isolated from the Sargasso Sea
ctgccgcccgcgttgcgcgcggacctgctcgcccgcgcggcgctgcgccggctgccggccggccatgcgttgttccggcgcggcgacccgccatgcgggctgtacgcggtactggccggttcactcacgataggtgcggtcgacccgcagggcaaggaagcgctgctgacggtggccgagcccgtcacctggttcggcgaaatcgcgctgttcgacggccagccgcgcacgcacgacgcgatcgcactcgacgacgcgctgctgctgcacgtgccgcaggccgcgctgctcgcgatcctcgacgcgacgccgcaatactggcggcaattcgcgctgctgatggcgcagaagctgcgcctgagcttcctgaccgtcgaatcgatgagcgtgatgccggccgcgcagcggctcgccgcccgcctgctgatgatcgccgacggctacggcggaatcagcgccgggcgcacccgcatccggctgtcgcaggaaaagctcgcggcgatgctgtcgctgacgcggcagaccaccaaccagttgctgaaggcgctgcaggccgacggcgtcgtgcggctgcacgtgggcgaaatcgagctcgtcgacgtcgatgcgctgcggcgggcgagcgggttgcccgacggcatgcgctgag

SEQ ID NO: 252942 - DNA, 877 bp, Unknown
  Bacterial polypeptide expressing nucleotide sequence isolated from the Sargasso Sea
atggcaaagtttacagtagtttcaggaaatgcatcaaccgacttagcaaagagaattgcaagaaaactcaaatcgccgtatatcaaaactgaaaagaaagtttttcctgacggagaaagtaaaataacaattaatcaaatcccaaaaaagagtattatggtagttgttcaatcaacctatccaccagttgattcaaatctattagaattgttgagtattgtttctaagattcagaaattttcttcaaaagtttatgcaatcataccttacatgggatacgcaagacaagatagagaatttcttggaggtgagatagttaccatcggtgttgttggaagactactcaaatctgcaggtgtaaaaaaagtcttaacagtagacatacacagtaaattagcattaaaagaattgaaaatttcttcagagaatgtttcagctatggatgttttagtaaaacatttcaagaaattgaaaatgaaagagccactagttgtatctccagatatgggaggtcaagaaagagctaaaaaatttgcaaatcttttgaaaactgattttgttgcactaaaaaaacatcgagatagaaaaactggcaaagtgaacatactttcagataaggttgatgtaaaaaatagagatttggttttagttgatgatatgattagtactggtggaagtatcgtaaaggctactctgttcttaaagaaacaaaaatgtagacgtgtttttgttgcatgcacacatgcattattggttaatgatgctagaaaaaagatcaaaaaggcaggagtttcccaaattgtcagcacaaatacaatcccgggtgaaacagcaaaagtagacgtatcaagagttattgctgatgcattaaaatgaa

SEQ ID NO: 252943 - DNA, 1293 bp, Unknown
  Bacterial polypeptide expressing nucleotide sequence isolated from the Sargasso Sea
attcggtggtttcgggattcatgtccggcatcggcttcatcatcctgatcctgcaaatcggccccttcatcggtgtaaccacaactggaggagtcgtcggctgtctgacgacgctggctgagttgccattgccgaaccctgcggcgttaagcatcggcgtcatgacccttgccgtggtctttctgacaccggcacggatccgtcaatgggtgccatccccactgttggccctgctgatcgtgactccgttgtcgctgttgctgttcaacgacgaccggttgcagtcgttgggattggaaccgctgaatcgcatcggcaccattcctgagggagggcttcgattcgtgatgccgaacttcagtcaacatctgccggaactgatcaaggccggtctggtgctggcattgcttggagcgatcgactcgttgttgacgtcgctggtggccgacaacatcacccagacaaaccatgactccaaccgagaactgatcggtcagggaatcgcgaacaccatttcagggctgctttcaggccttcccggtgctggagccacgatgagaacagtcatcaacatcaaatcaggaggagcgacgcccctttccggcatgacgcactccctggtgttgttgctggtgcttcttggggcaggaacattcgccgccgagatccctacagcactgctggcaggaattctgatcaaggtggggctcgacatcatcgactggggctttctgctcagggcccatcgcctttcagtcaaaacggctgccctgatgtacgccgtgatgttgatgaccgtcttctgggatctgatctggggggtgttggtgggcatgttcgtcgccaatctgctgacggtggatgccatcacgcagacccagctgcaagggatggacgaagacaaccctcaaaagggggacaagctccagatcgaaaacctcagtgaacaagagcagaggctgatggagagctgtggtgagcaactgatgttgttccgcttgcgaggtccactgagctttggtgccgccaaggggatcagcgctcgcatggggcttgtgagcaactatcaggtgctcatcctcgacatcacggacgtgccacggatgggcgttaccgcagctctggccatcgaacggatggttcaggaagcccaaatgctcggacgcgtggcctttgtcgcgggcgcaaaccaacgtctgaaggaacgcttggaacgctttggcgtcaacgctgtaatgacggacaggctggatgcacttcgacgggccagcgaccacttgtcactaaaatgaa

SEQ ID NO: 252944 - DNA, 376 bp, Unknown
  Bacterial polypeptide expressing nucleotide sequence isolated from the Sargasso Sea
atggcaaaatttacagttgttgggggagatgcatcatctgatttagctaaaagaattgctagaaaaataaaatcaccttatatcaaaactgaaaagaaagtgttcccggacggagaaagtaaaataacaattaatcaaataccaaaaaaaagcatagtagtagttgtacaatcaacgtatccaccagtagactcaaatcttttagaattattgagtattgtttcaaaagtacaaaaattttcatcaaaagtgtatgctgttattccttacatgggatatgcaagacaggatagagagtttctcggaggagaaataattacgataggagttgttggaaaattactcaaagcagcaggtgtcaaaaaaagtcttgacc

SEQ ID NO: 252945 - DNA, 436 bp, Unknown
  Bacterial polypeptide expressing nucleotide sequence isolated from the Sargasso Sea
atgaatgatcagttaaaaatattttctggacgcagtaaccctgctttaagtaaggacattgcgaattatctgggtaaagacctcggaaagttgacgataaagactttttcagacggagagttatggctacagtttgaagaaaatatcagaggttgtgacgtatttattatacagccaacaaatagccctgctgaaaatattatggagttaattttaattattgatgctgcagttagggcttcagccaaaactgtcactgcagttattccttattttggctatggacgtcaggatcgcaaggacaatccccgtgttcctatctcatccagagtgatggtagacctaataactgctacaggagctgaccgaattatcaccatggatttgcactccgcccaaatacaaggattcgcaacaattccattcgatcatcttt

SEQ ID NO: 252946 - DNA, 949 bp, Unknown
  Bacterial polypeptide expressing nucleotide sequence isolated from the Sargasso Sea
atgccagttctgagcggggcctcaggagtagatatcgcatctggacttgcacctattcttggtatggaatatgttgcactagaaagcagaagattccccgatggtgaggcttacgtgaggattcctcccgaatctatagagtcagtgagatcggagagtgtggttcttgtttccaatacgttccccgattctggcattatgcaaactctattcctacttggtgctattagagacgtgaggaggggcgatctttctagtttgaagggagagtgggagggtgaaacacacgatgttgggcctggtattttcctagcgattccttactatggatacgctaggcaggacaagaggttcggtttcggagagtcagtttctgccaagctagtggctgatttgctatcggagctatgtgatgggattgcaattctagatcttcatgcaccagaagtacttggagacatggagaccgacattgagtttgtgagctctatgccagagatagcagagagcctccagagggacgtgtcccctgatttcattctgagtccagacaagggtgcaatctcaagggcaactgaagttgctgagctaattggttgtgacttctcatacctggaaaagaagaggatagacgcgcatacgatagagcatactccgaaggatcttgatgtctcaggcaaggtagtagccatcgtcgatgacatgattagtacgggaggtaccatctgtagggctagtgatgctctcagaagacagggggctgtagaggtccatgctgcctgtactcatggactattcacaggtggagcactatctcgtctagccaatcacgttgatggagtatacactactgattctcttccaaatccaagggctagtgtttctgcggctccggcattggccaggggattgagtagaatgataggcagagcgcctgataacggctgac

SEQ ID NO: 252947 - DNA, 445 bp, Unknown
  Bacterial polypeptide expressing nucleotide sequence isolated from the Sargasso Sea
tgttgctccagatgtgggtggaactgaaagagcaagggctcttggaaaacttttaaatgttggtctagccatagtagataaaagaagacctaaaccaggacaatcacaggttatgaatgtaattggggatgtaaaagataaaacatgtataattgtggatgatatcatcgactcaggtggaacaattgtgaatgcagctaaagctctaaaagatagaggtgcaaaagaggtttatgtttatattactcatggagttcttagtggagaagcggtcaaaaaaattaaaaaatctgttattaaaaatttagtaattacagatacaattgataataacgacaaaataaaaggtactaaaaacattgaggttttatctatttcagggctaatgggtgaagcaataaaaagaatatcaaattccacttctgtatctgatttatttaaataa

SEQ ID NO: 252948 - DNA, 358 bp, Unknown
  Bacterial polypeptide expressing nucleotide sequence isolated from the Sargasso Sea
aatgcttcttttttcaggttcatcaaatgttgaacttgcgcaacaagtagcttcaaatcttggaaccgagttatcagaagtagagagaaaagaatttgcaagcggtgagatttatttgagacttggtgagagtgttagaggtgcagactgttttgttatgcaaagccattctggagatatcaacagaacaattatggaacaacttctcatgatagatgctttaaaacgtgcttcagcaaaacgaatcacagctgtacttcctttctatccttactcaagacaagataaaaaagctctacctagagaaccaatatctgcaagattaatcagcgatatggtacgttgctgcaggtgttaa

SEQ ID NO: 252949 - DNA, 1045 bp, Unknown
  Bacterial polypeptide expressing nucleotide sequence isolated from the Sargasso Sea
ttggggttaaatgaaacccaaaatataattacattgactgctgattcgataaaaaaattcgtttctcagatagatgatgatcaagactctgatggagatcccgatacagcgatctatatactcggcgataacgaaggaagctttcgagatctagtagtcgtttcgcctgatgatgggtggacttatctaaagagcagtctcgcttatgacttttatcaaagtgcagatggagaaacatattttatcacccggaaaggaatgggtgtttatgaggtcccatctggtgcaatcatttcaatctccaatcaaaccttaagagaaaatattgtcaatggtgaagtaggcaccatatctatatccggatctaagaaattatctccagatgatgatgttgccaaatataccctaagcggagcagatgctgataaatttgaaattacagatgaatatatactcagattaaaaccaggcacaaaagcagactttgaggctcaatcaagctatagcctaaccatcacaatcggagatattgctacagaattggttattacagtaactgatgcagaagaaaacaatatttcggggtccactgcagctgaaacattaaatggaacggatgtggatgacatcattgattcaaaaggtggtgaagacgatatagatggcaaggatggcattgatactttattgattcttgatcaaagttctaattatgagattgaaaccctagcgggtataacaaaaattacagctcttgattcggcctctggatcctatttaggtcaaacaataacattgagaaatgtagagaatattgagttctcagacacagtgatttctattgataccacactcaatgatgcaacatatttttatggcaatggaagttcagaaactctaaatggaacagatggagatgatgtattcgatccagatggtggctctgatgaaatagatgggaaagatggtgatgataccgtgctgatctttgatcaaagagataattatgaaatcacgatatcaaatagtgtggtatctattaaag

SEQ ID NO: 252950 - DNA, 417 bp, Unknown
  Bacterial polypeptide expressing nucleotide sequence isolated from the Sargasso Sea
gaacaagagctctagctagaaaattagatgttggaataggaataattgataaaagaagacctgcaccaggaaaatctcaagttatgaatgttataggaaatgtaaaaaacaaaacatgtataataattgatgacattattgactctggtggaacaattgttaatgcagctcaagccttaattaatagaggggcaaaagatgttcatgtttatattactcatggcgttctgagtggagaggcagttgagaaaattagaaaatctaaaattaagaatttggttataacagatacaattgataattcagataagattaaaaaagctaaaaatatagaggtattatcaatttctattttgttaggagaggcaataaaacgtatatcaaattcaacgtccgtatcagatttattcaaataaa

SEQ ID NO: 252951 - DNA, 1351 bp, Unknown
  Bacterial polypeptide expressing nucleotide sequence isolated from the Sargasso Sea
ttcgcggttgcgcgctgcggccgcctcggccgtcagcgcccgtgtgttccgccagtaaaaacagcaacgacgaagggcgcttcaagccccgcctcagggtctccctgtcccactccagcagcagaggacagctatgcaccgtctgcgagccggtggggtcgtcgtcgatcaccacaaccttcatggcaccatcgtgccgtgagccattcccctgccgaccgaagcgccttgatcgagctggtgcgccagtggcatcaggacgccatcccctggatccccagtggcctgggtgagcacctggagtggggacctcgcctggatcccacccatggcgtgctgagctgccgccatctcgatcgtgtgatcgaccatgccgtcgacgacctgaccctttcggtggaggctggaatgcccctcgacaggcttcaggctcttctggccaagcaggggcagtggctgccggttgatctgccccgtgatggcaggcccggcagcattggcggcctggtggcccggggactgtccgggggtctgcgtcaacgccacctgggagtacgggaccagatcatcgggatcggcctgctgcgggccgatggcgtggaagcccgcgctggcggaaaggtggtgaaaaacgtggcgggctatgacctgatgcgactgctctgtggcagctggggcagcctggcgctgatcaccgacgtcaccctgcggctacagccgatccggcctcatcaggcagccctcgctctccatggaaccctgtcggatctggagcgctgccgagccgagctggtgcgctccaccctcacgcccgaacgctgcgactggcagggctgcgtggaggaggggtggcagcttcagatcatggtgagcagcgtgtcggacgctgcagtggatgagcagctgcaacgactggagcagctgggccagaaccatggactgacctctgaacagcaaccctgctcagacccgagggacaacggactgacctgttcagcaccgacctggctggtgcgactggtactgccgccggccaaggtgacgcaactcctgcagagtccggcgatctcttcgttgaagggttggacctgggacattgccgccggtgccgggtgcggcgatggctggtcgagcggacccagcgaaccgttcaaggttgaagccctgcgccgcagcgtggtggaactcggcggaggactgaccgtgctcgtacagccgaaaccgggttccatcccggcctggttggactcgcccgcccgtccggtgatcgaagccgtgaagcgacagttcgatccgcggcagcagctctgccgcggtcgactgccgggggtcaatcaggacacggcgtagc

SEQ ID NO: 252952 - DNA, 979 bp, Unknown
  Bacterial polypeptide expressing nucleotide sequence isolated from the Sargasso Sea
atgattgaacgaactggcaaaaagaaaatgctcatattttcaggttcatcaaatcctgaattagccgataaagttgcaaaagaactaggaactgaacttgctgaagtagataagactcaatttgcaaatggagaaatttatatacgtttacaagaaagtgttagaggtgctgattgttttgtaatgcaaagccattcgggccaggttaactttacaattatggagcagcttttacttgtagatgccttaaaaagagcatctgcaaaaagaattactgcagttcttccgttttacccatattcaagacaggataaaaaagcattacctagagagccaatatctgctcgattagttgccgacctatttattgcagctggagcagatagaatagtctcaattgatttacacacacaacagattcaaggatttgttgatcagccatttgatcatttgacagctatgccattatttgtaaattactttaaagaaaaatttcaagagcctataacaataatttccccagacgctggaggagtgagaagagctacaacttttgctaaaaacatggaggcttatgttggttttgttcacaagaagagggatccaaagatacataacgaagtaaaggcatttactgtcatcggtgaagttgaggatcgacatgcgatattatttgatgacataattgatacaggaggcacgattgctgctgcatcaagagctctaattgagagaggtgcaaaatcagtgagcgtcgcagcaactcatggaattttttctgatgaaagtgtcgagaaacttcaagacacccctatagaagaaatcgtcgtaacagacacacttaaacaaaatgggaatatagaaaaaatcggaaatgtaaacattctctccgtttcatctattattgcaacggcactaacatctatttttgcggatgattctgtctctgcaatttttatgggtgaaaacgttttataag

SEQ ID NO: 252953 - DNA, 331 bp, Unknown
  Bacterial polypeptide expressing nucleotide sequence isolated from the Sargasso Sea
acggtgattggtgatgtcagcggcaagaccgccgtcttagtcgacgacatgatcgacaccggcggcacgatctctcaaggggccaagctgctgcgtcagcaaggggccaagcgagtgatcgcctgcgccacccacgcggtgttctcgcctccagcagtggagcgactctcagagccgggcttgtttgaagaagtggtggtcaccaacagcatcccgattgctccagaagaccgcttcccgcaactgcagatgctctctgtggcgaacatgctgggtgaaaccatttggcgcatccacgaggagagctcggtcagctcgatgtttcggtgag

SEQ ID NO: 252954 - DNA, 541 bp, Unknown
  Bacterial polypeptide expressing nucleotide sequence isolated from the Sargasso Sea
atgcttagaccaagaattattccatgccttttaatagataatgaagatgtagttaaaaccactagatttgaaaatcaaacatatattggcgacccactcaatatagtaagattatttaatgaaaaaaaatccgatgaaatcctaataattgatattactgcatcacttcaaaaaaaaagtccaaattttaaactaattgaaaatatcgcagaagaagccagaatgccagttgcttatggtggaggcataaagacagctgaccaagcattacgaatttttaactctggtatagaaaaaatttctgttagctcattgttttttgagaataaatctgaaattaaaagaattatcaaatcagtgggttctcaaagtttagtacttactttagatataaaattatttgataaccaatattctatttttatcctgaatggaaaaaaatttctaaccaatgatatcaaaggtgttatatcggaggcgcaagacctcggtgttggtgagatcatagtaaacaatatagataaagatggaacaatgaccg

SEQ ID NO: 252955 - DNA, 3181 bp, Unknown
  Bacterial polypeptide expressing nucleotide sequence isolated from the Sargasso Sea
ttgatcaacattattgattatataatggctgcaagaaaaactactgtttttcttatgcttattcttataaccattggaacctttactttcatatcaataccaaaggatgcagaaccagatatagatgttccttttgtttatgtttcagtagttttacctggaatatcacctgaagattcagaaagattaatagttagaccattagaaacagaattaaaaaatattgaaggattaaaagaaatatcaggaatggcatcccaaaattatggatctgttttattagaatttgatattagctttgataaggataaggttttaagtgatgttagggaaaaagttgatctagctaaatcggaatttcctcaagatgctgaggaaccacaagtcttagaatttaatatggctacaatgcctgtaatgaccgtttcgttatcaggcaaagtaccaaataggactttaatttatcatgcaaaagaacttcagaatcaaatagaacgagtacccggtatattagaagcaccaatagtgggagataaagaggaattactagaaatacttgttagtccttctaaacttgagaattatgatgtttcacttgctgatttgataagatcaataactggaaacaatagaatagttgcagctggtacaatcaataaaggacagggaaaattttcagtaaaagtaccagcagtttatgaaagcgcacaagacgtatacaacataggaattataacgcgaggcgaaggtactgttaaacttggcgatatagctgaaatacgaagtacatttaaggaaaatgagacttatgcaagaattgatggcaaaccagctatccacctagatgtaaaaaaaagaattggtgaaaatgtaatcctaataaataaagaaattagaaaagttggtaataaatataagcaagataatctttctaataacatatatatagacttttctgcagatacatctgattacattaatgaaatgcttggatctttatctaatgcaatttcaaatgcaattataagcgttatgcttctagttatagcttcactaggaataagatcggctttaatggttgggatatccattcctacttcttttcttatggcgattacgcttcttgctgtttctggtggatatataaacatgatggttatgtttggattattagtttctgtaggtctacttgttgatggatcaatagtaatggttgaatatgctgataggaaaatggcagagggtctagataggaaggcagcttatacccaggcatataaaagaatgatatggccgattatatcttctactgcaacaacactcgcagcatttctaccattagttttatggcctggtataccagggcaattcatgaaatggatgccgttcatggtaagtctggttttagtgtcttctttgctttctgcattaattttcataccagtaatgggttctttatttggtagaacagaaaataaaaataaaattaaactagatgaagagttcagttttaataatcttaagggaataactcttacatacgcaaaattattagagaaatgtctaaaaagacctatggcagttctattgtctgcagttcttgtggtctttacattgataatactctactcaaatttcaatgctggttcacagtattcagttgatactgactctaatcaaatgctggttcacgttaacgcaagaggaaatttatcccctgaagaaaaattagatctttcgatagatgttgaagaaatagtgatgggtactgatggcgttgatagagttcttacatcgataggctctggagatggatttaatgtttactctgcaatgggtggttcaggaaatagaacagatcaaattgcctcattgatggttgaattgaagccagttcatgaaagaagatcagctgataaaataaaagatgacattttaagtaaatctaaacttttacctgggattattgttgaggcttataaaattgaaaataaacctgatacaggaaaagatattcaaatggaaataacctcaaataataaaaataatcttgaaaaagtaacaaaactcatcacagcaaaattagaaaatatggatggtatccaggaagttgataacaccatgcctttacccggtattgaatggataattaatgttgatagagaacttgctggacgttttggagcggatatatcaactattggagcaattgttcaattggtaacaaatggaattctggttgacaagtataggccagataattctgacgatgaggttgatattcgagttcgatttcctgaagaatacaggatgatagaggaatttgatcaattaagaattccaacaagtgaaggtgctgtcccattatcaaattttgtaacaagaacgccaaattctaaggtatcaacaatcgaaagacttgatggtttaagaatttttaaaataagagcaaatacatctatcgacccttcaacaggtaaaaagtatcttgcagttgataaaagtaatgaattaaaaaaatggatttctcaagaaagccttccaaaaaatgtatttatcaaatttgctggttcagatgaagaaagagaggaatctgctgcattcctgggaaatgctatgataggagccctttttctaatgttcataattttattaactcaatttaatagtttttatcaagcagctataacattatcgactgtaatattatctacaattggtgctttaactggccttatgattgttggtcaatatttttcagtaattatgactggcttaggaattgtttcattggcaggaataattgttaataactcaatagtcttaattgatacatataatagactcagagttcagcatgaagacccaattgagacaattttgcattcttctgttcaacgatttagacctattgtcttaacgactgctaccacaatgattgctcttataccggttgctttacaggttacaattggttggtttgatagaagtattgaatttggcggattaatggctgcatggtgggttccattttctaccgctgtaatttggggattaggattttcaagtgtattaactctttttcttgtacctacactcttaagtatgccaatatattttgagagaaataaacataaaattttaaagttttttactaataaaattcaaccggcagagtaaa

SEQ ID NO: 252956 - DNA, 1399 bp, Unknown
  Bacterial polypeptide expressing nucleotide sequence isolated from the Sargasso Sea
gcgtttatggtatttcacaggtgattcagctttcggtgataacggtgatgataccttctactatgatagcaacgattttgctcttatatcaggtggtgctggcagagacaggctcgatatatcctcacaattagaagataaccctatatttgatcttgcttcaattcaaggcgaaatagaagctgttgaggaagtctatttggggttaaatgaaacccaaaatataatcaaagtaactgttgattcgataaaaaactttgtttctcagatcgatgatgatcaagactctgatggagatccagatacagcgatctatatacttggtgataatgaaggaagctttcgagatctagtggttgtttcacctgatgaggggtggacttatctaaaaagcagtctggcttatgacttttatcaaagtgcagatggagaaacatattttatcactcgaataggaatgggggtatatgaggtctcttctgatgcaggtattataatctctaatcagaccttaagagaaaatattgtcaatggtgaagtaggtaccatctctttatctggaactaagaaattatctccagatgatgatgttatcaaatttaccctaagtggagcagatgctgataaatttgaaatcacagatgaatatatactcagattaaaaccaggaacaaaagcagatttcgagaatcaatcaagctatagcctaaccatcacaatcggagacgtcacttcagaattggttattacagtaactgatgcagaagaaaataatatttcgggatccactgcagctgaaacattaaatggaacggatgtggatgacatcattgattcaaaaggtggtgaagatgatatagatggtaaggatggcattgatactttattgatacttgatcaaagttctaattatgagattgaaacccttgcgggtataacaaaaattaaagctcttgattcagcctctggaccttatttaggtcaaacaataacagtgagaaatgtagaaaatattgagttctcagacacaatgatttctattgatgcaacgctgaatgatgcaacatatttttatggcaatggcagttcagaaacactaaatggaacagatggagatgatgtgttcgatccagatggtggctcagatgaaattgatggtaaagatggtgttgataccgtgctgatctttgatcaaagggataattatgagatcactatatcggataacgtggtatcaatcatagctctggattcggccactggtgactatgcaggtaacacaattaaattgacgaatatcgagacaattatattctctgatcaaacagtacaggtctctgatcttacaagcaaaaattccaccagtaggttggttgatggtgaagacaatcaagaataa

SEQ ID NO: 252957 - DNA, 555 bp, Unknown
  Bacterial polypeptide expressing nucleotide sequence isolated from the Sargasso Sea
cacgctggccaatacaaggtttttttgatattccagttgataaccttttcgcaactcctatttttgcaagacatgtaaaaaaaaatctaaataaaaaaaatttaatttgtgtggctccggatgttggtggtgttgaaagaacaagagcgctagcaagaaaattggacattggtatagcgattattgataagagaagacctgcacctggaaaatctcaagtgatgaatgttattggaaatgtaaatggaaaaacttgtataattatagatgatataattgactcaggtggaactatagttaatgcagcccaagcattaataaacagaggagctaaagaagttcatgtttatattacccatggagttttaagtggagaagcagtaaacaaaataaaaaattctaaaataaaaaatttagttatcaccgatacaattgacaactctgacaagataaaaaaggctaagaatattgaggtattgacaatatctaatttactagcagaagctattaaaagaatttctaactcaacctcagtttcagatttatttaaataat

SEQ ID NO: 252958 - DNA, 463 bp, Unknown
  Bacterial polypeptide expressing nucleotide sequence isolated from the Sargasso Sea
aagtaaaaacctaatttgtgttgctccagaagtgggtggaactgagcgagcaagaacgctaggtaaactcttgaaggttggattagcgattgtagacaaaagaagaccaaaaccaggtcaatctcaagtcatgaatgtcataggagatgtaaaaggtaaaacttgtataattgtagatgatataattgattctggtggaacaatagtaaatgcagccaaagctcttaaagataggggcgctaaagaagtttatgtttatataactcatggtgtgctcagcggtgaagctgtaaaaaaaattaaaaattctgtaattaagaatttagtaataactgatacaatcgataacataagcagaactaaaggtgctaaaaacattgaggttctgtcaatttcagggcttatgggagaagcaattaaaagaatatccaattcaacctcggtatcagatttattcaaataa

SEQ ID NO: 252959 - DNA, 498 bp, Unknown
  Bacterial polypeptide expressing nucleotide sequence isolated from the Sargasso Sea
aaaaacactttcataacttatcaggcaagaacagcaactgtacagttttaattcctgatatgggatcaagtaaattaggccaatcttatgcgaaaagacttgaaatgagttttgctcttgtagataaaagaagaaacgcacacaatcaatcagaggtagtttcagttgttggtgagttaaaaaatcaacatatattaattatagacgatatgattgatactgctggtacaatttctaatgctgctaaaatagctaaagaaaaaggagctttatcagttactgttgctgcaacacatggaatattctcttctaatgcacttgataagctttctgatgatattgtagacacaatttttataacggacactatagacatgtcaaataaaaaagattgcaaaaaattaaaaaagatttcatctgcaaaaatttttgcagaaacaattaacaggattcacaacggtgagtcagtaagtcaactatttaggaaagtaacatgag

SEQ ID NO: 252960 - DNA, 727 bp, Unknown
  Bacterial polypeptide expressing nucleotide sequence isolated from the Sargasso Sea
tatgaatgatcagttaaaaatattttcaggacgtagtaaccctgctttaagcaaggatattgcaaattatttaggcaaggaccttggaaagttaacgataaagactttttcagatggagagctatggctccaatttgaagacaatatcagaggatgtgatgtatttattatacaacccacaaacagcccagctgaaaatattatggaattaattctaattatcgatgctgcagttagggcttcagctaaaactgttactgcagttatcccttattttggctatggacgacaggatcgcaaggacaatccgcgtgttcctatttcctctagagtgatggtagacttaataaccgctacaggagctgatagaattattactatggatttgcattccacccaaatacaagggtttgcaacaattccatttgaccatttatatagcagaatggtactgctagatgcaattaaatctttaaattttgatcaagaaaactctgcagttttgtcccctgatgtaggttcggctagaatgagtcagtcttatgcaaaaaaacttggaatgcattttgctcttattgataaaagaagatatgcgccaaataaagcacaagtaatgcatctgattggagatttgaaaaataaagatgtgctaataattgatgatatgattgacactgctggaacaactgtaaatgcagctaattcagcaatagaaaatggcgctaaa

SEQ ID NO: 252961 - DNA, 745 bp, Unknown
  Bacterial polypeptide expressing nucleotide sequence isolated from the Sargasso Sea
atgaaactgtttacaggaagatcaaaccctggtctagcatcaggaattgctgaatatctgaatattccattagggaaaatagatattcaaacatttagcgatggcgaactattagtagcttttgaagaaaacattcgaaatgaagatgtatttattgttcaatctactaatccgccagctgaaaatatactggaacttctattgatgttagatgcagcaagaagggcatcagcatcaaatgtagttgctgttattccatattttggatatggaaggcaagatcgaaaggacagacctagggttccaatctcagcaagattaatgctagatatgataacagcggttggagtaagtaggataattacaatggatttacattctccacaaattcaagggtttgtcaatgttccatttgatcatctttattcaagaatggttttattgaacaaattaaaagagttgaatttaagtgagagctctggcgttgtacttgcacctgatgttggttctgcaaaaatgagccaatcttatgcaaaaaaattaaatataggctttgcacttattgataaaagaaggccgaagccaaatcaagcagaggttgccaatttaattggtgatttgaagaataaagatgttattattattgatgatatgattgatacagcaggaacactatgtaatgcagctgatacagcgataaatgaaggtgcaaaatcggtaatcgccgttgcaacccatcctgttt

SEQ ID NO: 252962 - DNA, 302 bp, Unknown
  Bacterial polypeptide expressing nucleotide sequence isolated from the Sargasso Sea
ttgtattgttccagatgatcttattgatactgctggaacattatgtaacgcagcagatgcattaaaagaaaaaggcgctaaggctgttaaggcatatataacccatccagtgctgtcaggccctgctattgaaagactaaacaattcatcaattgatgaattagtagtaactaattcaattcctttgaacaaagaagctcaaaaatgcagtaaaatacgcgtcatttcactagcatcaacaatagctgagtgtataaaacgattaagtaatgaagaatcgctaagtgaaatgtttttataga

SEQ ID NO: 252963 - DNA, 228 bp, Unknown
  Bacterial polypeptide expressing nucleotide sequence isolated from the Sargasso Sea
tttgaagacaaaactagtgcattctagtattacgaaatttgctgatggtgaaatttacattgaaataaatgaaaatatcagaggcaatagtatattcttaattcaatcttcatcaacaccagctaatgataatttaatggaacttttgctatgtgttgatgcattaaaaagatcttctgcaaaaaacatcacagctgtaatcccctactttggatatgctagacaaga

SEQ ID NO: 252964 - DNA, 806 bp, Unknown
  Bacterial polypeptide expressing nucleotide sequence isolated from the Sargasso Sea
aaatgtaagaggtacagatgtcttcataatacagccgaccaacagtccagcagaaaatataatggaattagtattaattatagatgctgctgtaagggcctctgctagaaatgttacagcagtagtgccatactttggatatggcaggcaagacaggaaagatagaccaagagtaccagtttcatccaaggtcatggttgatttatttactactactggggctgctagaattataacaatggatttgcactctactcagattcaagggtttgctacgatcccatttgatcacatttacagcagattagttctcttagatgctattaaatcattaaaccttgattcggataattctgttgttttatcaccggatgttggttctgcaagaataagtcaatcatatgcaaaaaaacttggaatgcactttgcattaattgataaaagaagatatgcaccaaataaagctgaggtgatgcatttaattggcgatttagataaaaaagatgtcttaataatcgatgatatgattgatactgcgggaacgactgtaaatgctgctgaagcggctatcaaaaatggagctagaagtgttactgcagtagctacacatgcattgctatcgggaaatgcatgtgaaaaaattgaaaattctgttatcaacaagttaattgttacagatacagtagatattcctgataaaaagaaaattgctaaaatagaggttgtaactgtggcaaatgtattcgctgaagcaattgaaagagtttacaaagggaaatctgttagtgaattatttgaattttaat

SEQ ID NO: 252965 - DNA, 565 bp, Unknown
  Bacterial polypeptide expressing nucleotide sequence isolated from the Sargasso Sea
tagatttacaccttctggtcaaattcaaggtttttttgatatacctgtagataatttatttgcaacaccaatatttgctcgacatattaaaagaaaaattaaaacaaaaaacatgatatgtgttgcacctgatgtaggtggaacagcaagagcaagagcattgggtaaaatgttaaatgtcggattggctatagtagataaaagaagacctgcgccaggtaagtctgttgtcatgaatataattggaaatgtaaaaggtaaaacatgtataattgttgatgatataatagactcaggtggaactattgttaatgctgcaaaaatattaaaacaacgaggtgcaagagacgttcatgtatatgtctctcatggagttttgagcggtgacgcagttgaaaaaatcaggaagtcacaaattaaaaatttggtaattactgatacaatagacaattcacaaaaagtcaaaaaagctaaaaatatagagatattgacaatatctaatttagttggtgaggctataaaaagaatatctaattcaacatctgtatctgacttatttaattaa

SEQ ID NO: 252966 - DNA, 238 bp, Unknown
  Bacterial polypeptide expressing nucleotide sequence isolated from the Sargasso Sea
ctgtaatagtagcaaatccctagcagaaaaaatttctaaacatattgatgtgccattagcagatgcctctgttaggccctttaatgatagggaaatatttgtagaaataaatgaaaatattagaggtgaagatgtttttattattcaatctacatcacatccagcaaatgaccatttaatggaactgttaattacaattgatgctgcaagaagaggttcggcaaaaaggattactggt

SEQ ID NO: 252967 - DNA, 337 bp, Unknown
  Bacterial polypeptide expressing nucleotide sequence isolated from the Sargasso Sea
tatgcaaagaaacaaactgaaaatatttagtgggcgtagtaatcccaggcttgcagagagtatcgctaagtcgctagatagacatttaggagaaatatccataagaactttctctgatggtgagatttgggttaagtatgaagaaaacatcagggggtgtgatgtttttattattcaatcaactaacgggccatcagaaaatataatggaacttgcacttctcgttgatgctgctgttagagcctcagcagataccgtgacggtagtaatcccttattttggttatgggcgacaagacaggaaagatcagcctagagttccaatatcttcaagagtg

SEQ ID NO: 252968 - DNA, 413 bp, Unknown
  Bacterial polypeptide expressing nucleotide sequence isolated from the Sargasso Sea
aatggcacgtagagtaaaaattctttcttgttcttcctcaagggttttagcagaaaaaattgcaaaatcttttggtcaacctttagctaaatgtgagttacaacagtttagtgatggtgaatttcaggtgtctgtaaatgaaactgtaagagggtgtgatgtctttattgtacaaagcacaataccaccagctaataatttaatggaattattgctaatgattgatgctgtaaaaagagcttcagcaagaagaattattgctgttgttccttattttggttgggctagacaggatagaaaagatcaacctagagttgctattggagcaaaattagtagctaaccttttagagacagcgggaattgatagagtgatgactatggacttgcatgccgatcaaattcaaggatttt

SEQ ID NO: 252969 - DNA, 431 bp, Unknown
  Bacterial polypeptide expressing nucleotide sequence isolated from the Sargasso Sea
ggggggtgttgctagaactagagctttggccacaagattaaaagcagatcttgcaattattgataaaagaagaccagcgccaggtaagtctgaagtaatgaatatcattggagacgtaaaaaataaaacttgtattatagtcgatgatataattgatagtggaggaacaataataaatgctgtggacgctttaaaaaaaaaaggtgctaaagaagtttatgtatttattactcatgcagttttaagtggtgaagcggccaaaaaaattaaaaattcaaaagtaaagagattaattatcaccgactccatagataattctgataagattaaaaataacaataaaattgaggtcttatctatctcatctttgatgtcagaagctataaaaagaatagcaaattctaattcggtatctgatttatttaattaac

SEQ ID NO: 252970 - DNA, 439 bp, Unknown
  Bacterial polypeptide expressing nucleotide sequence isolated from the Sargasso Sea
attgccaggaagatttggtgaaataaaagttttttcaggtacatcacaccaacaactttcacttgatgtttgtaccaatcttggtattgaactatcaaaagcagaagtatttaaatttgaaaacgataatacttttgtaaggataatgaacaacatcagagaacaagatgtgtttatcatccagccaacagataagcccgctaacgacaatataatggaactgctgctgtgtttagatgctgcaaagagagcttctgctggcagactaactgcagttattccctattttggttatggcagaaccgataagaaggatcagccaagagtgccaatttctgcaagattaattgccgacattataactactgctggagctgacagaatccttacaatagatttgcatgctcctcaaatccaaggtttttttaatatacctgtt

SEQ ID NO: 252971 - DNA, 497 bp, Unknown
  Bacterial polypeptide expressing nucleotide sequence isolated from the Sargasso Sea
tatgggtaaatacgttaaaaaaatatttgcgggatcaagtaatcccagacttgcaactaaaattgcagaagagtgtggtgtttctcttggtaaggtatctattaaacgctttagtgatggagaaatttgggtgaaatttgaggagaacctaagaggtaatgacgtttatcttattcagtctaccaatgctccagcagataatattgtggaattagcattacttattgatgctgcaaaaagagctagtgctcaaagaattaatgtgattataccctattttggatattctagacaagatcgtaaagatgagccaagggttccaatttctgctaaagtcatgatggacattttcataaaagcaggagctaatagggtggtgactatggaccttcattcaactcaaattcaaggtttttcatcaaaaccagtcgataatatttatggaagccttgttttaatgcctgaattagaaaaacatttcaaagacttatcgtcaa

SEQ ID NO: 252972 - DNA, 731 bp, Unknown
  Bacterial polypeptide expressing nucleotide sequence isolated from the Sargasso Sea
gatggttgatgctgcagttagggcatctgcagatactgtaacagttttaattccatactttggttatggtaggcaagatcgaaaagatcagccccgtgttccaatctcatctcgtgtgatgattgatattttaacagccatgggtgcaaataggattattactcttgatcttcattcaactcaaatacagggttttgctaaaataccttttgacaacttatacagtaggtcagtcctatttgaggctattcaagatgaaaaattttctacagatgctacagctgttttggcgcctgatgtaggctctgttaaaatgagtcagggttatgcaaaaaacttaggcatgcattttgccctaatagataaacgccgctttgctccaaatcaagcagaggttaatcatcttataggagatttaaaagggatggatgttttaattattgatgatatgattgatacagctggaacaacggttaacgctgctgaagccgcaatggatgaaggtgcgcggtcagttactgtagtggctacacatggtgttttatctgggtctgcaattgaaagattaaataaatcaactataaaaaaaattattgttacagacactatagcaattcctaaagaaaaacagattaataaaatgaaaatagtaacggtagcaaatatttttggtcaggcagttaaccgagttcataatggtgagtcggttagtgctttgtttgaattttaat

SEQ ID NO: 252973 - DNA, 289 bp, Unknown
  Bacterial polypeptide expressing nucleotide sequence isolated from the Sargasso Sea
aatgaatgctgataatttaaaaattttttctggcaggagtagtaagcgacttgctgcgaaaatagctaacaatctaaatgttagtcttggggatatttctatcaagactttttcggatggagagttatgggtgaaatatgaagaaaatatacgaggaagcgatgtttttatcatacaatcaacaaatggaccatctgagaacattatagaattagctcttatgatagatgctgctgttagggcatctgcagataccgttacggttattatgccatattttggctatgga

SEQ ID NO: 252974 - DNA, 358 bp, Unknown
  Bacterial polypeptide expressing nucleotide sequence isolated from the Sargasso Sea
ctgaccggtttctcgggcagggtggtgggtttcacctcggtcgttcccaaccccgaggtcgcgtcgatccagttgacccgggacctgcaggagcacgcggagcgtttcgcgggcggcggacaggcggtgaccttcgccgggatggagggctacatcaacgcgcgcatctgcgtggacgcgctgcggcgcgcctccgcggcgggcatggtcgacgcgcgcggcgtactcgccgccatgaacaccatgggcagcgtcgatctcgggggcttcaccgcgaatttctcggcctcgccctccgccgcctccgaccgggtcgatatcgtcgtgcggtcgcgcagcgggcacctgttgaagtgac

SEQ ID NO: 252975 - DNA, 532 bp, Unknown
  Bacterial polypeptide expressing nucleotide sequence isolated from the Sargasso Sea
ttgatattccagttgataaccttttttgctactccaatttttgcaagacatgtaaaaaaaaatataaaaggaaaaaatttaatttgtgtttcacctgacgttggtggagttgagaggacaaaagctttagctagaaaattagatataggaatagctataattgacaaaagaagaccagcaccaggaaaatctcaagttatgaatgttataggaaatgttaataacaaaacttgtattatagttgatgatattattgactctggtggaacaattgtaaatgcggctcaagctctaattaataggggtgcgaaagaagttcatgtatatataactcatggagttttaagtggagaggcagttgaaaaaattagaaaatctaaaattaagaaattagttataacagacacaattgataatttagataagataaaaaaagccaaaaatatagaggtattatcaatttgtaatttattaggggaagcaataaaacgtatatcaaattctacgtctgtttcagacttattcaaataaa

SEQ ID NO: 252976 - DNA, 676 bp, Unknown
  Bacterial polypeptide expressing nucleotide sequence isolated from the Sargasso Sea
tattttggctatggaaggcaagacagaaaagatcagccaagggttccaatttcttctagggtaattgtagatattcttaccgttatgggaacggataggattattactttagatcttcattctactcaaatacaaggttttgcaaaaatcccttttgataatttatacagtaggtcggttattttaaatgcaatccatgatgaaggatttaaccctaattcttcagtcgttcttgcaccagacataggctcagccaaaatgagtcaaggctacgctaaaaatttgggcatgcactttgcattaattgataaaagaagatttgctccaaatcaagttgaaataaatcatttaatcggcgatttgaagaatatggatgttttgattattgatgacatgattgacactgcaggtacattagttaatgcagccaatgcagcacttgaaaaaggtgcaaaatctgttacagctattgctactcatggtgttttatcagatccagcaatcgatcgtatcaaaaaatcagatattaataaaataattattacagatacaatttctatcgcaaaacataaattaattgataaattaaaaattatgtcagtctctggcatttttggtcaagcaattgatagggttcataatggtgaatctgttagtgctttatttgaatattaga

SEQ ID NO: 252977 - DNA, 220 bp, Unknown
  Bacterial polypeptide expressing nucleotide sequence isolated from the Sargasso Sea
tcagtctatgcttatattactcatggagttttatcttatcccgcaatcgaaaggattcaaagatcgccgattgataaaatgataattactgatagcattatagctagagatgatgtaaaaaagtgtaaaaaaattatacagttgtcgatagcacatttaattggtgaagcaataggaaggattactgataatagatcagtttcaagtctttttgcataat

SEQ ID NO: 252978 - DNA, 778 bp, Unknown
  Bacterial polypeptide expressing nucleotide sequence isolated from the Sargasso Sea
cgatatcaataaaacaattatggaacaactagttttagtcgatgctcttaaaagagcttctgcaaaaagaataactgcagttctacctttttatccatattcaagacaagacaaaaaggcattaccaagagaaccaatcactgcaagattagttgctgatatgtatatagctgctggtgtagatagattagtttctattgatttacatactcaacaaatacaaggatttgttgatcaaccattcgaccatctaacagcgatgccattatttgttgagtattttaaagaaaagtttgatggcccaatttcagtaatttctcctgacgctggtggagttggaagagccacaacttttgcaaaacatttagaagcttatgtaggtttcgtacacaaaaagagagatccaaagattcacaatgaagtaaagtcatttactgtgatcggcgaagttgaggataggcatgtaattattttggatgacatcattgacactggaggcactattgcagctgcgtcaagaattatcaaagaaaaaggcgtaaagtcagtaaacgtagttgccacacatggtattttctctgatggatctgttgaacagttaaaggatgcaccgattgatagaataatagttacagatactttaactcaaaatggaaattcaaaagaaattggtaaagttgaggttctcagcgtttcaacaataattgctaatgcactaacatcaatatttactgatgattcagtatcagctttgtttatgggtgaaaacgttttatag

SEQ ID NO: 252979 - DNA, 109 bp, Unknown
  Bacterial polypeptide expressing nucleotide sequence isolated from the Sargasso Sea
gatgaagcaaattggaaaagtaaaacagcttactttatctgaaatgcttgcagaaactattcgtcgtatcagcaacgaagagtctatttcagcaatgtttgaatactaa

SEQ ID NO: 252980 - DNA, 278 bp, Unknown
  Bacterial polypeptide expressing nucleotide sequence isolated from the Sargasso Sea
tagaggtcacgatacctttataattcagtctacctgctttccagctgataaacatctcatggaattgatgttactagctgatgccctaaagcgatcttctgcttctaagatcactgcggttgttccatattatggctatgctagacaagaccgaagagtgaggtcttcaagagtcccaattagtgcaaaagttgtatctgatatgtttagttctgttggtattaatagagttctaacactagatcttcattctgaaacaatccaaggtttttttgaga

SEQ ID NO: 252981 - DNA, 559 bp, Unknown
  Bacterial polypeptide expressing nucleotide sequence isolated from the Sargasso Sea
tttgcatgcaggccaaattcaaggattttttgatattccggtagacaacttattttctacacccatttttgcaagacatgtaaaaaaaaatattaaaagtaaaaatatcgtatgtattgcacctgatgttggaggtactgaaagagcaagagcacttggaaagattttgaatgttggtcttgcaatcgttgataaaagaagaccaaaacctggtcaatcccaagtgatgaatgtaatcggagaagtaaaagataaaacttgtgtaatagtggacgacatcattgactctggtggaactatagtcaatgcggctaaagcattaaaggatcggggtgcaaaagaagtttacgtttatatcacccacggtgttttaacaggtgaggctgtaaaaaaaattaaaaattcggtaattaaaaaattagtaatcacagatacaattgacaataaagacaaaacgaagagtgcaaaaaacatagaagttctatctatttcagccttgatgggagaagctattaaaagaatatcaaactcaacctccgtttccgatttatttaaataa

SEQ ID NO: 252982 - DNA, 645 bp, Unknown
  Bacterial polypeptide expressing nucleotide sequence isolated from the Sargasso Sea
aagttgttccaagaacatctatttcagcaaaacttgtctcaaatttaataacaaaagctggtgcagatagagttgtgacagtagatttgcatgcaggccaaattcaaggattttttgatattccagtagacaatttattttctacacccatttttgcaagacatgtaaaaaaaaatattaaaagtaaaaatattgtatgtgttgcacctgatgttggtggtactgaacgagcaagagcgcttggaaagattttgaatattggtcttgcaattgttgataaaagaagaccaaaacctggtcaatcgcaagtgatgaatgtaatcggagaagtaaaagataaaacttgtgtaatagtggatgatatcattgactcaggtggaactatagtcaatgcggctaaggcattaaaggatcggggtgcaaaagaagtttatgtttatatcacccacggtgttttaactggagaagctgtaaaaaaaattaaaaattcagtaattaaaaaattagtaatcaccgatacaattgataataaaaacaaaacgaagagtgcaaaaaacattgaagttctatctatttcagccttaatgggagaagctattaaaagaatatcaaactcaacctccgtttctgatttatttaaataat

SEQ ID NO: 252983 - DNA, 724 bp, Unknown
  Bacterial polypeptide expressing nucleotide sequence isolated from the Sargasso Sea
tctattcgtgttatattacctattttcccttatcaaagacaagaccgtaaagactatattagagcaccaattagttccaagatggttgcttcttttcttgaaacacaaggagttgaccgtgtaattacatttgaccttcacgctggacaaatacaaggattttttgataaaacgcgcctagataatatttatacagaaccttattttattcattatataaaaaatgaaatattaacacaagtaaaagcagacgatttaattatagtttcacctgatgaaggaggggttaaaacggcaacacgaattgcagataaattaggttgtggagcggctattctatataaagagcgtcttcaagcaggagtagttaataaaatgatattaatggggaatgttcaaggtaaagtatgttttataatggatgatattattgatactgcaggaacagcatgtaaggcagcacaagttctccacgaaaatggtgcagaccaaatatatatgggtgcttgtcatggtattttatcagatcctgctacaacacgtatttataattcaccctttaaaaaagtaatcgtaagtaatacagttgaaattgctaatcgatttactgaaaacttttctcaactagataagattgaagttattgatgttagtaaaatttgtgcagctgctattgaacgtagtctagttggtcaaagtcttagtgaattaatggttttataat

SEQ ID NO: 252984 - DNA, 229 bp, Unknown
  Bacterial polypeptide expressing nucleotide sequence isolated from the Sargasso Sea
tatgaaagttcttgcaggtactagtaatttaaaactgtgcagacagatcgcaagacaacttaaactaaaattagttaattcacatataaaaagatttgccgatggcgaagtttatattgaaattaatgaaaatattagaggcaatagtatattcgttgtccaatcaacttcgaatcctgcaaatgataacttgatggaattattaatttgtatagatgcattaagaaga

SEQ ID NO: 252985 - DNA, 202 bp, Unknown
  Bacterial polypeptide expressing nucleotide sequence isolated from the Sargasso Sea
aactcatcctgttttatcaggtccggctattgaaagaataagtaattctgagattgatgaacttgttgtaactaattcgattcctcttaccaaagatggtcaaaaatgcagtaaaatacgcgtcatatcaatcgcatcattaatatcagagtgtattaagaggctttctaatgaagaatccttgagtgcggtttttttataa

SEQ ID NO: 252986 - DNA, 853 bp, Unknown
  Bacterial polypeptide expressing nucleotide sequence isolated from the Sargasso Sea
atgaatgaacaattaaaaatattttcaggacgtagcaatataaagcttagtaaggaaattgctagttatctaggtaaagaccttggtgaattgacaattaaaaccttttctgatggtgagctttggcttcaattcgaagagaacattaggggttgtgatgttttcatcattcaaccaaccaatagcccttcggaaaatataatggagctcattttaatcattgatgctgccgtcagagcttcagctaaaactgttacagcagtcattccatattttggatatggtagacaggatagaaaagataaccctcgtgtccctatttcctctcgagtcatggtagacctttttacggctacaggagctgacaggataattacaatggatttacattcaacgcaaattcagggttttgctacaataccttttgaccatctgtatagtagaatggtgttgctcgacgctattaaatctcttgatcttaataaagaaagttccgttgtattatctccagatgttggttcagctaggatgagccagtcttatgcaaaaaagctgggcatgcactttgctttgattgataagaggagatatgctcctaataaagcagaggtaatgcatttgattggagatcttaataataaagacgttttgataatcgacgatatgatagatacagctggtactactgtaaatgctgctaatgctgcaatggaaaatggagcaaatagtgttactgcagttgcaacccatgcaattctgtctggccctgcaattgacaggattcaagattcaaaaattagcaaacttattgtaactgataccgtagctatcccggaaagtaaaaaattagaaa

SEQ ID NO: 252987 - DNA, 271 bp, Unknown
  Bacterial polypeptide expressing nucleotide sequence isolated from the Sargasso Sea
aatgaaattattatctggaactagcaataagcctctcagtaaagatatagctaaattcttaaaatctaaactagtaaactcaagtattagaaacttttcagatggtgaaatatacgttgagttaaacgaaaacataagaggaaatagtatttttataattcagtctatttcgtctcctgcgaatgataacttgatggaacttttactatgtatagatgctttaaaaagatcttccgctaagaatataacagcagttattccatattttggt

SEQ ID NO: 252988 - DNA, 421 bp, Unknown
  Bacterial polypeptide expressing nucleotide sequence isolated from the Sargasso Sea
caaagaacaaggggactggctacaagaataaaagcagatttagctattattgataaaagaagacctaagccaggacaatcgcaagtaatgaatattattggaaatgtaaaaggtaaaacatgtatcattgttgacgatataattgatagtggaggtacaatagttaatgctgtaggagcattgaaaaaagctggagcaatagatgtatacgtatttattactcatgcagttttaagtggagaagcggtatcaaagattaaaaaatctaagataaaaaaattaatcattactgatactatagataactcaaaaaaaataaaaaataacaataaaattgaggtattatcaatatctccccttatggcagaggcaataaagagaatatctaattcaaattcagtatcagatttattcaattaat

SEQ ID NO: 252989 - DNA, 502 bp, Unknown
  Bacterial polypeptide expressing nucleotide sequence isolated from the Sargasso Sea
actcccattttcgcaagatatataaaaaaaaatattaaaagtaagaatataatttgtgtttcacctgatgcaggtggaatagaaagaactagaggtttagcaaaaaaaattaatgctgatctagccataattgacaaaagaagacctcaagcaggaaagtctcaagttatgaatattattggggacgtaaaaaataaagattgtgtaatagtagatgatataattgatagcggagggacaatcgttaatgctgccgatgctcttataaaaaaaggtgctatcagtgtcagtgtatttgtcacacatgctgtattaagtggtgatgcaataaataaaataaaaagatctaaaataaaaaaactagttattactgatagtatagataacagcaatagagtaaaaaatataagcaaaatacaagtattaaccattgctcctctcatggctgaagcaataaaaaggatttcgaactcaacttcagtatcagatctatttaattaac

SEQ ID NO: 252990 - DNA, 496 bp, Unknown
  Bacterial polypeptide expressing nucleotide sequence isolated from the Sargasso Sea
ttgaaggtgttctctggaacggcgcaccagacgctgagtgaggaaattgcaaattatttaggaataggactgggaaaggcgaccatcaagaggttcgccgacggagaaatttacgttcaaatcaaagagtccattcgcggctccgacgtctttctcgtgcaaccgacgtgtccgccgacgaatgatagtttgatggagcttttggtcatgattgacgcgtgcagacgcgcgtcgtgccgttccatcacggcggtgattccgtactttggttacgcgcgcgccgaccgcagaacggcgggacgagagtcgatcgcggccaagctcgtggccaacttaatcaccgaagcgggcgctactcgctgcgttttgatggacattcactcgttgcaaacgattggatactacgacattccggttgatcacatttacggcgagtcggttattttggactatctcacgtcgaaggacttcgcgcacgatgaaatcgtcatcgttt

SEQ ID NO: 252991 - DNA, 448 bp, Unknown
  Bacterial polypeptide expressing nucleotide sequence isolated from the Sargasso Sea
ttgccaggaagatttggtgaaataaaagttttttcaggtacatcacaccagcaactttcacttgatgtttgtaccaatcttggtattgaactatcaaaagcagaagtatttaaatttgaaaacgataatacctttgtaaggataatgaacaacatcagagaacaagatgtgtttataattcagccaacagataagcctgccaacgataatataatggaactacttttgagtttagatgctgcaaagagagcttctgctggtagactaaccgcagttattccttattttggttatggcagaaccgataagaaggatcagccaagagtaccaatttctgcaagattaattgccgacatcataactactgctggagctgacagaatccttacaatagatttacatgctcctcaaatccaaggtttttttaatatacctgttgacgaatgac

SEQ ID NO: 252992 - DNA, 676 bp, Unknown
  Bacterial polypeptide expressing nucleotide sequence isolated from the Sargasso Sea
atggctgattttaaagaattacgcgttttgagtggaacttcgcatataaaattaacagattctatatgtgaatatttaggcatttctaacgggagactcaatatacataaatttgccaatgataatacttttgtacaaatagaagaaaatatacgagagagagatgtatttatagttcagccatttagtaatccggtcaatgacaaaatcatggaaactcttattatgatcgatgccgcaaaaagagcttctgctggacgaataactacagtaattccgtattttgcatatggtaggacagataaaaaagaccaacctcgggttcctataactgcaagattaattgcagacttaatatccactgccggagctgatagagttcttacaattgatttacatgcaggacaaatccaaggtttttttaatatccctgtagatgaactcactgcaatccctatattgactagatatattaaagaaaaaaatatccctaatttagttgttgttgctgtagatatgggagcaactaaaagagcaagaaatgttgctgcaggtcttggtgttccattagccatcatggaaaaaagaagaactggaaataatgatacaactgaagcattaaatattattggtgaagttgaaaaaaaatcagccctaactgttgatgatgaattag

SEQ ID NO: 252993 - DNA, 619 bp, Unknown
  Bacterial polypeptide expressing nucleotide sequence isolated from the Sargasso Sea
tgcaaaggtcgtatcaaatttgataaccaaagcaggtgctaataggattgtgacagtagatttacatgctggtcagattcaaggtttttttgacatgccagtagacaatttgtttacaactcctttatttgcaagatatataaaaaaaaatattaaaagcaaaaatttaacatgtgtatctccagacgcaggaggaattgaaagaacaagaggtttggcaaaaaaaattaatgctgacttggcgattatagataaaaggagacctcaagctggtaagtctcaagttatgaatgttattggtgaaataaaaaataaaaattgtataattgtggatgatattattgacagtggggggacaatagtaaatgctgttgaagccttgattaaaaaaggagctaaggatgtacatgttttcgttacacatgctgttcttagcggagatgcagtaaataaaattaaaaagtctaaaataaaaaaattaattattactgatactatagataatagtagaagaataaaaaatgtaagtaaaatagaagtattatcaattgcacctcttatggcagaagcaataaaaaggatttcaaactctacatctgtgtcagatctgtttaattaa

SEQ ID NO: 252994 - DNA, 477 bp, Unknown
  Bacterial polypeptide expressing nucleotide sequence isolated from the Sargasso Sea
aaaaaaatattaaaagtaaaaattttatctgtgtttctcctgatgcgggagggatagaaagaacaagaggcttagcaaaaaaaattaatgctgatttggcgattatagataaaagaagacctcaagcaggaaaatctcaagtcatgaatattattgggcaagttaaagataaagattgtataattgttgatgatattattgatagtggtggtacaattgttaacgctgcggatgctcttataaaaaaaggtgcaaaagatgtttatgtgtttgtaacgcacgcagtgctaagtggtgaggcaatcaataaaataaaaaaatcaaaaattaaaaaattggtaattacggatagcattgataactctaaaagaataaagaatattaataaaattcaagtattatctattgctccactaatggctgaagctataaaaaggatttcaaactcaacatctgtgtcagatctatttaattagc

SEQ ID NO: 252995 - DNA, 538 bp, Unknown
  Bacterial polypeptide expressing nucleotide sequence isolated from the Sargasso Sea
atgacagaggcaaaaatttttagctgttcgcaaagtcacgatttagctttcaatatagctaaagatttcggtgctaaattgggtaaaattaaattttccaattttagtgatggagaatttcagccctcttttgaagagtctgttcgggggtcaagggtatttattattggctcgacaaatccaaattccgatcatcttatggaaatgcttttaatgcttgatgctgccaagcgttcctccgctagacacgttaccgctgttcttccttactttgggtgggcaagacaggacagaaaagacaaaccaagagtaccgataggagcaaaattggttgcaaaacttttagaagccgcgggagctacgagaataattactatggatcttcacgcagatcaaattcaaggtttttttgaaaagcctgttgatcatctatatgcatcaactatttttgtaccacacataaaaaacttaagattaaaaaacttaaccatagcttcacctgatatgggaggatctaaacgtgcatatgcatattcta

SEQ ID NO: 252996 - DNA, 407 bp, Unknown
  Bacterial polypeptide expressing nucleotide sequence isolated from the Sargasso Sea
gttagcaacaagaataaaagctgatcttgcaatcatcgacaaaagaaggcctgctccaggtaaatcagaagtgatgaatattattggaaatgttaaagataaaacttgcatcatagttgatgacataattgatagcggaggaacaatagttaatgcggtagatgcattaaaaaagaatggggcaaatgaagtttacgtatttattacacacgctgttttaagtggtgatgctgtaaaaaaaataaaaaactcaaaaattaaaaaacttgtaattactgatacaatcaataatgctaaaaaaattaaaaataataataaaattgaggtgttatctattgcctcactaatgtccgaagctataaaaagaatagctaattctaactcggtatctgatttattcaattaac

SEQ ID NO: 252997 - DNA, 205 bp, Unknown
  Bacterial polypeptide expressing nucleotide sequence isolated from the Sargasso Sea
tatgaaaataatcgcttgtaatagtagcaaatccttagcagaaaaaatttctaaacatattgacgtgccattagcagatgcttctgttagaacttttaatgatagagaaatatttgtggaaataaatgaaaatattagaggtgaagatgtgtttattattcaatccacatcacatccggctaacgatcatttaatggaactttaa

SEQ ID NO: 252998 - DNA, 428 bp, Unknown
  Bacterial polypeptide expressing nucleotide sequence isolated from the Sargasso Sea
aatgaaaaataaattaaaaatatttagtggtaggagcaatccagagctagcattaaagattgctaaatctgctaaatgtgaattaggtaaaatatctataaaaacgttctctgatggtgagttgtgggtaaagtatgaagaaaatatcagggggcacgatgtttttttaattcaatcaacgaacggtcctgcagaaaatattttggaaattgctcttatggcagatgcagctgttcgagcttctgcagaaagagtttcagttataataccttattttggatatgctagacaagatagaaaagatcaaccaagggttccaatatcatcaagagttatgattgatattatcacgagcatgggagctgacagaattgtgacaatggacttgcactcaacccaaatccaggggtttgcaaaaattccatttg

SEQ ID NO: 252999 - DNA, 307 bp, Unknown
  Bacterial polypeptide expressing nucleotide sequence isolated from the Sargasso Sea
atgggtaaatacgtaaaaaaaatatttgcaggatcaagtaatcctaggcttgcagctaaaattgcagatgagtgtggtgtatctcttggtgatgtaactattaaacgttttagtgatggagaaatttgggtgaaatttgaggagaacctaagagggaatgacgtttatcttattcagtctaccaacgctccagcagataatattgttgaactagcattacttatcgatgctgcgaaaagagcaagtgctcaaagaattaatgtgattataccatactttggatattctagacaagatcgtaaggacg

SEQ ID NO: 253000 - DNA, 340 bp, Unknown
  Bacterial polypeptide expressing nucleotide sequence isolated from the Sargasso Sea
gaggttatgaatatcattggtgatgtaaaaggacaaacttgtattttagtcgatgatataattgattcaggtggtacaattgttaatgcggctaaagctttgaaatctcgaggagcaaaagatgtttatgtttatatcactcatggggttttaagtggagatgcaattaaaaaaattaaaagttcaacaattaaaaatttagttataaccgatacaatagacaatgttcataaaactaaaaatgttaaaaatattgaggttttacctgtatcaggtcttatgggtgaagcaataaagagaatttcaaattcaacatctgtatcggatttatttaaataaa

SEQ ID NO: 253001 - DNA, 536 bp, Unknown
  Bacterial polypeptide expressing nucleotide sequence isolated from the Sargasso Sea
tgcaaagataccattcgataatttgtatagcagatctattatttttcaagcaataaaaaatgaaaatttagatccaaaaaattcagtggttctagctccagatataggatcagttaaaatgagtcagggttatgcaaaaaacctaggtatgcattttgcattaattgacaaaagaaggtttgcgccaaataaaaccgagattaatcatttaattggtgaactgaaaggtatggatgttttgattattgatgatatgattgatactgctgggacattagttaatgcatccgaatctgcattcgagcaaggtgcgaagtcagttacggcaattgctacacatggtgttttatctgaaccggccattgtccgtctggataaatcgaggataaaaaaaataattgttactgatacaatcgttttaaataatgaaaagctaattgataaactagaagtagtatcagtgtcaagtatttttggtcaagcagtaggcagggttcacaatggtgaatctgttagtgctttatttgaattttaga

SEQ ID NO: 253002 - DNA, 503 bp, Unknown
  Bacterial polypeptide expressing nucleotide sequence isolated from the Sargasso Sea
aactccaatatttgctagacatgtaaaaagaaatatcaaaggaggaaatttaatttgtgtttctcctgatgtgggtggagtagaaagatcaagagcacttgcgcgaaaactagatataggaatagcaatcatagataagagacgacctgcgcccggaaaatcgcaagttatgaatgtaattggaaatgtaaaaaataaaacttgtataataattgatgacataattgactctggtggaacaattgtaaatgcagctcaagcacttattaataggggagcaaaagaagttcatgtttatattactcatggggtattaagtggtgaagccgtagaaaaaattaaaaaatccaaaataaaaaaattagtaataactgatacgattgataattcagataaggttaaaaaagctaaaaatatagaggtattatcaatagctaatttgctcggggaagcgattaaaagaatatcaaactctacctctgtttcggatttatttaaataaa

SEQ ID NO: 253003 - DNA, 499 bp, Unknown
  Bacterial polypeptide expressing nucleotide sequence isolated from the Sargasso Sea
cctataattgatgatgttaaagaaaggtttaatggtaacaaagatttagttgttgcttcccctgatgttggtggtgttgttagagccagagcttttgctaaaagattagaggctggactggcaattgccgataaaagaagagaaaaagctggtgagtctgaagtaatgaatattataggagatgtaaaagataaaacttgtatcttactagatgatatagctgactctgcaggcacgttatgtaatgctgctgaagctctgagtaaaaatggggctaaagaaatttattcttatattgttcacggcgtattatctggagatgcactaaaaaagattgaaaattcaagcataaaagaattggttttaactgatactattgagccttccaaagaggtaaaaagcacaaaaaacattagacatattagtattgctcctttaatgggagatgcaattaaaaggattaacactgatacttcagtgtctgctcttttcgattaaa

SEQ ID NO: 253004 - DNA, 460 bp, Unknown
  Bacterial polypeptide expressing nucleotide sequence isolated from the Sargasso Sea
aaaaatttaatttgtgtatctcctgatgttggtggagttgaaagatctagagctcttgcaagaaaattagatatcggaatagctataattgataagagaagaccggcacctgggaaatctcaagttatgaatgtaataggtaatgtaaataataaaacatgtataataattgatgatattatcgattcaggaggaacgattgttaatgctgcacaggcattaattaatagaggggcaaaagaagttcatgtttatataacccatggtgttttaagtggagaagcagttgaaaaaattaaaaaatctaaaattaagaatttagttataacagatacaattgacaattctgataagattaaaaaagctaaaaatatagaggtattatcaatttgcaatttattgggggaagcaataaagcgtatatctaattcaacatctgtatctgatttatttaaataaa

SEQ ID NO: 253005 - DNA, 659 bp, Unknown
  Bacterial polypeptide expressing nucleotide sequence isolated from the Sargasso Sea
aatattggagagtttaaaggtggatagaataataacatttgatttacacgcaggacagatacagggattttttagttgtcatacaccatttgataatttatatgttgagaaatattttatagaccatattaaaacaaatattataaacggctctcctgatgatgtaataattgtatcgccggatgaaggcggagctaaaagagccattagaattgcgaataaattaggattatgtagcactataatatataaggaaaggaataaggataatagtataaatagaatgtgtataatgggtcatataaaacagaaaatagcaatattagtggatgatatgatagatacagcagggacagcttgtaaggctgcagaaatattaaaggagaatggtgttgaagcgatatatatgtatgcttgtcatggtttattttctggtccggcgatagaaagaatagagaatagtagttttaatagagtgattgtaactaatacaatagaacagaaaaaaaatatggaaaatcttaagaaatataattgtaataaaatagaggttatggatgtttcaaaaatgtgtgccgaagcaattagaagatcattatatggagaatcattaaaagaattatatgatactccatttgatgataatttatatagataaa

SEQ ID NO: 253006 - DNA, 253 bp, Unknown
  Bacterial polypeptide expressing nucleotide sequence isolated from the Sargasso Sea
atggttgtatctcctgatgttgggggggttgcacgtgctagagaattggccaaacggataaatgctccactctctatagttgataagcgaagagaaagagctggagaagttgccgaaatgacaatcatcggcgatgtcacaggtaaaaaatgcatcattgttgacgatatttgcgatacagctggcactctttgtaaagcagccgaagtccttattgagaatggcgcggcagaggttcattcttacattaccc

SEQ ID NO: 253007 - DNA, 468 bp, Unknown
  Bacterial polypeptide expressing nucleotide sequence isolated from the Sargasso Sea
ttaaaagtaaaaaaattgtttgtgttgcacccgatgtgggtgggacagaacgagctagagcactaggaaaacttcttaacgtaggcttagctattgttgacaagagaagaccaaagcctgggcagtcacaggtgatgaatgttattggagatgtgaaaggtcaaacttgcatcattgtagatgacataattgactcaggcggaactattgtaaatgcagcaaaagcattaaaagcaaaaggtgcaaaggaagtttttgtttatatcactcatggcgttctaagtggtgatgctgtaaaaaaaattaaaaactcagtaattaaaaatttagttattactgatacaattgataattcagaaaaaattagaaatgttaaaaatatagaagttttaccaatttcagggctaataggtgaagctattaaaagaatatctaattcaacttcagtatctgatttattcaaataat

SEQ ID NO: 253008 - DNA, 487 bp, Unknown
  Bacterial polypeptide expressing nucleotide sequence isolated from the Sargasso Sea
tatgaatgaaacattaaaaatatttagtggaagaagtaatccaattctagcaaaaggaattgttgatcatctaggtttaaaactaggagatgttactattcgaacattttccgatggtgaactatgggtaaagtttgaagaaaatataaggggagctgatgtatttatcattcagtctactagcgggccagctgaaaatttaattgaattatttttgcttcttgatgcagctgtaagggcgtcagctaaaagagtaactgctgtaattccatattttggatatggtagacaagatagaaaagaccagccaagagtacctatatcatcaagagttatggtagatattattactgcaactggtgcagatagaattattagtatggatttacactcgacacaaattcaaggatttgcatcaataccatttgatcatatatatagtcgcatggttttattggacacattgaaatcattaaatcttaactca

SEQ ID NO: 253009 - DNA, 532 bp, Unknown
  Bacterial polypeptide expressing nucleotide sequence isolated from the Sargasso Sea
tttgatattcctgtagataacttgtttgctactcctatttttgcaagacatgttaagaaaaaaattaaaagtaaaaatatgatttgtgttgctccagatgtgggtggtactgaaagagcaagatctcttggaaaacttttaaatgttggtctagccatagtagataaaagaagacctaagccaggacaatctcaggttatgaatgtaattggagatgtcaaaggtaagacatgtataattgtagacgatatcatcgactcaggtggaacaattgtaaatgcagctaaagctttaaaagatagaggtgcaaaagaagtttatgtatatattactcacggtgtgcttagtggtgaagcggtcaaaaaaattaaaaaatctgttatcaaaaatttagtaattactgacacaatcgataatagtgacaaaataaaaggtgcaaaaaacattgaagttttatctatttcagggctaatgggtgaagcaataaaaagaatatcaaattccacttctgtatctgatttatttgcataat

SEQ ID NO: 253010 - DNA, 803 bp, Unknown
  Bacterial polypeptide expressing nucleotide sequence isolated from the Sargasso Sea
cgccatatataaaactgaaaaaaaagtattcccagacggagaaagtaaaataacaattaatcagattccaaaaaaaagtatagtagtagtagtccaatcaacctatccaccagttgattcaaatcttttagaattattgagtattgtttcaaaagtacaaaaattttcatcaaaagtatatgcagttattccttacatgggatatgcaagacaagatagagagtttcttggaggagaaataatcaccataggagttgttggaaaattactcaaagcagcaggtgtaaaaaaagttctcacagtagatattcacagtaaattagcattaaaagaactaaaaatttcatcagaaaatgtttcagcaatggaagttctagtcaaacattttaagaaaatgaagatgaaaaatccagtagttgtatcaccggatttgggaggaaaagatagagctgtaaagttttctgaacttttaaagacagatttcatcgcgttaaagaaacagagagacagaaaaactggtaaagtgaaaattctttcaggaaaagttgatgttaaagacagagatttgattttagtagatgatatgattagtactggcggaagtattatcaaggcaacccaatttttaaagaaacaaaaatgcaggcgtgtttttgtagcatgtacacatgcattattagtcaatgatgctgcaaaaaagatcaaaaatgcaggcgtatcccaaataattagtacaaataccataccaggtgaatctgcaaaagtggatgtatcaaaagttatttctgatgcattaaagtgaa

SEQ ID NO: 253011 - DNA, 247 bp, Unknown
  Bacterial polypeptide expressing nucleotide sequence isolated from the Sargasso Sea
atgaaaattattgcctgcaacagtaataaaattttagctgaagcaatttgctcttatattggagtatctttagcaaatagttcattaagaagatttgctgatcgagaaatatttgttgaaattaatgaaaatattagaggtgaagatgtttttataatccaatcaacgtctcatcctgcaaatgatcatcttatggagttactaatttcaatagatgcagcaaaaagaggctcagcaaagagaataa

SEQ ID NO: 253012 - DNA, 526 bp, Unknown
  Bacterial polypeptide expressing nucleotide sequence isolated from the Sargasso Sea
attccagttgataacctttttgcaacaccaatatttgcaagacatataaaaaaaaaaattaaaagtaaaaatattatttgtattgctcctgatgttgggggaacagagagggcacgagcgttaggaaaattgctaaatgtgggtttagcaatagttgacaaaagaagaccaaagcctggccagtctcaagtaatgaatattatcggtaatgtgaaagacaaaacatgcattatagttgacgatataattgactctgggggaacaattattaattcagcaaaagctcttaaagaaaaaggtgccaaagaagtttatgtttatattactcatggggtcctaagtggtgacgcagtcaaaaaaattaagaattcagttataaaaaatttagtaattacagatacaattgataatggtgaaaaagttaaaactgttaagaacattgaaattttaccaatatcaggccttatgggagaggctataaaaagaatatctaactcaacttcagtttcagatttatttaaataat

SEQ ID NO: 253013 - DNA, 586 bp, Unknown
  Bacterial polypeptide expressing nucleotide sequence isolated from the Sargasso Sea
tggtgctatagaattgttactgtcgatctgcatgcttggtcaaattcaaggtttttttgatatgccagtagacaatcttttcacaactccattatttgcaagatatattaaaaaaaatattaaaaataaaaatttaatttgtgtttcacctgatgcaggtggaatagaaagaacaagagggctggcaaaaaaaataaatgctgatttagcaataattgataaaagaagaccgcaagctggaaaatctcaagtaatgaatattatcggaaatgtgaaaaataaaagttgtgtgattgttgatgatataattgacagtggtggcactatagttaacgcagcagaagctttaagaaagaatggagcaaaagatgtttttgtatttgtaactcatgcagtattaagcggtgaagctataaagaagattcaaaattcaaaaataaaaaaattagtaattactgatagtattgataattcaaaaagagttaaaaatattaataaaattcaagtgctgtctattgcctcactaatggcagaagctataaaaaggatttcaaattcaacatcggtgtcagatctgtttaattag

SEQ ID NO: 253014 - DNA, 601 bp, Unknown
  Bacterial polypeptide expressing nucleotide sequence isolated from the Sargasso Sea
gcagatagagttgtgactatggatcttcattcaacacaaattcaaggcttttcatccaaacctgtagacaatatttacggtagcctcgttttaatgcctgaattggaaaaacatttcaaaggtttatcatctgatgacaattttacagttttaatccctgatatgggatcaagtaagttaggacaatcttatgccaaaagattaggtatgagttttgctcttatcgataaaagaagaaacgcacataatcaatctgaagttgtatctgttgttggagagttaaaaaatcaacatgtattaatcattgatgatatgattgatactgctggcactatttctaatgctgctaaagtggctaaagaaaaaggagccatatcagtaactgtggctgcaacacacggtatattatcctccaatgcaattgaaaaattatcagatgatattgttgattttatatttattacagacacaatagatatgtcacatattgataattgtgaaaaacttaaaactatttcatctgcaaaaatttttgcagaaacaattaacaggattcatagcggtgaatcagtaagtcaactatttaggaaagtaacatgag

SEQ ID NO: 253015 - DNA, 523 bp, Unknown
  Bacterial polypeptide expressing nucleotide sequence isolated from the Sargasso Sea
tatgggtaaatacgtaaaaaaaatatttgcaggatcaagcaatcctcaacttgcaatgcaaattgctaatgagtgcggtacgtctttaggagatttatctgtaaaacgatttagcgatggagaaatttgggtaaagtttgaagaaaatcttagaggaaatgatatttacctagttcagtcaacaaatcccccagcagataatattgttgaattagcacttatgattgatgctgcaaaaagagcaagcgcaaagagaataaatgttataatgccttattttggttattctagacaagatagaaaagatgagcctagagttcctatttctgccaaagttatgatggatatatttattaaagctggtgcaaatagagttgtaacaatggacttacattctacacaaattcagggtttctcttcaaaacctgttgataacatttatggtagtttagttttaatgccagagcttgaaaaacactttcatagcttatcagataagaacaactgtacagttttaattcct

SEQ ID NO: 253016 - DNA, 812 bp, Unknown
  Bacterial polypeptide expressing nucleotide sequence isolated from the Sargasso Sea
tatgaatgatcagttaaaaatattttcaggacgcagtaaccctgctttaagcaaggatattgcaaattacttaggcaaggaccttggaaagttaacgataaagactttttcagatggagagctatggcttcagtttgaggaaaatatcagagggtgtgatgtatttattatacaacccacaaacagcccagctgaaaatattatggaattaattctaattatcgatgctgcagttagggcttcagctaagactgttaccgcagttattccatattttggctatggacgacaggatcgcaaggacaatccgcgtgttcctatttcctctagagtgatggtagacctaataaccgctacaggagctgacagaattattactatggatttgcattccacccaaatacaaggatttgcaacaattccatttgaccatttatatagcagaatggtcctgctagatgcaattaaatctttaaactttgatcaagaaaactctgcagttttgtcccctgatgtaggttcggctagaatgagtcagtcttatgcaaaaaaacttggaatgcattttgctctgattgataaaagaagatatgcgccaaacaaagcacaagtaatgcatctgattggagatttgaaaaataaagatgtgctaataattgatgatatgattgacacagcgggaacaactgttaatgcagctaattcagcaatagaaaatggtgctaaaagcgttactgcggtagcaacgcatgctattttgtcaggacctgcaatcgacagaataaaagattcagctataagcaaactcattg

SEQ ID NO: 253017 - DNA, 460 bp, Unknown
  Bacterial polypeptide expressing nucleotide sequence isolated from the Sargasso Sea
gatgccgatagtcgtcgctcttgatgtaggtggggtcgtaagagcgcgagctatcgctaagcaaattggcgacttggacctggcgataatagataaaagacgtcctagagctaacgaaaccgaagttatgacggtaattggcgatgtggctggcaagacgtgtattattgtcgacgacattgttgatactgcgggaactttatgtactgcggctgcagcattgaaaaaagaaggggctgagaaagtagtagcttacataacgcatgctgtcttttctggtagcgctattgacagaatatcgaattctgaattagatgagatagttgtaacagatacgatacctttgcatgcaaaagcccaagagtgtagtaaaatagagcagctaagccttgctaatcttctagctgagtcgataagacgtgtaagtaatgaagagtctattagtgcgatgtttaggtga

SEQ ID NO: 253018 - DNA, 476 bp, Unknown
  Bacterial polypeptide expressing nucleotide sequence isolated from the Sargasso Sea
aagaaatataaaaagtaaaaatcttatttgtgtttctcctgacgtaggtggagtagaaagatctagggctcttgcaagaaaattagatattgggatagcaattatagataagagacgaccagccccaggaaaatcacaagtgatgaatgtaattggaaacgtaaaaaacaaaacctgcataattatagatgatatcattgactcaggaggtacaattgtaaatgcagcacaagctttgattaatagaggggcaaaggaagttcatgtttatattactcatggtgtattaagtggagaagcagttgaaaaaattaaaaagtctaaaataaaaaaactagtaataactgatacaattgataactcagataaggtaaaaaaagctaaaaatattgaggtattatctatagctaatttactcggtgaggcaataaaacgaatttctaattctacttctgtatcagatttatttaaataaa

SEQ ID NO: 253019 - DNA, 877 bp, Unknown
  Bacterial polypeptide expressing nucleotide sequence isolated from the Sargasso Sea
atggcaaaatttacagttgttggaggagatgcatcatcagatctagctaaaagaattgctagaaaaataaaatcgccttatatcaaaactgaaaagaaagtgttcccggacggagaaagtaaaataacaattaatcaaataccaaaaaaaagcatagtagtagttgtacaatcaacgtatccaccagtagactcaaatcttttagaattattgagtattgtttcaaaagtacaaaaattttcatcaaaagtgtatgctgttattccttacatgggatatgcaagacaggatagagagtttctcggaggagaaataattacgataggagttgttggaaaattactcaaagcagcaggtgtcaaaaaagtcttgaccgtggatattcatagtaaattagcattaaaagaattgaaaatttcatcagaaaatgtatcagctatggaagttctggtcaaacattttaagaaaatgaaaatgaaaaatccagtagtcgtatccccagatatgggtggaaaagaaagagctgaaaagttttccaaacttttgaaaacagattttattgcattaaagaaacagagaaacagaaaaaccggtaaagtaaaaattctttcagaaaaagttgaggttaaagacagagatttgattttagtagatgatatgattagtactggaggaagtattatcaaagcaactcaatttttaaagaaacaaaaatgcaggcgtgtttttgttgcatgtacacacgcattattagtcaatgatgctgcaaaaaagatcaaaaatgcaggcgtatcacaaataattagcacaaataccataccaggtgaatctgcaaaagtggatgtatcaaaagttatttctgatgcattaaaatgaa

SEQ ID NO: 253020 - DNA, 979 bp, Unknown
  Bacterial polypeptide expressing nucleotide sequence isolated from the Sargasso Sea
aatgattgagcaatcgacaaaaaagagaatgctcatttactcaggatcttcaaattctgaattagcaaaaaaagtagccaacgaattaggaacagaacttgctgaagttgaaaaagaacagtttgctagtggagaaatctacattcgattagctgatagtgcgaggggggctgattgcttcgttctccaaagtcactcaggtggaatcaattttacaattatggaacagttgttaatagttgatgctttaaagagagcatcagcaaaaagaataacggccgtacttcctttttatccgtactcacgacaagataaaaaagcactaccaagagaaccaatttctgcccgattgattggagatttatttatagctgcgggagctaacagattagtatctattgatcttcatacacaacagattcaaggctttatacacgcaccatttgatcacttaactgcaatgcctctttttgttgattactttaaaaacaaatatgaagaatctgtttctgttatctctccagatgctggaggtgttaaaagagcaacaacatttgctaagcatttagaagcttatgttggttttgttcataagaaaagagatccaagtaaacataatgaagtcaaagccttcactgtaattggggaggttgaagatcgtcatgcgatattaattgatgacataattgatactggaggaacaatagctgctgcttcaagaatcttaaaagagaggggagcgaagacagtaagtgtagttgctactcacggaatattttctgatggttcagtagaaacacttaaagatgcaccaattgatgaaatagttgttacggacactcttgcacaaaacggtaattcagaagcacttggcaatgtagaagtccttagtgtttcgggaataattgcaaatgcactaacatctatatttgcagacgattcagtttctgccctctttatgggcgagaacgttttataa

SEQ ID NO: 253021 - DNA, 646 bp, Unknown
  Bacterial polypeptide expressing nucleotide sequence isolated from the Sargasso Sea
acaaaaattttcatcaaaagtatatgcagttattccttacatgggatatgcaagacaagatagagagtttcttggaggagaaataatcaccataggagttgttggaaaattactcaaagcagcaggtgtaaaaaaagttctcacagtagatattcacagtaaattagcattaaaagaactaaaaatttcatcagaaaatgtttcagcgatggaagttttagtcaaacattttaagaaaatgaagatgaaaaatccagtagttgtatcaccggatttgggaggaaaagatagagctgtaaagttttctgaacttttaaagacagatttcatcgcgttaaagaaacagagagacagaaaaactggtaaagtgaaaattctttcaggaaaagttgatgttaaagacagagatttgattttggtagatgatatgattagtactggtggaagtattatcaaagcaacccaatttttaaagaaacaaaaatgcaggcgtgtttttgtagcatgtacacatgcattattagtcaatgatgctgcaaaaaagatcaaaaatgcaggcgtatctcaaataattagtacaaataccataccgggtgaatctgcaaaagtggatgtatcaaaagttatttctgatgcattaaagtga

SEQ ID NO: 253022 - DNA, 221 bp, Unknown
  Bacterial polypeptide expressing nucleotide sequence isolated from the Sargasso Sea
catgaaaattttatctggaactagcaatataaaactaagtagaaatattgctaaaaatttaaagttaaaattaatcaatactaatattaaaagatttgctgatggagaaatttatattgaaataaatgaaaacataagagggaatagtgtatttgtaattcaatctacctctaacccagctaatgataatttaatggaattacttttggtgattgatgcat

SEQ ID NO: 253023 - DNA, 798 bp, Unknown
  Bacterial polypeptide expressing nucleotide sequence isolated from the Sargasso Sea
aatggcaaaatttacagttgttggaggagatgcatcatcagatctagctaaaaggattgctagaaaaataaaatcaccttatatcaaaactgaaaagaaagtgttcccagacggagaaagcaaaataacaattaatcaaataccaaaaaaaagcatagtagtagtcgtacaatcaacgtacccaccagtggactcaaatcttttagaattattgagcatagtttcaaaagtacaaaaattttcatcaaaagtgtatgctgttattccttacatgggatatgcaagacaggatagagagtttctcggaggagaaataattacaataggagttgttggaaaattactcaaagcagcaggtgtcaaaaaagtcttgaccgtggatattcatagtaaattagcattaaaagaattgaaaatttcatcagaaaatgtatcagctgtggaggttctggtcaaacattttaagaaaatgaagatgaaaaatccagtagtcgtatctccagacatgggtggaaaagaaagagctgaaaagttttctaaacttttgaaaacagattttattgcattaaagaaacagagagacagaaaaaccggtaaagtgaaaattctttcagaaaaagttgatgttaaagacagggatttgattttagtagatgatatgattagtactggtggaagtattatcaaagcaactcaatttttaaagaaacaaaaatgcaggcgtgtttttgttgcatgcacacatgcattattagtcaatgatgctgcaaaaaagatcaaaaatgcaggcgtatcaca

SEQ ID NO: 253024 - DNA, 889 bp, Unknown
  Bacterial polypeptide expressing nucleotide sequence isolated from the Sargasso Sea
aattgcaagttcccttggaaaggacttaggcgcactatcaattaaaactttttcagatggtgagctttggctgcaatttgaagaaaatgtaagaggtaccgatgtttttataatacagccaacaaatagtccagcagaaaatataatggaattagttttaattatagatgctgctgtaagagcctctgctagaaatgttacagcagtagtgccatattttggatatggcagacaagataggaaagacagaccaagagtaccagtttcatctaaggtcatggttgatctatttactactactggtgctgctagaattataacaatggatttgcactctactcagattcagggctttgctacgatcccatttgatcacatttacagcagattagttctcttagatgctattaaatcattaaatcttgatcctgataattccgtagttttatctccagatgttggttccgcaagaatcagtcaatcttatgcaaaaaaacttggaatgcactttgctttaatcgataaaagaagatatgcgccaaataaggctgaggtgatgcatttaattggtgatttagacaataaagatgtattaataatcgatgatatgattgatactgctggaacgactgtaaatgcagctgaagcggctattaaaaatggcgctcgaagtgttactgcagtagctacacatgcattgctatcgggaaatgcatgtgaaaaagttgagaattctgttattaacaaattaattgttacagatacagttgatattcctgataaaaagaaaattgctaaaatagaggttgtaactgtggcaaatgtatttgctgaagcaattgaaagagtctataaaggaaaatctgttagtgaattatttgaattttaa

SEQ ID NO: 253025 - DNA, 863 bp, Unknown
  Bacterial polypeptide expressing nucleotide sequence isolated from the Sargasso Sea
tatgtcaggaagatttggtgaaataaaggtattttctggtacctctcatcctcaacttacacaggatatatgtactaatttagggattgagccctctaaagcagaaatatttaaatttgaaaatgacaatacatttgtaagaattttgaataatgtgcgtgagcaagatgtttttattgttcagcctactgataagccttcaaatgataatataatggaattgttaatttgcatggatgctgcaagaagagcatctgcaggtagagttactgcagtaataccttattttggttatggtcgaacagacaaaaaagatcagccaagagttcctatttctgcaaggttaattgctgacctaataactacatcaggtgcagacagaatacttactatggatcttcatgctcctcagattcaaggtttttttaatattcctgttgatgaactaacagctactccaatccttatagagcattttaagaaaatgaaaaaagaattcgtagtagtagcaaccgatgttggaattagtaaaaaggctagagattttgcagctaggctttcgtctcctttggctattatcgaaaaaagaaggtcggataataaaggaaatgttgaattattaaatgttattggagatgttgatggcaagacagcattaacatttgatgatgaaatagatactggaggctccctagctcaagcaattgcagccctttctatggctggagttaatgaagtgtatagttgtgcaactcatggtattttttctggaaatgcaatagaaaaattaagttctattaaaattttaaaacaagtagtagttacggatagcgtaagcaaaaagtcaggtaatggtaaaataa

SEQ ID NO: 253026 - DNA, 952 bp, Unknown
  Bacterial polypeptide expressing nucleotide sequence isolated from the Sargasso Sea
atgctcatctactcagggtcttccaatactgaattagcaaaaaaagtagctaaagacttaggaacagaaattgctgaagttgaaaaagaacagtttgctagtggagaaatctacattcgattagctgatagtgccagaggtgctgattgctttgttcttcaaagtcattcgggtggaatcaattttacaattatggaacagttgttaatagttgatgctttaaagagagcatcagcaaaaagaataacggctgtacttcctttttatccttactcaagacaagataaaaaagcactaccaagagaaccaatttctgcgagattgattggagatttatttatagctgctggagctaacagattagtatccattgatcttcatacccaacagatacaaggttttatacacgcaccatttgatcacttaactgccatgcccctttttgttgattactttaaaaacaaatatgacgaatctgtttctgttatctctccagatgctggaggtgttaaaagagcaacaacatttgctaagcatttagaagcttatgttggttttgttcataagaaaagagatccaagtaaacataatgaagtaaaagccttcactgtaattggggaggttgaagatcgtcatgcgattttaattgatgacataattgatacaggagggacaatagccgctgcttcaagaatcttaaaagagaggggagcaaagacagtaagtgtagttgctactcacggaatattttctgatggttcagtagagacacttaaagatgcaccaattgatgaaatagttgttactgatactcttaaacaaaatggtaattcagaatcacttggcaacgtacaagtccttagtgtttcggaaataattgcaaacgcactaacatcaatatttgcagatgattcagtttcagccctctttatgggcgagaacgttttataag

SEQ ID NO: 253027 - DNA, 642 bp, Unknown
  Bacterial polypeptide expressing nucleotide sequence isolated from the Sargasso Sea
ttgtaccaagaacttctatttctgcaaaattagtctctaacttaattacaaatgcaggagctgatagagtagtgacagtagatttgcacgcaggacaaattcaaggtttttttgatataccagttgataatctttttgctactccaatctttgcaaagcatattaaaaggaaaatcaaaagtaataatataatttgcgttgcacctgatgttggaggagttgaaagagcaagagctttaggaaaaaaattagatgttggtttagcaatagttgacaaaaggagacctagtcctggaaagtcacaagttatgaatgtcattggaaatgttaaaaacaaaatttgtattttaactgatgatataattgattctggaggaacaatagttaatgcggctgatgctttattaaaaagaggtgcaaaagaagttcatgtatatgcaactcatggtgtttttagtggtgatgcagttaaaaagataaagaattcaaaaattaaaaatttagttattacagatagtatagacagttcagacaaatttaaaaaagtaagaaatattgaagtattatcaatatcaatattattggctgaagctattaaaaggatttctaattcaacgtctgtttcagatctatttaaataaa

SEQ ID NO: 253028 - DNA, 353 bp, Unknown
  Bacterial polypeptide expressing nucleotide sequence isolated from the Sargasso Sea
aatgaataataaactaaaaatctttagcggcagaagtaatcctgccctagctcttggtatagcaaaatcgcttgatcaagatttaggcagcatctccatccgcactttctctgatggtgagttatgggtaaagtatgaagaaaatgtgcgaggatgtgatgtgtttattattcaatctactaatgggccatcagagaacataattgaacttgcactgatggttgatgctgcagttagggcatctgcagataccgtaacagttttaattccatattttggttatggtaggcaagatcgaaaagatcaacctcgtgttccaatctcatctcgtgtaatgattgacatttttacag

SEQ ID NO: 253029 - DNA, 871 bp, Unknown
  Bacterial polypeptide expressing nucleotide sequence isolated from the Sargasso Sea
cccaagtatttggtcatcgcttggaaatgttgaatttcaaaggtatagtgatggggaatttcaaccatcttttgaagaatcagtaagaggctctagggtttttctaatcggatctaccaacccctcatctgataaccttatggaaatgttattaatgcttgatgcagcaaaaagagcttctgctagacatataactgctgttatcccatattttggatgggctaggcaagacagaaaagataagccaagagttcctataggtgccaaactaattgctaaactaattgaatcagctggtgcaacaagaatcataacaatggatctacatgcagaccaaattcaaggattttttgaaaaacctgttgatcatttatatgcatcagccattttcgtaccatatattcaatccctaaaaatagataatttgacaattgcatctcctgatatgggaggatcaaaaagagcatatgcttattctaaatttttagattcagatgtagttatatgttacaagcaaagatctaagggaaatattattactcatatggagttaattggtgatgttaatggaaaaaatgttatcctaatcgatgatatggttgataccgctggtacccttactactgccgctgatcttatgattgagagaggcgcagaatctgttattgcaatttgtactcatgcactattatcaggtgatgcatatgaaaaaatagaaaattctaaacttaaaaacttaataattacagattcaattgattctataaaaaaaactaacaagattgaagtattatcttgttcaaaaatatttggtgaggctatgtataatgttcatcataacaaatcaattgacgaattatttataacttaa

SEQ ID NO: 253030 - DNA, 946 bp, Unknown
  Bacterial polypeptide expressing nucleotide sequence isolated from the Sargasso Sea
atgaatgataaattaaaaatattttctggccgtagtaatgttcctctcagtaatgatattgcaaatcatctaggcaaggaacttggtcaattgtctatcaagacgttttcagatggtgagctatggcttcaatttgaggaaaacatcagaggttgcgatgttttcattatacagccaaccaatagcccctcagaaaatattatggaattaatattgattattgatgcagcagttagggcctctgcaaaaactgtaactgccgtagtcccttattttggctatggaaggcaggaccgaaaagataacccacgggttcctatttcttcacgtgttatggttgatttaattacagcaacaggagccgatagaataattacgatggatttgcactctacccaaatccaaggatttgctactatcccttttgatcatttatatagtcgcatggttctattggatgcaatcaaatctattggccttgaagaaaaaaactctgttgtcctatctccagatgtaggttctgcaagaatgagccaatcatatgcaaaaaaacttggtatgcattttgcccttattgataaaagaagatatgcaccaaataaagctgaagtaatgcaccttattggggacttgaataaaaaagatgttttaatcattgatgatatgattgatacagctggaacaactgtaaatgcagcaagcgctgcaattgaaaatggtgcaaacagtgtgacagcaattgcaacacatgcaatactatctggaccagcgattgatagaattaaagaatcaaaaataagtaaacttattgtaacagatacaatttctattcccgacaataaaaaattagacaatatgcaaattgttacagtagctgaagtttttgcagaagcaattaaacgcgtttatgaaggtaagtcagttagcgcactatttgaattttaaa

SEQ ID NO: 253031 - DNA, 576 bp, Unknown
  Bacterial polypeptide expressing nucleotide sequence isolated from the Sargasso Sea
tattactctttgatcttcattcaactcaaatacagggttttgctaaaattccttttgacaacttatatagcaggtctgttttatttgaagctattaaagatgaaaaattttcttcagatactacggctgttttagcgcctgacgtaggctctgttaaaatgagtcagggttatgcaaaaaacttaggcatgcattttgcactaatagataaacgacgttttgctccaaatcaagcagaggttaatcaccttataggggatttagaaggaatggatgttttaattattgatgatatgattgatacagcgggaacaacggttaacgctgctcaggccgcaatggatgaaggtgcgcggtcagttaccgtagtagctacgcatggtgttttatcaggacctgcaattgaaagattaaatgaatcaactattaaaaaaattattgttacagatactatatcaattcctaaagaaaaacagattgataaaatgaaaatagtaacggtagcaagtatttttggtgaggcaattaaccgagttcataatggtgaatcggttagtgctttgtttgaattttgat

SEQ ID NO: 253032 - DNA, 958 bp, Unknown
  Bacterial polypeptide expressing nucleotide sequence isolated from the Sargasso Sea
aatgaatggatttaacggtaagcctgtaattttttctggtaattcacatggtgttttggtacaagatatttgtaaatatttagatcaggatgtaggaaaaattgaagtttttaaattcgctaatgataatacttttgtaaaaatattagagaatgttcgccaaaaagatgtttttatactccaatctacagttgaacctgtaaatgataatattatggaactacttattatgatagatgcagcaaagcgtgcgtctgctggtagaataactgcagtagttccattttatagttatgctagaacagataaaaaagaccaacccagagttcctattacaggaagacttgtagctgacttgcttgagactgcgggagcagatagagtagtaatggttgatttacacgctggccaagttcaaggcttctttaaggttcctgtagatgaattaaccgcaatgcctagactagtggaatattttcaagataaatcggtagaagattgtgtagttgttgctactgatatagggatctcaaaaaaggcaagagattttgcaaattggataaatgtaccattggcgattgtggaaaaaagaagaatgggaaataatgacaaagttcaaagtttaaatgttataggtgatgtctcatcaaaaaatataatattgtttgatgatgaaataagtagcggcgaaacaatgatagcggcggcagaggctattcacaaagcaggtgctaaggacatttatgctgttgcaacccatggagtattgcctggagattcagcaaataaattagtaaaaaattcatacataaaagagtttgttgttaccgatactgttcctatcaatgctaaaaaacagcatgagaagattaaggttatatcaattgctccattattgggcgaggcaataagaagaattcatgaaggaaaatcagtaggacaactatttactcattaa

SEQ ID NO: 253033 - DNA, 213 bp, Unknown
  Bacterial polypeptide expressing nucleotide sequence isolated from the Sargasso Sea
tatgaaaataatcgcctgtaatagtagcaaatccctagcagaaaaaatttctaaacatattgatgttccattagcagatgcctctgttagaacttttaatgatagagagatatttgtggaaataaatgaaaacattagaggtgaagatgtttttattattcaatccacatcacatccagcaaatgaccatttaatggaactttttattacatt

SEQ ID NO: 253034 - DNA, 623 bp, Unknown
  Bacterial polypeptide expressing nucleotide sequence isolated from the Sargasso Sea
tgcaaaggttattgcagacatgttaagtgaagttggaatttctcgaataattactttagatattcactcagagcagatacaaggattcttttcattcccagttgataatatttataccgcaaacatcatggtgaagggcttacttgaaaaatatgatgttgaggatctacaagttgtatcaccagatacaggtggagttattagagctagatcagtagctaagacattaggagtgcaagatcttgcaataatagataaaaggcgagagaaagcgaatgaatcagaagtaatcaatcttataggtgatgtagaaggaaaagtgtgtatagtgccggatgatttgattgatacagccggaacattaagtaatgcgagtcatgctctaaaagacaagggagcaaaagaaataattgcctatattacacatccagtattatcgggcgatgctattaagaatttaaacaattctgcaatagataaattggtagtatcaaactctatcgatattggtgacaaatctaaaaaatgccctaaaatagacgtctttgatatatcacctatattgtcagaggcaattacgcgtatagcaactggtgattcaatcagtgaattatttaaataat

SEQ ID NO: 253035 - DNA, 469 bp, Unknown
  Bacterial polypeptide expressing nucleotide sequence isolated from the Sargasso Sea
aaatatgacaaaccaatagttgtctctccagatgtaggcggagttgtcagagcaagggcacttgctaagcaattaaattgtgacctagctattgtggataagagacgacaagaagccaatgtatctgaggtaatgcaaatcataggagatgtggatagtaaaacttgtattattgttgacgatattgttgatactgcagggactttatgtaatgcagcagcagcattaaaagaaaagggagcaaaatctgtattctcatacatcacgcaccctatcttttcagggaaagcttgtcaaaatatagctagctcaaaacttgatgggataattgttactgatactataccacttaacgaaaaaactgctaaagctaacaaaattagacaaattacagtctcagaaatgttggctgagactataagaagaatacataataaagaatctgttagtacactttttatggattaag

SEQ ID NO: 253036 - DNA, 721 bp, Unknown
  Bacterial polypeptide expressing nucleotide sequence isolated from the Sargasso Sea
atgaaaattttatctggaactagcaaccttaagttaagcaaggatatttctaaaaaattaaaattaaagctagttaatactaatattagaagatttgctgacggtgaaatctatatagagatcaatgaaaatattagaggaaatagtgtttttgtaattcagtctacatctaatccagcgaatgataatttaatggaacttcttttagttgtagatgcgttaaaaagatcttcagcaaaaaatgttaccgctgtgattccctattttggttatgcaagacaggacaggaaagttgctccaagaacatctatctctgcgaaagttgtagcaaacttaattactaatgctggagcaagtagagttgttacagttgatttacatgctggacaaattcaaggattttttgacatgccagtggataacttatttactactcctctttttgcaaaatacattaaaaaaaaattaaacaacaaaaaattaatttgtgtttcacctgatgttggtggagttcaaagaactagaggtttagcaacgcgaataaaagcagaccttgcaattatagataaaaggagaccagcgcctggaaaatctcaggttatgaatattattggtgatgtaaaaaataaaacttgcattatcgtagatgacataatcgatagcggtggaactattgtaaatgctgttgatgctcttaaaaaaagtggagctaatgaagttt

SEQ ID NO: 253037 - DNA, 566 bp, Unknown
  Bacterial polypeptide expressing nucleotide sequence isolated from the Sargasso Sea
catggatttacatgcagggcagattcaaggtttttttgatattccgacagataatctttttgctgcaccgattctcttatctgatattgaaaataagataggatcaaatgacgctatggtagtatctccagatgtagggggtgttgtaagagcgcgtttaattgcgagtagaataaactctgatctagccattgttgataaaagacgtgaaaaagcaggtgaatcagaagtaatgaatattattggcgatgtatcggatagaagttgttttatgattgatgatattgttgattcagccggaactttatgtaatgcagcagaggcattaattaattctggcgctaaggaagtttttgcacatgtaactcatggtgttttatctggggaagctataaaaagagtaaacgactccgctcttacaaaattggtaattacagataccattaatgagactgatgatattaaaaattccaataaaatagaaacggtaagcgttgtccacctacttggagaagcaataagaaggatttctgaagaaagatcagtatcgagtttgtttgattaac

SEQ ID NO: 253038 - DNA, 478 bp, Unknown
  Bacterial polypeptide expressing nucleotide sequence isolated from the Sargasso Sea
gatgaaaattctcacaggaaacagtaataaacatcttagtcaaaaaatatctaaatttttaaaaaatagactagtaaattcaaatattagaaaatttgcagacggagaaatctatatcgaaattaatgaaaatattagaggcaatagtatttttttaattcaatccgtttcatctcctgcaaatgacaatttaatggaattactactatcgattgatgctttaaaaagatcatcagccaagaacataactgctgtgatcccatattttggatatgcaagacaagatagaaaggtggttcctagaacatctatatctgctaaacttgtatctaatcttattgcaaaagcaggagcagatagagtcgttacagttgatttacactctggacaaattcaaggattttttgatattccagtagataacttatttgccactccaatatttgctagacatataaaaaagaagttaaaaaaaata

SEQ ID NO: 253039 - DNA, 829 bp, Unknown
  Bacterial polypeptide expressing nucleotide sequence isolated from the Sargasso Sea
atggaaaaacaattactattcagtggaaactcaaacaaagagctagcagagttagttgcaaaaaatctgggaaaaaaactagctccaatcaaagtaagtacttttagtgatggcgaagtgaatgttgaaatcgatatcaatgttagaggctcagatacatttataattcaatctacagactttcctgctgaaaaaaatttaatggagttagttttgatagcagatgctttaaaaagagcttcagcaaactcaatcactgccgtcattccttattttggctatgccagacaagacagacgagtaagatcagcaagagttccaataagtgctcgtgtaattgctgaagttttaactagtgttggcatttctagagttattactctcgatattcactctgaacaaattcaaggtttcttttcttttccagtagataacatttacacatcaaatattatgtgcaaagaaattattgggaagtataaagttgaagatttacaggtagtttcaccagatactggtggtgttataagggcaagatcagttgcaaaaacgcttggtgtcaaagatttagcgattatcgataaaagaagggaaaaagctaatgaatcagaagttattaatctaattggtggtgtgaaagataaagtttgtatagttccagatgacttaattgatacagcaggcactctaagtaatgctagccatgcattgaaggcagagggtgcgagagaagttatagcatatatcactcatcctgtgctctcaggaaatgctatcgaaaatttgaataaatcagccattgataggcttgtggtgtcaaactctatga

SEQ ID NO: 253040 - DNA, 781 bp, Unknown
  Bacterial polypeptide expressing nucleotide sequence isolated from the Sargasso Sea
tttttattcatccgtttcatctcctgcaaatgacaatttaatggaattactactgtcgattgatgctttaaaaagatcatcggccaaaaacataactgctgtaatcccatattttggatatgcaagacaagatagaaaggtggttcctagaacatctatatctgcaaaacttgtatctaatcttattgcgaaagccggagcagatagagtcgttacagttgatttacattctggacaaattcaaggattttttgatattccagtagataacttatttgcaactccaatatttgctagacatataaaaaagaaattaaaaaaaaataatataatctgtgttgctccagatgtcggtggcactgcaagagcaagggctttaggaaaattgttaaatgtagatttagcaatagtagataaaagaagacctgctcctggaaagtcagaagtaatgaatgtaattggaaatgttaaaaataaaacttgtatattagttgatgatataatcgactctggtggaacaattgtaaatgcagcttctgaattaaaaaaaagaggagctaaagatgttcatgtgtatgtaacacatggtgtattaagtggtaatgcagttgaaaaaattaagaaatcttcgataaaaaatttagttgtaactgatacaattgacaattcaatgaaagttaaaaaagctaggaatattgaggtattaacaatctctaatttggttggagaagctattaaaagaatatcaaattctacctcagtatcagatctatttaaataa

SEQ ID NO: 253041 - DNA, 331 bp, Unknown
  Bacterial polypeptide expressing nucleotide sequence isolated from the Sargasso Sea
aatgaaattattaactggaaacagcaataaagtcttaagtaaaaacattgctaaatacttaaaaacaaaacttgtaaattcaagtattagaaaatttgctgatggtgaaatttatattgaaataaatgaaaatataagaggaaacagtatttttattgttcaatctatctcttctccagcgaatgataatttaatggaattattgttatgtatcgatgctttaaagaggtcatcagcaaaaaatataacagcggtaataccttattttggatatgcaagacaagatagaaaggttgttccaagaacttccatatctgcaaaacttgtttca

SEQ ID NO: 253042 - DNA, 828 bp, Unknown
  Bacterial polypeptide expressing nucleotide sequence isolated from the Sargasso Sea
atgtagaagttaatgagaatgtaagaggtaaagacacttttattattcaatctaccagtaatcctgctgagaaaaacttaatggaattaattctaatggtggatgctttgaaaagagcttcagcaagatctgtaacagctgtaattccctactttggctactcaagacaagacagaagagtgagatctgcaagagtgcccataagtgcaaaggttattgcagacatgttaagtgaagttggaatttctcgaataattactttagatattcactcagaacagatacaaggattcttttcattcccagttgataatatttataccgcaaacatcatggtgaagggcttacttgaaaaatatgatgttgaggatctacaagttgtatcaccagatacaggtggagttattagagctagatcagtagctaagacattaggagtgcaagatcttgcaataatagataaaaggcgagagaaagcgaatgaatcagaagtaatcaatcttataggtgatgtagaaggaaaagtgtgtatagtgccggatgatttgattgatacagccggaacattaagtaatgcgagtcatgctctaaaagataagggagcaaaagaaataattgcctatattacacatccagtgttatcgggcgatgctattaagaatttaaacaattctgcaatagataaattggtagtatcaaactctatcgatattggtgacaaatctaaaaaatgccctaaaatagacatctttgatatatcacctatattgtcagaggcaattacgcgtatagcaactggtgattcaatcagtgaattatttaaataat

SEQ ID NO: 253043 - DNA, 643 bp, Unknown
  Bacterial polypeptide expressing nucleotide sequence isolated from the Sargasso Sea
agtagttccaagaacatctatttcagcaaaacttgtttcaaatctaattacaaaagctggagcagatagaatcgtaactgttgacctgcatgcaggacagatacagggattttttgatattcctgtggataacctttttgctactccaattttttcaagacatattaaaagaaaaataaaaaccaaaaatttaatttgtgtagcacctgatgtcggaggtgttgaaagagcaagggccttaggtagaaaattagatatagggctagccataattgataagagaagacctgcgccaggaaaatcacaagtgatgaatgtaataggaaacgtcaaaggaaaaacttgtattatagttgatgatataattgattcgggcggtactatagtgaatgcggctgatgccctattaaaaagaggagctaaagaagtccatgtttatattactcatggagttttaagtggtgaagctgttgagaaaattaaaaaatccagaattaaaaatttagttgttactgacactattgataattctgataaagtaaagaaatcaagaaatatagagatattatctatatcaaatttactagcagaggctatgaaaaggattgctaattctacttcagtatctgatctatttaaataa

SEQ ID NO: 253044 - DNA, 910 bp, Unknown
  Bacterial polypeptide expressing nucleotide sequence isolated from the Sargasso Sea
taaagttctagctgagtcaatttcttcatacattggtgttcctttagctaatgcctcaattcgtaaatttgctgaccatgaaatttttgttgaaataaatgagaatataagaggagaagatgtttttataattcaatctacttctcatccagcaaatgatcatttgatggaattattaatttgtatcgatgcagcaaaaagaggttcggcaaaaagaattacagcagttattccatattatggttacgctagacaagatagaaaaactggtcctagaacacctataacagctaaacttgttgctaatcttattacgtcttctggcgccgatagagttttgactatggatttacatgcaggtcaaatacaaggcttttttgatatacctttggataatatattttcagctccaccgataattaaagatatgaaaaaaaagttcaaaaataattcaaatctggttattgcatcacctgatgttggaggtgttgttagagccagggcttttgcaaaaagattgaatgctggattagctattgctgacaaaagaagagaaaaagcaggagaatctgatgtgatgaatattattggtgatgtgaataataaaacatgtattttactagatgatatagcagactctgcaggtaccttgtgtaatgctgcaaaagctcttaaaaataaaggggctaaagaaatcttttcgtatattgctcatggagttttatcaggaaaagcactggaaagaattcaaaattctgcaattgaagaactggtgttaactgatagtattcaagcttctgatttaatcaaaaatataaaaaatattagacatataagcatcgctcctttaatgggggaagcaattaagagaattagcagtgattcatctgtttctgctctttttgactaa

SEQ ID NO: 253045 - DNA, 903 bp, Unknown
  Bacterial polypeptide expressing nucleotide sequence isolated from the Sargasso Sea
tatgaataataaatttgatatctttactggaactgccaatcctgaacttgccaatgatatttctaaaattctaggaattgaaatttcaaaagcagatgttggttatttttcagatggagagattagagttgaaattgaagataacgttagagggcatgatacttttattatccaatcaacttgtactccacaaaataaaaaccttatggagttaatgttacttgcagatgccttgaaaagatcttctgcttcaaaaataactgcgataattccctactatgcttatgcaagacaagatagaagagttagatcagcaagggttccaataagtgctaaggttgttgcaaatatgttttcttccgtgggtattgatagagttctaaccgttgatctacattcagaaacaattcaagggttctttgatatgcctgctgataacgtatatgcaactaaattaatggttgaagatattaaatcaaataatccaaaaaataatatagttgttgtatcaccagatgtaggtggagttgtaagatcaagggcattagcaaaacaattaaatgatgctgaccttgctattattgataaaagacgagcggcagctaatcaatctgaagttatgaatataattggagatattaaagacaaagtatgcatagttccagatgatatcattgatactgcaggaactttatgtaacgctgcgaaagcccttaaagatcaaggtgctttagaagttaaagcttacattactcatcctgtcctttctggacctgctatcgagaggctaaataattcagaaattgatgaactagttgtaacaaattcgatcccattgtcacaagaaggaaaaaaatgcagtaaaatacgcgtcatttctttgagtgcgacgatagctgaatg

SEQ ID NO: 253046 - DNA, 627 bp, Unknown
  Bacterial polypeptide expressing nucleotide sequence isolated from the Sargasso Sea
tctatctcggcaaagttgttgctaatctaattactaacgctggagcaaatagagtattaactgtcgatttgcatgcaggtcaaattcagggattttttgatatgccagtagacaacttatatactactcccctctttgcaaaatatattagaaaaaaacttaataataaaaaattaatttgtgtttcgcctgatgtaggaggagttcaaagaactagaggtcttgcgactagaataaaggctgatttggcaattatagataaaagaagaccggctcctggaaaatcacaagtaatgaatataattggagatgttaagaataaaacttgtatcattgtagatgacataattgatagtggtgggactattgttaatgcggttgatgctttaaagaaaaatggtgctaacgaagttttcgtttttattactcatgctgttttaagcggagatgccgttaaaaaaattaaaaattcaaaaataaaaaaactaataattacagatacaattgataattctcaaaaaataaagaataacaacaaaattgaggtcttatctatatcctctctaatgtctgaggcgattaaaagaatagctaattcaaattcagtttcggatttatttaattaat

SEQ ID NO: 253047 - DNA, 938 bp, Unknown
  Bacterial polypeptide expressing nucleotide sequence isolated from the Sargasso Sea
aataatgaagctacttacaggaaatagcaataaaaatcttagtcaaaaaatatcaaaatttttaaaaacaaaattagttcattcgagtattaaaaaattttctgatggtgaaatatatattgagattaatgaaaatataagaggcaatagtatatttttgattcaatctgtaagttctcctgcaaatgataatcttatggaacttttgctttgcattgatgcacttaaaagatcttcagcaaaaaatattactgctgtaataccttactttggttatgcaagacaagatcgtaaagttgctcccagaacatctatttctgctaaactggtctctaatttaataactaaggcaggtgctgatagagtggttacagtagatttacacgcaggacaaattcaagggttttttgatattcctgttgataacctttttgctacacctatttttgcaagacatataaaaaaaaatgttaaaagaaaaaatttaatttgtgttgcaccagatgttggtggagttgaaagaactagagcacttgctagaaaattagatataggtatagcaataattgacaaaagaagacctgcgccaggaaagtctcaagttatgaatgtaataggtaacgttaataataaaacatgtataataattgatgacataattgattctggaggaacaattgtcaatgctgctcaagctctaattaatagaggtgccaaagaagttcatgtatatataactcatggtgttctaagtggtgaggcggtagaaaaaattaaaaagtcacgaataaaaaatttagtagtaacagacacaattgataattcaaataagttaaaaaaagctaaaaatattgaagtattatcaatttgtaatttattaggagaggcaataaaacgtatatcaaactcaacatctgtgtctgatttatttaaataaa

SEQ ID NO: 253048 - DNA, 360 bp, Unknown
  Bacterial polypeptide expressing nucleotide sequence isolated from the Sargasso Sea
tatgaaaatactttcatgtaatagcaataaagcattatccaagtctattgcagattatatcggaataaaactagctaatgcgtctattcgtaaattttcagatgatgaaattttcgtcgaaataaatgaaaatatacgtggagaagatgtttttataattcaatcaacttctcatcctgcaaatgatcacttaatggaattactgattacaatagatgcagttaaaagaggttctgcaaaacgtatcactgctgtaatgccgtattatggatatgctagacaagatagaaaaacaggaccaagaaccccaataactgcaaagttagttgcaaatttaattacttcagctggtgctgatag

SEQ ID NO: 253049 - DNA, 773 bp, Unknown
  Bacterial polypeptide expressing nucleotide sequence isolated from the Sargasso Sea
aatgaaaataatcacaggtaattcaaacaaaaatcttagtttgaaaatatcaaaatacttaaaaaatagacttgtgcgttcaagtatcagaaaattttcagacggtgaaatttatgttgaaataaatgaaaacatcagaggaaatagtatttttgttattcaatctgtctcttctccagcaaatgataatttaatggaactactgctttgcatagatgcattgaaaagatcatcggcaaaaaatataactgcagtaataccctattttggttatgcaagacaggaccgaaaagttgttccaagaacctctatatcagctaagttagtatctaatttaattacaaaggcaggcgcagatagagtagtaacaattgatcttcacgctgggcaaattcaaggtttttttgatattccagttgataatttatttgctactccaatatttgctcgtcatgtaagaaaaaaaataaaaaataaaaatttaatatgtgttgcgcctgatgtaggcggaaccgaaagagcaagagctttgggtaaatttcttcatgcgggtttagctattattgacaagagaagaccggcgccaggaaaatcagaagttatgaatgttataggaaacgtaaagggcaaaacatgtattatagttgatgatataattgactcgggaggaacaattgttaacgcagcaaatgctttaacagatagaggcgcaaaggaagttcatgtatatgttacccacggtgttttaagtggaaaggcagtacaaaaaatta

SEQ ID NO: 253050 - DNA, 565 bp, Unknown
  Bacterial polypeptide expressing nucleotide sequence isolated from the Sargasso Sea
atgtctacaaaaatcttatcttgcaacagcaatcgaccgttggctgatgcaatctcaaagtatatggagcttcctctcactaaagcagatgttcgaagattttcggatatggaagtttttgtggaaattcaagaaaatgttcgtggggaagacgtttttataattcaatcaacatcctcaccaacaaatgataatcttatggagttactagttgctctagatgccttaaaaagaggttcggccaatcggataacggccgtcattccctactatggatatgctaggcaagatcgaaagtcaggtcccagaacacctatttctgcgaagctagttgctaatcttataacggttgctggcgcccatagagtgctaacagtcgatctacatgctggccagattcaaggtttttttgacatcccaactgataatctttttgcagccccagtatttcaatccgacatcaaagagaaatatggtgataagtcacttgttatagtatcaccagatgtgggtggagtggtacgagctagagctcttgctaggagcttagatgctgaccttgcaa

SEQ ID NO: 253051 - DNA, 874 bp, Unknown
  Bacterial polypeptide expressing nucleotide sequence isolated from the Sargasso Sea
ttcaaaatcatatggccaaaaacttggaaatattgctatttcaaaatatagtgacggtgagtttcaaccttcattcgaagaatcgatcagaggagcgaggatatttataatcggatcaacacatcctaactctgaaaacctaatgcaactattgttaatgcttgacgcagcaaaaagatcttcagcaagacatataactgcagttatcccttactttggatgggcaagacaagatagaaaggataaaccaagagttcctattggagctaaattaatagcaaaattaattgaagctgctggagcaaccagaataataacaatggatttacatgcagaccaaatacaagggttttttgaaaaacctgttgaccatttatatgcttcttcaatatttattccatacgttgaatcactgagattgaataatttaactatggcatcccctgatatgggaggatctaaaagagcctatgcttactcaaaatttctaaaaagtgatgttgtaatttgctacaaacaaagagcaaaatctaatatcgttacccatatggaagtaattggcgatgttaagggaaagaacattattttggttgatgatatggtcgatactgcaggaacactaacaaaagctgcagatttaatgattgaaagaggtgctagttcagtaagagctatatgcactcacgctattctctccggaaatgcgattgaaaaaattgagaactctaatttattagaattaattgtaactgactcaattccatcgaatcaatcaagtccaaaaataagaattttaagttgtgctccattatttgctgaagtaatgaaaaatgtacacaataatttatcaataagctcaaattttattacataa

SEQ ID NO: 253052 - DNA, 337 bp, Unknown
  Bacterial polypeptide expressing nucleotide sequence isolated from the Sargasso Sea
atgaaagttcttgctggtacaagtaattcaagattgtgcaaaaatatagcaagacatctcaaactaaaattagtcaattcaaacattaaaaggtttgctgatggtgaagtttatatcgaaattaatgaaaatattagaggtaacagtatatttgtaattcaatcaacatccaatccagctaatgataatttaatggaactcttaatttgtattgatgcactaagaagatcctcagctaaaaatattacggcagtaattccttattttggatatgcaagacaagatagaaaagtagtaccaagaactgcgatatcagcgaaattagtttccaatctta

SEQ ID NO: 253053 - DNA, 309 bp, Unknown
  Bacterial polypeptide expressing nucleotide sequence isolated from the Sargasso Sea
catgaaaattttatctggaactagcaaccttaagcttagcaaggatatttctaaaaatcttaaacttaaactaattaatactaacataagaagattcgcggacggtgagatctatattgaaattaatgagaatattagaggtaatagcgtttttgtagttcagtctacttctaatccagctaatgacaatattatggaacttcttttagtaatagatgctcttagaagatcttcagctaaaactattactgcagttattccttactttggttatgcaagacaagataggaaagtagctccaagaacatc

SEQ ID NO: 253054 - DNA, 640 bp, Unknown
  Bacterial polypeptide expressing nucleotide sequence isolated from the Sargasso Sea
ttcgcggacaccgatctcggccaaactggtcgcgaacttgattacgaccgcaggcgccgatcgggtcctcaccatggacctgcatgcgggccagattcagggcttttttgatattccgactgataacttgtatgccgcgccggttttcggtcgcgacattgaggaagcgttcgacgacgatcaagagacgattatcgtctcccccgatgtcggtggcgtggtccgtgcccgatcaatcgcgcgacgcatcgatgccgaccttgctattatcgacaagcggcgtgaaaaggctggcgtttccgaagtgatgaacatcattggcgatgtgaagggtaaacgctgcatcctcgttgacgatattgtcgattccgccggcaccttgtgtaacgcggcggtcgctttgaccgacgcaggcgctacgtcagtatgcgcctatgtcacgcatggtgtgttgtctggaggggccgtggcgcgagtgtcatcctcgccgctcgaaatgatggttacgacagacagtattctcgcgacagaagcggtccgggtggctcaaaacattcgtcaaattactattgcgccgctcctagcggaggcgatcatcaggatcagtagttcacaatccgtatcgagtctgtttgattga

SEQ ID NO: 253055 - DNA, 598 bp, Unknown
  Bacterial polypeptide expressing nucleotide sequence isolated from the Sargasso Sea
gttaaccagtatgggagttgagagattattaaccattgatttgcacgccgatcagatacaaggatttttcgatataccagttgataatatttatgctactcctctatttttagcagatatacataagcaaaattatgacgatgttattgttgtatcacccgatgtcggcggtgtagtgcgcgcaagagctctagctaaacaactcaatactgatcttgcaatcgtagataagagacgtcctgaggcaaatgtctctgaggtaatgcaaatcatcggtgatgtcaaagataaatgttgtgtgatagttgacgatatatgtgatactgctgggacactatgtcacgcagcagacgcacttaaagataagggtgcatcagccgtatatgcgtacataacacatcccatattttcaggtaaagcagaccaaaatattatagaatcaactattgatagcataattgttacagatacaattaaactgtcgaaaaaaatcgtggatactgaaaaaatcaggcagattaccgtctcggaaatgcttgcagagaccctgagacgtatcgataataaagaatctgttagttcacttttcgtagaataa

SEQ ID NO: 253056 - DNA, 754 bp, Unknown
  Bacterial polypeptide expressing nucleotide sequence isolated from the Sargasso Sea
aatgataatttaatggaattattgttatgtatcgatgctttaaagaggtcatcagcaaaaaatataacagcggtaataccttattttggatatgcaagacaagatagaaaggttgttccaagaacttccatatctgcaaaacttgtttcaaatttaattactaaagctggtgctgatagagtggtaactgtagatttgcacgcaggccaaattcaaggtttctttgacattcctgttgataacttattttctactccaatttttgcgagacacgctagaaagaagattaaaagtaaaaaaattatttgtgttgcgcctgatgtaggaggaacagaaagagctagagctcttggaaaacttttaaatgtaggactagctattgttgacaaaagaagacctaaacctggacaatcacaagttatgaacgttatcggtgatgtaaaaggtcaaacctgtattatagttgatgacataatcgactcaggtggcactattgttaatgcagcaaaagctttgaaatctcgtggtgcaaaagatgtgtacgtttatattactcatggggttttaagtggagatgcaattaaaaaaattaaaagttcagtaattaaaaatttagttataactgatacgatagacaatgttcataaaactaaaaatgttaaaaatattgaggttttaccgatatcaggtcttatgggtgaagcaataaagagaatttcaaattcaacatctgtatcagatttatttaaataaa

SEQ ID NO: 253057 - DNA, 382 bp, Unknown
  Bacterial polypeptide expressing nucleotide sequence isolated from the Sargasso Sea
tttgcaattattgataaacgaagagcagctgctaatgaatcagaggtaatgaatatcattggtgacgttaaaggaaaaacttgcattgtgcctgatgatattattgatactgctgggacattgtgtaatgcagcccaagccttaaaagaagctggcgcatcaaaggttaaagcttatattacgcatcctgtgctttccggtcctgcaattgaaagaattaatgattcatcaattgatgaattagttgtaacaaattccattcctctttcgcaagaagcagaaaaatgcagtaaaatacgcgtcatttctcttgcacccaccattgctgagtgcattagaagattgaataatgaggagtcgctgagcgcactcttcctataac

SEQ ID NO: 253058 - DNA, 411 bp, Unknown
  Bacterial polypeptide expressing nucleotide sequence isolated from the Sargasso Sea
catgaaaattttatctggaactagtaatcctaaactaagcaaagaaatttcaaagttgcttaaacttaaacttgtaaatacaaatattaaaagattttccgatggtgaaatttatattgaaataaatgaaaacataagaggaaacagtgtgtttgtaattcagtcaacatcgcaccctgccaacgataacttaatggaattacttctttgcatagatgctctcagaagatcttctgcaaaaaatattacggctgtaattccttactacgggtatgcaagacaagatagaaaagttgtcccaagaacttctatctctgcgaaagtagttgcaaatttaatcacaaatgcgggcgcgagtagagttgttacagtggatttacatgcggggccaatacagggattttttgatat

SEQ ID NO: 253059 - DNA, 811 bp, Unknown
  Bacterial polypeptide expressing nucleotide sequence isolated from the Sargasso Sea
aatgaaaatattagaggtaatagtatattcgtagtccaatcaacttctaaccctgctaacgataacttaatggaattattaatttgtatagatgcattaagaagatcttcagcaaaaaatattaccgctgtgattccatattttggatatgcaagacaagatagaaaagtagttcctagaactgcgatctctgcaaaattagtttctaatttaattacaaatgctggtgcaaatagaatactgagtgttgatttgcatgctggccaaatccaaggtttctttgatattcctgtagataatttgtttgctacgcctatttttgcaagacatattaaaaacaaaagtaaactaaagaatgttatttgtgttgctcctgacgtaggtggagttgaaagaactagagccttaagtagaagaataaattcttcaattgcaattatagataaaagaagaccaactccaggaaaatctgaggtaatgaatcttgtgggaaatgtaaaaaataaaaactgtattatcgttgatgatataattgattctgggggaacaattgttaatgctgctagagctcttaaagaaaaaggagcaaaagatgtttatgtatatattactcatgccgtactaagcggaaatgcagtagaaaaaataaatgactcaaaaattaaaaaattaattaccacagatacaattgataattcaaaaaaaattgcaaaaagtaataaaattgaaataatttctattgccccaatgatttcggaagcaatgaaaagaatcgcaaactctacgtcagtttctagtctttttaaataat

SEQ ID NO: 253060 - DNA, 583 bp, Unknown
  Bacterial polypeptide expressing nucleotide sequence isolated from the Sargasso Sea
atgagaattattgcaggaaccagcaatttacccctatctaaaaaagtcgccaaatatctaggtgacaagattactgacgcatcaatcagaagatttgctgacgaagaggtgtacgttgaaatcaaagaaaatattcgaggggaggatgtatttataattgagtctctttcgtaccctgcaaatgacaatttaatggagcttttagtcataattgatgctttaaaaagagcttctgcaaaaagaattactgctgttattccatactacggatacgctagacaagatcgaaaaccaggtccgagaactcctatatctgcaaagttagttgcaaacttaattactactgctggagctgacagagtattaactttagatttgcacgctgaacaaatacaaggtttctttgacatacctacagataatctttttgctggtcccgtcttcgcaaaagatattaaagaaaaatataacattaataatctcaccgctgtttctcccgatattggtggggttgttagggctcgagcaatagcaaataaacttggcgcttctattgcaatagttgataaacgtagacctaaag

SEQ ID NO: 253061 - DNA, 815 bp, Unknown
  Bacterial polypeptide expressing nucleotide sequence isolated from the Sargasso Sea
aattaatgaaaatattagagggaatagtatttttttaatccaatctgtttcatctccagcaaatgataacctaatggaactactattatgtattgacgctcttaaaagatcatcagcaaaaaatattactgcggttgtcccttactttggttatgctagacaagatagaaaagttgcaccaagaacatcaatatcagcaaaacttgtatcgaatctaattactaaagcaggagcggatagagttgtcactgttgatttgcatgcaggacaaattcaaggattttttgatattccagtagataacttgtttgcaacgccaatatttgcaagacatgtaaaaaaaaagataaaaagtaaaaatctaatttgtgttgcaccagatgttggtggaactgaaagagcaagagcgctaggtaaactcttaaatgttggattagcaattgtagataaaagaagaccaaagcctggacaatctcaagtaatgaatattattggagatgtgaaaggaaaaacttgtattcttgttgatgatattatcgattctggtggaacaatagtaaatgcagctaaagctcttaaagatcgaggtgccaaagaagtttatgtttacataactcacggtgtacttagtggagaagctgtaaataaaattaaaaattcagtaattaaaaatttagtaataactgacacaattgataacattaacagggttaaaggtgctaaaaacattgaggttctgtcaatttctagccttatgggtgaagcgattaaaagaatatctaattcaacttcagtatcagatttattcaaataaa

SEQ ID NO: 253062 - DNA, 814 bp, Unknown
  Bacterial polypeptide expressing nucleotide sequence isolated from the Sargasso Sea
ataaatgaaaatataagaggtaatagcatatttataattcaatcaatttcttatccagccaatgataatttgatggagttgcttttatgtattgatgctcttaagagatcttctgcaaaaaatattactgctgttattccatattttggttatgcaagacaagatcgtaaagttgttccaagaacatcaatatctgcaaaacttgtttcaaatttaattacaatggctggtgcaaacagaatagtaaccgttgatcttcatgcgggccaaatacaaggtttctttgacataccggttgataacctattttcaactccaatttttgcaagacatataaaaagaaaaataaaaaataaaaatttaatatgtgtggctcctgatgttggaggtgttgaaagagcgagagctcttggaagaaagttagatgttggactttctataattgacaaaagaagaccttctcctggcaaatctcaagtcatgaatgttataggtaatgttaaaggtaaaacctgcattatcgttgatgatataattgattcagggggaactatagttaatgctgcagatgcactaaaaaaaagaggcgcaaaagaagttcatgtttatgttactcatggcgttttaagtggagaggcggttgaaaaaattaaaaaatcaaaaattaaaaacttggttgtaactgatacaataaataactctgataaggcaaaaaaagcaagaaatatagaggtattaacaatatcaaatttattagctgaagcgatgaaaaggatttctaattcaacttcagtttctgatctctttaaataat

SEQ ID NO: 253063 - DNA, 421 bp, Unknown
  Bacterial polypeptide expressing nucleotide sequence isolated from the Sargasso Sea
atgaaattattaacaggaaatagcaataaagttttaagtaaaaacattgctaaatatttaaaaacaaagctggtaaattcaagtattaaaaagtttgctgatggagaaatttatatagaaataaatgaaaatataagaggcaatagtattttcattgttcaatcaatttcatccccagctaatgataatttgatggaattattattatgtattgatgcgctaaaaagatcttctgcaaaaaatatcactgctgtaataccttattttggctatgctcgacaagacagaaaagttgttccaagaacatcaatctctgcaaaactagtttcgaatttaattacaaaagccggtgctgatagaattgttaccgttgatttacatgcaggtcaaattcaaggtttttttgatattcctgtagata

SEQ ID NO: 253064 - DNA, 664 bp, Unknown
  Bacterial polypeptide expressing nucleotide sequence isolated from the Sargasso Sea
atacgcccgtcaggataggaagccagggcctcgcacaccgatttccgctaagttagtagccaacttgattacaacggcgggtgccgatagggttttgaccttggatcttcatgctggtcagatccaaggtttttttgatattccggtagataaccttatctcggctcccgtgatggaggcagatattaagctgcaatttccgggggaaagcttggtggttgtttcgcctgatgttggtggtgtggtgagagcacgcgccatagctaatcggattgacgcagatctcgccatagttgataaaaggcgcgaacgggctggcatttccgaggtgatgaatataattggagacgtggaaggaaggcgttgtattctcgtggacgatataatcgattctgcggggacagtttgtaatgcggcgaacgcgctccgggaagctggggcaacttcggtggtggcatatgttacccacggagtgttatcgggcggagcagttgcccgtgttgcctcgtcttcgctggaaaaacttgtgattacagatagtatacaggcgacgcagcctgtggaactggcagagaatattagggtgctttctatagctgacctgatcgctgaggcaatgaagagaataagtgaggaaacgtctgtttctagtctctttaaataa

SEQ ID NO: 253065 - DNA, 746 bp, Unknown
  Bacterial polypeptide expressing nucleotide sequence isolated from the Sargasso Sea
ggaaataatgttaattgctgatgcattaaagagatcatcggcttcaagaattactgcagttgtcccatattatggatatgcaagacaagatagaagagtaagatctgcaagagttcccattagcgcaaaggttgttgctgatatgtttgcatctgttggtattgatagagttttaactattgaccttcactcagagacaattcaaggtttttttgacatgcctgctgataatgtttatgcaacaaaatttatggtcgacgatattaaagataataatgatagaaatgaagttgttgttgtatctccagacgttggtggagttgtaagatcaagagcgcttgcaaaattattagatgatacagatttagctattattgataaaagaagagccgtagcaaatgaatctgaggttatgaacatcattggcgaagtcgaaggaaaggtttgtatagttccagatgacattattgatactgctggaacactttgtaatgcagcaaaagcattaaaagataatggtgcaaaggctgtaaaagcatatattactcatccagttctatctggaccagcaatagaaagattgaataaatctgaaattgacgaattaattgttactaattcaattcctttgaacaaagacgctaaaaaatgcagtaaaatacgcgtcatttcaattgctaacataattgctgagtgtataacacgtctaagtaatgaagagtcattgagtgaaatgtttttataga

SEQ ID NO: 253066 - DNA, 820 bp, Unknown
  Bacterial polypeptide expressing nucleotide sequence isolated from the Sargasso Sea
tatgaaaataatcgcctgtaatagtagcaaatctttagcagaaaaaatttcaaagcatattgatgttccattagcagacgcctctgttagaacttttaatgatagagaaatatttgttgaaataaatgaaaatattagaggtgaagatgtttttattattcaatctacatcacatccagcaaatgaccatttaatggaacttttaattactattgatgctgcaagaagaggttcagcaaaaaggattactgctgttatcccatattatggatatgcaagacaagatagaaagactgggcctagaacaccaatcactgccaaacttgttgcaaatttaattacatccgctggtgctgatagggtattaacaatggatctgcatgctggtcaaattcaaggtttttttgatattcctttagataatattttttctgttagacctataatcgatgatgttaaagaaagatttaatggaaacaaagatttagttgttgcttcacctgatgttggtggtgttgttagggctagagcttttgctaagaggttagaggctggactagcaattgccgataaaagaagagaaaaggctggtgagtctgaagtaatgaatattattggagatgtaaaagataaaacttgtatcttactagatgatattgctgactctgcaggcacgctatgtaatgctgctgaagctctaagtaaaaatggtgctaaagaaatttattcctatattgtacatggagtattatctggagatgcacttaaaaagattgaaaattcaagcataaaagaattggtattaacagacacaaattga

SEQ ID NO: 253067 - DNA, 961 bp, Unknown
  Bacterial polypeptide expressing nucleotide sequence isolated from the Sargasso Sea
gatttagttgatgctcgaattgaaagatttaacgaccaagagatttttgtagaagttttcgaaaatgttcgtggcgaggacatgtttataattcaatcaacatctaatcctgccaacgataatctcatggagcttctcattatggtcgacgctttgcggcgctcatcagccagccgtattacggcagtaattccttattttggctatgcgaggcaagatcgacgatcaaaagcccgaacccccataagtgctaaacttgtggctaatttgttagtagaggcaggagtggaaagaattctaacactcgatcttcatgctacgcaaatacaaggtttttttgatatacctgtagacaatttatatgcagcaccggttttcgctttagatattattcaccagttttctaataaacttaacgacgtaatggttgtttctcccgatgttggaggggttgctcgggctagagaactggccaaacggataaatgccccgctttctattgttgataagcgaagagaaagagctggagaagtggccgaaatgacaatcatcggcgatgtcacaggtaagaaatgtattattgttgacgatatttgcgatacagccggtacactttgtaaagcagccgaagtccttatagaaaatggcgccgcggaggttcattcttacatcacccatggggtactatctggaccagctgttgaaagaataagtaattctgtgatgaaatctttagttataacagactcaattcaagccacaggtccagtagcaaaagctacaaatattagaatagttccaaccgctccaatatttgctcaagctattctcaatatttggaatggaacctcggtttcatcactattcgaaacagaaaccttggagccgatttatgatggtcaattacaaagattgttgtaccaaattgataaacgtcaaattttagtcactaaaatctgaa

SEQ ID NO: 253068 - DNA, 876 bp, Unknown
  Bacterial polypeptide expressing nucleotide sequence isolated from the Sargasso Sea
aatgaaaattattgcctgcaacagtaataaaatattagctgaatcaatttccacatacattggtgttaaactagctaacacctctctaagaaaatttgcagatagagaaatatttgttgaaattaatgagaatattagaggtgaagatgttttcattatccaatcaacttcccaccctgctaatgaccatcttatggaattactaattaccattgatgctgcaaaaagagggtcagcaaaaagaatcacagctgttataccttactatggatatgcacgtcaggatagaaagactggtccccgaacaccaattacagcgaagcttgtagctaatctaattacatccgcaggagctgatagagtattaacaatggacttacatgcaggtcaaatacaaggtttttttgatatcccattagataatatattctcagccccaccaataattaaagatatgaaaaataatttctctaacaatagtgacttagtaattacttcacccgatgttggtggtgtggtaagagcaagagcttttgcaaaacgtttaaacgcaggtttagcgattgctgataagagaagagaaaaagcaggcgaatctgaagtaatgaatatcataggtgacataaaacacaaaacatgcattttacttgatgatattgctgactctgcaggcaccttgtgtaatgctgccaaagcattgaaagaaaatggagcaaaggaaatctattcatacatagctcatggagtattatctggagaggcactaaaaagaattgaaaactccgcaatcaaagaattagtcctgactgatagtattcaagcatcaaatgaggtaaaaaatacaaaaaatattagacatattagtattgctccttt

SEQ ID NO: 253069 - DNA, 791 bp, Unknown
  Bacterial polypeptide expressing nucleotide sequence isolated from the Sargasso Sea
aatgaaaattcttacaggaaatagcaacaagcagctaagtaataaaatttcaaaaaatcttaaaaataaattagtaaatacaagtataaggaagtttgcagatggagaaatttatattgagattaatgaaaatataagaggaaatagtatttttataattcaatctgtatcctcaccagcaaatgataacctgatggaactacttctttgcattgatgcacttaaaagatcctcggcaaaaaatattacaaccgtaataccttatttcggttatgcaaggcaggatcgtaaagttgtaccaagaacatctatatccgcaaaattagtatcaaatttaataacaaacgcaggagctgatagagtagtaacagtagatttgcacgctggacaaattcaaggtttttttgatattcctgtagataacttatttgctactccaatttttgcaaagcatattaaaagaaaagttaaaagcaaaaatattatatgtgttgcacccgatgtgggtggagttgaaagggcaagagccttaggaaaaaaattagatgttggactagcaatagttgataaaagaagacctagtcctgggaaatcacaagttatgaatgttattggaaatgttaaaaataaagtctgtattttaaccgatgatataattgactctggtggaactatagtaaatgcaagcgatgtcttattaaaaagaggtgcgaaagaagttcatgtatatgcaactcatggagtttttagtggagatgcagttaaaaagataaaaaattcaaaaattaaaa

SEQ ID NO: 253070 - DNA, 553 bp, Unknown
  Bacterial polypeptide expressing nucleotide sequence isolated from the Sargasso Sea
atgaaattattaactggaaatagcaacaaagttcttagtaagaatatcgctaaatatttaaaatcaaaacttgtaaattcaagcattaaaaaatttgctgatggagaaatttatgtagagataaatgaaaatataagaggaaatagtatttttataatacaatctatctcttctcctgctaacgataatctaatggaattattactatgcatcgatgcactcaaaagatcgtctgcaaaaaatataactgctgtaattccttattttggatatgcaagacaagacagaaaagttgttccaagaacatccatctccgctaaactagtttcaaatttaattacaaaagcaggtgctgacagagttgtgactgttgacttgcatgcaggacaaattcaaggtttctttgatattccagttgacaaccttttcgcaactccaatatttgctagacatgcccgtaaaaaaatcaaaagcaagaaaattgtttgtgttgcacctgatgtaggtggaacagaaagagctagagcgcttggaaaacttcttggcgttggcc

SEQ ID NO: 253071 - DNA, 784 bp, Unknown
  Bacterial polypeptide expressing nucleotide sequence isolated from the Sargasso Sea
gagaatataagaggaaccagtgtttttgtaatacaatctacatcaaatccagctaatgacaatctaatggaattattattagtaatagatgcattaagaagatcttctgcaaaaaatattactgcggtgattccatactttgggtatgctagacaggataggaaggtagtgcctagaacttcaatttctgcaaaagttgcttcaaatattattactcaagccggtgccagcagagttgtgacggtagatttacatgcaggacagatacaaggattttttgatgttccagttgataatttatttactacacctctttttgcaagatatattaaaaaaaagctaaaaaataaaaatttaatatgtgtctcccccgatgttggaggtgtacagaggacaagagggctcgctacaaaaataaatgcagacttagcaataattgataaaagaagatctgcccctggaaaatctgaagtaatgaatataataggtgatgttaaaaagaaaacttgtatcattgttgatgatataattgatagcggtggaacaatagtaaatgctgtggaggctcttaaaaaaagcggggccgatgacgtttatgtttttattactcacggcgttttgagtggtgaagctgttagcaaaattaaaaaatctaaaattaaaaagttaataataacagatacaatagataactcgaaaaaaattaaaaatattaataaaattgagctaatatcaatagcttctttaatggctgaggcaattaagcgtatatctaattcaactt

SEQ ID NO: 253072 - DNA, 481 bp, Unknown
  Bacterial polypeptide expressing nucleotide sequence isolated from the Sargasso Sea
atgaaaataatcgcctgtaatagtagcaaatccctagcagaaaaaatttctaaacatattgatattccattagcagatgcctctgttagaacttttaatgatagagaaatatttgtcgaaataaatgaaaatattagaggtgaagatgtgtttattattcaatcgacatcacatccggctaatgaccatttaatggaacttttaattacaatagacgctgcaaggaggggatcagcaaaaaggattactgctgttattccatattatggatatgcaagacaagatagaaagactggacctagaacaccaatcactgccaaacttgtagcaaatttaattacatccgcgggtgctgatagagtattaacaatggatttacatgctggtcaaattcaaggtttttttgacattcctttagataatattttttctgtaagaccgataatcgatgatgttaaagaaagattaacggaaacaaaga

SEQ ID NO: 253073 - DNA, 763 bp, Unknown
  Bacterial polypeptide expressing nucleotide sequence isolated from the Sargasso Sea
taacagtatatttattattcagtcaatatcgtctccggccaatgataatttaatggagctattactttgtattgatgctttaaaaagatcctctgcaaaaaatataactgctgtaataccttattttggatatgcgagacaagatagaaaagttgttccaagaacatcaatttcagcaaaactagtttcaaatttaattacaaaagctggtgctgatagagtagtaaccttagatttacattctggtcaaatacaaggtttttttgatattcctgtggataatctttatgcaactccaatattcgcgagacacattaaaaaaaagataaaaacaaataatttaatttgtgttgcacctgatgtcggtggtacagcaagggcaagagcattaggtaaaatgttaaatattgatttagcaataattgataaacgtagaccaaagcctggcaaatcagaggttatgaatgtaataggaaaggttaataacaaaacatgcataatagttgacgacattatagattctggaggtacaatagttaatgctgcaaaggcactaaaaaataatggtgctaaagatgttcatgtctattgctcacacggagtattgagtggaaatgcggtagagaaaataaaaaattctaaagtaaagaatttggttattacagatacaattgataatattgataaagtaaaaaaggctaaaaatattgaaattttaactatttcgcaattagtaggtgaagccattaaaagaatatcaaat

SEQ ID NO: 253074 - DNA, 412 bp, Unknown
  Bacterial polypeptide expressing nucleotide sequence isolated from the Sargasso Sea
atgaaattagtatctggtaattcaaatataaatctagctgagaatattggtaagtatttagacacgcctttagcagattgtactgtcaaaaaattttctgataaggaaattttcgttgaaatgaatgaaaattgtagaggtgaagatgtttttattattcaatcaacatcttttcctgcaaatgataatttaatggaacttcttattttaattgatactctaaaaagagcttcagcaaaaagaattacggctgttattccttattatggatacgccagacaagatagaaaacctggaccgcgaaccccaataacagctaaattagttgctaatctaatcgccaaatcaggagcagatagagtattaagcatggatttacatgcaggtcagattcaaggtttttttgatattc

SEQ ID NO: 253075 - DNA, 820 bp, Unknown
  Bacterial polypeptide expressing nucleotide sequence isolated from the Sargasso Sea
atggcaaatcaggacccaatagcaaaaatcttttcatgtactcaaagtacagatctttctaaaaaaattgctaaatatttcggcactgaacttggtaatgtaaatttttcacactacagtgatggagagttccaaccttcatttgaggaatcagtaagaggggctagattatttataatcggatctactcaaccaaactcggaaaatttgatggaacttctcttaatgatagatgctgcgaaaaggtcttccgcaagacatattacagctgtaataccatattttggttgggctagacaagatcgtaaggataaaccaagagttcctattggtgcaaaattaatagctaatctaattgaagctgcaggtgctacaagattaattacaatggatttacatgctgatcaaattcaaggattttttgaaaaacctgttgaccacttatatgcatcaactattttcatcccttatatccaatcgctgaacttaaaaaaattaactattgcatcacctgatatggggggttctaaaagagcatatgcctactcaagatttttaaaaagtaatgttgttatttgctataagcaaagaaagaaagctaatgtggtttcgcatatggagttaattggtaaagtagaaggtaaaaatgtcataattgtagatgatatggtagatactgcaggaaccctaacaaaagctgcagatttaatggttgaaagaggtgctaaatcagttagagctatatgtactcatggtatactttctggaaaagcctatgaaaacatagaaaaatccaagttaaaagaattgatagttacag

SEQ ID NO: 253076 - DNA, 903 bp, Unknown
  Bacterial polypeptide expressing nucleotide sequence isolated from the Sargasso Sea
aatgaaattactaactggaaatagcaataaagttctcagtaaaaatatagccaaatatttaaaatctaagcttgttaactctagtattagaaaatttgcagatggtgaaatatacgttgaaataaatgaaaacatcaggggaaacagtatttttattattcaatctatttcatctccagcaaatgataatttgatggaactattattagtcatagatgctctaaaaagatcttcggcaaaaaacataactgcagttattccatattttggttatgctagacaagataggaaagttgttccaagaacttcaatatcagcaaaacttgtttccaatttaattacaaaagctggagctgatagagttgtgactgttgatttacatgcaggtcaaattcagggtttctttgatatacccgtagacaacctgtttgctacaccaatatttgcaagacatgtgaaaaaaaaagtaaaaagtaaaaaaattatttgtgttgctcctgatgtaggagggactgaaagagcaagagctctaggaaaacttctcaatgttggtcttgctattgttgataaaagaagacctaaacctggtcagtctcaagttatgaacgttattggagatgtaaataacaaaacttgtataatagtagatgatataattgactcaggtggaacaatagtaaatgctgctaaagcgttaaaagaaagaggagctaaagaagtttatgtttatattactcatggagttttaagtggggaagctgtaaaaaaaataaaaaaatcagtaatcaaaaatttagtaatcactgacacaatagataatggtgaaaaaactaaaaatgttaaaaatatagaagttttacctatttctgggcttatgggagaggctataaaaaagaattcaaa

SEQ ID NO: 253077 - DNA, 466 bp, Unknown
  Bacterial polypeptide expressing nucleotide sequence isolated from the Sargasso Sea
ccgaaagatacccctataattgtttcgcccgatgttggaggtgtcgttagagcaagaattatagctaaaagaattggcgctgatcttgcaatagttgataagagaagagaaagagctggagaatctgaggtaatgaatattattggtgatgttgaaggaagggaatgctttatgattgatgatattgttgactctgcaggtacactctgtaatgcatctgatgctcttattaaacagggggctacaaaagtatactcatatgtaacacatggtgtgctctcgggaaaagcagttgaaagagtaaataactcatccttaacaaaattattaattactgacacaattgaagagtcagatgcagtaaaaaaatcagataaaattgatgttatttcaatttcaccccttcttggagaagcaattaaaagaatatctgacgaaaaatctgtatcaagtttgtttgattaac

SEQ ID NO: 253078 - DNA, 807 bp, Unknown
  Bacterial polypeptide expressing nucleotide sequence isolated from the Sargasso Sea
cctgagtaaaaaaatatctaaatatcttataaataaacttgtcaattcaagtataaaaaaattttctgatggtgaaatttatatagaaataaatgaaaatattagaggcaatagtattttcattatacaagcaatatcttcgccggctaatgataatctaatggaacttttattatgcattgatgcactaaaaagatcatccgcaaaaaatataacagctgtaataccttattttggttatgctagacaagatcgtaaagttgttccaagaacttctatttccgcaaagcttgtttcaaatttaattacaaaagctggagcggatagaattgtaacagttgatctgcacgcaggtcaaattcaaggatttttcgatattcctgttgacaatcttttttcaactccaatcttcgctagacatattaagagaaaaattaaaagtaaaaatttaatttgtgtagctcctgatgttgggggagttgagagaaccagagctttaggaagaaaattagatgttggattagcaataattgataagcgaagaccttctccaggtaagtcacaagtaatgaatgttattggaaatgttaaaggaaaaacatgtataattactgacgatataatcgactcaggtggaacaattgtaaatgctgcagacgcattaattaaaagaggcgcaaaagaagtttatgtttatgtaacccatggagttttaagtggggaagcggttgaaaaaattaaaaattccaaaattaaaaatttagttgtaacagacactatagataactcggataaagtaaaaaaatc

SEQ ID NO: 253079 - DNA, 670 bp, Unknown
  Bacterial polypeptide expressing nucleotide sequence isolated from the Sargasso Sea
tttggttatgctagacaagacagaaaggtagtacctagaacgtcaatttctgcaaaattagtatcaaacctaattacaaaagcgggtgctgacagagtagttactgttgatttacatgcaggtcaaattcaaggtttctttgatattccagtagacaacttgtttgcaacacctatttttgcaagacatgcaaaaaaaaagataaaaagtaaaaacctaatttgcgttgctccagatgtgggtggaaccgagagagcaagagcgctaggtaaactgttaaatgttggattagcaattgtagataaaagaagaccaaaacctggtcaatctcaagtaatgaatgtgataggtgatgtaaaaggtaaaacttgtataattgtggatgatataattgattctggtggaacaatagtaaatgcagctaaagctcttaaagatagaggggctaaagaagtttatgtctatataactcatggtgtactcagcggtgaagctgtaaaaaaaattaaaaattctgtaattaaaaatttagtgataactgatacgatcgataacatgagcagaactaaaggtgttaaaaacattgaggttctgtcaatttcagggcttatgggagaagcaattaaaagaatatctaattcaacctcagtatcagatttattcaaataaa

SEQ ID NO: 253080 - DNA, 685 bp, Unknown
  Bacterial polypeptide expressing nucleotide sequence isolated from the Sargasso Sea
aatgaagattattgcctgcaatagtaataaaattttagctaaagcaatttgcacatatattggggtggatttagcaaatgcctcacttagaaaattcgcagatagagaaatattcgttgaaattaatgaaaacataagaggagaagatgtttttataattcaatcaacatcacatccagcgaatgatcatcttatggaattattgattacaatcgatgcagctaaaagaggctcggcaaaaagaatcactgccgttattccttattatggatatgctcgtcaagataggaaaacgggaccgcgcacacccattactgcaaaacttgtggcaaatttaataacttcagctggagctcatcgagttttaacaatggatttacatgcaggacaaatacaaggtttttttgatattcctctagataatattttttcagctccaccaataataaaagatatgaaagaaaaattctcaaaaaattctaatttagtcattacgtctccagatgttggtggtgttgtgagagctagagcttttgctaaaaggttaaatgctggtttagcgattgctgataaaagaagagaaaaagctggagagtctgaagtaatgaatattattggtgacgtaaaaggaaagacatgtattttattagatgatattgctgattctgctggcactttatgtaat

SEQ ID NO: 253081 - DNA, 385 bp, Unknown
  Bacterial polypeptide expressing nucleotide sequence isolated from the Sargasso Sea
tgggttggctattgttgataaaagaagaccgaagccaggtcaatctcaggtaatgaatattattggagatgtgaaaggaaaaacttgtattcttgttgatgatatcatcgactccggcggaacaatagtaaatgcagctaaagctcttagagaccgaggtgcaaaagaagtttatgtttacataactcatggtgtacttagtggagaagcagtaaaaaaaattaaaaattctgtaattaaaaatttagtaataactgacacaattgataatatgaaaagggttaaaggtgctaaaaacattgaggttctgtcaatttctagccttatgggtgaggcgattaaaagaatatcaaattcaacttcagtatcagatttattcaaataa

SEQ ID NO: 253082 - DNA, 832 bp, Unknown
  Bacterial polypeptide expressing nucleotide sequence isolated from the Sargasso Sea
aaaagtagaaatacttgagaatgtccgaggacatgaagcatatattattcaatcaacttgtgcgccgactaactcaaatttaatggagttaatgttaatcactgatgctttaaaacgctcctctgcatccagaatcacagcaattcttccctattatggttatgctcgtcaagacagaagggttagatcagcaagagttcctattagtgcaaaagttatagctgatatgatgaattctgttggtgttgacagagtgctaactgtagaccttcactcagaatctatccagggtttttttgatatgcctgcagataatgtatacgcaaccaagattatgcatgacgatatcaaggcaagatcttcacaggatgaggagatcttagttgtttctccagatgttggcggagttgtaagagctagggcgctagcaaaatttttagatgaatccgatcttgctattattgataaaaggagagctactgcaaatgaatctgaagtaatgaatataattggggatgttcaagggaaatgttgtattgttcctgatgatattattgatacagctgggacattatgcaacgcagcgcaagcattaaaagatgctggagcagccatggtaaaagcctatattacccatcccgtgctatctggccctgcaattgaaagaatttccaaatcttcaattgatgaattagttgtaaccaattccatatctttatccccagaagcagaaaaatgcagtaaaatacgcgtcatttctcttgctcctactattgcagagtgcatcagaagattaaacaatgaagagtcgctaagcgctctatttttgtaa

SEQ ID NO: 253083 - DNA, 822 bp, Unknown
  Bacterial polypeptide expressing nucleotide sequence isolated from the Sargasso Sea
atattgaaattaacgaaaatattagaggaaatagtatttttgttattcaatctgtatcttctcctgcaaatgataatttaatggagcttcttctgtgtatagatgctttaaaaagatcatcggcaaaaaatataacagctgtaattccttactttggttatgcgagacaagatcgaaaagttgttccaagaacatctatttctgccaaattagtttctaatttgatcacaaaagcaggggctgacagagttgtcacaatagatctccatgctggacaaattcaaggattttttgatattccagtggataacctatttgcaacaccaatattcgcacgtcatgtaagaaagaaaataaaaaataagaatataatttgtgtagctccagatgttggtggaacagaacgagcaagagctctaggaaaatttttacacgcaggtttggctatcattgataaaagaagacctgccccaggaagatcagaagttatgaatgtcatcggaaatgttaaaggcaagacatgtattatagttgatgatataattgactcaggaggcactatagtaaatgctgctaatgcattaacagaaagaggagcaaaagaagtgcatgtatatgttactcacggagtattaagcggaaaagctgtacaaaatataaaaagttcaaaaattaaaaggttagtgatcacggatacaatcgataattctgatagagtaaaaggtgcaaaaaatattgaaattttaacaatttctcaattagttggtgaggcgataaaaagaatttcaaactcaacttctgtttctgacctatttaggtaat

SEQ ID NO: 253084 - DNA, 865 bp, Unknown
  Bacterial polypeptide expressing nucleotide sequence isolated from the Sargasso Sea
aaaatgtttagtgggcgtagcaatcctaggcttgcagaaaatatcgctaaatttctcgacaggcacctgggagaaatatccatcagaactttctctgatggtgagatttgggttaaatatgaggaaaatatcagaggatgtgatgtattcataatacaatcaactaatggtccatcagaaaatataatggaacttgcactactagttgatgctgctgttcgtgcttccgcagatactgtaacagtagtgattccttattttggttatgggcgtcaagataggaaagatcaacctagagttccaatatcttcaagagtaattgtagatattttaacagcactaggcacagatagaatcattaccttagatttgcattctactcaaatacaaggttttgcaaacattccgtttgataatctttatagtagaaccgtcctatataatgctataaaagaagaaggttttaatcctgaggaaacagttgtccttgcgcctgatattggttctgttaaaatgagtcaaagctatgcaaagacgctgggaatgcattttgcattaattgataaaagaaggtttgcgccaaatcaggcagaggtgaatcatttgattggagagttgaaagatttagatgtgttgataattgatgatatgattgatacagctggtacaactgttaatgctgcaaaagcagctatagataaaggtgcaaaatctgtaactgcagttgcaacccatggcgtgctatcaggtcctgcaattaagcgactcaatgattctagtattaaaaaagttattataacagatacgataacaatcgataaagataaaaaaatagataaaataaaaatagtttctgtcgcaaaaa

SEQ ID NO: 253085 - DNA, 524 bp, Unknown
  Bacterial polypeptide expressing nucleotide sequence isolated from the Sargasso Sea
gatgtataaagagattgtcctaatgaaaattttatcaggaacaagtaatcccacacttagcaaaagcatatctaggcaccttagaacaaaacttgtaaatacaaatattaaaaaatttgcagacggcgagatttacgttgagattaatgaaaatattagaggtaacagtgtttttgttatacaatcaagcgctaacccagctaatgataatcttatggaacttctattatgtattgatgctcttagaagatcttctgcaaaaagtataacggctgttataccgtattttggctacgcaagacaggacagaaaggttgtccctagaacctcaatctctgcaaagttagtatctaatttaattacagacgcaggtgctcatagagtggttactgttgacctacacgcaggtcaaatccaaggtttttttgatatgcccgtggacaatttgtttactacgccactatttgcaagatttataaaaaaaaatattaaaagtaaaaattttatatgtgtttccccagatg

SEQ ID NO: 253086 - DNA, 517 bp, Unknown
  Bacterial polypeptide expressing nucleotide sequence isolated from the Sargasso Sea
atgaaagttcttgctggtacaagtaatttgaaactctgtagagacatagcaagacagctcaaactaaaattagtaaattctaatatcaagcgatttgctgatggtgaagtttatatagaaattaacgaaaatattcgaggaaatagcatatttgttgttcaatcaacttctaatcctgcaaatgataacttaatggaattattaatttgcattgatgcattaagaaggtcatctgcaaaaaatattacagcggtcattccttatttcggatatgcgagacaagatagaaaagtggttccaagaactgcaatttcagcaaaattggtttcaaacttaattacaaatgctggcgctaatagaatattaagtgttgatcttcatgctggccaaattcaaggcttctttgatattccggtggataacttatttgctactcctatttttgcaagacatattaaaaaaaagatgaagctaaataatttaatttgtgtttctcctgatagttggtggtgttgaa

SEQ ID NO: 253087 - DNA, 787 bp, Unknown
  Bacterial polypeptide expressing nucleotide sequence isolated from the Sargasso Sea
ataattcaatctacagactctcctgctgaaaaaaatttaatggagttagttttgatagcagatgctttaaaaagagcttcagcaaactcaatcactgctgtcattccttattttggctatgccagacaagacagaagagtaaggtcagcaagagttccaataagtgctcgtgtaattgctgaagttttaactagtgttggcatttctagagttattactcttgatattcactctgaacaaattcaaggtttcttttcttttccagtagataacatttacacatcaaatattatgtgcaaagaaattattgggaaatataaagttgaagatttacaggtagtttcaccagatactggtggtgttataagggcaagatcagtcgcaaaaacgcttggtgtcaaagatttagcgattattgataaaagaagagaaaaagctaatgaatcagaagttattaatctaattggtgatgtaaaagataaagtttgtatagttccagatgacttaattgatacagcaggcactctaagtaatgctagccatgcattgaagaaagagggtgcaagagaagttatagcatatatcactcatcctgtgctctcaggaaatgctatcgaaaatttgaataaatcagctattgataggcttgtggtgtcaaactctattgatattggtgacaaatcagaaaaatgtcctaaaatagacgtctttgatatatcgccaataattgctgaatcaattaaaaggattacaacaggcgactcaataagcgaactttttaaataat

SEQ ID NO: 253088 - DNA, 646 bp, Unknown
  Bacterial polypeptide expressing nucleotide sequence isolated from the Sargasso Sea
aatgaagtattctcaaaaaatgaagattctcactggaaatagcaataaaaagctaagtaataaaatctcaaaaaatttaaaaaataaattagtcaatactagtattagaaaatttgcagatggtgagatctatattgaaattaacgaaaatataaggggtaacagtatttttataattcaatcagtgtcctctccagcaaatgataatttaatggagctgcttctttgtatagatgcgcttaaaagatcgtctgcaaaaaatattactactgtgataccctattttggctatgctagacaagatcgtaaagttgtaccaagaacttctatttctgcaaaattggtctcaaacttaataactaatgcaggagctgacagagtagtgacagtagatttgcatgcaggacaaattcaaggtttttttgacattccagttgataacctttttgctactccaatctttgcaaaacatattaaaaggaaaataaaacgtaataatataatttgtgttgcaccggatgttgggggagttgaaagagcaagagctttaggaaaaaaattagacgtcggtttagcaattgttgataaaagaagaccaagtcctggaaagtcacaggttatgaatgtcattggaaatgtaaaaaca

SEQ ID NO: 253089 - DNA, 720 bp, Unknown
  Bacterial polypeptide expressing nucleotide sequence isolated from the Sargasso Sea
tatgaaagttcttgctggtacaagtaatttaaaactctgcaaagatatagcaagacagcttaaactaaaattagttaattctcatattagaagatttgctgatggagaggtttatatagaaattaacgaaaatattagaggcaatagtatattcgtagtccaatcaacctcgaatcctgcaaatgataatttaatggaattattaatttgtatagatgctttaagaagatcttctgctaaaaacattacagctgtaattccttattttggttatgcaagacaagacagaaaagttgtacctagaacagcaatatctgcaaaattagtttcaaatctaattacaaatgcaggagcaaatagaatattaagtgtagatttgcatgctggacaaattcaaggtttttttgacattccggttgataatctatttgcaactccaatttttgcaagacacattaaaaacaaaactaaacttaaaaatttagtttgtgttgccccagatgttggaggtgttgaaagaacaagagctttaagtagaagaataaattcctctattgcaattattgataagagaagaccatctccaggaaaatctgaagtgatgaatcttgttggaaatgtaaaaaataaaaactgtgtgattgttgacgatataatagattctggaggaacaattgttaatgctgctaaagctttgaaagataaaggagcaaaagatgt

SEQ ID NO: 253090 - DNA, 805 bp, Unknown
  Bacterial polypeptide expressing nucleotide sequence isolated from the Sargasso Sea
aatattaaaaaatcgacttgtgcgatcaagtataaaaaaattttcagatggagaaatctatattgaaattaacgaaaatattagaggaaatagtatatttgttattcaatctgtttcttctcctgctaatgataatttaatggagctactactttgtatagatgcgctaaaaagatcatcggctaaaaatatcacagccgtaataccttattttggatatgcgagacaagatagaaaagttgttccaagaacttcaatatcagcaaaactagtttcaaatttaattacaaaagcaggtgctgatagagttgtaacaatagatttacatgcgggacaaattcagggattttttgatataccagtagataatctttttgctactccaatttttgcaagacatgtaaagaataaaataaaaaataaaaacttaatttgtgtagccccagatgttggtggcactgaaagagcaagagctttaggtaaatttttgcacgcgggtttagcaataatagataaaagacgacctgcgcctggaaaatctgaggtaatgaatgttataggaaatgtaaaagggaaagtgtgtattatcgttgatgacattattgactctggaggcacaatagttaatgcttccaaagcattaattgacagaggggctaaagaagttcatgtatatgttacgcacggtgttttgagtggaaaagctgtagagaaaataaaaagttcaaaaataaaaagattagtaataacagatacaataaataactccgatagagtaaaatctactaaaaatatgaaatattat

SEQ ID NO: 253091 - DNA, 880 bp, Unknown
  Bacterial polypeptide expressing nucleotide sequence isolated from the Sargasso Sea
gcactgagattaaagttggtaaatacgaatattaaaagattttcagacggagaaatctatgttgaaataaatgaaaatataagaggtaacagtgtttttgtaatacaatctacttcaacacctgcaaacgataatttaatggaattgttgttggtgattgatgctctaagaagatcatcagcaaagaacataacagctgtaattccatattttggttatgcaagacaagatagaaaggttgctccaaggacttctatatcagctaaagtagtttcaaatttaattgcaaatgctggggcaaacagagttgtgactgtagatcttcatgctggacaaattcaaggtttttttgatattccagttgataatttatttactacacctctgtttgctagatacatcaaaaaaaaatggaaaaataaaaatttaatttgtgtatcaccagatgttggtggggtgcagagggcaagaggtttagccacaaagctaaaagcggatctagctattatcgacaaaagaagaccaaaaccagggaaggctcaggttatgaatatagttggagatgtcaaaggaaaggtatgcttaatagtcgatgatatcatagacagcggaggaactattgtgagtgctgctaaagcgcttaaagaaaatggagcattagatgtttatgtatttattactcatgctgttttaagcaacgatgccgctgataaaatccaaaaatcgaaagtaaaaaaattaataataactgactcaatagataactctaaaaaaataaaaaataacaataaaatcgaggtattatctatctcttcccttatggcagaggcaataaaaagaatttctaactcgacttcagtatcagatttgttcaattaat

SEQ ID NO: 253092 - DNA, 616 bp, Unknown
  Bacterial polypeptide expressing nucleotide sequence isolated from the Sargasso Sea
atgaaaattttatcaggaacgagcaatcaaacattaagcaaaagtatatcaaagcatcttaggctaaaactagttaatacaaatatcaaaaactttgctgatggtgaaatttatgtcgaaataaatgaaaatattagaggtaacagtgtttttgtaattcaatcgacctctacgcctgctaatgataatcttatggaacttttgttatgtattgatgcattaaaaagatcgtcggcaaaaaatattacagccgtgattccatactttggttatgctaggcaagacagaaaagtagtaccaagaacttctatttcagcaaaacttgtttcaaatttaattaccaatgcaggtgcaaatagaattgtaacagttgatttgcatgctggtcagatccaaggtttttttgatatgccagttgataacttattcacaacaccaatttttacaagatacattaaaaaaaatattaaaagtaaaaactttatttgtgtttcgcctgatgctggtggaatagaaagaacaagaggtttagcaaaaaagattaatgcagatttagcaataattgataagagaagaccccaagcaggcaaatctcaagtcatgaatataataggag

SEQ ID NO: 253093 - DNA, 596 bp, Unknown
  Bacterial polypeptide expressing nucleotide sequence isolated from the Sargasso Sea
tacatctgcgggtgcagatagggtattaaccttagatttacatgctggtcaaattcaaggtttttttgatattcctgttgataatattttttctgcaagacaaatgattccagatattaaaaagaattttgaaaatgatgatttagttattgcttcaccagatgtgggaggagttgtaagagcaagagctttcgcaaaaagattaggtgctggactagctatagctgataaaagaagagagaaggcaggtgtttctgaagtaatgaacataattggagatgttaaagataagacatgtattttattagatgatattgtggattcagcaggtacattatgtaatgctgcaaaagcactaaaaaaacatggggctaaagatatttactcatatatcgttcacggagtcctttcaggtaaggctttagaattaatacaaagttcaaaaattaaagaattagtgttaactgatagtattcagccaacaaaaattgtaaaaaatacaaaaaatattagacatataagcattgctcctttaatgggagaggcgattaaacggattaatagtgactcatcagtctcagctctgtttgattgat

SEQ ID NO: 253094 - DNA, 499 bp, Unknown
  Bacterial polypeptide expressing nucleotide sequence isolated from the Sargasso Sea
atgaagcttctcacaggaaacagtaataaaaatcttagtcaaaaaatatcaaaatttttaaaaactaaattagttcattcaagtattaaaaaattttctgatggtgaaatctatatagagataaatgaaaatattaggggtaatagtatttttttaattcagtctgtaagttcgcccgcaaatgataatcttatggagcttttattgtgcatagatgcactcaaaagatcttcagctaaaaacattactgcagttataccttactttggctacgcacgtcaggatcgtaaagttgcacctagaacatctatatctgctaaattagtttcaaatttaataactaaggcaggagcagacagagtagtcactgtagacttgcatgctggtcaaattcaaggattctttgatattcctgtcgacaacctttttgcaactccaattttttcaagacatataaaaagaaatgtaaaaggaaaaaatttaatttgtgttgcactct

SEQ ID NO: 253095 - DNA, 631 bp, Unknown
  Bacterial polypeptide expressing nucleotide sequence isolated from the Sargasso Sea
ccaataactgcaaagttagttgcgaatttaattacttcagccggtgcgcatagagtattaacaatggatttacatgctggtcaaattcaagggttttttgatattcctttagataatatcttttctgcaccccctattcttaaagatataaaagaaaaatttatatcaaataatgatctagttgttgcttcacctgatgttggaggtgttgtaagagcaagagcatttgcaaaaagacttaatgcaggtttagcaattgcagataaaagaagagaaaaagcaggagagtcagaagtaatgaatattataggagatgtaaatggtaaaacttgtattttacttgatgatattgcagactctgctggcacattgtgtaatgctgctgaagcattaaataataatggtgcaaaagacatttattcatatatcgttcatggagtattatcaggaaaagctcttgaaagaatttcaaattcttctatcaaagaattagtattaactgatactatagaaccgacaaaggaagtaaaaaacacaaaaaacattagacatatcactattgctcctttaatgggtgaggcgattaaaagaattagtagtgacgcctcagtttctgctctttttgaataat

SEQ ID NO: 253096 - DNA, 776 bp, Unknown
  Bacterial polypeptide expressing nucleotide sequence isolated from the Sargasso Sea
gactgatgcactgagacgatcaagcgcaaagcgcatcactgctgtaataccctactttggatatgcccgccaagacagacgaacaaaagcacgtacaccaataagcgctaagctaattgctaacttattaactgaagctggaatagaacgtattctcaccctagacctacatgcagcacagatccaaggattttttgatattccagttgacaatttgtatgcatctccaatttttgcactagatgcgcggcatcattttaaagatatgtcaaacattactgttgtatcaccagatgttggaggagtaactagagccagagagcttgcagaacgtatcgacgctgacctagctattgtggataaacgtcggcctgcaccaggtgaggtctcccaaatgacaataattggcgaagtgaaaaacagaaagtgtataattgttgatgatatctgcgatacagcaggtactcttgtaaaagccgtagaccttctactcggaaagggagctacagaagttcacgcatacattacccacggcgtactttccggaaaagccattgaaaggattgaaggctcaaacataagatcattggttgtaactgactcgattgaggcgacttcgactgttaagagcaattctaaaattagatcggtggccacagcacccatacttgcccaggccatgctaaatattgcaaatggaagttctatctcttctctttttgaggatgaaacattaggacctatttacgaagcattttatcctgaaaaacattaga

SEQ ID NO: 253097 - DNA, 640 bp, Unknown
  Bacterial polypeptide expressing nucleotide sequence isolated from the Sargasso Sea
aatgaagcttcttacaggaaacagtaataaaagcctcagtcaaaaaatatcaaaacatttaaaaacaaaattagttcattctagtattagaaaatttgctgatggtgaaatttatatagaaattaatgaaaatatcagaggtaatagtatattcttaattcaatctagttcagctccagctaatgataatttaatggagcttttattatgcattgatgctcttaaaagatcttctgcaaaaagtattaccgcggtaataccctattttggatatgcgagacaagaccgtaaagttgctccaagaacatctatatctgcaaaactagtttctaatttaataactaaagctggtgcagatagaatagtaactgttgatttgcacgcaggtcagatacaggggttttttgatattcctgttgataacctttttgcaactccaatttttgcaagacatataaaaaaacgtctaaataaaaaaaaactaatatgtgtagctcctgacgttggtggagttgaaagaacaagagctcttgcaagaaaattagatattggcatagctataatagataaaagaagacctacaccaggaaaatcacaagtaatgaacgttataggtaacgttaatggaaaaacttgtgtg

SEQ ID NO: 253098 - DNA, 424 bp, Unknown
  Bacterial polypeptide expressing nucleotide sequence isolated from the Sargasso Sea
aatgaaaattattgcaggcaacagtaataagagtttagcagaagcaatatgcgcctataatggtgtatcattagctgatacatccctaagaagatttgccgatagagaaatatttgtagaaattaatgaaaatataagaggggaagatgtattcatcattcaatcaacatctcaccctgcaaacgatcacctaatggagttattaattacaatagatgctgccaaaagaggttcggcaaaaagaatcactgctgtcattccttattatggatatgctagacaagatagaaaaacaggtcctaggactccaattactgctaagcttgttgcaaacttaattacttcagctggagctgacagagtattaactatggatttgcatgcgggtcaaattcagggattttttgatattcctctagataat

SEQ ID NO: 253099 - DNA, 711 bp, Unknown
  Bacterial polypeptide expressing nucleotide sequence isolated from the Sargasso Sea
aaagatcatctgcaaaaaatataactgcggtaattccatattttggttatgccagacaagatcgaaaagttgtgccaagaacttctatatctgcaaaacttgtttcaaatctaattacaaaagctggagcagatagaattgttactgttgatttgcatgctggacaaattcaaggattttttgatattcccgttgataatcttttctcaactccaatttttgctagacatgttaagaaaaaagttaaatccaaaaacttaatttgtgtggctcctgatgttggtggagttgaaagaacaagagccttgggtagaaaattggatgttgggctagcaataattgataaaagaaggcctactcctggtaaatcacaagtaatgaatgttgtaggaaatgttaaaggaaaaacatgtttaattgttgatgatataattgactcaggtggaacaattgtaaatgctgctgaagccttaataaaaagaggggctaaagaagtacatgtttatgttactcatggtgttttaagtggtgaagcagttgaaaaaattcaaaaatctaaaataaaaaatttagtagtgacagataccatagataattcagacaaagtaaaaaaatcaagaaatatagaggtattatctatctctaatttgctagcagaagcaatgaaaaggatttctaattcaacatctgtatctgatttatttaaataat

SEQ ID NO: 253100 - DNA, 630 bp, Unknown
  Bacterial polypeptide expressing nucleotide sequence isolated from the Sargasso Sea
gaaccccaattagtgcaaaactagttgctaatctaattacaacttctggagctgatagagttctgactatagatttacatgctggacaaatacaagggttttttgatattccagtagataatctttacgcagctacaattcttttagaggatattaaaaaaaactataatttagataggacagtgataatttccccagatgttggaggagtggtgagagctagatatgttgctaatagattgaatattggtttagctatagttgataaaagaagagaggctgctaatatatcagaagttttaaatataataggtgacgtaaaagaaaaagattgtatattaattgatgatatagttgatacagctggtactttaacaaaagcaggcaaagctctcatgaatgttggagcaaaaactgtttctgcttacgtaagtcatggtgttttatcaggaaatgctcttgagaagataaataaatctgtacttaaagaaatagtaacaactaatactatttctagtttacttggtgaagacaaaaataaaattagaagattgtctgtagcgccattaatagctgaagcagtaaagagaatagacaaccatagctctgtgtcaagtttgtttaattaag

SEQ ID NO: 253101 - DNA, 346 bp, Unknown
  Bacterial polypeptide expressing nucleotide sequence isolated from the Sargasso Sea
atgaagctctttgcaggtaatgccgtaccagaacttgcccagaaagtcgccgaccgtctctacaccaagctaggaaatgccaaagttggccgtttcagcgacggtgagattagcgtagaaattcatgaaaacgtccgtggctcggacgtttttattatccagtctacgtgtgcccctaccaacgataacctgatggaacttattgtgatgatcgacgcactgcgccgcgcatctgcaggccgtattactgcggtaattccctactttggttacgctcgtcaagaccgtcgagttcgttcagcaagagtaccaatcactgcaagagttgtggcagatttcttgtcaa

SEQ ID NO: 253102 - DNA, 700 bp, Unknown
  Bacterial polypeptide expressing nucleotide sequence isolated from the Sargasso Sea
atgggtaaatacgtaaaaaaaatatttgcagggtcaagcaatcctcaacttgcaatgaaaattgctaatgagtgtggtacgtctttaggagatttatctataaaacgatttagtgatggagaaatttggataaagtttgaagaaaatctcagaggaaatgatatttatctagttcagtcaacaaaccccccagcagataatattgttgaattagcacttatgattgatgctgcaaagagagcaagcgcaaagagaataaatgttataatgccttattttggttattctagacaagatagaaaagatgagcctagagttcctatttctgccaaagttatgatggatatatttatcaaagctggtgcaaatagaattgtaacaatggacttacattctacacaaattcagggtttctcatcaaaacctgttgataacatttatggtagtttagttttaatgccagagcttgaaaaacactttcataacttatcaggcaagaacagcaactgtacagttttaattcctgatatgggatcaagtaaattaggccaatcttatgcgaaaagacttgaaatgagttttgctcttgtagataaaagaagaaacgcacacaatcaatcagaggcagtttcagttgttggtgagttaaaaaatcaacatatattaattatagacgatatgattgatactgctggtacaa

SEQ ID NO: 253103 - DNA, 403 bp, Unknown
  Bacterial polypeptide expressing nucleotide sequence isolated from the Sargasso Sea
aatgaagcttcttacaggaaacagtaataaaagcctcagtcaaaaaatatcaaaacatcttaaaacaaaattagtgcattccagtataagaaaatttgcagatggcgaaatttatattgaaataaatgaaaatattagaggaaatagtatttttttaatccaatctatttcatccccagcaaacgataatttaatggaacttttgttgtgtgttgatgctctaaaaagatcatcagcaaaaaatattactaccgtaataccttattttggatatgcaagacaagatagaaaagttgcaccaagaacatctatatctgctaaattagtttcaaatttaattactaaagcaggagcagatagagttgtaactgttgatttgcatgcagggcagatacaaggtttt

SEQ ID NO: 253104 - DNA, 652 bp, Unknown
  Bacterial polypeptide expressing nucleotide sequence isolated from the Sargasso Sea
gctgtataaagagaatgtcctaatgaaaattttatcaggaacaagcaatctctcactaagcaaaagcatatcaaaacaactcaagctaaaattggtaaatacaaatattaaaaattttgctgatggtgaaatttatgttgagataaatgaaaatattagggggaatagtgtatttgtaattcaatccacgtcgacacctgctaatgataatttaatggagcttttattgtgcattgacgcactgaaaagatcttctgcaaaaaatgttactgctgtaatcccttattttggttatgcgagacaagatagaaaggtagttccaagaacttctatttctgcaaaacttgtttctaatttaataacaaatgcaggtgcaaatagaattgtgacagtagatctacatgctggacaaattcaaggtttttttgacatgcctgtagataacctttttactacaccgatatttgcaagatacattaaaaaaaatattaaaagtaaaaacttcatatgtgtctcaccagatgcaggtgggattgaaagaacaagaggactagcaaaaaaaataaatgctgacttggcaattatagataagagaagaccacaagctggaaaatctcaggtaatgaatattataggtgaggttaataataaa

SEQ ID NO: 253105 - DNA, 769 bp, Unknown
  Bacterial polypeptide expressing nucleotide sequence isolated from the Sargasso Sea
actgtataaggaattacatttcatgaaaattttatctggaactagcaaccttaagttaagcaaggatattgctaaaaaattaaaattaaaattggttaatactaatatcagaagatttgctgacggtgaaatctatatagagatcaatgagaatattagaggtaatagtgtttttgtaattcaatctacatctaatcccgcaaatgataatttaatggaacttcttcttgttattgacgcattaaaaagatcttcagcaaaaaatgttaccgctgtgattccatattttggctatgcaagacaggataggaaagttgctccaagaacatctatctctgcaaaagtggtagctaatctaattactaacgctggcgcaagtagagttgttacagttgatttgcacgctggacaaattcaaggattttttgatatgccagtagacaacttgtttactactcctctttttgcaaaatatattaaaaaaaaacttaataataaaaaattaatttgtgtttcgcctgacgttggtggggttcaaaggactagggctttggctacaagaataaaagcagatcttgcaattatagataaaagaagacctgcgcccggaaaatctcaagtcatgaatattattggagatgtaaaaaacaaaacatgtattattgttgacgatattattgatagcggcggaactattataaatgcggttgatgctttaaagaaaagtggcgctaatgaagtttatgtttttattacccatgctgtttta

SEQ ID NO: 253106 - DNA, 430 bp, Unknown
  Bacterial polypeptide expressing nucleotide sequence isolated from the Sargasso Sea
aatgaaattattaactggcaatagcaataaagtcttaagtaagaatattgctaaatatttaaaatcgaaacttgtaaattcaagtatcagaaaattttctgatggagaaatctatgttgagataaatgaaaatattagaggtaatagtatttttattattcaatctatttcatccccagccaatgataatttaatggaattactattatgtatagatgctcttaaaagatcttctgcaaagaatataactgcggtaatcccatattttggttacgctagacaagatagaaaagttgttccaagaacatctatatcagccaaattagtttcaaatttaattacaaaagctggagctgatagagttgtaactgttgatttacatgctgggcaaattcaaggattctttgatatcccagtggataatcttttt

SEQ ID NO: 253107 - DNA, 745 bp, Unknown
  Bacterial polypeptide expressing nucleotide sequence isolated from the Sargasso Sea
aatgaaaattatcgcttgtaatagcagtaaaagtctctcagacaaaatatctaaacatattggagtaccattagcagatgcttctataagaacttttaatgatcgtgaaatatttgttgaaataaatgaaaatattcgtggtgaagatgtatttattattcagtctacatctcatcctgctaatgaccaccttatggagcttcttattactattgatgcagcaagaaggggttctgctaaaaggataactgcggtcataccatattatggatatgctagacaagatcgcaaaactggaccaagaactcctattacagccaaacttgttgcaaacttaattacctctgctggagcacatagagttttaacaatggacttacatgcaggacaaatacaaggtttttttgacatacctttagataatattttttcagctcctcctatacttaaggatataaaagataaatttaatgaaactactaatttagtagttgcttcaccagatgtgggtggtgttgtaagagcaagggcatttgcaaaaagactaaatgctggattggcaatagcagataaaagaagagaaaaggcaggagagtcagaggtaatgaatattattggagatgttgataataaagtctgtatattactagatgatattgcggactctgctggaacactctgtaatgctgctgaagcactaaaggaaaatggagccagtgaaatatattcctatatgtacatggag

SEQ ID NO: 253108 - DNA, 337 bp, Unknown
  Bacterial polypeptide expressing nucleotide sequence isolated from the Sargasso Sea
catgaaaattttatctggaactagcaaccttaaactaagcaaggatatctctaaaaaactaaaattaaaattagttaatacaaatatcagaagatttgctgatggagaaatttatatagagattaacgaaaatattagaggtaatagtgtttttgtagttcagtctacgtcgaatccagcaaatgataacttgatggaacttcttctggtaattgatgcattaaaaagatcgtctgcaaaaaatgttactgcagtaattccatactttggttatgccagacaagatagaaaagtcgctcctagaacttctatttctgcaaaagttgttgcaaattta

SEQ ID NO: 253109 - DNA, 529 bp, Unknown
  Bacterial polypeptide expressing nucleotide sequence isolated from the Sargasso Sea
tatgcctgctgataatgtttatgcaacaaaactaatggttgaagatatatccaagcattattctaaagataatttagttattgtctcgccagatgtaggtggggttgtcagatcaagagcgttagcaaaatatctagatggtcttgatcttgcaattatagataagcgaagagatgtggctaatgagtcagaagtaatgaacataatcggtgatgttgctggaaaagaatgtattgttcctgatgacatcatcgatacagcaggaacattatgcaatgcagccaaggctttaaaagatgctggggcaagtaaagtaagtgcatatataactcatcctgttttgtcaggtccagctattgaaagaataagtaattctgagattgatgaacttgttgtaactaattcgattcctcttacccaagatggtcaaaaatgcagtaaaatacgcgtcatatcgatcgcaccaataatatcagagtgtattaagaggctttctaatgaggaatccttgagtgcggtttttttataa

SEQ ID NO: 253110 - DNA, 858 bp, Unknown
  Bacterial polypeptide expressing nucleotide sequence isolated from the Sargasso Sea
actcaagtataagaaaatttagtgatggcgaaatatatattgagataaacgaaaatattagaggaaatagtatatttataattcaatctgtctcatcacctgcaaatgacaatctgatggaacttttgttgtgtattgatgcattgaagagatcctctgcaaaaaatataacagctgtaattccatattttgggtatgcaaggcaagatagaaaagttgttccgagaacctcgatctctgctaaactagtttcaaacctgattactaattctggtgctgacagagttgtaacattggatttgcactctggtcaaattcaaggtttttttgatatacctgtagacaatttatttgccacaccaatatttgctcgacatattaaaagaaaaattagaacaaaaaatatgatatgtgttgcacctgatgtaggtggaacagcaagagcaagagcattgggtaaaatgttaaatgttggattggctatagtagataaaagaagacctgcaccaggtaagtctgttgttatgaatgtaattggaaatgtaaaagataaaacatgtataattgttgatgatataatagactcaggcggaactattgttaatgctgcaaaaatattaaaacaacgaggtgcaagagacgttcatgtatatgtctctcatggagttttgagcggtgatgcagttgaaaaaatcaggaagtcacaaattaaaaatttggtaattacagatacaatagacaattcacaaaaagtcaaaaaggctaaaaatatagagatattgacaatatctaatttagttggtgaggctataaaaagaatatctaattcaacatctgtatccgacttatttaattaac

SEQ ID NO: 253111 - DNA, 807 bp, Unknown
  Bacterial polypeptide expressing nucleotide sequence isolated from the Sargasso Sea
ttctgatggggaaatctatgtggaaattaatgaaaatattagagggaatagtatttttttaattcaatctgtttcatctcctgcaaatgataacttgatggagcttttgctgtgtattgatgcgcttaagagatcatcagcaaaaaatattactgctgttattccttactttggttatgccagacaagatagaaaagttgcaccaagaacatcaatatcagcaaaacttgtctctaatctaataactaaagcaggagcagatagagttgttactgtcgatttgcatgcaggacaaattcaaggattttttgatattccagtggataacttgtttgcaacgccaatatttgcaagacatgtaaaaaaaaagataaaaaataaaaatctaatttgtgttgcaccagatgtgggtggaactgaacgagctagagcacttggaaaacttttaaatgtagggttggctattgttgataaaagaagaccaaaaccaggtcaatctcaagtaatgaatattattggagatgtgaaaggaaaaacttgcattctcgttgatgatattatcgattcaggtggaacaatagtaaatgcagctaaagctcttaaagatcgaggtgccaaagaagtttatgtttacattactcacggggtacttagtggagaagcagtaaataaaattaaaaattctgtaattaaaaatttagtaataactgacacaattgataatataaacagagttaaaggtgctaaaaacattgaggttctgtcaatttcagggcttatgggagaagcaattaaaagaatatctaa

SEQ ID NO: 253112 - DNA, 727 bp, Unknown
  Bacterial polypeptide expressing nucleotide sequence isolated from the Sargasso Sea
aaagttttaagtaaaaacattgctaaatacctaaaaacaaaacttgtaaattcaagtattagaaaatttgctgatggtgaaatttatattgaaataaatgaaaacataagagggaatagtatttttattgttcagtctatctcttctccagcaaatgataatttgatggaattgttattatgtattgatgctcttaagaggtcgtctgcgaaaaatataacagcagtaataccttattttggatatgcaagacaagatagaaaagttgttccaagaacttccatatctgcaaaacttgtttctaatttaataactcaagctggtgctgatagagtggtaactgtagatttacatgctggtcaaattcaaggtttctttgatattcctgttgataacttattttctactccaatatttgcaagacatgttagaaagaaaattaaaagtaaaaaaattatttgtgttgcgcctgacgtaggaggaacagaaagagctagagcacttggaaaacttctaaatgtaggactagctattgttgataaaagaagaccaaagcctgggcaatcagaagttatgaatatcattggtgatgtaaaaggacaaacttgtattttagttgatgatataattgattcaggtggcacaattattaatgcggcgaaagctttaaaatctcgaggagcaaaagatgtttatgtttacattactcatggggttttaagtggaa

SEQ ID NO: 253113 - DNA, 814 bp, Unknown
  Bacterial polypeptide expressing nucleotide sequence isolated from the Sargasso Sea
attaatgaaaatattagaggaaataatatttttataattcaatctatatcgtcacctgcaaatgataatcttttggaaatgttgatttgcatagatgctttaaaaagatcttctgctaaaaatattacagcagtaattccttattttggttatgcaagacaagacagaaaagttgttcctagaacttctatttctgcaaaacttatttcaaaccttataacaaaagctggtgccgatagagttgtcacagttgatttgcatgcgggacaaatacaaggattttttgatattcccgtagacaacctttttacaactccaattttttatagacatattaaaaaaagacttaaattaaataatttagtttgtgtttcacctgatgcaggtggcattaatagaacaagaggtttgagtaaacttctagatgtaggcctggctattgtagataaaagaagaccatcaccaggaaaatcagaagttatgaatataattggtaatattaaaaataaagtttgtataattgttgatgacataattgactctggaggaacaatagttaatgcagcaaaaatgcttaaaaacaaaggagcaaaagaaattcatgtatatataactcacggagttttaagtggcgatgcgataaaaaaaattaaacattcaccaataaaaaatttagttattactgacacaatagataattctaaaaaaatcaatagtgctaaaaatattgaaatattaagtatttccaatttactaggagaagcattaagaagaatttctaattcgacatctgtatcagatctattcaaataat

SEQ ID NO: 253114 - DNA, 583 bp, Unknown
  Bacterial polypeptide expressing nucleotide sequence isolated from the Sargasso Sea
tcgagtactgaccgtcgatctccacgcggagcagatacaaggttttttcacagtacccgtcgacaacgtctacgcttcatccatcctcaatgcggacattgttcgctgcgagcatgaaaacctgatcgttgtctctcccgatattggcggcgttgtcagagcccgagccatcgcaaagcaattggacgacgctgatctggcgatcatcgataaacgtcgccctcgtgcaaacgaggcggaggtcatgaatttgattggtgatgtggaaggtcgaaccgcaatattggtagacgacatggtcgatactgcgggcacactctgtacagcagccaatgcgctgaaagagcgtgacgccctcaaggtcgtttcttactgtacacacgcggtgctgtccggtaaggctttggagaacatcaaaaactcgcagatcgatgaattggtggtaaccgataccattccgctgtcagctgaggcgttggcactcggcaaaattcgccaactgaccattgctgacttgctggccgaatcgatcaggcgggtcagtaacgaagaatccattagcgcgctgtttgatctcacttaa

SEQ ID NO: 253115 - DNA, 700 bp, Unknown
  Bacterial polypeptide expressing nucleotide sequence isolated from the Sargasso Sea
tgcaagactatcactggctgtaattccttactttggatacgctagacaagatagaaaagttgcgccaagaacatccatatcagcaaaagtaatggctaatttaattactaatgcaggggcaacaagagttgttactgtagatttgcatgctggtcaaatacaaggtttttttgatatgccagtagataatttatatacagctccattatttgcaaaatatattaaaaaaaaattaagtaacaaaaaacttatttgtgtttcacctgacgttggtggcgttgcaagaaccagggatttagcaaatagaattaaggctgaccttgcaattatagataaaagaaggccttcacctggaaaatcagaagttatgaatattttgggaaatgtacaaaataaaacttgtataattgttgatgatataattgatagtggaggcactatagttaatgcagttaatgcccttaagaaaagtggggcaaatgaagtttatgtttttatttcacatggtgtacttagtggtgatgcggcaaaaaaaatcaaagactcaaaaattaagaaacttatagtcaccgatacgattgataacacaaaaaaaattcataataatagtaaaattgaggttttatctatatcctcgttgatgtctgaagctattaaaagaatagctaattcaaattctgtgtcagatttatttaattaa

SEQ ID NO: 253116 - DNA, 861 bp, Unknown
  Bacterial polypeptide expressing nucleotide sequence isolated from the Sargasso Sea
gatgattttcgctggcaatgccaaccccgaacttgcgcgtgatattgccagaaaactccatattcccatgggccaggccactgtaggccgcttcagcgatggcgagaccaccgttgaaatcaatgagaatgttcgtggtcacgacgttttcattatccagcccacctgctaccccaccaacgacaacctgatggaactgatcgtgatggctgacgccctgcgtcgtgcatccgccacacgaatcaccgccgttattccttactacggctatgcccgtcaggatcgtcgcgttcgctctacccgggtagccatcagtgcaaaagtcgtcgccgacatgatctccagcattggcgtggatcgtgtgctgaccgtagacctgcacgccgaccagattcagggtttcttcgatatcccggtggacaacatctacgccaccccggtactgcttgaagacattgaaaaacagcggttcgagaactttgtcgtcgtatctccggacgtaggcggcgttgtccgcgcccgcgctgttgccaagcgcctggatgatgctgacctggccatcatcgacaagcgtcgccccaaggccaacgtttcccaggtaatgcacatcatcggtgacgtccgcgacaagacctgcatcctggtggatgacatcgtcgacaccgccggcacactgtgcaaagccgccaacgcgctcaaagagcacggcgcctcccgcgtggttgcctacattactcacccggtactttccggcccggccatcgagaacatcaacaactcggagctggacgaactggtggtgtgcgacaccatcccgctgggtgacaaagccaaaaattgtgatagaatccgccccctcag

SEQ ID NO: 253117 - DNA, 739 bp, Unknown
  Bacterial polypeptide expressing nucleotide sequence isolated from the Sargasso Sea
tggattattgctatgtatagatgccttaaaaagatcctcagctaaaaatatcactgctgtaatcccatactttgggtatgcaagacaagatagaaaagttgtaccaagaacatctatctcagcaaaattagtttctaacctcataactaaagctggggctgatagaattgtaacagtagatcttcattcaggacagatacagggattttttgacatacctgtagataatttatttgctactccaatttttgctagacatgctagaaaaaaaattaagaaaaaaaatgttatatgtgtagcgccggatgttggtggaacagcaagagcgagagcattgggtaaaatgttaaatgttggactagctatagtagataaaagaagaccatctcctggaaaatcagaggttatgaatattattggaaatgttaaaggcaaagtctgcttgatagtagatgatataattgactctggtggaacgattgtaaatgctgcaaaagcacttgtagaaagaggcgctcaagaggtacacgtttatgttactcacggagtattaagtggtgatgccgtggaaaaaattaagaaatcaaaaatcaaaaacttagtcatcactgatacgatagataatgtaaataaagtaaaaaaagctaaaaatatagaggtattaacaatttcgaatttagttggagaggcaattaaaagaatttctaactctacatcagtatctgatttatttaaataa

SEQ ID NO: 253118 - DNA, 883 bp, Unknown
  Bacterial polypeptide expressing nucleotide sequence isolated from the Sargasso Sea
agactactaaaattaaagttagtcaatacgaatataaaaaatttttccgacggtgaaatttacgttgaaataaatgaaaatattagaggcaatagtgtttttgttattcaatctactgcgacacctgccaacgataatcttatggaactacttttgtgtatagatgcactaagaagatcttctgcaaaaaatataactgcggtaattccttattttggttatgcaagacaagacagaaaagtggttcctagaacttctatttctgcaaagcttgtttctaatcttataacaaatgcgggagcaaatagagttgtaacagtagatttgcatgccgggcaaattcaaggcttctttgatatgcctgtagacaatctattcacctctccaatatttgctagatacgttaaaaaaaatataaaaagtaaaaattttatatgtgtttcaccagatgctggtggaattgaaagaacaagagggttagcaaaaaaaataaatgcagatctagcaatcatagacaaaagaagaccgcaagcaggaaaatctcaagttatgaatataataggtgaggttaaaaataaagattgtataattgtagatgacattatggatagcggaggaacaatagttaacgctgcagaagctttaaaaaagaaaggcgctaaagatatttatgtctttataactcatgccgtacttagtggagatgcaataaataaaattaaaaagtctaaaataaaaaaattgataattactgataccattgacaacgccaacagaataaaaaatgtcagtaaaattcaagtgttatccgttgcacctcttatggctgaagccatcaaaaggatttcaaactcaacatcggtatcagatctattcaattaaa

SEQ ID NO: 253119 - DNA, 598 bp, Unknown
  Bacterial polypeptide expressing nucleotide sequence isolated from the Sargasso Sea
agattaaggttagtaagtgggacaacaaacccaaagttagctgaagaaattgcatcatacttagggattgaaaatgtaccattaatatctaaaagatttgcagatggtgaactttatgttcagattcagcaatctattagaggttgtgatgtattccttatacaacctacatgcgctcctgtaaacgatagtttaatggagctcatgataatggttgatgcttgcaaaagagcttctgcaagacaaataacggctgtaattccctattttggatatgcaagagcagataggaaaacctcaggaagagagtctataactgcaaaattaactgctaatttactagagaaatcaggagttgatagagttttagcaatggacttgcactcggctcaaatacaaggctacttcgatataccatgcgatcatatttacggttcacctgtattaattgattatctagaatctctagatttagaagaaatagttgtagtctctcctgatgttggcggggtagcaagagcaagagcgttcgcgaaattaatgaatgatgcgccgttggctatcaaagataaaagaagagctgctcataatatcgctg

SEQ ID NO: 253120 - DNA, 608 bp, Unknown
  Bacterial polypeptide expressing nucleotide sequence isolated from the Sargasso Sea
aatgaagcttcttacaggaaacagtaataaaaaccttagcctcaaaatatcaaaatttttaaaaacaaaattagttcattcaagtataagaaaattttctgatggagaaatttatatagagattaaggaaaatataagaggtaatagtatttttttaattcaatctgtaagttcacctgcaaatgataatctaatggaacttttgttatgcattgatgctttaaaaagatcttcggcaaaaaatattactgcagtaataccttattttggttatgcaagacaagatcgaaaagttgcaccaagaacatctatatcagcaaaattagtttcaaatttaattactaaagccggagcagatagagttgtgacagttgacttgcacgcaggtcaaatccagggattttttgatattccagttgataacctttttgcaactccaatttttgctagacatgtaaaaaaaaatataaaaggaaaaaatttaatttgtgtttctcctgatgttggcggagttgaaagaaccagagctcttgcaagaaaattagatattggaatagctataattgataaaagaagaccagcgccaggaaaatctcaagttatgaatg

SEQ ID NO: 253121 - DNA, 658 bp, Unknown
  Bacterial polypeptide expressing nucleotide sequence isolated from the Sargasso Sea
agacaagataggaaagtggttccaagaacttctatttctgcaaaacttgtatcaaatttaatcacaaaagctggtgcagacagagtagtaacagttgatttacatgcaggccaaattcaaggattttttgatattcctgtcgataacttattttcaacacccatttttgcaagacatgtaaaaaaaaatattaaaagtaaaaatattgtatgcattgcacctgatgtaggtggtacagaaagagcaagagcacttggaaaaattttaaatgttggtcttgcaattgttgacaaaagaagaccaaaacctggtcaatcgcaagtaatgaatataataggagaggtcaaaggtaaaacttgcataatagtagatgatataatcgactcaggcgggactatagttaatgcagctaaagctttaaagaatcgtggtgcaaaagaagtttatgtttatatcactcatggagttttaagtggagatgctgtaaaaaaaattaaaaattctgtaattaaaaatttagtaattacagacacaattgacaataaaagtaaaattaagagtgctaaaaacattgaagttctatctatttcaggtttaatgggagaagctatcaaaagaatttctaactcaacatcagtttcagatttatttaaataat

SEQ ID NO: 253122 - DNA, 706 bp, Unknown
  Bacterial polypeptide expressing nucleotide sequence isolated from the Sargasso Sea
tgcttctaagatcactgcggttgttccatattttttctatgcaagacaggacagaagagtaagatcctcaagagttccaattagtgcaaaagttgtatctgacatgtttagttctgttggtattaatagagttctaactctagatcttcattctgaaacaatccaaggtttttttgatatgcctgccgataatgtttatgcaacaaaactaatggttgaagatatatccaaacattattctaaagataatttagttattgtttcaccagatgtaggtggggtcgtcagatcaagagcgctagcaaaatatctagatggtcttgatcttgcaattatagataagcgaagagatgtggctaatgagtcagaagtaatgaacataattggtgatgttgctggaaaagaatgtattgttcctgatgacataattgatacagcaggaacattatgcaatgcagccaaggctttaaaagatgctggggcaagtaaagtaagtgcatatataactcatcctgttttgtcaggtccagctattgaaagaataagtaattctgagattgatgaacttgttgtaactaattcgattcctcttacccaagatggtcaaaaatgcagtaaaatacgcgtcatatcgatcgcaccaataatatcagagtgtattaagaggctttctaatgaggaatccttgagtgcggtttttttataa

SEQ ID NO: 253123 - DNA, 337 bp, Unknown
  Bacterial polypeptide expressing nucleotide sequence isolated from the Sargasso Sea
gtagatctacatgcgggtcaaattcaaggtttttttgatataccaactgataatttatttgcggcaccagtttttattactgatattaaaaaaaaatttgataacaatgaaacaatcatagtttctcccgatgttggtggagttgtaagagctagagcaatagcaaaaagactagattgtgaattagcaataattgataaaagaagagaaaaagcaagtgtttcagaagttatgaatataattggagaggtagaaaataaaaattgcatactgattgacgatatttgtgacactgcgggaactcttactaacgccgcaaatgctctcaacaaaaaaa

SEQ ID NO: 253124 - DNA, 927 bp, Unknown
  Bacterial polypeptide expressing nucleotide sequence isolated from the Sargasso Sea
tggtttagtactcttctcaggcaatggaaatcctgatttatctaaagaaatagcaagagaattaagtgtggacttaggcaatgcaaaagtaaccacctttagtgatggagaaataagtataagtattaatgaaaatgttaggggtaaagatgttttcctaatacaaccaacttgcgctcctgcaggtgataatctacttgaattgataataatggtagatgcacttaggaggtcttcagcaggaagaattacagctgtaataccatattatggctacgctagacaagatcgcagagttagatcagaaagagttcccattagcgctaaagtcatggcagatatacttgaaagatctggaattgacagagtattgactgtagaacttcattctgagcaaattcagggcttctttgatataccggttgataatgtttacggaacaaaagtaatgagagacgatatacaaaaactaaactcagacaagcatttgattgtctctcctgatgtaggaggagtcgtcagatctagagctttaggaaaagtgttaggtttgagtgatttagcaattattgataaaagaagagacgaagctaatcaatcagaagtaatgaatgtgattggcgaagtaaaagataaggaatgtattatcgttgatgatatagcagataccgcaggcactttatgcaatgctgccgatgcgttaaagagtaaaggtgctttaaaagtctatgcttatattgttcatccggtactttcaggtgaagcgattgaaaaaatatcacaatcaaagcttgatcaattggttgtaacagatactataccgctctctgaagaagcgcgtgactgtgaaaaaataagaaagatcactatggcgcctactttagctgaagccataaggcgagttaataatgaagaatctataagtgc

SEQ ID NO: 253125 - DNA, 397 bp, Unknown
  Bacterial polypeptide expressing nucleotide sequence isolated from the Sargasso Sea
cgatgattccgatctggcgattatcgataaacgtcgcccacaagcgaacgtcgctcaggttatgcacatcatcggtgatgttcaaggccgcgactgcattatcgttgacgatatgatcgacacaggcggcactctgtgtaaagcggcagaagccttaaaagaacatggtgcaaaccgcgtatttgcttacgcaacccaccctgtgttctcaggcaaagcggctgaaaatattaccaactcagtgatcgatgaagttatcgttaccgatacagttcctttaagtccagaaatgttaaaagtggctaaagtcactcagttgacaatgtctgcggtactggcagaggctattcgtcgcgtaagtaacgaagagtctatctctgcgatgtttagccattaa

SEQ ID NO: 253126 - DNA, 910 bp, Unknown
  Bacterial polypeptide expressing nucleotide sequence isolated from the Sargasso Sea
cagacccatgttggtgtcgagcttgatgagccaaatctagctgaatttgcaaatggagagattcactgcagattcagtgaatctgttcgaggaggggatgtatttattatccaaagtcactctgctgcaacagatatgaccatcaatgattcaatcatggaacagctaataatggttgatgcggctcgacgcgcatcagcgaagcgcataacggtagtctgccctttctatggttatgcaaggcaggataggaaatcagaaggaagagagcccatcacagcgcgtctcttggctaacctctttatcgctgcaggtgtgagcaggatggtttcggtagatctgcatgcaggccaaatacagggattcttcgataaaccagtcgatcacttaactgctatgccagtacttgtggattatatgcgaactcttggagatgatttagttatcgtttctccagacactggaagagtgaaagtcgcagaaagatacgcatccgaattaactgcagacttggcaatagtccataagcgccgcatcaagagtcagaaaaatcgtgttgaggctggagatgtactaggtgacgtagatgggagagtctgcgtcctgattgacgacatgatcgatacaggcgggaccattgtcggggcggctgagcagcttgcggatagaggggctaaggaagtgtatgcctgcaccacccatggtgttttctctgacccagctatagagcgtcttgaaaattcagtgatcaaagaagtcgccatgactaacaccctgccgcttcctgaggagaaaaatatttcgaaaattaaaatgctatctgtcgcctcgataatagctaacgccttagatgctgtttttgaggatacaagcgtaagtgaaatatttggggggaagcatttaagctagg

SEQ ID NO: 253127 - DNA, 772 bp, Unknown
  Bacterial polypeptide expressing nucleotide sequence isolated from the Sargasso Sea
gagtaaagagtcgaattttaatctaactaatagtagattgaggttagttagtgggacaacaaatcctaaattagctgaagaaattgcatcatacttagggattgaaaatgtacctttaatatccaaaagatttgctgatggagaactttatgtccagattcagcaatcaattagaggttgtgatgtgttcctgatacaacctacatgtgctcctgtaaacgatagtttgatggaacttatgataatggttgacgcgtgcaagagagcatctgcaagacaaataacggctgtaatcccctattttggatatgcaagggcagatagaaagacctcaggaagagagtctataactgcaaaattaacagctaatttgcttgaaaaatctggagttgatagggttcttgctatggatttacactcggctcaaattcaagggtattttgacattccatgcgatcatatttacggttcacctgtgttaattgattatctagaaacgttagatttagaagaaatagttgtcgtctctcctgatgtaggtggagttgctagagcgagagcatttgcaaaattaatgaaagatgctccgttggctattattgataaaaggagatctgctcataatatcgctgaaagtctaacagttattggtgaggttaaaggtaagacagctattcttatagacgatatgatagacactggaggcacaatttgttctggagctaatttattaaaacaagaaggagctaatagaatatttgcatgtgcatca

SEQ ID NO: 253128 - DNA, 712 bp, Unknown
  Bacterial polypeptide expressing nucleotide sequence isolated from the Sargasso Sea
ccgacgcgggtctgcgcgccggattacagcggtaatcccgtattttgggtatgcccgccaggatcggaagtcgagcccacgctcgcctatatccgccaaactagtggctaatttaatcacggaagccggcgcggatagggtgcttacgcttgaccttcatgccggccaaattcagggattttttgatattcctctcgacaacttgtttgcctcacccgtttttaataaggatatttccgaacggtataatggagacggcatcatgatggtctcaccggatgtgggaggtgtggtgcgcgcgcgcgccatcgcaaagcgcctggatgcggatctcgccatcatcgataagcgtcgtgaacgggccggggagtcagaggtcatgaacattatcggcgacgtgcaagatcgtcggtgcattcttatcgatgatattgtggattcagcgggcaccctttgcaatgccgcgactgctctcatggactccggtgcaaaatctgtttctgcatatgtgactcatggtgtcttatcgggtggtgccgtcgcccgggtgacggcctctccgctagagaaacttgtgaccaccgatagtatcatggcgaccgaggcagtacgagttgcacacaacatagagcaattgaccgtcgctccacttatcgcggaagccatgcagcgtattagtctcgaaaattccgtttcgagtctgtttgactag

SEQ ID NO: 253129 - DNA, 775 bp, Unknown
  Bacterial polypeptide expressing nucleotide sequence isolated from the Sargasso Sea
aatgacacctcttgaaccggtagcaaaaatattttcatgtactcaaagcattgagctttcgaaaaaaattgctagagaatacggtactgaacttggtaacgtaaatttttctcactacagtgatggagagtttcaaccttcatttgaggaatcagtaagaggtgctagattatttataatcggatctactcaaccaaactcagaaaatttgatggaacttctattaatgatagatgctgctaaaaggtcctcagcaagacatattacagctgtaataccatattttggttgggctagacaagatcgcaaggataaacctagagtcccaattggtgcaaaattaatagctaatttaattgaagctgcaggtgctacaagattaattacaatggatttgcatgcggatcaaatacaagggttttttgaaaaacctgttgatcacttgtatgcatcaactattttcatcccttacattcaatcattaaacttaaacaaacttacaattgcatcacctgatatgggtggttctaaaagagcatacgcatactcaagatttttaaaaagcaatgttgttatttgctacaagcaaagaaaaaaagctaatgtagtttcacatatggaattaataggtaaagttgaaggtaaaaatgtcattattgttgatgatatggtagatactgcgggaacccttactaaagctgcagatttaatggttcaaagaggtgctaaatctgttagagctatatgtactcatggtattctctctggaaatgct

SEQ ID NO: 253130 - DNA, 431 bp, Unknown
  Bacterial polypeptide expressing nucleotide sequence isolated from the Sargasso Sea
aatgaaattactaactggaaatagtaataaaaacttaagtaaaaaaatagcaaaatatttaaaatcaaaattagtcaactctagtataaaaaaatttgctgatggagaaatttatatagaaataaatgaaaatataagaggtaatactatttttataattcaatcaatatcttctcctgcaaatgataatttaatggaactattattatgtattgatgccttaaaaagatcttcggcaaaaaatattacagttgtaattccttactttggttacgcaagacaagatcgaaaagtagttccaagaacatcaatctctgcaaaattagtttctaatttaattacaaaagcaggcgcggatagaattgttactgttgatcttcatgctggtcaaattcagggtttttttgacataccagtagataatttatttt

SEQ ID NO: 253131 - DNA, 438 bp, Unknown
  Bacterial polypeptide expressing nucleotide sequence isolated from the Sargasso Sea
gatgaaaattttatcttgtaattcaaatcaaccattagctgaagcaatttcagcatatctaaatcagcctttgacaaaagctgaagttaaaagattttctgatatggaagttttcgtagaaattcaagaaaatgttcgtggagaagatgcatttatagttcaatcaacctcatatcctactaatgatcatctgatggaattactagttgctatagatgctcttaaaagaggctctgctcgaagaataactgcagttatcccttattttggttatgctagacaagatagaaaatctggacccagaactcctatctctgcaaaactagttgcaaatatgattactactgcaggagctgatagagtccttacattagatcttcatgctgctcaaattcaaggtttttttgatattcctactgacaacctttttgcagcccc

SEQ ID NO: 253132 - DNA, 336 bp, Unknown
  Bacterial polypeptide expressing nucleotide sequence isolated from the Sargasso Sea
aatgaaattagtatctggtaattcaaatataaatctagcggaaaacattggtaagtatttagatacgccattggcagattgtactgtaaaaaaattttctgataaggaaatttttgttgaaatgaatgaaaattgcagaggtgaagatgtttttattattcaatcaacatcttttcctgcaaatgataatttaatggagcttcttattttaattgatacattaaaaagagcttcagctaagagaattacagctgttattccttattttggatacgctagacaagatagaaaacctggaccacgaaccccaataacagctaaattagtttgctatct

SEQ ID NO: 253133 - DNA, 886 bp, Unknown
  Bacterial polypeptide expressing nucleotide sequence isolated from the Sargasso Sea
tcatgcgctggttcgaatccagccaccccagccaataaaaaagaaaatgattataaacctacagtaggaattttctcaggctcagcatcaacatccctttcagaggaagttgcaaaaatacttggtctcaagctaggcaatattgatcttggaaagttttctgatggtgaaatcaaagtagaaattcttgaaaatgttcgtggccatgaggcatatatcattcaatctacatgcgctccaaccaattctaacttaatggaattaatgttaataactgatgctctaaaacgctcttcagcatccagaataaccgccatccttccatattatggttatgctcgtcaagatagaagagtgagatctgccagagttcctattagtgctaaagttatagcagacatgatgaattctgttggcgttgatagagtgctaactgtagatcttcattcagaatctattcaagggttctttgatatgccggcagataatgtctatgcaactaaaattatgcatgatgatattaagtcaaagtccgcaaatgatgaaaaaattttagttgtttctccagatgtaggtggagtagtccgcgcaagggcattggcaaaattcttagatgaatcagacctggctattattgataagagacgcgcaacagcaaatgaatctgaagtaatgaatattattggagatgtccaaggaaaaagctgtattgttcctgatgatatcattgatacggctggaacattatgcaatgcagctcaggctttgaaagatgcaggggccgcaaaagtaaaggcttatattactcatccggtactatctggacctgcaattgaaagaatctcaaaatcttcaattgacgaattagttgtaaccaattccatat

SEQ ID NO: 253134 - DNA, 521 bp, Unknown
  Bacterial polypeptide expressing nucleotide sequence isolated from the Sargasso Sea
tgataatgtttatgcaacaaaactaatggttgaagatatatccaaacattattctaaagataatttagttattgtttcgccagatgtgggcggtgttgttagatcaagagcgttagcaaaatatctagatggtcttgatcttgcaattatagataagcgaagagatgtggctaatgagtcagaagtaatgaacataattggtgacgttgctggaaaagaatgtattgttcctgatgacatcatcgatacagcaggaacattatgcaatgcagccaaggctttaaaagatgctggagcaagtaaagtaagtgcatatataactcatcctgttttgtcaggtccagctattgaaagaataagtaattctgagattgatgaacttgttgtaagtaattcgattcctcttacccaagatggtcaaaaatgcagtaaaatacgcgtcatatcgatcgcaccaataatatcagagtgtattaagaggctttctaatgaggaatccttaagtgcggtttttttataag

SEQ ID NO: 253135 - DNA, 682 bp, Unknown
  Bacterial polypeptide expressing nucleotide sequence isolated from the Sargasso Sea
gtaattccatattttgggtatgcgagacaagatcgtaaggttgtaccaagaacttccatttctgcaaaattagtatcaaaccttataacgaatgcaggtgctgaccgagtggtaacagtagatttgcatgcaggtcaaattcaaggtttttttgatattcctgtagataacttatttgctacaccaatctttgcaaagcatattaaaagaaaaattaaaagcaaaaatattatatgtgttgcccctgatgtgggaggagttgaaagggcaagagctttaggaaaaaaattagatgtcggtttagcaatagttgataaaaggagacctagtcctggaaaatcgcaagttatgaatgttattggaaatgtaaaaaataaagtctgtattttaactgatgatataattgactctggaggaacgatagtaaatgcagctgatgctttattaaaaagaggagcaaaagaagttcatgtatatgcaactcatggggtttttagcggtgatgcagttaaaaagataaaaaattcaaaaattaaaaacttagttattacagatagtatagatagttcagacaaactaaaaaaagcaagaaatattgaagtattatcaatatcaatcttactagctgaggctatcaaaaggatttctaattcaacatctgtctcagatctatttaaataaa

SEQ ID NO: 253136 - DNA, 655 bp, Unknown
  Bacterial polypeptide expressing nucleotide sequence isolated from the Sargasso Sea
gctgatagaaagacttccgggaagagaatcaataactgcgaaactcactgctaacttactagaaaaagcaggggttgatagagtgctcgctatggatttacattcggctcaaatacaaggctactttgatattccatgcgatcatatttacggttcgcctgttttaattgattatttagaaagtttaaatttagaggatgttgtagttgtatcgcctgatgtgggtggagtggcgagggcaagagcatttgcaaaattaatgaatgatgctccgttggctatcattgacaaaaggagatcagctcataatattgctgaaagtcttactgttattggggaagtcaaaggtaagacagctattctcatagacgatatgatagacactggtggcacaatttgctctggagctaatttattaaaaaaagaaggggctaacagaatatttgcttgtgcttcacatgctgtattctctcctccctcttatgagagattaagtactaaggatttattcgaacaagtaattgttactaacagcataccagttcttgttaaagataattttcctcagttaaaagttctctctgtcgcgaatatgctaggtgaagctatttggagaatacacgaagaaagttcggttagttcaatgttcagataa

SEQ ID NO: 253137 - DNA, 745 bp, Unknown
  Bacterial polypeptide expressing nucleotide sequence isolated from the Sargasso Sea
gatggagattatgctaataattgacgctttaaggcgttcatcggcgggacgtattactgctgcaattccatattttggttatgcaagacaagacagaagagttcgttcttctagagtgccaataagcgctaaagtagtggcaaacatgcttgagtcagctggtgtaaatagaattctaaccatggatttgcactctgaccagatacaaggattttttgatataccagtagacaatatttatgcaactccaataatgttgggagatatttgtaaaaaccattttaatgaccctgttgttgtatctcccgacgttggaggagttgtccgtgcgagagcattcgcaaaagagctcaacaccgatcttgcaattattgataaaagaagagcaagagccaacgagtcagaggttatgaatattattggagatgttggtggtcgtccatgtttgatcatggatgatgtagttgatacagctggaacattaacaagagctgctgaagcattgaaaaatcatggagcttcaaaagtagttgcatactgtactcatcctgttctctctgggaatgctattgaaaaaatcaaacaatctgccctcgatgagttggtcgtaacagacaccataccactctctgaaattgcgcaagcatcagataaaatcaggcaaatttcttgctcagggcttcttgccgagacaatattaaggatttctaagtcggattctgtaagttcattgttcttaagttaa

SEQ ID NO: 253138 - DNA, 574 bp, Unknown
  Bacterial polypeptide expressing nucleotide sequence isolated from the Sargasso Sea
atgaagcttcttacaggaaatagtaataaaaaccttagcctcaaaatatcaaaatttttaaaaacaaaattagttcattcaagcataagaaaattttctgatggagaaatttatatagagattaaagaaaatataagaggtaatagtatttttttaatccagtctgtaagttcacctgcgaatgacaatctgatggaacttttgttatgcattgatgctttaaaaagatcctcagcaaaaaatattactgcagtaataccttattttggttacgcaagacaagatcgaaaagttgcaccaagaacatctatatcagcaaagttagtttcaaatttaattactaaagctggtgcagacagagttgtaacagttgacttgcacgcaggtcaaattcagggattttttgatattccagtagataacctttttgcaactccaatttttgctaggcatgtaaaaaaaaatataaaaggaaaaaatttaatttgtgtttctcctgatgttggtggagttgaaagaaccagagctcttgcaagaaaattagatattggaatagctataattataaaagaag

SEQ ID NO: 253139 - DNA, 690 bp, Unknown
  Bacterial polypeptide expressing nucleotide sequence isolated from the Sargasso Sea
aatgaagttattaacaggaaatagtaataaaactctcagcaaaaatattgcaaaatatttaaaatcaaaacttgttaattcaagtattagaaaatttgctgatggtgagatttatattgaaattaatgaaaatataaggggtaacagtatatttataattcaatctatctcttctcctgcgaatgataatttaatggagttgttgttgtgtattgatgcattaaaaagatcctccgctaaaaatatcactgcagtcattccttattttggatatgcaagacaagatagaaaagttgttccaagaacatctatttcagcaaaacttgtttcaaatcttattactaaagcaggagcagacagaattgtgactgtggatttgcatgcgggacaaattcagggattttttgacatacctgtagacaatctttttgcaacacctatttttgctagacatgtcagaaaaagaattaaaagtaaaaaaattatttgtgttgctcctgatgttggtggaactgaaagagcaagagcacttggaaaacttttaaatgcagaactagcaatcgttgataaaagacgccctaaacctggtcaatcccaagtaatgaatgttataggagatgtaaaaaataaaacttgtattttagttgatgacataattgattcaggaggcacaattgtaaatgcagcagc

SEQ ID NO: 253140 - DNA, 793 bp, Unknown
  Bacterial polypeptide expressing nucleotide sequence isolated from the Sargasso Sea
gatgaaattattatccggaaacagcaacaaacctttaagcaagagtatttcaaaatatcttaaatctaaactagtaaattctagtattagaaaattttcagatggtgaaatttatgttgaaattaacgaaaatattagaggaaacagtatttttataattcaatctgtatcttcacctgctaatgataatttgatggaacttttattgtgtattgatgcactgaaaagatcatcggcaaaaaatataaccgctgtaattccatattttggttatgcaagacaagatagaaaagtagtgccaagaacatcaatttctgcaaaattagtatcaaatttaattacaaaagcaggcgctgatagagtcgttactgttgatttgcatgcaggtcaaattcaaggtttctttgatattccagtagataacttatttgcaactcctatttttgcaagacatgcaaaaaaaaagataaaaagtaaaaacctaatttgtgttgctcctgatgtaggtggtactgaacgagctagagcactaggaaaaattttaaatgttggattggctattgtagataaaagaagaccaaaaccaggtcaatctcaagtaatgaatattgttggggatgtaaaagagaaaacctgcataattgttgatgatataatcgattcgggtggaacaatagtaaacgcagctaaagctcttaaagatagaggtgctaaagaagtatacgtatacataactcacggagttcttagcggagaagctgtaagaaagattaaaaattcagtaattaaaaat

SEQ ID NO: 253141 - DNA, 450 bp, Unknown
  Bacterial polypeptide expressing nucleotide sequence isolated from the Sargasso Sea
atgtaggaggtgtggtcagagcccgtgcgttggcaaaaagtcttgatgcagatcttgctataattgataagcgccgagaacgcgctggagtatctgaagttatgaatattataggggatgtgagtaatcggcactgcatactcgtcgacgatatagttgattcgggtggaacactctgtaatgcggcagaagcgttaatggccgcaggaggtctatccgtatctgcttatataagtcacggggtgctttctgggggagccgtagcaagagtaaagaactctccactaaaagagctggtaaccacagatagcataaaagccactgaagctatgcttgaagcaaaaaatatgcgccagataagcatagctcccttattaggagaagcgatattaagaatcgctgaatctagatcggtatcaagtttgtttaattataacaattctgattaaa

SEQ ID NO: 253142 - DNA, 541 bp, Unknown
  Bacterial polypeptide expressing nucleotide sequence isolated from the Sargasso Sea
atgaaattattaactggaaatagtaataaaattctaagtaaaaatattgccaaatatttaaaatccaaacttgtcaattctagtataagaaagtttgcagatggagaaatttacattgagataaatgaaaatataagagggaacagcatttttataattcaatcaatttcctcaccagcaaatgataatttaatggaattacttttatgcattgatgctttaaaaagatcttcagcaaaaaatataactgctgttattccctactttggttatgcaagacaggatagaaaagttgttcccagaacatctatatcagcaaagcttgtttcaaatttaataacaaaagcaggagctgatagggttgtgacagttgatcttcatgctggtcaaattcaagggttttttgatatccctgtagataaccttttttctactccaatctttgcgcgacacgttaaaaaaaagatcaaaaataaaaatttaatctgtgttgcccccagatgttggtggaacggagcgagcgagagcacttgtaaaattt

SEQ ID NO: 253143 - DNA, 884 bp, Unknown
  Bacterial polypeptide expressing nucleotide sequence isolated from the Sargasso Sea
tggatctcggatgaaattctctcctgtaatagcaaccgtccgcttgccgaggcgattgcagcctgtcttgatgttccccttacaaaggcagatgtgcggcgcttcgctgacatggaagttttcgtcgaaatcggcgagaatgttcgcggcgaggatgtgttcgtcatccagtccacctgctttccggccaacgacaatgtcatggaactgctagtcgcgctcgacgcgctgcgccgtggctcggcccgccggatcaccgccgtgctgccctattacggctatgcacgccaagaccggaaatccggtccccgtacgccgatctcagccaagctgctggccaaccttatcacatccgccggtgccgaccgcgtgctgacgatcgatctgcatgccggccagattcagggcttttttgacattccaacagacaatttgttcgccgccccggtctttatcgaggacatccgcacccgctatgacggttccgagcttatgatcgtctcgcccgatgtcggcggcgtggttcgcgcccgctcgctcgcacggcggctcgaggccgacctcgccatcatcgacaagcgccgccccaaggccggtgtgtcggaagtgatgaacatcatcggtgatgtcgacaagcgtcattgcatcatggtcgacgatattgtcgattccggtggcacgctctgtaacgctgccgccgcgctgatggatgccggcgcgatcagcgtcgatgcttatgtcacccacggcgtgctgtccggcggggctgtcagccgcgtcgcttcctcgccgctgagctcactggtgacgacggattcgattcccgccacggaagccgtccgcgtggcccgcaatgtgcgccatctgtcggtggcgccgctgct

SEQ ID NO: 253144 - DNA, 373 bp, Unknown
  Bacterial polypeptide expressing nucleotide sequence isolated from the Sargasso Sea
atgaaaattgtttcaggcaacagtaatatacctctagcagaggaaatctctaaataccttaacgtaaaattgcttaaggcaacaattaaaaaatttcctgataaagaaatatttgtagagatacaagaaaatgtaagaggcgaggatgtttttgtaattcaatccacgtcatttcctgcaaacgatcacctgatggaacttttagtcactattgatgctttaaaaagaggatcagcaaagaggattgctgcgattgttccttactacggttacgcaagacaagatagaaaatctggtccaagaacccctatttctgcaaaattagttgctaatttaatgagtactgccggagctgatcgagctttaatggtga

SEQ ID NO: 253145 - DNA, 721 bp, Unknown
  Bacterial polypeptide expressing nucleotide sequence isolated from the Sargasso Sea
aggagaactaaagcaagaactcccataagtgcaaaattaattgcaaatcttttgagtggcgctggtattgaaaggattctaactcttgatttacactctgctcaaattcagggtttttttgatataccagttgataatctttatgcgtcaccaatttttgaacttgatatttctcattattttgaaaagcaagaattgctcaccgttgtttcaccagatgtaggtggagtggcaagagctaggggtttagctaaaacaattaatgctgaccttgcaattgttgataagagaagaaatcaacctggtgaaattgcatcaatgacagtaataggtgaagtaaaaaataaaatctgcattattgtagatgatatctgtgatactgcaggaacgttagttaaagcttctgatttacttattaatgaaggggcaattgaggtacatgcatatatctcccatggagtactttctgacccagcaatagacagaatagaaaaatcaagcttgagttcattggttgtaaccgattcgataagtataattccaaaaattaaaaacagtaataaaataagaatcgttccaacagcacctctatttgctcaggcattactaaatatagctaatggaaattctgtatcttctttatttgatagtgaaagattaaggcctatatacaaaccttactatcctaaatatcatattgaaaaaaaacgtaaggcataat

SEQ ID NO: 253146 - DNA, 610 bp, Unknown
  Bacterial polypeptide expressing nucleotide sequence isolated from the Sargasso Sea
aatgaaattattatcaggaactagcaataagcctctgagtaaagagattgctaaattcttaaaatctaaactagttcattcaagcattagaaattttgcagatggtgaaatttatattgaattaaatgaaaacattagaggtaacagtatttttatcattcagtctatttcatctcctgcaaacgacaacttaatggaacttttgttgtgtatagatgctttaaaaagatcatctgctaaaaatattacagctgttattccatattttggttatgctagacaagatagaaaagtggttccaagaacatctatttcagcaaaactcgtttcaaatttaattacaaaagctggagcagatagagttgtaacagttgacttgcatgcaggtcaaattcaaggtttttttgatattccagtcgacaacctattttcaacacctatatttgcaagacatataaaaaaaaatattaaaagtaaaaatattgtatgtgttgcacctgatgtaggtggtactgaaagagcaagagcacttggaagaattttaaatgttggtcttgcaattgttgataaaagaagaccaaaacctggtcaatctcaagtaatgaatgtt

SEQ ID NO: 253147 - DNA, 737 bp, Unknown
  Bacterial polypeptide expressing nucleotide sequence isolated from the Sargasso Sea
attgttgctttgtattgatgctctaaaaagatcatctgcaaaaaacataacagctgtaattccatattttggatatgctagacaagatagaaaagtcgttccaagaacatctatttcggcaaaacttgtttcaaatttaattactaaagctggtgccgatagaatagtgactgttgatttgcatgcaggacaaattcaaggattttttgatattccagtcgacaacctttttgcaacaccaatatttgcaagacatgctaaaaaaaaaattaaaagtaaaaaaattgtttgtgttgcaccagacgtaggtggaacagaacgagcaagagcactaggaaaacttcttaatgttggcttggctattgttgataaaagaagaccaaaacctgggcaatcacaagtgatgaatgttattggagatgtgaaaggtcaaacttgcattattgtagatgacataattgactcagggggaactattgtaaatgcagcaaaagcattaaaagcaaaaggtgctaaagaagtttttgtttatatcactcatggtgttctaactggagatgctgtaaaaaaaattaaaaattctgtaattaaaaatttagttattactgatacaattgataattcagaaaaaactagaaatgttaaaaatatagaagttttaccaatttcagggctaataggtgaagctatcaaaagaatatctaattcaacatcagtatctgatttatttaaataat

SEQ ID NO: 253148 - DNA, 553 bp, Unknown
  Bacterial polypeptide expressing nucleotide sequence isolated from the Sargasso Sea
aatgaaattattaacaggaaatagcaataaagctttaagcaaaaatattgctaaatacttaaaaactaaaatcgtaaactctagtattaggaagtttgctgatggagagatttatattgaaataaatgaaaatatcagaggcaacagtatttttataattcagtctatttcttctccagcaaatgataatttgatggaattgctactctgcattgatgctttaaaaagatcatcagcaaaaaatataacagctgtcataccgtattttggatatgcaagacaggatagaaaagttgttccaagaacttctatctctgccaaattagtctcaaatttaattactaaagctggcgctgatagagtggttactgtagatttacatgcaggtcaaatccaaggattttttgatattcccgtagacaatttgtttgcaactccgatcttttgcaagcatgtaaagaaaaaaataaagaacaaaaatattattttgtgtcgcttccagatgttgggaggaacgggaaagagcgaggggctctttgggaaaaatttttaa

SEQ ID NO: 253149 - DNA, 349 bp, Unknown
  Bacterial polypeptide expressing nucleotide sequence isolated from the Sargasso Sea
  misc_feature (332)..(332): n is a, c, g, or t
aatgaaattattatctggcaatagcaataaaccattaagcaagaatattgctaaatttttaaaatctaaattagtcaattctagcattagaaatttttctgatggagaaatttacgtggaaattaatgaaaatattagagggaatagtatttttttaattcaatctgtttcatctcctgcaaatgataacctaatggaactactattatgtattgatgcacttaaaagatcatcagcaaaaaatattactgctgttatcccttactttggttatgctagacaagatagaaaagttgcaccaagaacatccatatcagctaagcttgtctcanatctaatcactaaagca

SEQ ID NO: 253150 - DNA, 593 bp, Unknown
  Bacterial polypeptide expressing nucleotide sequence isolated from the Sargasso Sea
taaggctggcgcagacagagtggtaacagttgatctgcatgctggacaaattcaaggtttctttgatttaccagttgataacctttttgcaacaccaatatttgctagacatgtgaagagaaacattaaaggaaaaaatttaatttgtgtttcaccagatgtgggtggagttgaaagatctagagctcttgcaagaaaactagatataggaatagcaattattgataaaagacgaccagcgcctggaaaatcacaagttatgaatgttattggaaatgtaaaaaataaaacttgtataataattgatgatataattgactctggtggaacaattgtgaatgctgcacaagcgcttattaatagaggtgctgaagaagttcacgtttatataactcatggagttttaagtggagaagctgtagaaaaaataaaaaaatcgaaaataaaaaagttggtaattactgatacaattgataattcagagaaggtaaaaaaagctaaaaatatagaggtattatcaattgctaatttacttggagaggcaattaaacgaatttccaactctacttctgtttcagatttatttaaataaa

SEQ ID NO: 253151 - DNA, 708 bp, Unknown
  Bacterial polypeptide expressing nucleotide sequence isolated from the Sargasso Sea
gtattcgtaatagagtccctatcctacccagctaatgacaatataatggaactgctggtaatgatagatgcacttaaaagagcttcagcaaaaaggattactgctgtgatcccttattatggatatgcacgtcaagacagaaaaccagggccaagaactcctatctcagcaaaactagttgcaaatttaataacaactgctggagcggatagagttcttactttagatcttcatgctgaacaaatacagggattttttgatatacctacagataatttatttgcaggtccagtgttttcaaaagacataaaagaaaaatatgaaattagtaatcttgtagccgtttcacctgatattggtggagttgtgagggcaagagcaattgcaaataaaattggagcctcaattgctattgttgataaaagaagaccaagagcaggtgaaagtgaagtaatgaatatcattggtgacgtaaaaggaaaagattgcattattttagatgatatcattgattcagcaggaacaatttgtaatgcagctgataaaattatagatttaggagctaacagtattacttcttatgttacgcacggagtattaactggtaatgccttagaaaaaattagtggatcaaaattgactgaacttgtaattacagattcaatcaataatcaggaaaaattaaaagcttgtgagaaaattaggtca

SEQ ID NO: 253152 - DNA, 517 bp, Unknown
  Bacterial polypeptide expressing nucleotide sequence isolated from the Sargasso Sea
atgaaattattatcaggaaatagcaataaacctcttagtaagaaaattgctaaatatttaaaatctaaattagtcaattcaagtataagaaatttttctgatggtgaaatctatgttgagataaatgaaaatataagaggaaatagtatttttattattcaatctgtttcttcaccagcaaatgataatttaatgcaacttttgttgtgtatagatgctttaaaaagatcgtctgccaaaaatataactgccgtaattccatattttggatacgcaagacaagatagaaaagttgttccaagaacttctatttcagcaaaacttgtatctaacctaatcacaaaagcaggggcagatcgagttgtaacagtagatttacatgcaggacaaattcaaggtttttttgatattccagtagataacttgtttgctactcctatttttgcaagacacgttaagaaaaaaattaaaagtaaaaatatgatttgtgttgctccaagatgtgggtggaactgag

SEQ ID NO: 253153 - DNA, 421 bp, Unknown
  Bacterial polypeptide expressing nucleotide sequence isolated from the Sargasso Sea
atgaagattctcactggaaatagcaataaacagctaagtaataaaatttcaaaaaatctaaaaaataaattagtaaataccagtattagaaaatttgcagacggtgagatatatattgaaattaatgaaaatataagaggtaacagtatttttataattcaatcagtatcctcgccagcaaatgataatttaatggaattgcttctttgtatagatgcacttaaaagatcatctgcaaaaaatatcactactgtaattccttattttggctatgccagacaagatcgtaaggttgtaccaagaacttctatttctgcaaaattagtctcaaacttaattacaaatgcaggagctgacagagtagttacagtagatttgcacgcaggacaaattcaaggtttttttgatatccctagttgat

SEQ ID NO: 253154 - DNA, 241 bp, Unknown
  Bacterial polypeptide expressing nucleotide sequence isolated from the Sargasso Sea
gtttatattgaaattaatgaaaatattagaggtaatagtatatttgtaattcaatctacttccaacccagccaatgacaatttaatggagttattaatttgcatagatgccttgagaagatcatcggcaaaaaatattacagcagtaattccttattttggatatgctagacaagacagaaaggttgttcctagaacagcaatatccgcaaaattagtttcaaatttaattactaatgcag

SEQ ID NO: 253155 - DNA, 523 bp, Unknown
  Bacterial polypeptide expressing nucleotide sequence isolated from the Sargasso Sea
gtccagtctacgtctaatcctgctaatgataatttaatggagcttttgatctgtattgatgctttgagaagatcttcagctaaaaacattactgcagtaatcccctactttggttacgccagacaagatagaaaggtagtgccaagaacagcaatatcagcaaaattggtttcaaatttaattactatggcgggtgcaaatagaattttaagtgtagatttgcatgctggtcaaattcaagggttttttgatattcctgtagataacttatttgcaacacctatttttgcaagacatattaaaaagaaaatgaaattaaataatatagtttgtgtatcacctgatgttggtggtgtcgaaagaacaagagctctaagtagaagaattaactctggtattgctattatagataaaagaagaccttctccaggtaaatctgaagtaatgaatatagtaggaaacataaaaaataaaaattgtgtaattgttgatgacataatagattctggaggaactattgtga

SEQ ID NO: 253156 - DNA, 634 bp, Unknown
  Bacterial polypeptide expressing nucleotide sequence isolated from the Sargasso Sea
gagaacaccaataacagctaaactagttgctaatctaattgccaaatcaggagcagatagagtattaagcatggatttacatgcaggtcagattcaaggtttttttgatattccgaccgataatctttttgctgcaccgattctcttatctgatattgaaaataagataggatcaaatgacactatggtagtatctccagatgtaggaggtgttgtaagagcgcgtttaattgcgagtagaataaactctgatctagccattgttgataaaagacgtgaaaaagcaggtgaatctgaagtaatgaatattattggtgatgtatctgatagaagttgctttatgattgatgatattgttgattcagccggaactttatgtaatgcagcagaggcattaattaattcgggtgctaaggaagtttttgcacatgtaactcatggtgttttatctggggaagctataaaaagagtaaacgactccgctcttacaaaattggtaattacagataccatcaatgagactgatgatattaaaaattccaataaaatagaaacggtaagcgttgtccgcctacttggggaagctataagaaggatttctgaagaaagatcagtatcgagtttgtttgattaa

SEQ ID NO: 253157 - DNA, 742 bp, Unknown
  Bacterial polypeptide expressing nucleotide sequence isolated from the Sargasso Sea
tacatagaaattaatgagaatattagaggcaatagtattttcttaattcagtctacatctgccccagccaatgataatttaatggaattactattatgtattgatgcattaaaaagatcttctgcaaaaaatattactgctgtaattccttactttgggtatgctagacaagacagaaaggttgctcctagaacatctatttcggcaaaattggtatctaatttaattacaaatgcaggagccaatagagttgttactgttgatttgcatgcaggtcaaatacaaggtttttttgacattccagttgataacttatttgctacgccaatttttgcaagacacgtaaaaaaaaatttaggcaagaaaaatttgatttgcgtagctcctgatgttggtggagttgaaagaacaagggctcttgcaagaaaattagacattggcatagccattattgataaaagaagacctgctccaggaaaatctgaagttatgaatataattggaaatgttaaaaacaaaacttgtataattatagatgatataatcgactctgggggaacaatagtaaatgcggcacaagctttaataaatagaggagcaaaagaaatacacgtttatataactcatggtgtcttaagtggcgaagcagtaaataaaataaaaaagtctaaaataaaaaaattagtaattacagatacaatcgataactatgataagataaaaaagactaagaatatacaag

SEQ ID NO: 253158 - DNA, 715 bp, Unknown
  Bacterial polypeptide expressing nucleotide sequence isolated from the Sargasso Sea
aaaatttgccgatggtgaaatttatatagagataaatgaaaatataagaggtaatagtatatttttattacaatcagtttcttcacctgcaaatgataatttaatggaacttctgttatgcattgatgcgcttaaaagatcttcagctaaaaatataacagcagttatcccttactttggttatgcaagacaagacagaaaagttgcgccaagaacatctatatctgcaaaacttgtttcaaatttaattacaaaggcaggcgcagacagaatagttacagttgatctacatgctggacaaatccaaggtttttttgatattcctgttgataaccttttttcaaccccaatttttgcaagacatattaaaaagaaattaaataataaaaatttaatttgcgtagcccccgatgttggtggagttgaaagaacaagggcgctcgcaagaaaattagatattggtatagctataattgataaaagaagaccgactccaggaaaatcacaagttatgaatgttattggtaatgttaaaggaaaaacatgtgtaatagtagatgatataattgattctggtggaacaattgtaaatgctgctcaagccttaataaatagaggagctaaagaagttcatgtttatataactcacggagttttgagtggggaggctgtagaaaaaattaaaagatccaagattaaaaatttagttcttact

SEQ ID NO: 253159 - DNA, 520 bp, Unknown
  Bacterial polypeptide expressing nucleotide sequence isolated from the Sargasso Sea
gataacatttattcttcaactattctgatgagcgacatgtggagacaaggctatccagatcaggtcattgtttctccagatgtaggtggtgtccaaagggcaagggcaattgccaggagattaggtaatgcaagtttggcaatcattgataaaaggcgtgaagcagccaataaatctgaagtgatgaacatcattggcgatgttgatcagaaaacggcgatcatattcgatgacatggttgatactgcaggcacgctttgtaatgctgcagctgcactgaaagataagggtgctttgaagacagtcgcttatgctgctcaccctgttctatcaggaccggcaatcgagagaatagctgattctgaacttgatgagcttgttgtcactgacaccattccactgactcaggatgcaaaagatacaggaaaaattagacaacttacgattgctgagcttttgggggagacaatagaaaggattgtagccgatcaatcggtcagttccctttatgcagaatagg

SEQ ID NO: 253160 - DNA, 781 bp, Unknown
  Bacterial polypeptide expressing nucleotide sequence isolated from the Sargasso Sea
aaatcccccagcagataatattgttgaattagcacttatgattgatgctgcaaaaagggcaagcgcaaagagaataaatgttataatgccttattttggttattctagacaagatagaaaagatgagcctagagttcctatttctgccaaagttatgatggatatatttattaaagctggtgcaaatagaattgtaacaatggacttacattctacacaaattcagggtttctcatcaaaacctgttgataacatttatggtagtttagttttaatgccagagcttgaaaaacactttcataacttatcagacaagaataactgtacagttttaattcctgatatgggatcaagtaaactaggccaatcttatgcgaaaagacttgaaatgagttttgctcttgtagataaaagaagaaacgcacacaatcaatcagaggtggtttcagttgttggcgatttaaaaaatcaacatatattaattatagatgatatgatcgatactgctggtacaatttctaatgctgctaaaatagctaaagaaaaaggagctttatcagttactgttgctgcaacacacggaatattctcttctaatgcacttgataagctttctgatgatattgtagacacaatttttataaccgacactatagacatatcaaataaagaaggttgcaaaaaattaaaaaagatttcatctgcaaaaatttttgcagaaacaattaacaggattcataacggtgagtcagtaagtcaactatttaggaaagtaacatga

SEQ ID NO: 253161 - DNA, 580 bp, Unknown
  Bacterial polypeptide expressing nucleotide sequence isolated from the Sargasso Sea
atgaaaataatcgcctgtaatagtagcaaatccctagcagataaaatttctaatcacattgatgtgccgttagcagatgcctctgttagaacttttaatgatagagaaatatttgtggaaataaatgaaaatattagaggtgaagatgtttttattattcaatcgacatcacatccagcaaatgaccatttaatggaacttttaattacaattgatgctgcaagaagaggttcagcaaaaaggattactgctgttatcccatattatggatatgcaagacaagatagaaagactggtcctagaacaccaataactgctaaacttgttgcaaatttaattacatctgcaggtgctgatagggtattaacaatggatttgcatgctggtcaaattcaaggtttttttgacattcctttagataatattttttctgtaagaccaataatcgatgatgttaaagaaagatttaatggaaacaaagatttagttgttgcttcacctgatgttggtggtgttgtaagggctagagcttttgctaagaggttagaggctggactagcaattgctgataaaagaagag

SEQ ID NO: 253162 - DNA, 609 bp, Unknown
  Bacterial polypeptide expressing nucleotide sequence isolated from the Sargasso Sea
tttcaaatttaattactaaagctggagctgatagagttgtgactgttgatttacatgcaggtcaaattcaaggtttctttgatattcctgtagacaacctttttgctacaccaatatttgcaagacatgtaagaaagaaaattaaaaataaaaaaattatttgtgttgctcctgatgtaggtggaacagagagagcgagagcattaggcaaactacttaacgtaggtttagcaatagttgacaaaagaagaccaaagcctggtcaatctcaagttatgaatattattggagatgtaaaagatcaaacttgtatcattgttgatgatataattgactctggtggtactataataaatgccgctaatgcactaaaaaaaagaggtgctaaagaagtttatgtttatatcactcatggagttttaagtggagatgcggtaaaaaaaataaaaaactctgtaattaaaaatttagttattaccgacacaattgataatgttgaaaaaactaaaaatgttaaaaatatagaagttttacctatttctggccttatgggagaggctataaaaagaatttctaactcaacttctgtttcggatttatttaaataat

SEQ ID NO: 253163 - DNA, 805 bp, Unknown
  Bacterial polypeptide expressing nucleotide sequence isolated from the Sargasso Sea
tatgagtattaacaatttggatatctttacaggaactgcaaatcctgaacttgctgaagaagtatcaaaaatacttggaattcctttgtcatctgccgatgttggttatttttcagatggtgaaattaaagtagagatagaagataatgtaagaggtcatgacacatttataattcagtctacttgtacaccacaaaataaaaatgtaatggagttgatgttgctcgcagacgcattaaagagatcgtctgcatcaaaaattactgcaattgttccatattacggttatgcaagacaggatagaagagtaagatctgcaagagttccaatcagcgcaaaggtggttgcagacatgtttgcatcagttggcattgatagagtcttaactattgaccttcattctgagactatccagggcttctttgatatgcctgctgataatgtctatgcgactaaattaatgatggaagacataaaagcaaataacgaaagagatgaaatagtcgtagtttctcctgatgttggaggagtagttagatccagagccttagcaaaattcctagatgatactgatcttgccataatagataaaagaagagctgctgcaaatcaatcagaagttatgaacataattggagaaattgaaggaaaggtttgtatcgtacctgatgatattattgatacagccggcacattatgcaatgctgcaaatgcattaaaagaaaagggagcaaaagctgtaaaggcgtatattacccaccctgttctttcaggtcctgctatagaaagattagaagaatcgcaa

SEQ ID NO: 253164 - DNA, 511 bp, Unknown
  Bacterial polypeptide expressing nucleotide sequence isolated from the Sargasso Sea
ctgctaccccagccaaacctcttttatcaacgcactgaggaaccacttgtgccagatatgaagctctttgcaggtaatgccgtaccagaacttgcccagaaagttgccgatcgcctctacaccaaacttggaaatgccaaagttggccgtttcagtgacggtgaaatcagcgtagaaattcatgaaaacgtccgtggctcggacgtttttattatccagtctacgtgtgcgcctactaacgataaccttatggaacttattgtgatgatcgacgcactacgtcgcgcatcagctggtcgtattacagcagtaattccttactttggttatgcacgccaagaccgtcgtgttcgttcagctagggtgccaattactgcgaaagtagtggctgacttcctgtctaacgttggtgttgaccgcgtacttactatcgacctacacgccgaacagattcaaggtttctttgatgttccggtggataacgcattcggtactcctatccttcttgctg

SEQ ID NO: 253165 - DNA, 409 bp, Unknown
  Bacterial polypeptide expressing nucleotide sequence isolated from the Sargasso Sea
aatgaaattattaactggaaatagcaacaagcctcttagcaaaaagatctctaaattcctaaaatctaaacttattaattcaagtataaggaaatttgcagatggagaaatttacattgaaattaatgaaaacattagaggaaatagtatttttattatccaatccgtttcctcgcctgctaatgataatttaatggaactattactttgcatagatgctttaaagagatcatctgcaaaaaacattacggctgtaattccatattttggttatgcaagacaggatcggaaagtagtgcctagaacttctatttcagctaagttagtctcaaatttaatcacaaaagctggtgccgacagagttgtgacagttgattgcatgcaggacaaattcaaggtttttttgata

SEQ ID NO: 253166 - DNA, 517 bp, Unknown
  Bacterial polypeptide expressing nucleotide sequence isolated from the Sargasso Sea
atgaaattattaactggaaatagcaacaaagttctaagtaaaaatattgctagatatttgaaaacaaaacttgttaattcaagtattagaaaattttcagacggtgaagtctatgttgagatcaatgaaaatataagaggtaatagtatttttattgtacaatctatatcatcacctgcaaatgataatttaatggaattattgttatgcatagacgctctcaaaagatcttctgcaaaaaacattacagctgtaattccttattttggatacgcaaggcaagatagaaaagttgttccgagaacatctatatcagctaaattagtctcaaatttaattacaaaagctggagcagatagagtagttactgttgacttacatgcaggacaaattcaaggcttttttgatattccagtagataaccttttcgcaacacctatttttgctagacatgtaagaaagaaaattaaaagtaaaaaaattatttgtgttgcacctagatgttggaggaactgag

SEQ ID NO: 253167 - DNA, 644 bp, Unknown
  Bacterial polypeptide expressing nucleotide sequence isolated from the Sargasso Sea
aatgaaaattttatcaggaacaagcaatccctcattaagtaaaagtatctctaaatatctcaaaacaaaacttgtaaatacaaatattaaaaaatttgctgatggtgagatatatgttgaaataaatgaaaatataagaggtaatagtgttttcgtaatacaatctagcgcaacacctgcaaatgacaacctcatggaactgctattgtgcatagatgctttgagaagatcctcagcgaaaaatataactgcagtaattccttattttggttatgcaagacaagatagaaaagttgtaccaagaacatctatctcggcaaaacttgtttctaatttgataactaatgctggagctcatagagtggtaaccgttgacttgcatgcgggacaaattcagggtttttttgatatgccagttgacaatttatttactactccattatttgcaaggtacattaaaaaaaatataagaagtaaaaatcttatatgcgtatcaccagatgcaggtgcgattgaaagaactagaggtttagcgacaaaaataaatgcagacttagctataattgataaaagaaggccagagcccggaaagtcaaaagttatgaatattattggtgatgtaaaagataaagactgtatgatta

SEQ ID NO: 253168 - DNA, 391 bp, Unknown
  Bacterial polypeptide expressing nucleotide sequence isolated from the Sargasso Sea
atgaaattattatctggaactagcaataagcctctcagcaaggacattgcaaagtttttaaaatctaaactagttaattcaagtatcaagaattttgcagatggtgagatatatgttgaattaaatgaaaatataagaggaaatagtattttcataattcagtctatctcatctcctgctaatgataaccttatggaacttttgttgtgcatagatgctttaaaaagatcctctgctaaaaatataacagcagttattccatattttggttatgcaagacaagatagaaaagttgttccaagaacatctatctcagcaaaacttgtatcaaatttaataacaaaagctggcgcaggagtttctcgatctcgcttgcgtcgctttcgcacga

SEQ ID NO: 253169 - DNA, 325 bp, Unknown
  Bacterial polypeptide expressing nucleotide sequence isolated from the Sargasso Sea
gctaaaaatattacggcagtgattccatactttggatatgcaaggcaagatagaaaggttgtacctagaacatcaatctctgctaaactagtttcaaatttaattactaaagctggagcagatagagttgtaacagttgatttgcatgctggtcaaattcagggatttttcgatattccagttgataacctatttgccacaccaatatttgcaagacatataaagaaaaaaataaaaagtaaaaatattatttgtgttgctccagatgttggtggtaccgaaagagctagagccctgggaaaaattttaaatgttggtcttgcta

SEQ ID NO: 253170 - DNA, 289 bp, Unknown
  Bacterial polypeptide expressing nucleotide sequence isolated from the Sargasso Sea
atgaagattattgcctgcaatagtaataaaattttagctgaagcaatttgctcatacattggagttagtttggcaaatgcatcacttagaagatttgcagatagagaaatatttgttgaaattaatgagaatataagaggagaagatgtttttataattcaatcaacatcacatcccgctaatgatcatctaatggaattattaattacaatagatgcagttaaaagaggttctgcaaaaagaattactgctgttattccttattatggttatgctcgcccaagataga

SEQ ID NO: 253171 - DNA, 712 bp, Unknown
  Bacterial polypeptide expressing nucleotide sequence isolated from the Sargasso Sea
aaaagatcttcagcaaaaaatattactggcggtaataccttattttggatatgcaagacaagatcgaaaagtggcaccacgaacatctatatcagcaaaattagtctcaaatttaattactaaagctggagcagacagagttgttactgtagacttgcacgcaggtcaaattcaaggattttttgatattccggttgataacctttttgccactccaatttttgcgagacatgtaaaaaaaaatataaaaggaaaaaatttaatttgtgtttcacctgatgttggtggagttgagagaacaagagctttagctagaaaattagatataggaatagctataattgataaaagaagaccatcaccaggaaaatctcaagttatgaatgttataggaaatgttaataacaaaacttgtattatagttgatgatattattgactctggtggaacaattgtaaatgcggcccaagctctaattaatagaggtgcgaaagaagttcatgtatatataactcatggagttttaagtggagaggcagttgaaaaaattagaaaatctaaaattaagaaattagttataacagacacaattgataatttagataagataaaaaaagcaaaaaatatagaagtattgtcaatttgtaatttattaggggaagcaataaaacgtatatcaaattctacgtctgtttcggacttatttaaataa

SEQ ID NO: 253172 - DNA, 409 bp, Unknown
  Bacterial polypeptide expressing nucleotide sequence isolated from the Sargasso Sea
atgaaaattattgcaggaaatagcaacctccctttatcatcagatgttggcaaatatcttcaaattgatcttgcaaaggcttcaatacgtagatttgctgatgaggaagtctacgttgaaataaaagaaaatattagaggagaagatgttttcgtaattgagtcaacttcttaccctgctaacgataatttaatggagcttcttgtcataattgacgccttgaaaagagcatctgcaaaacgtataaccgctgttcttccttactttggatatgctagacaagatcgtaaaccaggccctagaacgcctatatcagcaaaattagtggctaatttaatatctactgctggggctgacagagttctaacagttgatttgcatgctgaacaaattcaaggattctttgata

SEQ ID NO: 253173 - DNA, 607 bp, Unknown
  Bacterial polypeptide expressing nucleotide sequence isolated from the Sargasso Sea
tttcaatttaataactaaggctggtgcagacagagtggtaacagttgatctgcatgctggacaaattcaaggtttttttgatttaccagttgataacctttttgcaacaccaatatttgctagacatgtaaaaagaaatattaaagggaaaaatttaatttgtgtttcaccagatgtcggtggagttgaaagaagtagagctcttgcaagaaagctagacataggaatagcaattattgataaaagacgaccagcaccaggaaaatcacaagttatgaatgttattggaaatgtaaaaaataaaacttgtataataattgacgatataattgactctggtggaacaattgtaaatgctgcacaagcacttattaatagaggtgctaaagaagttcacgtttatataactcatggagttttgagtggagaagctgtagaaaaaataaaaaaatcgaaaataaaaaagttggtaattactgatacgattgataattcagataaggtaaaaaaagctaaaaatatagaggtattatcaattgctaatttacttggggaggcaattaaacgaatttctaactctacctctgtttcagatttatttaaataa

SEQ ID NO: 253174 - DNA, 736 bp, Unknown
  Bacterial polypeptide expressing nucleotide sequence isolated from the Sargasso Sea
aatgaaaattattgcaggcaacagtaataagagtttagcagaagcaatttgcgcatataatggtgtatcattatctgatacatccctaagaagatttgccgatagagaaatattcgtagaaattaatgaaaatattagaggagaagatgtctttattattcaatcaacatctcaccctgcaaacgatcacttaatggagttattaattacaatagatgctgccaaaagaggttcagcaaaaagaataactgctgtcattccttattatggatatgctagacaagatagaaaaacaggtcctaggactccaataacggcaaaacttgttgcaaacttaattacttcagctggagctgacagagtattaaccatggatttacacgcaggtcaaattcaggggttttttgatattcctctcgataatattttttctgctccaccaataattaaagatatgaaacaaaaattttccaatgaaagcaatctagtaatcgcatctccagatgttggtggtgtcgtgagagcaagagcttttgcaaaaagaatgaacgctgggctagctatagctgacaaaagaagagaaaaagctggcgagtctgaagtaatgaatattattggcgatgtaaaagacaaaacatgtattttactagacgatattgctgactctgctggaacactttgtaatgcagcaaaagctcttaaggacagtggcgctaaggaaatatactcatatata

SEQ ID NO: 253175 - DNA, 829 bp, Unknown
  Bacterial polypeptide expressing nucleotide sequence isolated from the Sargasso Sea
tattggataccactagcaaatgcttcaataagaaaatttgctgataatgaaatttttgttgaaattaatgaaaatataagaggagaggatgtttttattgtccaatctacttctcatccagcaaatgatcatttgttagaattattaatctgtatagatgcggcaaagagaggatctgcaagaagaattactgcggtaataccatattatggatatgctagacaagataggaagtctggtcctcgtactcctattacagcaaaattagttgctaatcttattacatcctcaggggcggatagagttttaacaatggatttacacgcaggacaaattcaaggtttttttgatattccattagataatatattttcagcacctccaattattaaagatatgaaagaaaaatttaaaaataataaaaatcttgtaatagcttcaccagatgttggaggggttgttagggcaagagcttttgcaaaaagattaaatgctggtttagctattgctgataaaagaagagaaaaagctggagagtctgatgtaatgaatattataggagatgtagaaaataaaacctgtattttacttgatgatatagctgactcagcaggtactttatgtaatgcagcaaaagctcttaagaatgagggtgctaaagaaattttctcatatattgctcacggtgttttatcaggcaaagctctagaaagaattcaaaattcagatattgaagaattagtcctaacagacagtattcaagcttcaaatgaaataaaaaatacaaaaaatattagacatattagtatcgctcctttaatgggggagg

SEQ ID NO: 253176 - DNA, 328 bp, Unknown
  Bacterial polypeptide expressing nucleotide sequence isolated from the Sargasso Sea
atgaagcttcttacaggaaatagtaataaaaaccttagtcttaaaatatcaaaatttttaaaaactaaattagtccattccagtattagaaagttttctgatggagaaatttatatagaagtcaaagaaaacattagaggtaacagtatattcatagttcagtctgtaagctctcctgcaaatgataatctgatggaacttttgctttgtatagatgcgttgaaaagatcttcagcaaaaaatattacagcggtaataccttattttggttatgcaagacaagatagaaaagtagctccaagaacatctatatcagcaaaattagttc

SEQ ID NO: 253177 - DNA, 502 bp, Unknown
  Bacterial polypeptide expressing nucleotide sequence isolated from the Sargasso Sea
atgaaaattttatctggaactagcaatcttaagcttagcaaggatatttctaaaaatcttaaactaaaattaatcaacacaaatataagaagatttgctgacggtgaaatctacattgaaattaatgaaaacattagaggtaacagtgtatttgtaattcaatctacttctaatccagctaatgataatattatggagcttttattagtaattgatgctcttaagaggtcgtctgcaaaaacagtcactgcagtaataccttactttggatatgctagacaagatagaaaagttgctccaagaacttctatttctgcaaaagttgtggctaacttaatttctaatgctggggctacaagagtagtaacagtggatttgcatgctggtcaaattcaaggtttctttgatatgccggtagataacttatatacagctccactttttgcaaaatatataaaaaaaaaattaagcacaaaaaaattaatttgtgtttctctctgac

SEQ ID NO: 253178 - DNA, 700 bp, Unknown
  Bacterial polypeptide expressing nucleotide sequence isolated from the Sargasso Sea
tatgacgcacagcaggcgacacataaagcctgctgcattattaaccggactcacaaactgccctgaggatcctaccgtgcccgacatgaagattttcgctggtaacgccataccagaactcgccaagaagatagccagccgtttatatatcaagctgggcgatgccgaagtcggccgttttagtgacggtgaagtctgtgtacaaatcaatgaaaacgtcaggggatctgacgtttttattatccagtctacttgcgccccaaccaatgacaacctgatggaactcattgtgatggtagacgccttacgccgcgcctctgccggtcgtattaccgctgttatcccatactttggttatgcccgccaggacagacgtgtgcgttctgcccgtgtgcctatcacggccaaagtcgtagccgactttttatccagcgtaggtgtagaccgtgtattaacggtggacttacacgctgaacaaatccagggcttcttcgacgttccggtagacaacgtctttggtagcccggtgttactggaagatatgcgcaaacgtgaattcgttgcaccagtagtggtatctccggatatcggcggtgtagtgcgtgcccgtgctatcgccaaactgttgaacgatgctgacttagccattatcgataaacgtcgtcctaaggctaacgtgtctcaggtgatgcatatcatc

SEQ ID NO: 253179 - DNA, 431 bp, Unknown
  Bacterial polypeptide expressing nucleotide sequence isolated from the Sargasso Sea
aatgataacaaacggcaagttaaaaattatatctggtaattccaatatctcgctagcaaaaagtatttgtaagagaataggcttattgtttgggacaaaagtgaagccggttaaggctcgtgtagagaggtttagtgatcaggagatttttgtagaggtttttgaaaatgtccgaggtgaagatatgtttatagttcagtcaacttctaatcctgctaatgacaaccttatggagctacttatcattgccgatgcgcttaaaagatcaagtgcaagtagagttacagcaataatttcatactttggatatgctagacaggacagaaggacaaaagctaggacccccattagtgcaaaactagttgccaatttgctttgcgcagccggtataaatagagtgcttacattagacttgcacgcagcccaaattc

SEQ ID NO: 253180 - DNA, 644 bp, Unknown
  Bacterial polypeptide expressing nucleotide sequence isolated from the Sargasso Sea
agttgctccaagaacatctatatcagcaaaattagtgtctaacttaattaccaaagctggcgctgatagagttgtgacagtggatttacacgcaggtcaaatacaaggtttttttgatattccagttgataatctatttgccacacctattttctcaagacacataaaaaaaaacttaaagaaaaataacttaatttgtgttgcacctgacgttggcggtgttgaaagaacaagagctcttgctagaaaattagacattggtttagctataattgataaaagaagaccagctccaggtaagtcccaggtcatgaatgttataggtaatgttaataataaaacttgtataatagtagatgatataattgattcaggtggaacaattgtaaatgcagctaatgcactaatgaatagaggtgctaaagaagttcatgtttatattacacatggagttttaagcggtgaggcagtaaacaaaataaaaaaatcaaaaattaaaaaattgatagtaacagatactatcgataactcagataaggtaaaaaaagctagcaatattgaggtattaacgatatctaatttattagctgaggccattaaaaggatttcaaattctacttctgtttctgatttatttaaataat

SEQ ID NO: 253181 - DNA, 487 bp, Unknown
  Bacterial polypeptide expressing nucleotide sequence isolated from the Sargasso Sea
aatgaaaattgtttcttgtaattccaatcaaccgcttgcagaaggcatttctgcctatttaaatcaacctttaacaaaagctatagttagacgattttctgacatggaagtatttgtcgagatacaggaaaatgttagaggcgaagatacttttataattcagtcaacttcatatccagcaaatgataatttaatggaattattggttgcaattgatgcattgagaagaggttctgctagaaggataacagccgttatcccgtattttggatatgcaaggcaagatagaaaatcaggacctagaacccctatttctgcaaaactcgttgcaaatctaatcacagttgctggtgcagacagagtgctcacactagacctgcatgctgcacaaattcagggtttctttgatataccaacagataatttattttctgtacctgtatttatagaaaatattttaaagagttataatccaaaagatttgtgt

SEQ ID NO: 253182 - DNA, 829 bp, Unknown
  Bacterial polypeptide expressing nucleotide sequence isolated from the Sargasso Sea
tatgaaagttcttgctggtacaagtaattcaaaattgtgcaaagacatagcaagacaactcaaactaaaattagttaattcaaatatcaaaagatttgcagatggtgaagtctatattgaaataaacgaaaacattagaggcaatagtatttttgttattcaatcaacctctaaccctgctaatgataatttaatggagcttttaatttgtattgatgcgctaagaagatcatctgcaaaaaatattactgctgttattccatactttggttatgcaagacaagataggaaagttgttccaagaactgctatctctgcaaaattagtttcaaatcttataactaacgcaggagcaaatagaattttaagtgttgatttgcatgccggacaaattcaaggtttttttgatattccagttgataacttatttgctacacctatctttgcaagatacataaaaaatagaattaaattaaaaaatatgatttgtgtagctcctgatgttggtggtgttgaaagaaccagagctctaagtagaaggcttaactcaagtattgctataatagataaaagacgaccggttcccggaaagtctgaagtaatgaatatagttggaaatgtaaaaaacaaaaactgtgtaattgtagatgatataattgactctggtggaactatcgtaaatgcggccaaagctttaaaagaaaaaggagcaaaagatgtgtatgtttttattactcacgctgtgttaagtggtcaggctgtaaacaaaatagaaggttcacaaattaaaaaattagtaactacagacactatagataactcaaaaaaa

SEQ ID NO: 253183 - DNA, 364 bp, Unknown
  Bacterial polypeptide expressing nucleotide sequence isolated from the Sargasso Sea
tatgagtaaaaaaaatttggacatctttactggaactgcaaatcctgaatttgcaattgaagtatctaaaattttaggaattgaaatttctgatgcagatgtaggttacttctcggatggtgagcttaaagttgaaattgaagaaaacgttagaggtcatgatacctttataattcaatcaacctgctcccccactaataagaatgtaatggaaataatgctaattgcggatgctttaaaaagatcatcggcatcaaaaattacagcgattgttccttattatgggtatgctcgacaagacaggagagtaagatcagcaagagttccgattagtgcaaaagttgttgcagatatgtttgcttca

SEQ ID NO: 253184 - DNA, 464 bp, Unknown
  Bacterial polypeptide expressing nucleotide sequence isolated from the Sargasso Sea
aatgaaattattaactggaaacagcaataaagttttaagtaaaaacattgctaaatacttaaaaacaaaacttgtaaattcaagtattagaaaatttgctgatggtgaaatttatactgaaataaatgaaaatataagaggaaacagtattttcattgttcagtctatctcctctccagcaaatgataatctaatggaattgttattatgtattgatgctcttaagaggtcgtcagcaaaaaatataacagcggtaataccgtattttggatatgcaagacaagatagaaaggttgttccaagaacttccatatctgcaaaacttgtttcaaatttaattactaaagctggtgctgatagagtggtaactgtagatttgcacgcaggtcaaattcaaggtttctttgatattcctgttgataacttattttctactccaatatttgctagacacgctagaaaga

SEQ ID NO: 253185 - DNA, 865 bp, Unknown
  Bacterial polypeptide expressing nucleotide sequence isolated from the Sargasso Sea
atagctgtcttcagcggaacagctaatcttgagcttgctgaaaaaatttgtaaaaaacttgctctgaaacaaggaaaagcagatatcggtcgttttagtgatggcgaaatcagtgtgaaaattaatgaaaatgtaagaggaaaagatgtttatataatccagccaacttgcagcccttctcacgtgaatttaatagagttgatactaatggttgatgctcttagatggtcttctgcaggtagaattacggctgttattccatattatggatatgcaaggcaagacagacgggtaagatctcaaagagtcccaatcagtgctaaagttattgctggtatcttagaaaggtcaggaattgacagagttttaacagtagagcttcactctgagcagattcaaggattttttgacatacctgtagataatatatacggcacaaaagttatctacgaggatatcaaaaaacaaaaattcaaagatatattagttgtaagtcctgacgttggaggcgtggtcaggtcaagagctctatctaagtttttagatattggtgacttggcaattatcgataaaagaagagatgaagcgaacaaatccgaggtaatgaatgtaattggagatgtttcaaaaaaagattgtttgctttatgacgatatggcagacacatgtggaacattgtgcaatgccgcagatgcattaaaagccaaagacgctagaagtgtgagtgcttatattactcatcctgtattatcaggtgaagcaatagaaaaaataaatcaatcttcacttgatcaattagttgtaacagatactataccgctctcggaagaagctaaatcctgtaaaaagataagatgtatatctt

SEQ ID NO: 253186 - DNA, 520 bp, Unknown
  Bacterial polypeptide expressing nucleotide sequence isolated from the Sargasso Sea
atgaaaattttatctggaactagtaatcaaaaacttagtaaggatatttccaaacaacttaagcttaaactagtaaatacaaatataaaaagatttgctgatggagaaatttatattgaaataaatgaaaatattagaggaaatagcgtttttgttgttcaatcaacttcaaatcctgctaacgataatttaatggagcttttgttagtaattgatgctttaaaaagatcatcagccaaaaatattacagctgtaattccatattatggctatgcaagacaagatagaaaagttgctccaagaacatctatctccgcaaaggttgtggcaaatttattaactaacgctggtgcgagtagagttgtaactgttgatttacatgctggtcaaattcaaggtttttttgacatgccggtagataacttatttacaactccgctttttgcaaaatatattaaaaaaaaattgaaaagtaaaaaattgatttgtgtttctccagatgttgggggcgttcaaagaa

SEQ ID NO: 253187 - DNA, 846 bp, Unknown
  Bacterial polypeptide expressing nucleotide sequence isolated from the Sargasso Sea
aaagattttctgacatggaagtttttgttgagtcaaaggaaaacgttagaggcgaagatatgtttgtcatacaatcaacctcatatcctgcaaatgataatttaatggaattactagttacattagacgcattaagaagagcaagtgcaaaaagaataacggctgtaataccttattttggctatgcgagacaagataggaagtcaggtccaagaaccccaatttccgcaaaacttgtagctaacttaataacctcagctggtgcagatagagttcttactatggatttgcatgcaggacaaatacaaggcttttttgatattcctacagataatctttttgcagcaccagtttttgttaaagatgttaaagatagatattcagatatccctactatagttgtttccccagatgttggaggagtattaagagcaagagctatagcaagaagaattaatgctggacttgcaattattgacaaaagaagagaaaaacctggtgcatctgaagttatgaatataataggtgatgtatctaaacatcattgtattcttgttgatgatattgttgattctggtggtacattatgtaatgcagctcaagctttagtttcagctggagcaatttctgttgatgcatatgtcactcatggtgtgctttcgggatctgcggtttctagaatccttaattcacctttacaaaatttagttacaactgactctattcaagcaactgaaccaatcaaattagcatcaaatattagacaaatttcaatagcatctatacttggggaagctataagaagagttcatacagaatcttcagtatcaagtttatttgattaat

SEQ ID NO: 253188 - DNA, 356 bp, Unknown
  Bacterial polypeptide expressing nucleotide sequence isolated from the Sargasso Sea
tctgaccgcagcgcgcgcagaacaggaaaagctcacaccggacacgcgccggttgcgcctgttcagcggcacctccaatcccggtctgaccagggagatcgcggcctatctgggtgttcccgatggtcctcgcgtctgcaaacgcttcgctgacggcgagctctacgtgcagatccaggagtcgatccggggctgcgatgtgtttctgatccagcccacctgcgctccggtgaatgatcacctgatggagctgctgatcatggtggatgcctgccgtcgggcttcggcgcgccagatcacagcggtggtgccctattacggctacgcccgcgctgaccgcaagaccgctgggcgtg

SEQ ID NO: 253189 - DNA, 646 bp, Unknown
  Bacterial polypeptide expressing nucleotide sequence isolated from the Sargasso Sea
atgaacgatcttaaaatatttagtggtcttgcaaatgaaccgttaaccgagggtatctgtcgataccttaatttacctatggggaagattgcacttgggcgctttccagatggtgaaatctcatgcaaaattgaggaagatgttcgtgggcgtgatgtgtttattgttcaacctacctgtccaccggtgaacgaacatatcatggaattgcttgtaatgattgatagttttaagcgcgcaagttcttttcgggttactgcagttattccatattttggctatgcccggcaggacagaaaggatgctgggcgagtaccaattactgcgaaactggtcgcaaatcttattacccgagctggggcagaccgggtattggccatggatcttcacgcagcccaaattcagggattctttgacgtcccagttgatcacctttatgcagcgcccgttctcaataattattttcgggcaatggatttgtcaaacgatgaccttgtcgtggttgctgcagatgccggaagcattaagcgaacgcttgggcatgccgcccgactgaatgtcccgctggcaatcgttgataaacgacgtgtgaatgctgagacaaccaaaagtgcgaatgtcattggcgcgaatgttgaggggaaga

SEQ ID NO: 253190 - DNA, 925 bp, Unknown
  Bacterial polypeptide expressing nucleotide sequence isolated from the Sargasso Sea
atgaagctacttacaggaaatagcaataaaaatcttagtcaaaaaatatcaaaatttttaaaaacaaaattagttcattcaagcattaaaaaattctcagatggtgaaatttatattgagataaatgaaaatatcagaggtaacagtatatttttgattcagtctataagctctcctgcaaatgataatcttatggaacttttactttgcgttgatgcacttaaaagatcttctgcaaaaaatattaccgctgtaataccttattttggttatgcaagacaagatcgtaaagtggcgcctagaacatctatatcagctaaattagtttcaaacttaataactaaggcaggcgctgatagagtggttactgttgatttgcacgcaggacaaattcaaggattttttgatattccagttgataacctttttgctacacctattttttcaagacacataaaaaaaaatgttaaaggaaaaaatttgatttgtgttgcacctgatgttggaggagttgaaagaactcgggcacttgctaaaaaattaaacataggaatagcaataattgataaaagaagacctacgccaggaaaatctcaagttatgaatgttataggaaatgtaaataataaaacttgtattatagtcgatgacattattgactctggaggaacaattgttaatgctgctcaagctttaattaacagaggagctaaagaggtacatgtgtatataactcacggtgttttaagtggtgaggcagtcgaaaaaattaaaaaatcacatataaaaaatttagtgataacagacacaatagataattcaaataagttaaaaaaagctaaaaatatcgaagtattatcaatttgtaatttattgggggaagcaataaaacgtatatcaaactcaacatcaggtcagatttatt

SEQ ID NO: 253191 - DNA, 427 bp, Unknown
  Bacterial polypeptide expressing nucleotide sequence isolated from the Sargasso Sea
atgtcacatcgagtaaaaatattagcctgttctgcatctgataaattagccaatgaaattgctaataaatatggtcagtcaatagctgaatatgaaagacaaagttttagtgatggagaatttcagatatctatcaatgaaacagtaaggggatgtgatgtattcataatccaaagtacaataccacccgctgacaacctaatggaaatgcttcttatgattgatgctgctaagagagcatctgctcacaagataatagctgttattccttatttcggttgggcaaggcaagacagaaaagataagccaagagttgctattggtgcaaaattggtagcaaacatgttggtttctgcaggcgttgatagggtgatgactatggatttacatgccgatcaaattcaaggtttttttgaagttcctgtag

SEQ ID NO: 253192 - DNA, 294 bp, Unknown
  Bacterial polypeptide expressing nucleotide sequence isolated from the Sargasso Sea
tggagctacaagagttgtaacagtagatttacatgccgggcaaatacaaggattttttgatatgccagttgacaacttgtatacagctcctctctttgcaaaatatataaaaaagaaattaaattcaaagaaacttatttgtgtgtcacctgatgtgggtggagttgctaggacaagagctctggcaacaagaataaaagctgatctatcaataattgataaaaggagaccggcgcctggtaaatctgaagtcatgaatataattggtaatgttaaaaataaaacttgtataat

SEQ ID NO: 253193 - DNA, 720 bp, Unknown
  Bacterial polypeptide expressing nucleotide sequence isolated from the Sargasso Sea
cgcttagaagatcttcagcaggaagaataactgctgtaataccttattacggttacgcccgacaagatcgtagggttagatcaggaagagttcctattagcgccaaagttatggcggatattcttgaaagatcaggtattgatagagtcttaacagtagaacttcattcagaacagattcaaggcttcttcgatatacctgtagacaatgtttacggaacaaaagttatgagagacgacgtacaaaaactaaactctgacaagcatttagtagtttctccagatgttggtggtgttgttagatcaagggcattagcaaaagtcttaggtctctctgacctggcaataattgacaaaagaagagatgaagctaataaatctgaagtaatgaatgtgattggggaggttaaagataaggaatgcataatcgttgatgatatagctgatacggcaggaactttatgcaatgccgccgaagcattaaaagaacaaggagcattaaaagtatacgcttatatcgttcatccagtgctttcaggtaatgcgatagaaaaaatttctaaatcaaagcttgatcaattggttgtaacagatactataccgctctcagaagatgctcagaactgtgaaaagataaggatcatcactatggcgccaactttagctgaagccataagacgagttaataatgaagaatctataagtgcaatgttcttgtagt

SEQ ID NO: 253194 - DNA, 817 bp, Unknown
  Bacterial polypeptide expressing nucleotide sequence isolated from the Sargasso Sea
actttgtagagacattgcaagacaactcaaactaaaattagtcaattcgcatattaagagattcgctgatggtgaggtttatgtagaaattaatgaaaacattagaggtaacagtatatttgtagttcaatcgacatctaatcctgctaacgacaatttaatggaactattgatttgcatagatgccttgagaagatcgtctgcaaaaaatattactgcggttattccttattttgggtacgcgagacaagatagaaaagtggttccaagaactgctatatcggcaaaattagtttcaaatcttattacaaatgctggagcaaatagaattttaagtgttgatttgcacgctggtcaaattcaaggtttctttgatataccggttgataatttgtttgctacacccatttttgcaagacacattaaaaataaaataaaactaaataatttaacatgtgtttcaccagacgttggtggtgtagaaagaaccagggctttaagcagacgaataaattcgagtattgccataatagacaaaagaagaccagctcctggaaaatctgaagtgatgaacattgtaggaaatgtaaaaaataaaaactgcgtaatagtagatgatataatcgactctggaggcacaatcgtaaacgctgcaaaagccttaaaattaaagggagccaaagatgtctatgtttatattacgcatgctgtattaagtggagaggcaataaataaaatagaaaaatctcaaataaagaaactaataacaactgatacaatagataattccaaaaaaatggaagaagcaaaaaaatag

SEQ ID NO: 253195 - DNA, 688 bp, Unknown
  Bacterial polypeptide expressing nucleotide sequence isolated from the Sargasso Sea
cactgctgtaattccatactttggatatgcaagacaagatagaaaagttgtaccaagaacctcaatatctgcaaaattaatttctaatttaataactaaggctggagctgatagagttgtaacagttgatttacatgcaggacaaatacaaggtttttttgatattccagttgataacctttatgcgacaccaatattttacagacatataaaaaaaaatcttaaaatgaataatttagtttgcgtttcaccagatgtaggtggagtagcaaggacaagaggattgagtaaattgctgaatgtcaaccttgctattgtagacaagagaagacctgcgccaggaaaatcagaggtaatgaacataatcggtaatattaaaaataaaatttgtataatagtagacgatattattgactctggaggaacaatagttaatgcagcaaaaatgttaaaatcaagaggagcaaaagaaattcatgtttatataactcatggtgtactaagtggagatgcagtaaaaaaaattaaaaattctccaataaaaaacttggtaattaccgatacgattgataattcaaaaaaaataaataatgtaaaaaatatacaaatattaagtatctcaaatcttcttggagaagctcttaaaagaatatctaactcgacgtctgtctctgatttatttaaataa

SEQ ID NO: 253196 - DNA, 430 bp, Unknown
  Bacterial polypeptide expressing nucleotide sequence isolated from the Sargasso Sea
aatgaaattattaactggaaacagcaataaagttttaagtaaaaacattgctaaatatttaaaaacaaaactggtaaattccagtattagaaaatttgctgatggtgaaatttatattgagataaatgaaaacataagagggaacagtatttttattgttcaatctatctcttctccagcaaatgataatttaatggaactgttgttatgtattgatgctctaaagaggtcatcagcaaaaaatataacggcggtaataccgtattttggatatgcaagacaagatagaaaggttgttccaagaacttccatatctgcaaaacttgtctctaatttaataactcaagctggtgctgatagagtggtaactgtagatttgcatgcaggtcaaattcaaggtttctttgatattcctgtagataacttaatt

SEQ ID NO: 253197 - DNA, 730 bp, Unknown
  Bacterial polypeptide expressing nucleotide sequence isolated from the Sargasso Sea
atgaaattattatccggaaatagcaataaaccattgagcaagaatattgctaaatatttaaaatctaaattggttaactctagcattaaaaatttttctgatggagaaatatatgttgaaattaacgagaatattagaggcaatagtatttttttaattcaatcaatttcatctcctgcaaatgataatcttatggaactactattatgtattgatgctcttaagagatcatctgcaaagaatattactgccgttatcccttactttggatatgcaagacaagatagaaaagttgcaccaagaacatccatatcagctaaacttgtctcaaatctaatcactaaagcaggagcagatagagttgtaactgttgatctgcatgcaggtcaaattcaaggtttctttgatattccagttgataacttatttgcaacacctatttttgcaaggcatgcaaaaaaaaatataaaaagtaaaaaccttatttgtgttgctccagatgtaggaggtactgaacgagctagagcacttggaaaaattttaaatgttggaatagcaatagtagataaaagaagacctaaacaaggtcaatctcaagtaatgaatattgttggagatgtaaaaggaaaaacttgtattattgttgatgatataattgattcaggtggaacaatagtaaaaaaagctaaagctcttaaaaatagaggtgctaaagaagtttacgtttata

SEQ ID NO: 253198 - DNA, 493 bp, Unknown
  Bacterial polypeptide expressing nucleotide sequence isolated from the Sargasso Sea
aatgaaaattgtagcttgtaacagtaacttggagcttgctagagcgatttcttcatatataggagtaaagcttgctgacgcttctattagaaaatttgctgaccatgaaatttttgtagaaattaatgaaaatattcgtggtgaagatgtttttattattcaatcaacttctcatcctgccaatgatcatttaatggaattattaatagctatagatacagctaaaagaggatcggcaaaaagaattactgcggttattccttattatggttatgctagacaagatagaaaaactggcccaagaacccctataactgcaaaattagtagctaatttaattacttcagctggagcggatagagtcttaactatggatttgcatgcaggacaaattcaaggtttttttgatattcctctagataatatattttcagcacctccaataattaaagatatgaaaactaatttccctaatagtgaaaatttagttatt

SEQ ID NO: 253199 - DNA, 769 bp, Unknown
  Bacterial polypeptide expressing nucleotide sequence isolated from the Sargasso Sea
tatgaagaaagaaaagctaattctttttgcgggcccagcatcaaaagacttgggttcacaaattgctagatatttaaatgaaccacttggctatattcaggttggagcttttagtgatggtgaaaccagcattgaggtttcacaaaacatcagaggaatggatatatttttggttcaatcgacttatcaaccaggcaatgaacatctaatgcagcttctattgatggcagatgcatgcaaaagggcttcggctaattctgtttcagctgtcattccttatttcggttactctaggcaagacagaagaccaaggaataccagaggccctgtttctgcaaaattggtagcggatttgattgaaacagcagatatcaaaagagtgatcactgtggatcttcatgcagatcagattgaaggtttcttctcaattccagttgataatatttactcctcaaccattttgatgagtgacatgtggaaacaagggtatccagatcaggtgattgtttctccagatgtaggtggtgtacaaagggcaagagcaatcgccagaagattaggcaatgcgagtttggcaatcatcgataaaagaagggaagcagcgaataagtctgaagtgatgaatatcatcggtgatgttgatcaaaaaacagcgatcatatttgatgacatggtcgatacagctggaacgctttgtaatgcagcagccgcactcaaagagaaaggcgcactgaagacagtggcttatgctgcacaccctgtgctttca

SEQ ID NO: 253200 - DNA, 507 bp, Unknown
  Bacterial polypeptide expressing nucleotide sequence isolated from the Sargasso Sea
ttgctgttccagtttttatagaaaatattctgcaaaattataatcctaaagatttatgtattattgcacctgacgtaggtggtgttttgcgcgctagagctattgctaaaagattaaatacagatttagcaattatagataaaagaagagaagcaccaggacaatctgaagttatgaatattatcggcgaagtgaaaaatcgtcattgtttattagtcgatgacatagttgactcaggcggtactttatgtaacgcagctgaaaccttaattgaatctggagcaattactgttgatgcttatgttactcatggagtgctgtcaggtggagcagttgccagagttgcatcctcaccactgaactcacttgttacaacagatagtattgctgcaacggaagcatttagagttgctaaaaatgttagacatatatctatagcaccacttcttggcgaagctgtcaaaagaatccatatggagagatctgtctcctcattatttgattaaa

SEQ ID NO: 253201 - DNA, 538 bp, Unknown
  Bacterial polypeptide expressing nucleotide sequence isolated from the Sargasso Sea
caaaaatattacagcagtgattccgtactttggttacgcaagacaagatagaaaagttgttcctagaacttcaatttcagcaaaactagtttctaatcttataactaatgctggtgcaaacagagttgtcactgttgatttacatgcgggacaaatacaaggtttttttgatatgccagttgataatttgtttacgactccattattttccaggtacataaaaaaaaatatcaaaagtagaaattttatttgtgtatcaccagatgcaggcgcaattgagagaacaagagcgttagcaacaaaaattaatgctgacttggcaattatagataagagaagaccagagccaggaaaatcaaaagttatgaatattattggaaatgtaaaaggtaaagattgtataatcatagatgatataattgatagtggagggactatcataaatgcagctgatgcccttatgaaaaaaggtgcaaaaagtgtttatgtatttatttcacacgcggtactaagtggaaacgctattaagaatattcaa

SEQ ID NO: 253202 - DNA, 560 bp, Unknown
  Bacterial polypeptide expressing nucleotide sequence isolated from the Sargasso Sea
aatgataaattcttctcgatctggtttagtccttttttcaggaaatggtaaccctgccttgtctgaagaaatttctaaacaactaggtgttaagcttggtcaggcaaatgttacaacttttagtgatggtgaaattagcatcagtatcgatgaaaatgttagaggtaaggatgtattcctcatacagccaacttgcgctcctgccggcgataaccttcttgagctgatcattatggttgatgctctgcgcagatcttctgccggaagaataacagctgttatcccttactatggctatgcgagacaagatcgacgtgttagatctgaaagagtcccaattagtgcaaaagttatggccgatatattggaaagatcaggaatagatcgagttttgacagttgaattacactccgaacaaattcaaggcttctttgacattccggtggataatgtctacggaaccaaagttatgagagacgatattcttcgtaacaactctaaaaataatctagtagtatccccagatgttggaggagttgtcagatcaagggctttggcta

SEQ ID NO: 253203 - DNA, 356 bp, Unknown
  Bacterial polypeptide expressing nucleotide sequence isolated from the Sargasso Sea
tatgaaaatactagcttgtaactcgaatattgatttggctgaaagtatttctaaaaaactaaattcacaactagtaaaagctgaagttaaaagattttctgacatggaagtttttgttgaagttcaagaaaatgtgagaggtgaagatatgtttataatacaatcaacttcttatccggcaaatgacaatttaatggaattactagtttcgttagacgctttaagacgagcaagtgcaagaaggataacagcagttatcccatattatggctatgcaagacaagatagaaagtcaggtccaagaacacctatttctgcaaagttagttgctaacttaataactaaagcaggagctg

SEQ ID NO: 253204 - DNA, 732 bp, Unknown
  Bacterial polypeptide expressing nucleotide sequence isolated from the Sargasso Sea
catgccaactgtaaaactattttcaggaacaggttctaaatatttagcagaggaaattgcagaatattacggtagaaggttggggaaactcgacatcaataaattcagcgatggtgagtttcagcctgttattaaagaatctgtaaggggtgctactatttttttagttcaatcaagctttagcccatctgaaaatcttttcgagctactaatgatgatagatgcagcaaaaagagcatcagcagattatatagtggcggtaatgccttattttggttttgcaagacaagacagaaaggacaagccaagagtttcaattgcagcaaagcttattgcaaacatgcttactacagctggtgctaatcgtataatgacaatggatttgcacgcagctcagatacagggcttttttgatatcccttttgaccaccttgattcctcttatatttttgtgccatatattaaaaaacttaaacttaaagatgttattatagctgctcctgatgttggcggttctcacagagctagagtttacagcatgcacctcaatactggttttgtaatttgtgataaatacagaaaaaaagcaaatgaggttgcagaaatgactgtgattggagatgtagagggaaaaaacgttgtcatgatagatgacctcattgacacaggaaatactcttgcaaaagcagctaaaatgcttaaagagaaaggcgcaaaatctgtcagagcatt

SEQ ID NO: 253205 - DNA, 703 bp, Unknown
  Bacterial polypeptide expressing nucleotide sequence isolated from the Sargasso Sea
agcacaaaaagttatagctgttataccttattttggttatgcacgacaagatagaaaagtaagcgacagatctcctattacggctaaattaatatgtgacctattggtaaagtctggaattgaagaagttattttaatggatattcatgctggtcaaattcaaggtttctttgatgtacccgttaatcatctttatgcatttcctattgctagagactattttattaaaaaatacagtaaaaaaaatcttattattgcgtcaccagatgctggtggtatggaaagagctcgtgcatttgcaaaaagatctaatattgttgacttagctatgaccgataaaagaagagcagctcctaatgttgctgagataactaatgttattgggaatgtaaaagggaaatatgttcttcttattgatgatattatagatactggtggaactgcagcaaaatcagcagaagctttaattaaagctggtgcaaaaggagtctccatgttttgtacccatggagtcttgtcagggaatgctatccagaatattcagaattcaagtattgatgaacttataattacagatacaattaataaccaagctaaattaaagaaagtaaaaaagattagggttttaagtgttgctgacttatttgcgaaagctttgagaagaattattgataaaaaatccataagtaatttattttcttag

SEQ ID NO: 253206 - DNA, 698 bp, Unknown
  Bacterial polypeptide expressing nucleotide sequence isolated from the Sargasso Sea
aatgattaataaacaaacagtcggaatcttctcaggctcagcttcaaaagttttatctgaagaagtagcaaaaatactaggcataaaactaggcgagattgatttgggcaaattttcagatggggaaattaaggttgaagtcttggaaaatgtccgaggtcatgaagcttatatcattcaatcaacttgcgccccttcaaatgcaaatttaatggaattgatgctaattactgacgctctgaaacgctcatctgcatcaagaattacagcaatacttccctattatggttatgcacgtcaagacagaagagtcagatcagcaagagtcccaataagtgcaaaagtaattgcagatatgttgaattccgttggcgtagatagagtgcttacagtagaccttcattctgaatccattcagggtttttttgatatgcctgctgataatgtttatgcaacaaaaatcatgcatgatgacattaagtctagaaccgcaaaagatgagcaaatacttgtcgtctctcctgatgtgggtggtgttgtaagagcacgagcattggcaaaattccttgatgaatctgatttagcaattattgataaaagaagatcatcatcaaatgaatctgaagtaatgaatattattggagatgttaaaggaaaaagctgtattgtgcccgatgacattattgatacagctggca

SEQ ID NO: 253207 - DNA, 836 bp, Unknown
  Bacterial polypeptide expressing nucleotide sequence isolated from the Sargasso Sea
aatctatgtaaaaattgaagaaaatgttcgtggtggagacgttttcgttgttcagtcgacttgtttcccgggcaataccaatttgatggaattgctgattatgatagatgcatttcgtcgtgcatcagcagaaagaatcacagcagtgattccttattatggatatgcgcgccaggataggaaaaacgaacccagggtacccatcacatccaagttgattgctgatttagtggttactgcaggggcagatcgtgttctgacggtcgatttacatgcagggcaaattcagggcttttttaatatccctttggatcatttgttcgcaataaatgttctaatcgactacatcaaagagcaaaaactaaaggacttgatcgtaatatcacccgatgcaggaggtgtggaaagagcccgtgcttatgcaaaacggttaaatagctcgctggcaatcattgacaaacgtcgagatattcctaatgaagctaaggcaatgaatatcattggtgatgtaaaagggaaaatagcttttatagtagacgacatgatcgatacagcaggaacattgatagaagcgactgatgcattattagcggccggtgcaagggaagtgcatgcttgttgttcccatccagttttatcaggaccagcaggagagcgtattactagctcacctattaaaacggtgataacaaccaataccattcctttgaatggagagttggaaaaaaattcaaagataaaagtgttatctgttgcatcccttttaggggaagcaattataagaattcatcaagaaacctcagttagttccttatttgattcaaccaaggattaac

SEQ ID NO: 253208 - DNA, 700 bp, Unknown
  Bacterial polypeptide expressing nucleotide sequence isolated from the Sargasso Sea
gcttgcaaaagggcttccgcagcaagcgttaccgctttgatcccttattttggctactctcgccaagatcgtagaccccgagcctctagggttcctatctccgcaaagctggtagcaaaattaattggcacagctggaatagaccggattctcacagtagatcttcatgctgatcagatacaaggtttttttgatatcccagtagacaatgtgtacgcatctcccgttcttctcggtgatgcctggaaacaaaaatatgatgatattgtcgtggtttcacctgatgtaggtggcgtggcgcgcgcacgagccttagcaaaacgtctggctgatgctgatctagcaataatagacaaacgtcgtcctcaagcgaatatgtctgaggttatgaatgttattggtgaagttgaaaataaagtctgcatactaattgatgacatggtggatacagctggaacactttgccaagcatgcgcaacgcttaaagaacgtggagcaacgagggttgtggcgtatatcacacatccggtactctctggtcctgcaattgagcgcatcaatggctcagtaatggatgaactagtagtgaccgacaccatccctctaaatgaggatgcaaaggcctgtaaaaaaattcgacaactcagtgttgcagagcttctggcagaaaccgttcgcagaattagtgatgcagagtagg

SEQ ID NO: 253209 - DNA, 593 bp, Unknown
  Bacterial polypeptide expressing nucleotide sequence isolated from the Sargasso Sea
aatgaaattattatccggaaatagcaataaaccattgagcaaaaatattgctaaatatttaaaatctaaattagtcaattctagcattagaaatttttctgatggtgaaatctatgtggaaattaatgaaaatataagagggaatagtatttttttaatacaatctgtatcttcgcctgctaatgataatttgatggagcttttgttatgcattgatgcactaaagagatcttcagctaaaaatattacagcagtaatcccttactttggttatgctagacaagatagaaaagttgcaccaagaacatcaatatcagcaaaactagtctcgaatctaattactaaagcaggagcagatagggttgttactgttgatttgcacgcaggacaaattcaagggttttttgatattccagtggataacttatttgcaacgccaatatttgcaagacatgtaaaaaaaaagataaaaagtaaaaatctaatttgtgttgcaccagatgtgggtggaactgagcgagctagagcccttggaaaaatttttaatgttggattggctattgttgataaaagaagaccaaagccaggtcagt

SEQ ID NO: 253210 - DNA, 793 bp, Unknown
  Bacterial polypeptide expressing nucleotide sequence isolated from the Sargasso Sea
atggtttttactggcaatgctaatcctgcacttgccgatgctattgccaaaaatataggtgttcccttgggacgagcgagcattagtaaatttagcgacggagaagtttcggttgagctaaacgaaaatgttcggggcaaagatgtattcgttattcaaccaacgtgcgctccaacaaatgatagtattatggaagtgctactcatgtcagatgccctacatcgcgcgtcagcaaaccgaataacagcagtcatcccatactttggttatgcgagacaagaccgcagggttagatctgctcgagttgcgatcagtgccaaagtcgtcgcagatatgataggtgctgtaggtgttaatagagtccttactgtagatcttcacgctgaacagattcagggattttttagtatccccgtagataatgtctatggctcgcccgttctaacagatgatattgaaagacaaaactattcgaacctcacagtagtgtcccctgacgttggcggggttgtgagagctagggctgtagcaaaacagataaatgccgacctcgcgataatagataagcgccgccctaccgcgaacgaggcccaaatcatgcatataataggtgacgtgaaggggaaaagttgcttgattgtagacgatatggtggatacagcagggacattatgtaaggctgctgacgctcttaaagaccatggtgcaaccaaggttgtcgcttactgcacccatcctgttttatcaggccccgctattcaaaatatagaggggtcaaatttagattcactta

SEQ ID NO: 253211 - DNA, 538 bp, Unknown
  Bacterial polypeptide expressing nucleotide sequence isolated from the Sargasso Sea
ggttattttgatataccatgtgatcatatttatggttcacctgttttgattgattatttagaatctttaaatttagaggaagttgtagttgtctctcctgatgtgggtggagtggccagagcaagagcatttgcaaaattaatgaaggatgccccgttggctataattgataaaaggagatcagctcataatatcgctgaaagcctaacagttattggtgaagttaaaggtaaaacagctattctcatagacgatatgatagacactggaggaacaatttgctctggtgctaatttattaaaaaaagaaggagctaaaagaatattcgcatgtgcctcacacgctgtattttctcctccatcttatgaaagattaagtactaaggatttattcgaacaagttattgtgacaaatagcataccagttcttgttaaagataatttcccacaattaaaagtcctttcagtagcaaatatgctgggtgaagctatttggagaatccatgaagaaagttcagtaagttctatgtttagataat

SEQ ID NO: 253212 - DNA, 330 bp, Unknown
  Bacterial polypeptide expressing nucleotide sequence isolated from the Sargasso Sea
gatgagtgagttagtacacccaaagataatttctggaaattcaaatataactctctctaaaggaattgcaagttgggcaagctctttgagcagatcacaaattgatctagttaaagcaagagttgaacaatttaatgatcaagaaatttttgttgaggtttttgaaaacgtaagaaatgaagatatgttcattattcaatctacatctaatccagctaatgataatattatggaattactcattattgctgatgctttgagtagatcaagtgcacagagaataactgcagttatcccttattttggatatgcaagacaagatagaagaac

SEQ ID NO: 253213 - DNA, 895 bp, Unknown
  Bacterial polypeptide expressing nucleotide sequence isolated from the Sargasso Sea
aatgaataatacgatgttattctgtggtaacacgaacaaattacttgctcaatctgtcgcagagcacctaaaaatgcccctggctaaagccactatcgatcggttcaaagatggtgaagtcatggtggaaatacttgaaaatgttcgcggaaaagatacctttatcattcaatctacctgctctcctgtaaatgactccatcatggaaatattaatgattgcagacgcacttaaaagagcttctgtcgcatcagtgactgcagttattccctactttgggtatggtcgtcaagatagacgccctagatctgcaagagtacccattagcgctaaactcattgccgatctcattatgagctcaggcattaaccgaattattactgtcgatttacatgccgatcaaatccaaggttttttcaatatacctgctgataacatttatttttctagagtcattagtgacgacattaaagaaaatcaaattgggccatgtgccatcgtttctccagatgtaggaggtgttgttagggcgcgtgctgtggttaaaaaaattgaaggcagccatcttgtcattgttgataaacgaagacaagcacctaacaaaaccgaagtgatgaatatcataggggatgttgaaggtttagattgcattttgattgacgatatcattgatactgcaggcaccttaactcaagcagctaaggccctgaaggcagcaggtgccagaagaatttttgcttattgtacgcatgcagtgctttctggaccggccctagaacgcattgaaaactccgaaattgatctttatactgtatcagattccattccattacagccaaaagtgaaaaaatctactaaaataaaagtattaccctttagggtttttactcgctga

SEQ ID NO: 253214 - DNA, 362 bp, Unknown
  Bacterial polypeptide expressing nucleotide sequence isolated from the Sargasso Sea
catgaaaattttatctggaactagcaatctcaagcttagcaaagatatttcaaagaatcttaaactcaaactgataaatacaaacataaggagatttgctgacggagaaatttacattgaaataaatgaaaatattagaggtaatagtgtttttgtaattcaatctacttcaaatcctgcaaacgataatattatggaacttttacttgtaattgatgcattaaaaagatcatcagcgaaaactattactgcagtaattccatattttgggtacgcaagacaggacagaaaagttgctccaagaacatctatctctgctaaagttgttgcaaatttaatttcaaacgctggagctacaagag

SEQ ID NO: 253215 - DNA, 817 bp, Unknown
  Bacterial polypeptide expressing nucleotide sequence isolated from the Sargasso Sea
atgaaattattaactggaaacagcaacaaaattctcagcaagaatattgcgaaatatttaagatcaaagttagtaaattcaagcatcagaaaattttctgatggagaaatctatgtagaaataaacgaaaatattagaggaaatagcatcttcatcattcagtctgtttcatctccagctaatgacaatttaatggaactattgctaagcatagatgctcttaagagatcttctgcaaaaaacataacagctgttattccttattttggatatgcaagacaagatagaaaagttgttccaaggacatctatttcagctaaacttgtttcaaatttaattactcaagctggagcagatagagtcgttactgttgatttgcatgcgggtcaaattcaggggttctttgacatacctgtggacaatctttttgcaactccaatttttgctaggcacatcaaaaaaaaaattaaaagtaaaaaaattatttgtgttgctccagatgttgggggcacagaaagagcaaggtctctaggaaaacttcttaatgttggtttagcgatagttgataaaagacgacctaagcctggtcaatctcaggtaatgaatgttataggagacgtaaaaggtaaaacttgtattattgtggatgatataattgattcaggtggcaccatagttaatgctgcaaaagctttaaaggccagaggagcaaaagaagtgtatgtttatataacccatggtgtgcttagtggagacgctgttaaaaaaataaaaaactctgtgattaaaaatttagtaattactgacacaattgaca

SEQ ID NO: 253216 - DNA, 679 bp, Unknown
  Bacterial polypeptide expressing nucleotide sequence isolated from the Sargasso Sea
aataccttatttcggttatgcaagacaagatagaaaagtagtcccaagaacttcgatatctgcaaaactcgtttcaaatttaattacaaaagctggagctgatagagttgtaacagttgatctgcatgcgggtcaaatacaaggattttttgatattccagttgataacctttttgcaactcctatttttgcaagacatataaaaaaaagaattaaaaataaaaatctgatttgtgttgctcctgatgtaggtggagttgaaagagcaagagctttagcgagaaagttagatgtaggtctttcaataattgataaaagaagacctgttccaggaaaatctcaagttatgaatgttgtaggtagtgttagcggaaaaacatgtataattgttgatgatattattgattcaggaggaactattgtaaatgctgcagatgcattaattaaaaggggagctaaagaggttcatgtatatataactcacggggttcttagcggagaagctgttaaaaaaataaaaaaatctaaaattaaaaagttggttataacagatactataaacaactcagataagctaaaaaattcgacaaatatagaggtattaactatatccaatttattagctgaagctataaaaaggatatctaactcaacttctgtatctgatttatttaaataa

SEQ ID NO: 253217 - DNA, 812 bp, Unknown
  Bacterial polypeptide expressing nucleotide sequence isolated from the Sargasso Sea
aaaattcttagtcaaaaaatatctaaatttttaaaaaacagattagttaattcaagtataagaaaattttcagatggtgaaatttatacagaaataaatgaaaatattagaggaaatagtatctttgtaattcagtcgatatcatcacccgctaatgataaccttatggagttattgttatgcatagatgcattaaaaagatcttcagctaaaaatataacagctgtaattccatactttggatacgccagacaggatagaaaggtagtacctcgtacatctatttctgcaaagttagtctccaatttaattaccaaagcgggtgcagatagagttgtaacggttgacttgcatgctggtcaaattcaaggtttttttgatattccagttgataacttattcgcaacacctatttttgcaagacatgtaaaaaaaaagataaaaactaaaaatctaatatgtatagctccagatgttggtggaactgaaagagctagagcacttggaaaacttcttaatgtgggacttgcaattgttgataaaagaagaccgaaagcaggtcaatcacaagttatgaatattataggagatgtaagaggaaaaacttgcataattgttgatgatatcatcgactcagggggcacaatagtaaatgcggctgcagctttaaaaaaaagaggagcaaaagatgttcatgtttatgtaactcacggcgttttgagtggaggggctgaaaataaaataaaaaagtcgaatattaaaaatttagtaataactgataccatcgataacacagtaaaagtaaaaaatat

SEQ ID NO: 253218 - DNA, 889 bp, Unknown
  Bacterial polypeptide expressing nucleotide sequence isolated from the Sargasso Sea
gatatctaaatatttaaaaaatagacttgttcattcaactatcaaaaaattctctgatggtgagatttatgtagaaataaatgaaaatataagaggaaatagtatttttgtaattcaatcagtatcatctccggcaaatgataatttaatggaacttcttattataatagatgctctaaaaagatcttcagcaaaaaatataacagctgtaataccttattttggatatgcaaggcaagatagaaaagttgtacccagaacatctatttcagcaaaattagtttcaaatttaattactaaagctggtgccgacagagttgtaacaatagacttgcatgcaggacaaattcaaggattttttgatataccagtggacaacctcttcgctacgccaatctttgctagacatattaaaagaaaaatcaaaaataaaaatttgatttgtgttgctccagatgttggtggcactgaaagagcaagagccttaggaaaatttcttaacgctgggctagctataattgataagagaagaccggccccaggaaaatcagaagtaatgaatgtaataggatatgttaaaggcaaaacatgtattatagttgatgatataattgactcaggtggcacaattgtaaatgcttctaatgcattaattgaaagaggagcaaaagaagttcacgtttatgttacacacggtgtgctaagcgggaaagcagtagaaaaaattaaaaattctaaaataaaaagattaattataacagacaccattaacaactcagatcgtgtaaaaggagcaaaaaatattgaaattttaacaatttctcaattagttggtgaagctataaaaagaatatctaactctacatctgtatctgatttatttagataa

SEQ ID NO: 253219 - DNA, 475 bp, Unknown
  Bacterial polypeptide expressing nucleotide sequence isolated from the Sargasso Sea
atggctatatatgaggaattaaaagttttttcgggaaattctaataatcctctagcgactagagtcgctgagtacttggatatcgacctaggaaccattgaggttttcaaatttagtaatgacaatacatttgtcaggattcaggaaaatatcagggagcgggacgttttcctaattcagtctttttgcatgcctgtgaacgacagtattatggaaatgctgattatgattgatgctgccaagcgggcgtctgctggtcgtattaccgcagtcattccttattacggatacggaagaactgataaaaaagatcaaccacgagttcctattacatctaggcttgttgcagacttacttacaactgcaggcgctaatcgtgtacttactatggatctacacgcggggcagatacagggatttttcaacatacctgtagatgaattgactgcattgcccaattattgtgcattatttg

SEQ ID NO: 253220 - DNA, 700 bp, Unknown
  Bacterial polypeptide expressing nucleotide sequence isolated from the Sargasso Sea
gcaaaaaatataacagcagtaattccttattttggatacgcaaggcaagatagaaaagtggctcctcgaacttcaatctcagcaaaattagtatcaaacttaattacaaaagcaggagctgacagagtagtaactgtagatttgcatgcaggacaaattcaaggattttttgatattccagttgataatttatttgcaacaccgatttttgcaagacatgtaaaaaaaaatattaaaagtaaaaatatcatttgtgttgcacctgatgtgggtggaacagaaagagctagagcactaggcaaaattctagatgttggtttagctatagtagacaagagaagaccaaagcctggccaagcgaaagttatgaacatagttggaaatgtcaaagataaaacttgtattatagttgatgatataattgattctggtggaacaattgtaagtgcagctaaagcattaaaagataagggcgctaaagaagtatatgtttatattacccatggtgttttaagtggagaagccgttcaaaaaattaaaaaatctgcaattaaaaatttagtaattaccgatactattaataatctagaaagagttaagaaagctaagaatatcgaagttttaacaatatctaacttaatgggtgaggctataaagagaatctcaaactcaacttctgtttcagacttatttaaataat

SEQ ID NO: 253221 - DNA, 934 bp, Unknown
  Bacterial polypeptide expressing nucleotide sequence isolated from the Sargasso Sea
tctttttgctggcccagcatcaaaagacttgggttcacaaattgctagatatttaaatgaaccacttggttatattcaggttggagccttcagtgatggtgaaaccagcattgaggtttcacaaaacattagaggaatggatatatttttggttcaatcgacttatcaaccaggcaatgaacatctgatgcagcttctattgatggcagatgcatgcaaaagggcatcggctaaatctgtttcagctgtcattccttattttggttattctaggcaagacagaagaccaaggaatatcagaggccctgtttctgcaaaattggttgcggatctgattgagacagcggatatcaaaaggctcataactgtggatcttcatgcagatcagatcgaaggtttcttctcaattccggttgataatatatactcctcaaccattttgatgagtgacatgtggagacaaggctatccagatcaggtgattgtttctccagatgtaggtggtgtacaaagggcaagagcaatcgctagaagattgggcaatgcaagtttggcaatcattgataaaagaagggaagcggcgaataagtctgaagtgatgaatatcattggtgatgttgatcaaaaaacagcgatcatatttgatgacatggtcgatacagcaggaacactctgtaacgcagcagccgcactcaaagaaaaaggcgcactgaagacagtggcttatgccgcgcaccctgtgctttcagggcctgcaatagagagaatagctgattctgaactcgatgagctggttgtgactgacaccatacctttgacgcaggaagcaaaagatacaggcaaaattagacaactttcaattgctgagcttctgggtgaaacgatagagagaatagtggcagatcaatccgtcagttctctatacgcagaataa

SEQ ID NO: 253222 - DNA, 822 bp, Unknown
  Bacterial polypeptide expressing nucleotide sequence isolated from the Sargasso Sea
aatgaaattattaactggaaatagtaataaagcattaagtaaaaatattgccaaatacttaaaaactaaaatcgtaaattctagcatcagaaagtttgctgatggagaaatttatattgaaataaatgaaaatattcgcggtaatagtatttttataattcagtctatttcatcaccagctaacgacaatttaatggaattactactttgcatcgatgctcttaaaagatcctcagcgaagaatataactgcagtaattccttattttggatatgcaagacaagatagaaaagttgttccaagaacctccatttcagcaaaactagtttcaaatttaattactaaagctggagcagatagagtagtgactgtagatttacatgcaggacagatccaaggtttttttgatattccagttgataacctttttgcgactccaatttttgctaggcatgttaagaaaaaagttaaaagtaaaaaaatgatttgtgtggcaccagatgttggtgggactgaaagagcaagagcattaggaaaaattttaaatgtcggtcttgctattgtagataaaagaagacctaaaccaggacaatcacaagttatgaacataattggagatgtaaaaggtaaaacttgtatactagttgatgatataattgattcaggaggcactatagtaaatgctgcaacagctttaaaaaaaaggggtgctaaagaagtttatgtttatataactcatggtgtattaagcggtgaagctgttaaaaaaatcaaaaattcagttataaaaaatctagtgataacagatacaattgataacta

SEQ ID NO: 253223 - DNA, 754 bp, Unknown
  Bacterial polypeptide expressing nucleotide sequence isolated from the Sargasso Sea
taatgataacttaatggagttattgttgtgtattgatgctctaaaaagatcttctgcgaaaaatattacagcagttattccttactatggttatgcaagacaagatagaaaagtagtaccacgaacatccatttcagcaaaattagtttcaaatttaattacaaaagctggagcagatagagttgtgaccattgatcttcatgctggtcaaattcaaggtttttttgatatcccagttgacaacttgtttggtacacccatttttgcaagacatgctaaaaaaaatataaaagataaaaatattatttgtgtagctccagatgtgggtggagtagaaagagctagagctcttggaaaattattggatgttgaattggcaattattgacaaaagaagaccgagtccaggcaaatctaaagtaatgaacataataggtaatgttaaagataaaacttgtattatggttgacgacataattgactcgggtgggacgattgtaaatgctgcaaaagctcttaaagatcgaggagcaaaagatgtttatgtatatgttactcacggagttttaagtggagaagcagttcaaaaaattaaaaaatcattaattaaaaaattagttataactgatagtattgataataatgcaaaagttaagagagctcaaaatattgaagttttgacggtgtcgaacttaatgggagaagcaattaaaagaatttcaaattccacatcagtttctgatttattcaaataa

SEQ ID NO: 253224 - DNA, 826 bp, Unknown
  Bacterial polypeptide expressing nucleotide sequence isolated from the Sargasso Sea
taaattaaaactcataaatactaatataagaagattttcagatggcgaaatttatattgagataaatgaaaatataagaggaaatagtgtttttgtaattcaatcaacatctaatcctgctaacgataatattatggagcttcttttagtcatagatgcactaagaaggtcatctgcaaaaacagtaacagcagtcattccttactttggatatgctaggcaggataggaaagttgctcctagaacttcaatctccgcaaaagttgtagcaaatctaatttcaaatgcaggagctactagagttgtaacagtagatttacacgctggacaaattcaagggttttttgatatgccagttgacaacttatatacggcacctcttttttcaaaatatattaaaaagaaattaggcagtaagaaattaatttgtgtttctccggatgtgggtggtgttgcaagaacaagggcgttagcaacaagaattaaagctgatcttgcgatcatagataaaagaagaccagcgcctggtaaatcagaggtaatgaacattataggcgatgttaaaaacaagacttgtataatagttgatgacataattgatagcggaggaacaatcgtaaacgcagtagatgctttaaaaagaaatggagctaatgaagtctatgtatttattacacatgcagtattaagtggtgatgcagtaaaaaaaattaaaaattcgaaaatcaaaaaattgatcatcacagatacaattgataatgctcaaaaaattaaaaataataataaaattgaggtgttatcaattgcctcattgatgtcagaagct

SEQ ID NO: 253225 - DNA, 403 bp, Unknown
  Bacterial polypeptide expressing nucleotide sequence isolated from the Sargasso Sea
aatgaaaaataaaagtgtagacatttttactggtacagctaatcctgaatttgcacaggaggtctctgatattctgggtattaaaatttctgctgctgatgttggatatttttctgatggagaattaaaagttgaaatcgaagaaaatgtaagaggacacgatacatttattattcagtcaacctgctcgcctaccaataaaaatgttatggaaatcatgttaattgctgatgcgttgaaaagatcatctgcatctagaatcactgctgttgttccttactatggctatgcaagacaggatagaagagttagatctgctagagttcctataagtgcaaaagttgttgcagatatgtttgcgtctgttggaattgacagagttctaacaatagatcttcactca

SEQ ID NO: 253226 - DNA, 633 bp, Unknown
  Bacterial polypeptide expressing nucleotide sequence isolated from the Sargasso Sea
taccaatcactgctaaagttgttgccgatttcttatcgagtgtaggtgtagaccgtgtacttacggttgatttacatgcagagcaaattcaaggcttctttgatgtaccagtagataatgtatttggtagccctgtattacttgaagatatgaaagagcgtcattttgatgatgttgttattgtttctccagatattggtggtgtagtgcgcgcacgtgcaattgcaaaactattagacgatactgatttggctattattgataaacgccgcccacaggcaaatgtttctcaggtaatgcatattattggtgatgtagaaggccgtgactgtatcattgttgatgacatgattgatactggtggtacgttatgtaaagccgctgaagcacttaaagaacatggtgctaaacgcgtatttgcttatgcaactcaccctattttatcaggtaaagcagctgaaaatttacgtgattctgttattgacgaagttattgtaaccgactcaattccattatctgatgaacttaaagcgcttgataaagtaaaagtgctaacgcttgctgatatgttagcagaaactattcgtcgtattagcaacgaagaatctatttcagcaatgtttgagcattaat

SEQ ID NO: 253227 - DNA, 604 bp, Unknown
  Bacterial polypeptide expressing nucleotide sequence isolated from the Sargasso Sea
atttcctgtacaaataatagagatttatcaaaagaaatagctaaaaaattaaataaaaaattagttgataccaaaattattaggtttgccgatggtgaagtgtacgttgaaataaacgaaaatatgagaggacaagacgttttcgttattcagagtacatgtacaccagtgaatgatagtattatggaacttttaatttgtattgatgcgctgagaagagcatcagccaaaagtatcacagcagttcttccatattttgcttatgcaaggcaagatagaaaagttagccctcgatctccaattagtgcgaaactttttgcaaatcttctaatgggctcaggtgcaagtcgagtattaacgatggatcttcatgctaatcaaattcagggattttttgatattccggttgataatttatttgctgctccaacttttgtgcaacacgttaaaaaaaatattaaatcaaaaaatttagtttgcgtagcccctgatgtgggtggcgttgaacgtgctagagcaatcgcaaaaagattgtcagcggatttggcaattatagataaaagaaggtctggtcctgggacatcagaagttatgaatgttatag

SEQ ID NO: 253228 - DNA, 482 bp, Unknown
  Bacterial polypeptide expressing nucleotide sequence isolated from the Sargasso Sea
aatgaaaattattgcaggaaatagcaatcttccactttcctcagatgtaggtaaatatcttcaaattgaccttgcgaaggctacaattcggcgatttgctgatgaagaagtctacgttgaaatcaaagaaaatattagaggtgaagacgtctttgttattgagtcaacatcctacccagctaatgataatcttatggagcttcttgttattattgatgcattaaaaagagcatccgcaaagcgaattactgctgtactgccttactttggatatgcaagacaggacagaaagccaggtccaagaacacctatttctgcaaagttagttgcaaatctaatttctaccgctggagcagatagagttttaactgtagatttgcacgctgaacaaattcagggcttttttgacataccaactgataatttatttgcaagtcctgtattttctagggatataaagatcaatttgatttatcaaatct

SEQ ID NO: 253229 - DNA, 709 bp, Unknown
  Bacterial polypeptide expressing nucleotide sequence isolated from the Sargasso Sea
ggttcggcaaaaagaatcacagctgttattccttattatggatatgctagacaagatagaaaaacaggccctagaacacctataactgcaaaacttgtagccaatttaattacttcagctggtgctgatagagttttaacaatggatttacacgcagggcaaatacagggtttttttgatatccccttggataatattttttctgcaccccctataataaaagatatgaaagaaaaattttctaataatgataatttggtaattgcttcaccagatgttgggggagttgtgagagctagagcttttgcaaaaagaatgagtgctggtcttgcaatagcagataaaagaagagaaaaggcaggtgagtctgaagtaatgaacattattggtgatgtaaaagataaaacatgtattttacttgatgatatcgccgattctgcaggcacattatgcaatgcagcaaaagctcttaaagataatggtgcaaaagaaatattttcttatattgcacacggagttttatctggagaagctctaaaaagaattgaaaactctgctatcaaggaattagttctaactgacagcatagaagcgtcaaatgatgtaaaaaatacaaaaaatattagacatattagcattgctcctttaatgggggaggccataaaaaggattaacagtgattcttctgtttcggccctttttgattaaa

SEQ ID NO: 253230 - DNA, 785 bp, Unknown
  Bacterial polypeptide expressing nucleotide sequence isolated from the Sargasso Sea
ttttatcatacaatcaacaaatgggccatctgaaaatatcattgagttagcgcttatggtagatgccgctgttagagcatctgcggatactgttacagttgtcatgccttactttggctacgggaggcaagatcgaaaagaccaaccacgtgttccaatttctgctagggttatgatagacataatgaccacaatgggtgcgaatagaatcataactatggatcttcattctactcaaatccaaggatttgcaaaaataccattagataatctctacagtagagccgttttgttttcagcaataaaagatcaagaatttagcccagatcaaacaacagttttagcaccagatataggttcagcaaaaatgagtcagggttatgctagaaacttgggtatgcactttgctgttattgataaaagacgattttctccaaataaagcagaagtaagtcatttaattggcgatatgcaggacaaagatgtattgattatagatgatatgattgatacggccggaacgattattaacgcttcacacgcagcattagaaaacggtgcaaaatctgttactgtagttgctacacatggagtattttcaggggactctattaacaatttaaataactctgatataaaaaaaataataattacagatacaatacaaatccccaaagaaaaattttttgataaattaacaattgtatctgtcaaagacgtttttagtgaagcagtttctcgtattcacaacggtgaatctgtaagtgctttatttcagttttaat

SEQ ID NO: 253231 - DNA, 325 bp, Unknown
  Bacterial polypeptide expressing nucleotide sequence isolated from the Sargasso Sea
atgaagattattgcctgcaatagtaataaaatcttagctgaagctatttgctcatataatggtgtaaaattagcaaatgcgtcacttagaagattcgcagatagagaaatatttgttgaaattaatgaaaatataagaggtgaagatgtttttataattcaatcaacatctcatccagcaaatgatcatctcatggaattattaattacaatagatgcagcaaaaagaggttcagcaaaaagaataactgctgttattccttattacggatatgctcgtcaagatagaaagacaggaccgcgtacacctatcactgcaaaactgt

SEQ ID NO: 253232 - DNA, 627 bp, Unknown
  Bacterial polypeptide expressing nucleotide sequence isolated from the Sargasso Sea
tatgaagataatttctggtaacagcaacctagaattagcccaagaaatcgccaattatacaaaaaattctttagcagaaacaacaatgaccagattctctgataaagagatatttgtggaaattggagagaacgtcagaggtgaagatgtttttctaattcaatctacttcatttcctgcaaatgataatttaatggaacttttagttgctattgatgctctgaaaagaggttctgctgcaagaattaccgctgtgcttccatactttggctatgcacgacaagatcgcaaaactggccctagaacaccgatatctgcaaaacttgttgcaaatcttattaccacagctggtgcaaatagagttttgactatggatttacatgctggccaaatacaaggattctttgatatccctcttgataacttatatgcttcaaatctttttattgctgatatcaaagaaaagaaaagagaagataacttagtatttgtatctcctgacgttggaggggtattaagagctagatcctttgctaaaaaattaaatgcagatttagctattatagataaaagaagagatgccccaggggtatcaaacgctatgaacgtgattggctcagttgaaaa

SEQ ID NO: 253233 - DNA, 625 bp, Unknown
  Bacterial polypeptide expressing nucleotide sequence isolated from the Sargasso Sea
atcagctaaattacttgctaacctaataagtacagctggcgcagatagagcccttatggttgatcttcatgctggacaaatccaaggtttttttgatattccaacagacaatctattcgctgcacctgttttaatagaagatataaaacagaaattttctggaaaagattttgttattatatctcctgatgttggtggagttgtaagagcccgcgcaattgcaaaaagattagactgtgaccttgctataattgacaaaagaagagagaaagcaagtgtttccgaggtagtgaatattattggtgaaatcaaaaataaacattgtattttaattgatgatatttgtgatactgcagggacacttacaaatgcagcgaaagcattaaaagtagaaaaagcaaaatcagtttacgcttatattactcatggagttctgtcaggacccgctttagaaagaataaataattcgcctattgataaaatggtaataactgatagtattctcgctcgagaagatgtacgttcttctgaaaaaattgagcaattgtctatagctcctcttattggagaggcaataggaagaattacagaaaataggtcggtttcgagtctattcgctttatag

SEQ ID NO: 253234 - DNA, 586 bp, Unknown
  Bacterial polypeptide expressing nucleotide sequence isolated from the Sargasso Sea
atgaaaattattgcaggcaacagtaataagagtttagcagaagcaatttgcacccataatggtgtgtcattagctgatacatccctaagaagatttgctgatagagaaatatttgtagaaattaatgaaaatataagaggggaagatgtatttatcattcaatcaacatctcaccctgcaaacgatcacctaatggagttattaattacaatagatgctgccaaacgaggttcagcaaaaagaattactgctgtcattccttattatggatatgctagacaagatagaaaaacaggtcctagaactccaataacggcaaaacttgttgcaaacttaattacttcagctggagctgacagagtattaaccatggatttgcacgcgggtcaaattcaggggttttttgatattcctctagataatattttttctgctccaccaataatcaaagatatgaaagaaaaattttccaacgaaagcaatcttgtaatcgcatctccagatgttggtggtgtcgtgagagcaagagcttttgcaaaaaaaatgaatgctggactagctatagctgacaaaagaagagaaaaag

SEQ ID NO: 253235 - DNA, 715 bp, Unknown
  Bacterial polypeptide expressing nucleotide sequence isolated from the Sargasso Sea
atgaagcttctcacaggaaacagtaacaaaaaccttagtcaaaaaatatcaaaatttttaaaaactaaattagttcattcaagtattaaaaaattttctgatggagagatctatatagagattaatgaaaacattagaggtaatagtatttttttaattcaatctgtaagttcacctgcaaatgataatcttatggaacttttgttatgcatagatgcactcaaaagatcttctgctaaaaacataactgcagttataccttacttcggttatgcccgacaggatcgtaaggtagcaccaagaacatctatatcagcaaaattagtttcaaatttaataactaaagcaggagcagatcgagtagtaactgtggacttacatgcaggtcaaattcaaggattttttgatattcctgttgataacctttttgcaactccaattttttcaagacatataaaaaaaaatataaaaggaaaaaatttgatttgtgttgcacctgacgttggtggagttgaaagaacaagggcacttgctagaaaattagatcttggtatagcaataatagacaagagaagaccgactccaggaaaatctcaagttatgaacgttgtgggaaatgttaataataaaacttgtattattgttgatgatataattgattcaggcggaacaattgttaatgcggctcaagcattacttgatagaggggcaaaag

SEQ ID NO: 253236 - DNA, 754 bp, Unknown
  Bacterial polypeptide expressing nucleotide sequence isolated from the Sargasso Sea
atcacctgctaacgataatctaatggaattactactatgtatcgatgccttaaaaagatcttcagcaaaaaatataacagcggttattccatattttggttatgcgagacaagatagaaaagttgttccaagaacatctatatcagcaaaactagtctctaatttaattacaaaagctggtgcagatagaattgtaacagttgatttacatgcgggtcaaattcaaggtttctttgacttaccagttgataatcttttttctactccaatatttgcaagacatgcaaaaaagagaattaaaagtcgaaaaattatttgtgttgctcctgatgtaggaggtactgaaagagcaagagcgcttggaaaacttttgaatgttggtcttgcaatagttgataaaagaagaccaaagccaggtcagtcacaagttatgaatgttatcggagatgttaaaggtcaaacttgtataattgttgatgatattatcgattcaggtgggactattgtaaatgctgcgaaagctttaaaaaatagaggggcaaaagaagtttatgtatatattactcacggagttttaagtggagaagcagtaaaaaaaattaaaaattctgttataaaaaatttagttattacagatacaattgataatgttgaaaaaactaaaaatgttaaaaacatagaagtattatctatttcaagccttatgggagaggcgattaagcgaatatctaattctacctctgtgtccgattta

SEQ ID NO: 253237 - DNA, 467 bp, Unknown
  Bacterial polypeptide expressing nucleotide sequence isolated from the Sargasso Sea
aatgaaaattttatcaggaacaagcaatccttcgctaagcaaaagcatttcgaaacaactcaagctaaaactagttaatacaaacattaaaaattttgctgatggcgaaatttatgttgaaataaatgaaaatattagaggaaatagtgtttttgttattcagtcaacatcaaggcctgctaacgataatctcatggaacttcttttgtgtatagatgctttaagaagatcttctgcaaaaaatattaccgctgtaattccttattttggttatgcgagacaagacagaaaagtggtccctagaacttctatctctgcaaaacttgtttctaatttgataacaaatgcaggtgcccatagagttgtaacggtagatctacatgctggacaaattcagggttttttcgatatgcctgtagataacctttttaccactccaatatttgctagatacattaaaaaaaata

SEQ ID NO: 253238 - DNA, 342 bp, Unknown
  Bacterial polypeptide expressing nucleotide sequence isolated from the Sargasso Sea
aatgagaattattgcaggaaccagcaatttacccctttctgaaaaagtcgccaaatatttgggtgacaaacttactgatgcgtcaataagaagatttgctgacgaagaagtatatgtagaaattaaagaaaatatacgtggagaagacgtatttataattgaatcgctctcatttcctgcaaatgataacctgatggaactcttagtaaccattgatgcgctaaaaagagcttcggctaaaagaattactgctgttatcccatactatggctatgcaaggcaagatcgaaagcctggtccaagaactcctatttcagcaaaattagttgcaaacttaattac

SEQ ID NO: 253239 - DNA, 686 bp, Unknown
  Bacterial polypeptide expressing nucleotide sequence isolated from the Sargasso Sea
tgtatttccatactacggatatgctagacaagatcgcaaaactgggcctcgaacaccaataacggctaaacttgttgcaaacttaattacatcagcaggagcgcatagagttttaacaatggatttgcatgcaggacaaatacaaggtttttttgatatccccttagataatattttttcagccccaccaatactgaaagatataaaagaaaaatttaatggtaataccgatttggttgttgcatcacctgatgtaggcggagtcgttagagctagagcttttgcaaaaagattaaatgctggattagctatagcagataaaagaagagaaaaagctggagagtcggaagtgatgaacataatcggtgatgttaaaaataaaatttgtattttgctagacgatatagcagactcagcaggtacattatgtaacgcagcagaagcacttcaaaaaagtggcgcaaaggaaatctactcatacattgttcatggagtattatctggtcaagctttaacaaaaatatcaagttctgctataaaagaactagttcttactgatacaattgaaccttcaaatgatgtaaaaaatacaaaaaacattagacatattagtatcgctcctttaatgggtgaggcgattaaaaggataagtagtgacgcatctgtttctgcactttttgattaaa

SEQ ID NO: 253240 - DNA, 799 bp, Unknown
  Bacterial polypeptide expressing nucleotide sequence isolated from the Sargasso Sea
aatggatgtatttttagttcaatcgacttatcaaccaggtaatgaacatctgatgcagcttctattgatggcagatgcatgcaaaagggcatcagctaaatctgtttcagctgtgattccctattttggttattctaggcaagacagaagaccaaggagtaccagaggccccgtatctgcaaaattggttgcggacttgattgaaacagcggatatcaaaaggctcataactgtggatctccatgcagatcagattgaaggtttcttctcaattccagttgataacatctactcttcaaccattttgatgagtgacatgtggagacaaggctatcaagatcaggtgattgtttcaccagatgtaggtggtgtacaaagggcaagagcaatcgccagaagattaggtaatgcaagtttggcaatcatcgataaaagaagagaagcggcgaataaatctgaagttatgaatatcatcggtgatgttgatcaaaaaacagtgatcatatttgatgacatggtcgatacagctggaacgctctgtaatgcagcagctgcacttaaagagaaaggcgcactgaaaacagtggcttatgccgtacaccctgtactttcagggcctgcaatagagcgaatagctgattctgaactcgatgagttggttgtgactgacaccatacctttgacgcaggaagcaaaagatagtggaaaaattagacaactttcaattgccgagcttctgggtgaaacaatagagagaatagtggcagatcaatccgtcagttctctatatgcagaataa

SEQ ID NO: 253241 - DNA, 655 bp, Unknown
  Bacterial polypeptide expressing nucleotide sequence isolated from the Sargasso Sea
aatgaaattattaactggaaatagcaacaaagttctaagtaaaaatattgctaaatacttaaaaacaaaacttgtaaattcaagtattaggaaattttccgatggagaaatctatgttgaaataaatgaaaacataagaggtaatagtatttttatcattcaatctatatcttcacctgcaaatgataatttaatggaattattactttgtattgatgctcttaaaagatcttctgcaaaaaatataacagctgtcattccttattttggatatgctaggcaagatagaaaggttgttccaagaacatccatatcagctaaattagtctcaaatttaattacaaaagccggtgctgatagagttgtaactgttgacttgcatgctggtcaaatccaaggtttttttgatatccctgtagataacctttttgcaactccaatttttgctagacatgcaagaaaaaaaataaaaagtaaaaaaattatttgtgtagcgcctgatgtgggtggaacagaaagagctagagctcttggtaagcttctcaatgttggtctagctattgttgataaaagaagaccaaaacctgggcagtctcaagtgatgaatgttattggagatgtaaaggatcaaacttgtataatagtggatgatata

SEQ ID NO: 253242 - DNA, 439 bp, Unknown
  Bacterial polypeptide expressing nucleotide sequence isolated from the Sargasso Sea
atgaaattattaactggaaatagcaacaaaactttaagcaaagatatagcgaaatatttaaaatcaaaacttgtaaattcaagtataagaaaattcgctgatggtgagatctatattgaaattaatgaaaatataagaggaaatagtatcttcataatacaatctgtttcttcgcccgcaaatgataatttaatggagttattactttgcatcgatgctttaaaaaggtcgtcagctaaaaatataacagcagtaattccatacttcggctatgctagacaagacagaaaagtcgttcctagaacatctatttctgcaaaacttgtatctaatttaattacaaaagctggcgcagatcgaatagtgactgtagatttgcacgcaggtcaaattcaaggtttctttgatattccagttgacaatctttttgctactccaa

SEQ ID NO: 253243 - DNA, 734 bp, Unknown
  Bacterial polypeptide expressing nucleotide sequence isolated from the Sargasso Sea
catgaaaattttatctggtacaagtaatcttaaattaagcaaagacatttcaagaaaactgaaactaaaattagttaatacaaatatcagaagattttctgatggagaaatctatattgaaattaatgaaaacattagaggaaacagtgtctttgtcattcaatcaacctccaatcctgcaaatgataatcttatggaacttttgttggttatagatgctttaaaaagatcatcagcaaagaatattactgcggtaattccttattttggttatgctagacaagatagaaaagttgcacctagaacatcaatttcagcaaaagttgttgctaatttaattaccaatgctggagcaagcagagttgtaactgtagatcttcatgcgggacaaattcaaggtttttttgatatgccagtagacaacttatttactactccgctttttgcgaaatatattaaaaagaagtttaataataaaaaacttatttgtgtttcacctgatgtaggtggtgtccaaagaacgagaggtttagcaactagattaaaagctgatctagccattatcgataaaagaaggccggttcctggaaaatctcaagtaatgaacatcattggaaatgttaaaaataaaacgtgtataattgtagatgacattattgatagcggtggaacaatagtaaatgcagtagatgccttaaagaaaaatggtgcacaagaagtttatgtatttatca

SEQ ID NO: 253244 - DNA, 388 bp, Unknown
  Bacterial polypeptide expressing nucleotide sequence isolated from the Sargasso Sea
atgaaattattaactggaaacagcaacaaaattctcagtaaaaatattgctaaatatttaaagtcaaaactagtaaattcaagtattagaaaattttctgatggggaaatatatattgaaataaatgagaatattagaggtaatagcattttcattatccagtcagtgtcatctcccgctaatgataatttaatggaattattactaagcatagatgctcttaaaagatcttcagcaaaaaatataacagctgttattccctattttggatatgcaagacaagataggaaagttgttccaagaacatctatctcagctaaacttgtttcaaatttaattacccaagctggtgcagatagagttgttactgttgatttacatgcaggtc

SEQ ID NO: 253245 - DNA, 409 bp, Unknown
  Bacterial polypeptide expressing nucleotide sequence isolated from the Sargasso Sea
gcaaaacaaataaacaccgatctcgctatcatcgataaacgtcgcccgacagcaaacgaggcacagatcatgcacattatcggcgatgtagaagaaaaaagctgcttgattgtagatgatatggtggataccgcgggaacgctatgtaaggctgctgatgctctaaaagaccacggcgcaacccgcgtattcgcttattgtactcatccggttttgtcaggacctgctatagagaatattgaaaagtcgagtttagattctctggttgttacagatacaattccattgaatgacacggcaagaaactgtaagcgtattcgccagctctcaatggctaaactgctaggtgaatcaatcagacgggtgagtaatgaagaatccatcagtgcgatgtttgacaatacttaag

SEQ ID NO: 253246 - DNA, 736 bp, Unknown
  Bacterial polypeptide expressing nucleotide sequence isolated from the Sargasso Sea
tgaatttgcaacagaggtatcagaaatactaggaatcaaaatctcaaaagcagatgttggttatttttctgatggagagctaaaagtagaaattgaagaaaatgtaagaggtcatgatactttcataattcaatctacttgttctccaactaataaaaatgtaatggaaataatgttaattgctgatgcattaaagagatcatcggcttcaagaattactgcagttgttccatattatggctatgcgagacaagatagaagagtaagatctgcaagagtacccattagtgcaaaagttgttgctgatatgtttgcatctgttggtattgatagggttttaactattgaccttcactctgagacaattcaaggtttttttgacatgcctgctgacaatgtttatgcaacaaaatttatggtcgacgatattaaagataataatgatagaaatgaagttgttgttgtgtctccagacgttggcggagttgtaagatcaagagcgcttgcaaaattattagatgatacagatttagctattattgataaaagaagagcagtagcaaatgaatctgaggttatgaacatcattggcgaagtcgaaggaaaggtttgtatagttccagatgacattattgatactgctggcacactttgtaatgcagcaaaagcattaaaagataaaggtgcaaaagctgtaaaagcatatattactcatccagttctatctggaccagca

SEQ ID NO: 253247 - DNA, 493 bp, Unknown
  Bacterial polypeptide expressing nucleotide sequence isolated from the Sargasso Sea
atgaaattattatcaggaactagcaataagcctctgagtaaagatattgctaaattcttaaaatctaaactagttcattcaagcattagaaattttgcagatggtgaaatttatattgaattaaatgaaaacattagaggtaacagtatttttatcattcagtctatttcatctcctgcaaacgataacttaatggaacttttgttgtgtatagatgctttaaaaaggtcatctgctaaaaatattacagctgttattccatattttggttatgctagacaagatagaaaagtggttccaagaacatctatttcagcaaaactcgtttcaaatttaattacaaaagctggagcagatagagttgtaacagttgacttgcatgcaggtcaaattcaaggtttttttgatatcccagtcgacaacctattttcaacaccaatatttgcaagacatataaaaaaaaatattaaaagtaaaaatattgtatgtgttg

SEQ ID NO: 253248 - DNA, 571 bp, Unknown
  Bacterial polypeptide expressing nucleotide sequence isolated from the Sargasso Sea
atgaaaattctcacaggaaatagtaataagaacctaagtaaaaaaatatctaaatatctaaaaaataaacttgttaattctagtattaaaaaattttctgatggtgaaatctatatagaaataaatgaaaatataagaggaaatagcatttttattattcaaggaatctcttcacccgcaaatgataatttaatggaacttttgttatgtattgatgcactaaaaagatcatcagcaaaaaatataactgcagtaattccatattttggttatgctagacaagatcgaaaagttgtaccaagaacttcaatatctgcaaaacttgtttcgaatctaattacaaaagctggggcagatagaattgtaactgtagatctgcatgccggacaaatacaaggtttttttgatattccagttgataatctttttgcaacaccaatttttgctagacatattaaaagaaaaattaaaagtaaaaatttaatttgcgtagcacctgatgtgggtggagttgaaagagcaagagctttgggtagaaaattagatgttggtttagcaattattgataaaa

SEQ ID NO: 253249 - DNA, 325 bp, Unknown
  Bacterial polypeptide expressing nucleotide sequence isolated from the Sargasso Sea
atgaaaattattgcctgtaacagtaataaattcttagctgaagcaatatcatcttacattggtgtaaagttagcaaatacttcacttagaagatttgcagatagagaaatctttgttgaaataaatgaaaatattagaggggaagatgtttttataattcaatcaacatcacatcctgcaaatgatcatcttatggagttattaattactatagacgcagcaaaaaggggatcagctaaaagaataacagcagttataccttattatggatatgctcgtcaggatagaaaaacaggtcctcggacacctattacagctaaattag

SEQ ID NO: 253250 - DNA, 557 bp, Unknown
  Bacterial polypeptide expressing nucleotide sequence isolated from the Sargasso Sea
catgtccgattacgaaagtttaaaagttttttcaggaaattctaacaaagagctttctgataaaatcgcaaaaaaaattggtataccaatcggaaaagcttttgttggaagatttagtgatggggaagttcaaatagagcttcacgaagatgttagaggaaaagatatttttgtaatacagtctacatgtaatccaacagacgaaaatctcatggaattattaattctagttgatgccttgaaaagatcgtcagctgctcgagtaacaactgtcattccttattttggatattctaggcaggatcgaagagtaagatcaatgagagtgccaatatcagcaaaagttgtcgccaatttaattagcactgttggaactgacagactgttaacagttgatttacattctgatcaagaacaaggcttttttgatattccagtagataatatatatggatctccaattttgatatcagatatgtggaaaaagaaatatccaaatattgtagttgtttccccagatactggcggtgtagttagagcaagagcagttgccaaac

SEQ ID NO: 253251 - DNA, 403 bp, Unknown
  Bacterial polypeptide expressing nucleotide sequence isolated from the Sargasso Sea
gcaaggcgaattaatgcaaatttagctataattgataaaagaagagagaaacctggatcctctgaagttatgaatattattggtgatgtttctaatcatcactgtttaatagtggatgatataattgattctggaggtacaatatgcaatgccgctcaagcgctcattgatgtaggtgcaattagtgtagatgcatatgttactcacggtgttctctctggttctgcagtaagtaatatctcaaattctcctttaagttctcttgtaacaacgaactctatcaaagcaactgaggcagtaaaaatgtcaggcaacataaggcaaatttccattgctcctataattggtgaggctattcgtagagttcatatggaacagtctgtttctagtctttttgaataaa

SEQ ID NO: 253252 - DNA, 775 bp, Unknown
  Bacterial polypeptide expressing nucleotide sequence isolated from the Sargasso Sea
tgcaagtacttagatattcctttgggagagtgtgaagttttcaagttcagcaacgataatacttttgtgaaattcaaagaaaatattcgtgaacgagatgtgtttgtagtacaaactttttctgatccagtaaatgatcatattatggaattgttgataatgattgatgctgctaaacgtgcatctgccggtaggattacagcagtaattcctcattattcttatggtaggagcgataaaaaagatcagcctagaattcctattactgctagattagtagctaacttgctaacagtagctggtgctgatcgtgttttgactgtggatttacatgcaggtcaaattcaagggttttttaatattcctgtagatgaactgactgctgttccaatgttagcaggatattttaaagataatcatgtagatattgaggttgcttctgctactgatgctggtgatgttaaaagaacaagagatactggtagatacttaaatgttcctatttctttggttgaaaaacatcgtataggcaatgaagataaagtagagtcaatgagtttagttggagatgtaactaacaaatctactttgatagttgatgatgaagtaggaacaggtggcacggttatagcaacagctgaagctttggcaaaccatggtgctagagaaatatattgtgctgctacccatggagtcatgtccggtgatgcgagagagatattagaatctagtagtatcaaagaaatagtagttactgataccttacctgtgaata

SEQ ID NO: 253253 - DNA, 649 bp, Unknown
  Bacterial polypeptide expressing nucleotide sequence isolated from the Sargasso Sea
tagaaaggttgttccaagaacttccatatctgcaaaacttgtttcaaatttaataactcaagctggtgctgatagagtggtaactgtagatttgcacgcaggtcaaattcaaggtttctttgatattcctgttgataacttattttctactccaatatttgcaagacacgctagaaagaaaattaaaagtaaaaaaattatttgtgttgcacctgacgtaggaggaacagaaagagctagagcacttggaaaacttttaaatgtaggactagctattgttgataaaagaagaccaaagcctgggcaatcagaggttatgaatatcatcggtgatgtaaaaggacaaacttgtattttagttgatgatataattgattcaggtggcacaattgttaatgcggcgaaagctttgaaatctcgaggagcaaaagatgtttatgtttacattactcatggggttttaagtggagatgcaattaaaaaaattaaaagttcagtaattaaaaatttagttataaccgatacaatagacaatgttcataaaactaaaaatgttaaaaatattgaggttttacccatttcaggtcttatgggtgaagcaataaagagaatttcaaattcaacatccgtatcagatttatttaaataa

SEQ ID NO: 253254 - DNA, 390 bp, Unknown
  Bacterial polypeptide expressing nucleotide sequence isolated from the Sargasso Sea
catgaaaattttatctggaactagtaaccttaaattaagcaaggacatttctaaaaaattaaaattaaagttagttaatactaatataagaagatttgctgacggagaaatctatatagagataaatgaaaacataagagggaatagtgtttttgtaattcaatctacctctaatcctgcaaacgataatttaatggaacttcttcttgttgttgatgcattaaaaagatcttctgcaaaaaatattacggctgtgatcccatactttggatatgctaggcaagatagaaaagttgctccaagaacatcaatctctgctaaagttgtcgccaatcttatcactaatgctggagcaagtagagtagttacggttgatttgcatgctggaca

SEQ ID NO: 253255 - DNA, 700 bp, Unknown
  Bacterial polypeptide expressing nucleotide sequence isolated from the Sargasso Sea
atgaaactattatccggaaatagcaataaacctttaagcaagaatattgcgaaatatctaaaatctaaattagtaaattctagtattagaaaattttcagatggtgaaatttatgttgaaataaatgaaaatataagaggaaatagtatttttataattcaatctgtatcttcacctgcaaatgacaacttgatggaacttttgttgtgtattgatgcgcttaaaagatcatctgcaaaaaatataactgcagtaattccatattttggttatgcaagacaggatagaaaagtagtacctagaacatctatatctgcaaaattagtatcaaacttaataactaaagcaggagcagatagagttgtcactgttgatttacatgcaggtcaaattcaaggattttttgatattccagtagacaacttgtttgcaacacctatttttgcaaggcatgcaaaaaaaaagataaaaagtaaaaaccttatttgcgttgctccagatgtgggtggtaccgaaagagctagagcccttggaaaaattttaaatgttggtttggctatagtagataaaagaagaccaaaaccagggcaatctcaagtaatgaatatagttggagatgtaaaaggaaaaacttgtattattgttgatgatataatcgattcaggtggaacaatagtaaactcagcaaaagctcttaaag

SEQ ID NO: 253256 - DNA, 496 bp, Unknown
  Bacterial polypeptide expressing nucleotide sequence isolated from the Sargasso Sea
tatgcttaattttattcagtctcaggccataaaaaacccggtggtggtttctcctgatatgggtggtgttgcacgggctagggcattagctaaaagccttgattgtgacttagccattattgataagcgtcgtcctaagcctaatgaggcgcaggtgatgaatattattggtgatgttcaggatcgtcattgccttattttagatgatattgtcgatactgcaggaactttatgtaaggctgctggtgctctaatgaaaaaaggtgcaagtgcggtttcggcgtattgtgttcaccccattttatctggtcctgcattggagaatattgccgcttcttctttatctgatttggtagtgaccgactctattcctttatctgccgctgcgcaaaaaatgccggttattaaacagctcagtttatcaaatatgcttggcgagatcatttccagggtaagcttagaaaaatccttatcggatgtatttgcagaagagtag

SEQ ID NO: 253257 - DNA, 341 bp, Unknown
  Bacterial polypeptide expressing nucleotide sequence isolated from the Sargasso Sea
aatgaaacttctgacaggaaatagtaataaaaaccttagtcaaaaaatatctaaatatttaaaaactaagttggtacattctagtattaaaaaatttgcagatggtgaaatttatatagagataaatgaaaacattagaggtaatagtatttttttaattcaatcaattagttctcctgcaaatgataatcttatggaacttctgctttgtatagatgcattaaaaagatcatcggcaaaaaatattacagcagtaattccttatttcggatacgcaagacaagatagaaaagttgctccaagaacatctatttctgcaaaactagtttctaatttaatta

SEQ ID NO: 253258 - DNA, 529 bp, Unknown
  Bacterial polypeptide expressing nucleotide sequence isolated from the Sargasso Sea
gatgtataaagaaagtgtcctaatgaaaattttatcaggaacaagcaatcccacattaagcaaaaatatatctaggcatcttaaaagcaaacttgttaatacaaatattaaaaaattcgcagacggtgaaatttacgttgaaataaatgaaaatataagaggtaacagtgttttcgtaatacagtctagcgcaacgccagctaatgataatctcatggaattacttttatgtatagatgctctaagaagatcttctgcaaaaagtattacagctgttattccatattttggttatgcaagacaagatagaaaagttgtccctagaacatccatttcggcaaaactcgtgtccaatttaattacaaatgctggtgcacacagagtcgttacagttgatttacacgcaggtcaaatccaaggtttttttgatatgccagttgataacttatttaccacaccactttttgcaagatatataaaaaaaaatataaaaagcaaaaattttatatgtgtatcccctgatgcaggt

SEQ ID NO: 253259 - DNA, 593 bp, Unknown
  Bacterial polypeptide expressing nucleotide sequence isolated from the Sargasso Sea
caatgcaggggcaagtagagtacttactgtagatttgcatgcaggacaaattcaaggttttttcgatatgccagtagacaatttatttacaactccactgtttgcgagatacataaaaaaaagattgaaaagtaaaaaaataatatgtgtttcacctgatgtaggcggagttcaaagaacaagaggtttagcaaataggattaacgctgacctagctatcatcgataaaagaagacctaaacctggaaaatctaaagttatgaatataataggaaatgtgagagggaaaacatgcatcatagtagatgatataattgatagcggtggaactattgttaatgcagtggatgctctaaaaaaaagtggtgcaactgaagtttacgtttttataactcatgcggttttaagtggtgatgctgtagcaaaaattaaaagatcaaaaataaaaaaactaattattacagacactatagataattcgcaaaaaataaaaaataacaacaaaattgaggtattatcgatttcctctttaatggctgaagctataaaaagaatttccaactctacatcagtgtcagatttatttaattaac

SEQ ID NO: 253260 - DNA, 667 bp, Unknown
  Bacterial polypeptide expressing nucleotide sequence isolated from the Sargasso Sea
ggatacgctagacaagatagaaaggttgctcctagaacatcaatatcagcaaaattagtttcgaatttgatcactaaagcaggagcagatagagttgttactgttgatttgcacgcaggtcaaatacagggtttttttgatattccagttgataacctttttgctactccaatttttgcaagacacgttaaaagaaatttaaataaaagaaatttaatttgtgtgtcccctgatgttggtggtgtagagagaacaagagcacttgctaaaaaattaaatgttggtattggaataattgataaaagaagacctgctcctggaaaatctcaagtgatgaatgtaataggaaatgttaaaggtaaaacttgtataattattgatgatataattgactctggaggaacaatagtaaatgcggcacaagctttgataaatagaggagcaaatgaagttcacgtttatattactcatggagttttgagtggtgaagcagttgacaagattaaaaaatctagaataaaaaaactggttattacagatacaatcgataactccagtaagataaaaaaagccaaaaatattgaagtattaacgatatctaatttacttgcggaagcaattaagagaatttctaattcaacttcagtttctgatctatttaaataat

SEQ ID NO: 253261 - DNA, 494 bp, Unknown
  Bacterial polypeptide expressing nucleotide sequence isolated from the Sargasso Sea
catgaaaattttatctggaactagcaatcttaagcttagcaaagatatatctaagaaccttaaactaaaattaatcaatacaaatataaaaagattcgctgatggagaaatttatattgaagtgaatgaaaatattagaggcaatagtgtatttgtaattcaatcaactgctaatccagcaaatgataatataatggaacttcttttagttatagatgcattaagaagatcttcagcaaaaacaatcacagctgtaattccttacttcggatatgcaagacaagatagaaaagtcgctcctagaacttctatatcagcaaaagttgttgcaaatttaatttctaatgctggagcctcaagagtggtcacagttgatttgcatgctggccaaatacaggggttttttgatatgccagttgacaacttgtatactgcacctctttttgccaaatatataaaaaagaaattaaataataaaaaattaatttgcgtgt

SEQ ID NO: 253262 - DNA, 458 bp, Unknown
  Bacterial polypeptide expressing nucleotide sequence isolated from the Sargasso Sea
tatgaagattctttcttgcaacagtaatctaacaatttctaaaaaaatttctgaatatcttaatatcaatttaattgatgctaacattactaaatttgctgacaaagaagtttttgttgaggtcaatgaaaatgtacgtggtgaggatatatttgtaattcaatcaactcaatatcctgtaaatgataatatcatggagctattgattacaatagatgctctaaagagagcttcagctaagagaattacagccgttattccttattttggctatgctaggcaggataggaaatccagtccaagaacaccaatttctgcaaagctggtagcaaacttaatcacagttgctggtgttgatagagtcttaacccttgatttacatgctggtcaaatccaaggttttttcgatattcctctagataaccttacctcagctcctgttttttctcggcacatta

SEQ ID NO: 253263 - DNA, 643 bp, Unknown
  Bacterial polypeptide expressing nucleotide sequence isolated from the Sargasso Sea
catgaaaattctttctggaacaagcaatttaaaactcagcaagagtatagcaaaaaacctaaaactaaaattaattaacacaaatattagaagatttgctgatggagaaatttatattgaaataaatgaaaacattagaggtaacagtgtttttgtagttcagtccacttctcatccagctaatgacaatataatggagttgttattagtaattgatgcattaaaaagatcatcagctaaaacaattacagcagttatcccttattttggatacgctagacaagatagaaaagtcgctccgagaacttccatatctgctaaagtaatggcaaatttaatcacgaatgctggtgctacaagagttgtaacggtagacttacatgcaggacaaattcaaggattttttgatatgccagtggataatttatacactgctcctctatttgcaaaatatattaaaaaaaaattaaataacaaaaaattaatttgcgtttcacctgatgtaggcggtgtggctagaactagagatctagcaaatagaataaaagctgaccttgcaattatagataaaagaagacctgctccgggaaagtctgaagtaatgaatatattaggagaggtaaaaaataaaacatgtattatt

SEQ ID NO: 253264 - DNA, 517 bp, Unknown
  Bacterial polypeptide expressing nucleotide sequence isolated from the Sargasso Sea
gatcatatttacggttcacctgtattaattgattatctagaatctctagatttagaagaaatagttgtagtctctcctgatgttggcggggtagcaagagcaagagcgttcgcgaaattaatgaatgatgcgccgttggctatcattgataaaagaagagctgctcataatatcgctgaaagtctaaccgttatcggtgaagtcaaaggtaaaacggctattcttatagacgatatgatagatacgggaggcacaatttgttctggagcaaatttactaaaaaaagaaggagctaatagaatatttgcatgtgcttcacatgctgtattttctcctccttcacatgaaagattaagttctaagaatctttttgaacaagttattgtgactaacagcataccagttatatataaagataattttcctcagttaaaagtcctttccgtcgctaatatgttgggggaagctatttggagaatccacgaagaaagttctgttagttctatgtttagataaa

SEQ ID NO: 253265 - DNA, 358 bp, Unknown
  Bacterial polypeptide expressing nucleotide sequence isolated from the Sargasso Sea
atgaagcttctaacaggaaacagtaacaaaaaattaagtgaaaaaattgcaaaatatttaaaagaaagcctcgtgaattcgagtataagaaaattcaaggatggagagatatacatagagattaatgaaaatattagaggaaataatattttcatcatacaatcaatttcatctccggctaatgataacttaatggaaatgttgctatgtattgatgctttaaaaagatcatcagccaaaaatattactgctgtaattccttattttggatatgctagacaagatcgaaaagttgtaccgagaacatctatatcagcaaaattagtttcgaatttaataacaaaagctgggcgcagat

SEQ ID NO: 253266 - DNA, 805 bp, Unknown
  Bacterial polypeptide expressing nucleotide sequence isolated from the Sargasso Sea
atgaaaattttatctggcactagcaatttaaagcttagcaaagatatttctaaaaatcttaaactaaaattgattaatactaatattagacgattttcagatggggaaatctatattgaaataaacgaaaatattagaggtaatagtgtttttgttattcaatctacatcaaatcctgctaatgataatataatggaacttttattagtgatagacgcattaaaaagatcatcagcaaaaacaattactgctgttatcccttattttggttatgctaggcaagatagaaaagttgctcctagaacttctatatctgcaaaagtcgttgctaatttaatttcaaatgcaggcgcgactagagttgtgactgtagatttgcatgcaggacaaattcaaggatttttcgatatgccagttgataatttatacactgcccctctctttgcaaaatatataaaaaaaaagctcaatactaaaaaacttatttgtgtttctccagatgttgggggagtggctaggactagagctttagctacaagaataaaagcagatcttgctatcattgataaaagaaggcctgctcctggaaaatctgaagttatgaatataattggaaatgtaaaaaataaaacttgtataattgttgatgacataattgacagcggagggactattgttaatgctgtagacgctcttaaaaaaagtggtgcaaatgaagtttatgtattcataacgcatgcagtattaagtggagatgcagtaattaaaattaaaaagtctaagatcaaaaaacttgtaattacag

SEQ ID NO: 253267 - DNA, 343 bp, Unknown
  Bacterial polypeptide expressing nucleotide sequence isolated from the Sargasso Sea
aatgaaaattttaactggaactggaaatcctaagttagctgagctgattgctacatctgttggtgtaagtttatgtgaaacgaacatcacacgttttcctgatggtgagatctttgttaaaattgttgataatgttcgaggtgaagatctttttattattcagtcagtatctattgagccgaataatatgcttatggagctgttgattatgattgacgctgcaaaacgcgcatctgcaaaacgtattactgcggttttaccttattatggatatgcaaggcaggaccgaaaagatcaacctagagtgcctattacagctaaattagtggcaaatttattagtt

SEQ ID NO: 253268 - DNA, 928 bp, Unknown
  Bacterial polypeptide expressing nucleotide sequence isolated from the Sargasso Sea
atgaaaattatttctggaaatagtaacattgagttatctaaagagatttcagaatatctaaaaattcaattatctgaaacaactatgacaaggttttctgataaagagatatttgttgaaattggtgaaaacgttcgaggagaagatgtttttttagttcaatcaacttctttccctgccaatgacaatttaatggaattattggtagcaattgatgctctaaaacgtgggtctgcaaaaagaatcactgctgttttgccatattttggttatgcaagacaggatagaaaaactggaccaagaactcctatatcagcaaaattagtagccaatctaattaccacagctggtgcaaatagagttttaacaatggatctacacgcaggtcaaattcaaggtttttttgatatccccttagacaacctatatgcaactaatatgttcatgaatgacattaaatcaaataaaagggatgaaaatcttgtatttgtctctccagacgtcggaggtgttttaagagctagagcatttgcaaaaaaactcgacgctgatttagctataattgataaacgtagagacgctccaggtgtgtctaatgctatgaatgtcataggctcggttgatggaaaaaaatgtataatcgttgacgatttggttgactcaggaggaacaatttgcaatgcggctaaagctcttaaagagaatggtgccacagaggtttatggatattgttctcatggtgtttactctggaaaggctttagacaacataaataattcagttttagaggaaatggtttgtacaaatacaattaaacccacttttgaagtgccctcatcaatgaggtatttatctgtagctccactttttggtgaagctattaagcgtattaataacgaaacttctatatcttctctgtttgattaat

SEQ ID NO: 253269 - DNA, 976 bp, Unknown
  Bacterial polypeptide expressing nucleotide sequence isolated from the Sargasso Sea
actggatgcaaccccgaggtttcaaaccgtgcctgacatgaagctgtttgctggtaacgcaacgccggaactagcccagaagatcgcagatcgcctgtttatcaaactcggcaatgctgccgtaggtcgctttagcgacggcgagatcagcgtacagatcaacgagaatgtacgtggtggcgatatcttcatcattcaatccacctgtgccccgaccaacgacaatttgatggaattgatcgtgatggtggatgctctgcgtcgtgcttcagctggccgtattactgccgttatcccctactttggttatgcccgtcaggaccgccgcgtccgctccgcccgtgttcccatcaccgccaaggtcgtcgccgacttcctctccagcgtcggtgtggatcgcgtgctgaccgttgacctgcatgccgaacaaatccagggcttcttcgacgtcccggtcgacaacgtgttcggcagcccggtgctgctggaagacatgaagtccaagaacctcgaatcccccgtggtcgtgtcgccggacatcggcggcgtggtacgtgcccgtgccatcgccaagctgctggacgataccgacatcgccatcatcgacaagcgtcgtccccgcccgaacgtctcccaggtcatgcacctgatcggtgacgtggccggccgcgactgcatcatcgtcgacgacatgatcgacaccggcggcaccctgtgcaaagccgcagaagccctcaaggagcgcggcgccaagcgtgtattcgcctacgccactcacccggtcttctccggttccgccgtggagaacatcaagaactccgtgatcgacgaactgatcatcaccgactccatcccgctcaccgcggagatgaaggcggtcgacaaggtcaagcagctgacgctctcttccgtgctggccgaagccattcgccgcatcagcaacgaagagtccatctctgccatgtttgagcattga

SEQ ID NO: 253270 - DNA, 442 bp, Unknown
  Bacterial polypeptide expressing nucleotide sequence isolated from the Sargasso Sea
ggagtggtacgagccagagctctcgcaaggagcttagatgctgaccttgcaatcattgacaagcgaagagagcgcgctggcgtctcggaagttatgaatataattggtgaagtcgacgataggcattgtatattagttgatgatattgttgactcaggcggtacgttatgcaacgcagcagaagctcttatggttgcaggtggcttatcagtatcggcctacataagccatggagtactatctggaggcgccgctgcgcgaattaaagactccccgttaactgaacttgttacaacggacagtattcaagcaactgaggcggtgctagccgctcccaatatgcgccagattacgatagctcccttattaggagaagctatcctacgaatagcagaatcccgatccgtatctagcctttttgactataacacatcaaattaag

SEQ ID NO: 253271 - DNA, 325 bp, Unknown
  Bacterial polypeptide expressing nucleotide sequence isolated from the Sargasso Sea
tctgaccgcagcccgcgctgaacaggaaaagctcacaccggacacacgccggttgcgcttgttcagcggcacctccaatcctgggctggccagggagatcgccgcatatctgggtgttcccgatggcccgcgggtgtgcaaacgcttcgccgatggcgagctctacgtgcagatccaggagtccatccggggctgcgatgtgtttctgatccagcccacctgcgctccggtgaacgatcacctgatggagctgctgatcatggtggatgcctgccgtcgggcatcggcacgccagatcacggcagtggtgccgtattacggctat

SEQ ID NO: 253272 - DNA, 614 bp, Unknown
  Bacterial polypeptide expressing nucleotide sequence isolated from the Sargasso Sea
aatgagtagtagagttaactttgatatattttccggtagctctgtaccggatttagcaagaggaattgcagaaattcttgatacagatattggtcatatagatgtatcaaagttttctgatggagagattaaggttgaattgatggaaaatgtaaggggtcatgaaaccttcatcgtgcaatcaacatcatatcccgcaaatgataatttgatggaattaatcctaattgcagatgcattgaaacgctcttcagcctcaaaaattacagctgttattccatattttgggtatgcaagacaagatagaagagtgagatctgcaagagtcccaattagtgcaaaggtagtagctgatattctctataaagctggaattcatagaattttaactgttgatcttcactcagaaacaattcaaggtttttttgatatgccagctgataacgtatatgcaactaaagtgatgttaaatgacataaaaaataactatagagatgatttatctaaggttacagtcgtgtctccagatgttggaggtgtagtaaggtcaagggcattagcaaagtttatagatgatgctgatttggccataattgataaaagacgatcagcag

SEQ ID NO: 253273 - DNA, 955 bp, Unknown
  Bacterial polypeptide expressing nucleotide sequence isolated from the Sargasso Sea
gatgtataaagtaaatgtcctaatgaaaattttatcaggaacaagcaaccccacattaagtaaaaacatatcaagatatcttagaaccaaacttgttaatacaaacataaaaaagtttgcagatggcgaaatctatgttgaaattaatgagaatattagaggtaacagtgtttttgttattcagtctagcgcgaatcctgctaacgataatcttatggaacttcttttgtgcattgatgctttaagaagatcctctgcaaaaaacattacagcggtaattccatattttggatacgcaagacaggatagaaaggttgttccaagaacttcaatttctgcaaaactagtttctaatcttataactaatgcaggcgcaaacagaatagtcacagttgatttacatgctggtcaaatccaaggtttttttgatatgcccgttgacaatttatttacaactccattatttgccagattcataaaaaaaaacataaaaagtaaaaattttatttgtgtctcaccagatgcaggtgcgattgagagaacgagagcattagcaactaaaattaacgctgacttagctattatcgataaaagaagaccagagccaggaaaatccaaagttatgaatattattggaaatgtaaaaggtaaagattgtataatcatagatgatataattgatagtggagggactatcataaatgcagctgatgcccttatgaaaaaaggtgcaaaaagtgtttatgtatttatttcacacgcagtactaagtggaaacgctgttaagaacattcaaaaatcaaaaattaagaaattaattattacagatacaatcgataatacaaaaaaaattaataaagctaataaaatacaagttttatctatagcgcagcttatggctgaggctataaaaaggatttcaaattcaacatctgtatccagcctgttcaattag

SEQ ID NO: 253274 - DNA, 798 bp, Unknown
  Bacterial polypeptide expressing nucleotide sequence isolated from the Sargasso Sea
gaggaaatagtatttttattgtacagtcaatttcatctccagcaaatgataacttaatggagttgttgttatgtattgatgcacttaaaagatcgtcagcgaaaaatataactgctgttattccttattttggatatgctagacaagataggaaagttgttccaagaacttcgatctctgcaaaacttgtatcaaatttaataacaatggcaggagcagatagagttgtaaccgttgatttacatgctgggcaaattcaaggttttttcgatattccagttgacaaccttttttctactccaatttttgcaagacatgcaaaaaaaaagataaagagtaaaaaaataatttgtgtagccccagatgtaggcggaactgaaagagctagagcccttggaaaacttttgaatgttggattagctatagtagataaaagaagaccgaaacctggtcaatcagaagttatgaatgtcatcggtaatgttcaaggtcagacttgtattattgttgatgatataattgattcaggtggtacaattgttaatgcagctaaagctttaaaatcaagaggtgctaaagaagtttatgtttatatcactcatggagttttaagtggagacgcagtaaaaaaaattaaaagttcagttataaaaaatttagtcatcactgatacaattgataacgtagtaaaaacaaaaaatgttaaaaatattgaggttttgccaatttcaggccttatgggcgaagcaataaaaagaatctcaaactccacatctgtttcagatttatttaaataaa

SEQ ID NO: 253275 - DNA, 683 bp, Unknown
  Bacterial polypeptide expressing nucleotide sequence isolated from the Sargasso Sea
ttactttggctatgcccgtcaggaccgacgcgtccgctcggctcgagtgccaatttccgccaaagtggtcgcggataccatggtgggcgtgggtgtagaccgggtactcaccgtcgacctgcacgccgagcagattcagggcttctttaccgtaccggtagacaatgtctacgcctcatcgattctcaacgccgatattgtgcgctgcgattacgagaacctcatcgtcgtgtcgcctgatattggcggcgtggtgagagctcgggcgatcgcaaaacagttggacgatgccgacctggccatcatcgacaagcggcgtccgcgcgccaacgaagccgaagtcatgaatctgattggagacgtagaaggccgaaccgccattctggtcgacgacatggtcgacacagcgggcaccttatgcactgcggccaacgcgctcaaagaacgtggggcattaaaggtcgtgtcttattgtacccatgccgttttatcgggcaaggccctggagaacatcaagaattcgcagatcgacgaattggtcgtcacagacacaatcccactgtcgggtgaggcgcaggccgtcggcaagatccggcagctgacgatcgctgatttactggcggagtcgattcgtcgagtcagcaacgaggaatccattagcgcactgtttgatttgtcttgag

SEQ ID NO: 253276 - DNA, 934 bp, Unknown
  Bacterial polypeptide expressing nucleotide sequence isolated from the Sargasso Sea
aatgaaattattaactggaaacagcaataaaattttaagtaaaaacattgctaaatacttaaaaacaaaacttgtaaattcaagcattagaaaatttgctgatggtgaaatttatattgaaataaatgaaaacattagaggtaatagtatttttattgttcaatccatctcctctccagcgaacgataatttaatggaactattattatgcattgatgctcttaagagatcatcagcaaaaaatataacagcggtgataccgtattttggatatgcaagacaagatagaaaagttgttccaagaacttccatatctgcaaaacttgtttctaatttaattactaaagccggtgctgatagagtggtaactgtagatttgcatgcaggtcaaattcaaggtttctttgatattcctgttgataacttattttctactccaatatttgcaagacacgcaaagaagaaaattaaaagtaaaaaaattatttgtgttgcacctgatgtaggaggaacagaaagagctagagcgcttggaaaacttttaaatgtaggattggctattgttgacaagagaagaccaaaacctggccaatcacaagttatgaacgtcatcggtgatgtaaaaggtcaaacctgcattatagtcgatgatataattgattcaggtggaacaattgttaatgcagcgaaagctttgaaatcccatggggcaaaagatgtgtacgtttatattactcatggagttttaagtggagatgcaatcaaaaaaattaaaaactcagtaattaaaaatttagttataactgatacaatagacaatgttcataaaacaaaaaatgttaaaaatattgaggttttaccagtatcaggtctcatgggtgaagcaataaagagaatctcaaattcaacatctgtatcagatttatttaaataa

SEQ ID NO: 253277 - DNA, 934 bp, Unknown
  Bacterial polypeptide expressing nucleotide sequence isolated from the Sargasso Sea
atgaaaattctcactggaaatagcaataaagttctaagtgataaaatatcaaaatatcttaaaaataggctggttaattctagtattaaaaaattcgctgatggagaaatttatattgaaataaatgaaaatataagaggtaatagtatttttattattcaatctatttcatcacctgcaaatgataatttaatggaacttcttatttgtatagatgcattaaaaagatcgtctgctaaaaatataacggctgtaattccttattttggttatgcgagacaggaccgtaaagtggttcctagaacatctatatctgcaaaacttgtttcaaatttgattacaaaggcaggtgcagatagaattgtaacagttgaccttcacgcaggacaaatacaaggattttttgatattccagttgataacctttttgcaactccaattttttcaagacatattaaaaaaaaaattaaaagtaaaaatttaatatgtgtggctccagatgtcggtggagttgaaagagccagagcattaggaagaaaattggatgttggtctcgctataattgacaaaagaagaccaacaccaggcaaatctcaggttatgaatgttataggtaacgttaagggtaaaagttgtataatagttgatgacataatcgactctggtggtactattgtaaatgcagctgccgcgcttattaaaagaggtgcaaaagaagttcatgtttatgtaactcatggagttttgtctggagaatctgtagaaaaaattaaaaaatcgaaaattaaaaatttagtagtgactgatacaataaacaactctgataaagttaaaaaatcaagaaatatagaggtattatctatatctaatttgttagcagaagcgatgagaaggatttcaaattctacttctgtatctgatttatttaaataat

SEQ ID NO: 253278 - DNA, 756 bp, Unknown
  Bacterial polypeptide expressing nucleotide sequence isolated from the Sargasso Sea
aatgaaaataatcacgggtaattcaaacaaaaacctaagtttgagaatatctaaatatttaaaaaatagacttgttcattctacaataaaaaaattctctgatggagaaatttacattgagattaatgaaaatattagaggtaatagtatttttgtcattcaatcagtatcatctcctgcaaatgataatttaatggaattactactttgtatagatgctctaaaaagatcttctgcaaaaaacattactgcagttatcccttattttggatatgctagacaagatagaaaggttgtgcctagaacttctatttctgctaaattagtttcaaatctaattacaaaagcaggcgcagatagagttgttacaatagatttgcatgcgggacaaatacaaggatttttcgatataccagtagataacctttttgctacaccaatctttgctagacatgtcaaaaagaaaattaaaaagaaaaatttgatttgtgtcgcacctgatgttggtggaactgaaagagcaagagctttgggtaaatttcttaacgctggattagcaataattgataagagaagaccagctccaggaaaatcagtagtaatgaatgtagtaggatatgttaaaggcaaaacatgcatcatagttgatgatataattgactcgggaggcacaatcgtaaatgcttctaatgcattaattgaaagaggggcgaaagaagttcatgtttatgtaacacatgggggtgctaaagtgga

SEQ ID NO: 253279 - DNA, 937 bp, Unknown
  Bacterial polypeptide expressing nucleotide sequence isolated from the Sargasso Sea
atgaaaataatcgcttgtaatagcagtaagagtctttcagaaaaaatttcaaaacatattggagtacccttagcggatgcttcacttagaacttttaatgatagagagatatttgttgaaataaatgaaaatattcgtggtgaggatgtatttatagtacaatcaacttcccatcctgcaaatgaccacttaatggaattacttattacaattgatgctgcaaagagaggatctgcaaaaagaataacggctgttattccttactatggatatgctaggcaagatcgtaaaacaggtccaagaacaccaataactgctaaacttgttgcaaatttaataacttcagctggagcagatagagttttaacaatggatttgcatgctggtcaaattcaaggtttttttgatattcctcttgataatattttttctgctcctccaattctaaaagatattaaagaaaagtttaatacaaataaagaattagtggttgcttctccagatgttggtggagttgttagagcaagagcttttgcaaaaaggctcaatgctggtttagcaatagctgataaaagaagagaaaaagctggagagtcagaagttatgaatattattggtgatgttaatgataaaatttgtattttacttgatgacattgcagactctgctggaactttatgtaatgctgctgaggcattaaaaaataacggagccaaagaaatctattcatatattgttcatggagttttatcaggtaaagcaatagaaagaatatcaaattcctcaataaaagaactaatattaactgatactatagagccttcaaaagatgtaaaaaatacaaaaaacattagacatatcagtatcgctcctttaatgggtgaggcgattaaaaggattagcagtgatgcatcagtttctgctctttttgattgat

SEQ ID NO: 253280 - DNA, 955 bp, Unknown
  Bacterial polypeptide expressing nucleotide sequence isolated from the Sargasso Sea
tatgagtaatggaacaatagatatcttctcaggatcatcttgcattgatctatcaaatgaagtcgcaaaacttttaaataatgagctttcttcaattgaattgggaactttttcagatggtgaaatccaagtagaaattaatgagaatgttagaggtcacgatacctttataattcagtctacctgctttccagctgataaacatctcatggaattaatgttactagctgatgccctaaagcgatcttctgcttctaagatcactgcggttgttccatattatggctatgctagacaagaccgaagagtgaggtcttcaagagtcccaattagtgcaaaagttgtatctgatatgtttagttctgttggtattaatagagttctaacactagatcttcattctgaaacaatccaaggtttttttgatatgcctgctgataatgtttatgcaacaaaactaatgattgaagatatatccaagcattattctaaagataatttagttattgtctcgccagatgttggtggggtcgtcagatcaagagcgttagcaaaatatcttgatggtcttgatcttgcaattatagataagcgaagagatatggctaatgaatcagaagtaatgaacataattggtgatgttgctggaaaagaatgtatagttcctgatgacatcatcgatacagcaggaacaatatgcaatgcagccaaggctttaaaagatgctggggcaagtaaagtaagtgcatatataactcatcctgttttgtcaggtccagctattgaaagaataagtaactctgagattgatgaacttgttgtaactaattcgattcctcttacccaagatggtcaaaaatgcagtaaaatacgcgtcatatcgatcgcaccaataatatcagagtgcattaagaggctttctaatgaggaatccttgagtgcggtttttttataa

SEQ ID NO: 253281 - DNA, 589 bp, Unknown
  Bacterial polypeptide expressing nucleotide sequence isolated from the Sargasso Sea
atgaaaattttatctggaactagcaaccttaatttaagcaaggatattgctaaaaaattaaaattaaagttggttaatactaatatcagaagatttgctgacggagaaatctatatagagatcaacgagaatattagaggtaatagcgtttttgtaattcaatctacatctaatccagcaaatgataatttaatggaactactacttgttgttgacgcattaaaaagatcttctgcaaaaaatgttaccgctgtgattccatattttggctacgctagacaggatagaaaagtcgctccaagaacatctatctctgcaaaagtagttgctaatctaattactaacgctggtgcaagtagagttgtaacggttgatttgcatgcaggacaaattcaaggattttttgatatgcccgtagacaacttatttacaactcccctttttgcaaaacatattaaaaagaaacttaataacaaaaggttagtttgtgtttcacctgacgttggtggggttcaaaggactagagctttggcaacaagaataaaagctgatcttgcaattatagataaaagaagacctgcgcccggaa

SEQ ID NO: 253282 - DNA, 454 bp, Unknown
  Bacterial polypeptide expressing nucleotide sequence isolated from the Sargasso Sea
gtggtggtgtcaccggatgtgggcggtgtggcccgggcccgggcctttgccaaacagatgaacgatgcgccgttggcgatcatcgacaagcgccgcacgggccacaatctggccgaaagcctcacggtgatcggcgacgtctccggacgtacggcgatcctgatcgacgacatgatcgacaccggtggcaccatctgcgccggggccaggctgctgcggcagcagggggcgaaacgggtgattgcctgtgccacccatgcggtgttttcgcccccggccagtgaacgcctctcggccgatggactgttcgagcaggtggtcgtgaccaacagcattccgatccagcaggagcgaaccttcccccagcttcaggtgctctccgttgccaacatgctgggcgaagccatctggcgcatccacgaggagagttccgtcagttcgatgttccgttaag

SEQ ID NO: 253283 - DNA, 737 bp, Unknown
  Bacterial polypeptide expressing nucleotide sequence isolated from the Sargasso Sea
aatgaaaattctcacaggtaacagtaacaagcttttaagtgaaaaaatatcaaaacatcttaaaaccaagttggttaataacaatattaagaaatttgcagacagtgaaatttatgtagaaatcaatgaaaatataagaggaaatagcatattcattattcagtctatttcgtcacctgctaatgacaatttgatggaattacttttgtgtatagatgccttaaaaagatcctctgcaaaaaatattactgcggtaataccttattttggttatgcaagacaagatagaaaagttgttccaagaacttctatttctgcaaaacttgtttcaaatttaattacaaaagctggtgcagacagagttgttaccgttgacctccatgctggtcaaatacaaggcttttttgatatcccagtagacaacctctttgcaactccaatttttgcaagacatataaaaaaaagaattaaaaataaaaatttgatttgtgttgcgcctgatgttggtggagttgaaagaacaagggctttagcaagaaagttggacattggtctttcaataattgacaaaagaagaccgaccccaggtaaatctcaagttatgaacgttgtaggtaacgttggtggaaaaacttgcataattgttgatgatattattgactcgggaggaacgattgttaatgccgctgacgctttaattaaaagaggagcaaaagaggttcatgtatatataactc

SEQ ID NO: 253284 - DNA, 379 bp, Unknown
  Bacterial polypeptide expressing nucleotide sequence isolated from the Sargasso Sea
aatgaaattagtatctggtaattcaaatataaatctagcggaaaatattggtaagtatttagacacgccattagcagattgtactgtcaaaaaattttctgataaggaaatttttgttgaaatgaatgaaaattgtagaggtgaagatgtttttattattcaatcaacatcctttcctgcaaatgataatttaatggaacttcttattttaattgatactttgaagagagcttcagcaaaaagaattacagctgttattccatattttggttacgctagacaagatagaaagcctgggccgagaacaccaataacagctaaactagttgctaatctaattgccaaatcaggagcagatagagtattaagcatggattta

SEQ ID NO: 253285 - DNA, 397 bp, Unknown
  Bacterial polypeptide expressing nucleotide sequence isolated from the Sargasso Sea
aatgtttagtaaatctagtttagatattttttctgggaatgcgaccccagcccttgcatcagaagttgcatctattttgggacaggatcttggtaaggtcgaggtcagcaaattctcagatggcgaaataagagttgagttgcttgaaaatgtcagagggcatgaaacatttataattcaatcaacttgtcagccgtctaatgcaaacataatggagttaatgctattggctgatgcactaaaaaggtcttctgcttcgagaattactgccatcatcccctattttggttacgcaagacaggacaggagagttagatcagcaagagtaccaatcagtgcaaaggttgtagcagacatgctcaatcaagtgggaattcaaagagttcttacagtagac

SEQ ID NO: 253286 - DNA, 934 bp, Unknown
  Bacterial polypeptide expressing nucleotide sequence isolated from the Sargasso Sea
catgaaattattaactggaaatagtaataaaatcttaagtaaaaatattgctaaatatttaaaatctaaacttgtcaattctagtataagaaaatttgcagatggtgaaatttacattgaaataaatgaaaatataagagggaatagcatttttataattcaatctatttcttcaccagctaatgataatttaatggaattattattatgtattgatgctttaaaaagatcatcagcaaaaaatataactgctgtaattccttattttggttatgcgagacaagatagaaaagttgtaccaagaacatctatatcagcaaagcttgtttcaaatttaataactcaagcaggggcagacagagttgtgaccgtcgatctccacgctggtcaaattcaaggtttttttgatattcctgtcgataacctttttgcaactccaatctttgcacgacatattaaaaaaaagattaaaagtaaaaatataatctgtgttgcaccagatgtaggtggcacagaaagagcgagagcacttggtaaaattttaaacattggtttagctattgttgacaagagaagaccaaagccaggtcaatcacaagtaatgaatattattggagatgtaaaaggtaaaacatgtatcttggttgatgatataattgactctggtggtactatcgtcaatgccgctaaggcattaaaacaaagaggtgcaaaagaggtttatgtttatattactcatggtgtattaagtggggacgcggttaaaaaaattaaaaattcggttattaaaaatttagttattacagacacgatagataacaacgaaaaaacaaaaaatgttaaaaacatagaagttttaccaatttcagcacttatgggagaagctataaaaagaatttctaattcaacatcagtttcagatttattcaaataa

SEQ ID NO: 253287 - DNA, 707 bp, Unknown
  Bacterial polypeptide expressing nucleotide sequence isolated from the Sargasso Sea
gatgggaccggtaattgatgatctgaagatttttagtggtaatgcacataagcaattggctcaggatgtatgtgactacttgaatatacctctagggaaagcagaagtatttaaatttgccaacgataatacttttacgaatattcaggaaaatgtacggcaaagagatgtatttatagtgcagccgatcacatttcctgtaaatgatcatctaatggaactattaattatgatagacgcttgtaaaagggcctctgctggaagaatcacagcggttgttccctactacggatatggtagaacagataagaaagaccagccgagagttccgattacagccagattagttgccgacttattgaccacagcaggagcagacagaattctaactatggatttacatgctggccaaatccaagggtttttcaatatccctgttgatgaattaacagctttgcctatattgaccgattatgtgaaatccaaagaaatagatgacttggtagtagtggcagttgatatagggataagtaaaaaagccagagatgtggcagctagattaaatgctcccttggccatcattgaaaaaagacgtgtagggaataatgatactactgaaactttaaatattattggagacgttaaaggtaaaactgctttgacatttgataatgaaattgacactggcggcaccattgttggagctg

SEQ ID NO: 253288 - DNA, 767 bp, Unknown
  Bacterial polypeptide expressing nucleotide sequence isolated from the Sargasso Sea
tggcccagttaatgaaaatcttatggagctttttataattgttgatgcgttgaaaagagccgcagttaacgaaattacagcagttattccttattttggatattcacggcaagatagaaaagttaccgataggtctcccattacagcaagacttgtttgtgatttgctaattaaatctggaatacaaaaaattgttacaatggatcttcatgctggacaaattcaaggtttttttgatataccagtggatcatttatattcctccccaattgcaattaattatataaagaagaaatttaagaataaagacttcataatagcgtcaccagatgctggtggtatggaaagagcgagagcatttgccaaaaaactaaatgatgcggatcttgcgatgacagacaaaagaaggccagctcccaatgtagcagaaattacaaatgttattggggaggtccaaaataaacatgttatattgattgacgatttaattgatactggtgggacagcagcaaaatctgctgaagctctagttaaatcaggcgcaaaaagtgtttctatgttctgtacacacggagtactatctggaaatgcgatagaaaatatcgcaaattcttgtattgatgaactgataattactgatacaatagataatcaagaaaagttaaaaaagtctaataaaattaaagttttgactgtatctactctaattgccgaagcaattaatagaattagaaacaacaaatctattagtcagttattttcttagg

SEQ ID NO: 253289 - DNA, 911 bp, Unknown
  Bacterial polypeptide expressing nucleotide sequence isolated from the Sargasso Sea
aatgaagaaagaaaaactaattctttttgcgggtccggcatcaaaagacctgggttcacagattgcaagatatttgaatgaaccgctgggtttcattcaagttggagcgttcagcgatggcgaaaccagcatcgaaatctcgcaaaatattcgaggaatggacgtattcttggttcaatccacctatcaaccaggcaatgagcatctgatgcagctcttattgatggccgatgcatgcaaaagggcctcagcaaaatcagtgtcagctgtcattccttattttggttattctcgacaagacagaaggccaagaaacactcgaggaccagtttctgcaaaactggtggcagatttgattgagacagctgatatcaaaagagtgatcactgtggatcttcatgctgatcagatcgaaggttttttctcaattccagtcgataatatttattcttcaaccatcctaatgagcgacatgtggagacagggctatcctgatcaagtgattgtgtccccggacgtgggtggcgtgcaaagggcgagagcaatagccagaagactgggcaatgcaggacttgcaatcatagataaaagaagagaagcagccaataaatcagaagtcatgaatattattggcgatgtcgatcagaagacagcaatcatatttgatgacatggtcgatacagccggaacgctttgtaatgcagcaggagcgcttaaagagaagggcgcgctgaaaacagtagcttatgcagcacatccagtgctctcaggtcctgcaatagagagaattgccgattctgaacttgatgagctggttgtgaccgacacgattccgttgacacaggaagcaaaagatactgggaaaattagacaacttacaattgctgagcttctgggcgaaacaatagaga

SEQ ID NO: 253290 - DNA, 934 bp, Unknown
  Bacterial polypeptide expressing nucleotide sequence isolated from the Sargasso Sea
atgaaaattctgacatgtaatagtaataggcctatagctgaagctatatcggcttatcttaatttacctctcactagtgcaagtgtaagacgtttttcggatatggaagtttttgttgaaattaacgaaaatgttcgaggtgaggatgtctttgtcattcaatctacctcttatccggctaacgataatctgatggaactcctggtgactatggacgccttgagaagaggatctgcaagaagaattacagccgtaatcccttactttggttatgcccgtcaggaccgtaaatctagtcctagatctccaatttcagcgaaattggttgctaatttaattaccgaagctggagcagatagagttttaacattagatttacatgctggccaaattcaaggtttttttgatattccgctagataatctctttgcatctccaggtttcagtaaagatatttcagaaaaatataatagcggtaacattacgatgatatcgccggatgttggaggtgttgtaagagcaagagctatagccaaacgcctggatgcagatttagcgattattgataaacgtagggaaaaggctggcgagtccgaggtgatgaatatcataggggatgtttctggccaacgttgcataattattgatgacatagttgattctgctgggacgctttgtaatgccgccgtagcgttaatggattcgggagccgattcggtttccgcctatgttactcatggtgtgctttctgggggagcggttgccagagtgtcttcgtcaccattggatagattagtaaccacagatagtataatggcaacagaggcggtaagggtttcccataatattgaacagcttactattgcacctctaataggtgaggcaataaaaagaattagtatggagaattcagtttcgagtttgtttgactaat

SEQ ID NO: 253291 - DNA, 625 bp, Unknown
  Bacterial polypeptide expressing nucleotide sequence isolated from the Sargasso Sea
gtgcaaaaggttgttgctgatatgtttgcatctgttggtattgatagagttttaactattgaccttcactcagagacaattcaaggcttttttgacatgcctgctgacaatgtttatgcaacaaaatttatggtcgacgatattaaagataataatgatagaaatgaagttgttgttgtgtctccagacgttggtggtgttgtaagatcaagagcgcttgcaaaattattagatgatacagatttagctattattgataaaagaagagccgtagcaaatgaatcagaggttatgaatatcattggcgaagtcgaaggaaaggtttgtatagttccagatgacattattgatactgctggaacactttgtaatgcggcaaaagcattaaaagataaaggtgcaaaagctgtaaaagcatatattactcatccagttctatctggacaagcgatagaaagattgaataaatctggtattgacgaattaattgttacaaattcaattcctttgaacaaagacgctaaaaaatgcagtaaaatacgcgtcatttcaattgctaatataattgctgagtgtataacacgtctaagtaatgaagagtctttgagtgaaatgtttttataga

SEQ ID NO: 253292 - DNA, 787 bp, Unknown
  Bacterial polypeptide expressing nucleotide sequence isolated from the Sargasso Sea
atgaaaattattgcaggcaacagtaataaaattttagcagaagcaatttgctcttatattggtgtatcattagcaaatacatctctaagaaaatttgctgatagagaaatttttgtagaaattaatgaaaatataagaggagaggatgtttttataattcaatcaacatctcacccagcaaatgatcacctaatggaactattaatcaccattgatgctgcaaaaagaggttcagcaaaaagaatcactgctgtaattccttattatgggtatgctagacaggataggaaaacaggacctaggaccccaataactgcaaaactagtagcaaacttaattacttcagcaggagctgatagagttctaactatggatttacatgcaggacaaattcaaggtttctttgacattcctctagataatattttttctgctccaccaataatcagagatatgaaagaaaaattttcaaatcatagcaatctagtaattgcatctccagatgttggcggtgttgtaagagctagagcctttgcaaaaagaatgaatgctggtcttgctatagctgataaaagaagagaaaaagctggcgagtctgaagttatgaatattattggagatgtaaaagataaaacatgtattttactcgacgatattgcagactctgctggaacattgtgtaatgcagcaaaagcccttaaggacaatggtgccaaagaaatatgctcttatattgcccatggagtcttatctggagaagctctaaaaaggattgaaggctccgcta

SEQ ID NO: 253293 - DNA, 837 bp, Unknown
  Bacterial polypeptide expressing nucleotide sequence isolated from the Sargasso Sea
aatgaataaacaaaatttagatatttttactggtactgctaacccagattttgcaaaagaagtttcagatcttcttggaattaaaatttcatccgctgatgttggatatttttctgatggtgaattaagagttgaaattgaagaaaatgtaagaggacatgatacattcattattcaatcaacctgttctccaacaaataagaatgtaatggaaattatgctaattgctgatgcacttaaaagatcctcagcatcaaaaattacagctgtagtaccatattacggttatgcaagacaagacagaagagtaagatcagccagggttccaataagtgctaaggttgttgcagatatgtttaggtctgttgggattgatagagttttaacgattgatcttcattcagaaactattcaaggcttttttgatatgccagcagataatgtttatgcaacaaaattaatggttgatgatattaagtcaaataatgaaagaattgaaattgttgttgtgtcacctgatgttggaggagttgtaagatcacgagcactagcaaagcttttagatcaaactgatttagcaattattgataaaagaagacctactgcaaatcaatctgaagtaatgaatattattggagaagttgagggaaaggtatgtattgttcctgatgatattattgatacagctggaacgctgtgcaatgctgcaaatgcccttaaagaaaaaggtgcaaaagctgttaaagcatacattacacatccagttttatcaggaccagctatcgaaaggttagaaaagtctgaaattgatgagcttgttgtaacaaattctatcca

SEQ ID NO: 253294 - DNA, 875 bp, Unknown
  Bacterial polypeptide expressing nucleotide sequence isolated from the Sargasso Sea
aatgacagaacataataataatcttgtcctattttctggatcttcaaacccaaatttagcccatagagttgctaaagaattaggaaaaaacctaggagatgcctatgttggtcgctttagcgaccaagagctcaatgtcagaattgatgagcatgttcgtggtatggacgtgtttatattgcaatctacttgttttcccgcaaatgagaacttaatggaacttttgataatgattgatgctctcagaagatcctctgcttctagaataacagctgtcattccttattttggttacgccagacaagacagaagagtaagatctgaaagagttcccataagtgcaaagttagttgcagagatgcttcaaaatgctggagcagataggatattaacaattgaacttcactctgatcaaatccaaggtttttttaacgtccctgtagataatatctatggaacgaatgttacttttgaacatatcgataaggcaaattatgaaaatcttataattgtctctccagatgtaggaggggtagttagagctagggcattagcaaaactattaaatgacgctgatctagctatcattgataaaagaagagaaaaagacaatcagtctcaggttatgaacgtaataggagatgttgccgaaaaaacttgtgtacttgttgatgacattgtagacacagctggaacaatttgtaatgcagctgaagcattaaagaatgctggagcaaaaaaagtaatatcttacgcaacacatccagttttatctgggcctgcattaaaaagaatagaaaaatcagggctagacgaaattatagttactgatacaatcccgctttcagaaaaggcatctaaattaaataaattaa

SEQ ID NO: 253295 - DNA, 949 bp, Unknown
  Bacterial polypeptide expressing nucleotide sequence isolated from the Sargasso Sea
atgagtaatagagtactttttacagggaattcaaatatagatctagcaaataaagttgctaagaatctagaaacagatcttggcccaatgaaagtgggaacttttagtgatggtgaaataaatgtagaagttaatgagaacgtaagaggtaaggacacttttattattcaatctaccaataatcctgctgaaaaaaacttaatggaattagttttaatggtagatgctttgaaaagagcttcagcaagatctataacagctgtaattccttactttggctactcaagacaagacagaagagtgagatctgcaagagtgcccataagtgcaaaagttattgcagacatgttaagtgaagttggaatttctcgaataattactttagatattcactcagagcagatacaaggattcttttcattccctgttgataatatttataccgcaaacatcatggtgaaaggcttactagaaaaatatgatgttgaggatctgcaagttgtatcaccagatacaggtggagttattagagctagatcagtagccaagacattaggagtgcaagatcttgcaataatagataaaaggcgagagaaagcgaatgaatcagaagtaatcaatcttataggtgatgtagaaggaaaggtgtgtatagtgccggatgatttgattgatacagccggaacattaagtaatgcgagtcatgctctaaaagacaagggagcaaaagaaataattgcctatattacacatccagtattatcgggcgatgctattaagaatttaaacaattctgcaatagataaattggtagtatcaaactctatcgatattggtgacaaatctaaaaaatgccctaaaatagacgtctttgatatatcacctatattgtcagaggcaattacgcgtatagcaactggtgattcaatcagtgaattatttaaataat

SEQ ID NO: 253296 - DNA, 730 bp, Unknown
  Bacterial polypeptide expressing nucleotide sequence isolated from the Sargasso Sea
gatggtagacgccttacgccgtgcctctgccggtcgtattactgcggttatcccttactttggttatgcccgccaggacagacgcgtgcgttctgcccgtgtgcctatcacagccaaagtagtagccgactttttatccagcgtaggtgtagaccgtgtattaacggtggacttacacgctgagcaaatccagggcttcttcgacgttccggtagacaacgtctttggtagcccggtattgctggaagacatgcgcaaacgtgaattcgtagcgccagtggttgtatctccggatataggtggtgtagtgcgtgcccgtgctatcgccaaactgctgaatgacgctgacttagccattatcgataaacgtcgtcctaaggccaacgtgtctcaggtgatgcatatcattggtgatgtcaaagatcgtgactgtattattgtcgatgacatgattgatacaggcggcactttatgtaaagccgctgaagctttaaaagaacaaggcgctaaacgggtatttgcttatgccactcacccgatcttctccggttctgccgctgagaacatcagaaactcagtgattgacgagctgatcatcaccgacactattccgctgactgcagaaatgcgcgcagtcagcaaagtaaaacagctgaccttaagcgatatgctggccgaatgtatccgtcgtatcagcaacgaagaatctatctcttctatgtttgattaa

SEQ ID NO: 253297 - DNA, 937 bp, Unknown
  Bacterial polypeptide expressing nucleotide sequence isolated from the Sargasso Sea
atgagaattattgcaggaaacagcaatttacctttatctaagagcgtcgcagaatatcttggtgaaaaccttacaaatgcttctattacaagatttgctgatgatgaagtttatgtagaaattaaagaaaacattcgtggtgaggatgtattcgtaatggagtctttatcttacccagcgaatgacaatataatggaactactggtgatgatagatgcacttaaaagagcttcagcaaaaaggattactgctgtgatcccttattatggatatgcacgtcaagatagaaaaccagggccaagaactcctatctcagcaaaattagttgcaaatttaataacaactgctggagcagacagagtgcttactttagatcttcatgctgaacagatacaaggattttttgatataccaacagataatttatttgcaggtccagtgttttcaaaagacataaaagaaaaatatgaaattagtaatctagttgcagtttctcctgatattggtggagttgtgagggcaagagcgattgcaaataagatcggagcctcaattgctattgttgataaaagaagacccagagcaggtgaaagtgaagtaatgaatatcattggagacgtaaaaggaaaagattgtattattctagatgatatcattgactcagcgggaacaatttgtaatgcagctgacaaaattatagatttaggagctaacagtatcacttcatatgttacgcacggagtattaacaggaaaagccttagagaaaattagtgcatcaaaattgactgaactagtaattacagattcaatcaataatcaagaaaaattaaaagcttgtgagaaaattaggtcgattagtatctcagatttattgggcgaggcaattaagaggatatccgaggcgagctcagtatcaagtctatttgaattttgat

SEQ ID NO: 253298 - DNA, 642 bp, Unknown
  Bacterial polypeptide expressing nucleotide sequence isolated from the Sargasso Sea
gatgagcagccatgacggcctgatggtttttactggcaacgcaaatcccgcgcttgcacaggaagtcgtcaaaatcctcggtattcccctcggcaaagcaatggttagccgtttctcggacggtgaaatccaggtcgagattcaggaaaacgtgcgtggcaaggatgtcttcgtcctgcaatccacgtgcgcgccggcgaatgacaatctgatggaactgatgatcatggtcgatgcgctcaagcgcgcatccgccggccggatcaccgccgccatcccctacttcggttatgcccgtcaggatcgacgcccgcgttcggcgcgcgtcgccatctcggcgaagatcgtggcgaacatgctggaaatcgccggtgtcgagcggatcattacgatggatctgcacgccgaccagattcaaggcttcttcgacatcccggtcgacaatatctacgctacgcccgtgctgctcggcgatctgcgcaagcagaactacgagaacctgctggtcgtttcgccggacgtcggcggcgtggtgcgtgcccgtgcattggccaagcaactgaattgcgatctcgcgatcatcgacaaacgccgcccgaaggcgaacgttgccgaagtgatgaacatcatcggtgaagtcga

SEQ ID NO: 253299 - DNA, 985 bp, Unknown
  Bacterial polypeptide expressing nucleotide sequence isolated from the Sargasso Sea
ctgacagcagcccgcgccgagcaggaaagactgcagcaggagagccggcgtctacgcctgttcagtggtacctccaaccctggactggccagggaaatcgcggcttatctgggtgtgccggatggcccgagggtctgcaaacgcttcgccgacggtgagctctacgtgcagatccaggagtcgatccgtggctgcgatgtgtttctgatccagcccacctgcgctccggtcaacgaccacctgatggagctgctgatcatggtggatgcctgccgacgggcatctgcccgacaaatcaccgccgttgtgccttactacggctacgccagagccgaccgcaagaccgccggtcgtgagtcgatcaccgcgaagctcaccgccaacctgctggtcaaatccggtgtcaaccgggtcctcgcgatggaccttcactcgtcgcaaattcagggatatttcgacattccctgcgatcacatctacggctccccggtgctggtggattacctctccacccagaacctcggcgacatcgtcgtcgtctcaccggacgtcggcggcgtggccagggcacgcgccttcgccaaacagatgaacgatgctcccctggcgatcatcgacaaacggcgcaccggacacaacatggcggaaagcctcacggtgatcggagacgtctcaggacggaccgctgtgctgatcgacgacatgatcgacaccggcggcacgatctgcgccggagcccgactgctgcgtcagcagggggccaagcgggtcatcgcctgcgccacccatgcggtgttctctcctccggcgagcgagcgtctgtctgccgagggattgttcgaacaggttgtcgtcaccaacagcattccgatcgagccggatcgaaccttcccccagcttcatgtgctgtccgttgccaacatgctgggcgaggcgatctggcggattcacgaagaaagctccgtcagttccatgttccgctgat

SEQ ID NO: 253300 - DNA, 649 bp, Unknown
  Bacterial polypeptide expressing nucleotide sequence isolated from the Sargasso Sea
atgaagattcttactggaaatagcaataaacagctaagtaataaaatttcaaaaaatctaaaaaataaattagtaaataccagtattagaaaatttgcagacggtgagatctatattgaaattaacgaaaatatacgaggaaacagtatttttataattcaatcagtatcctcgcctgcaaatgataatttgatggagttgcttctttgtatagatgcacttaaaagatcatctgcaaaaaatatcactgccgtgattccatattttgggtatgcgagacaagatcgtaaggttgtaccaagaacttctatttctgcaaaattagtctcaaacttaattacaaatgcaggagctgacagagtagtgacagtagatttgcacgcaggacaaattcaaggtttttttgatatcccagttgataacctttttgctaccccaatctttgcgaagcatattaaaaggaaaattaaaagtaataatataatttgtgttgcacctgatgttggaggagttgaaagagcaagagctttaggaaaaaaattagatgtcggtttagcaatagttgataaaagaaggccaagtcctggaaagtcagaagttatgaatgtcattggaaatgttaaaaacaaaaatttgtattttaactgat

SEQ ID NO: 253301 - DNA, 852 bp, Unknown
  Bacterial polypeptide expressing nucleotide sequence isolated from the Sargasso Sea
aatgaaattattaactggaaacagcaataaagttttaagtaaaaacattgctaaatacttaaaaacaaaacttgtaaattcaagtattagaaaatttgctgatggtgaaatttatattgaaataaatgaaaatataagaggaaacagtatttttattgttcaatctatctcttctccagcaaatgataatttaatggaattattgttatgtatcgatgctttaaagaggtcatcagcaaaaaatataacagcggtaataccttattttggatatgcaagacaagatagaaaagttgttccaagaacttccatatctgcaaaacttgtctctaatttaataactcaagctggtgctgatagagtggtaaccgtagatttacatgctggtcaaattcaaggtttctttgatattcctgttgataacttattttctactccaatatttgcaagacacgctagaaagaaaattaaaagtaaaaaaattatttgtgttgcacctgacgtaggaggaacggaaagagctagagcacttggaaaacttctgaatgtaggactagctattgttgataaaagaagaccaaagcctgggcaatcagaggttatgaatatcattggtgatgtaaaaggacaaacttgtattttagttgatgatataattgattcaggtggtacaattgttaatgcggcaaaagctttgaaatctcgaggagcaaaagatgtttatgtttacattactcatggggttttaagtggagatgcaattaaaaaaattaaaagttcagtaattaaaaatttagttataaccgatacaatagacaatgttcataaaactaaaaatgttaaaaatattga

SEQ ID NO: 253302 - DNA, 934 bp, Unknown
  Bacterial polypeptide expressing nucleotide sequence isolated from the Sargasso Sea
aatgaagattgtatcttgtaattcaaatcagcctcttgcagaaggtatttctgcatatttaaatcaaccattaacaaaagctgttgtaagaagattctctgatatggaggtttttgttgaaatccaagaaaatgtaagaggtgaagatgcctttattgttcagtcaacatcttatccagcaaatgaccatcttatggagttattagtaactatagatgctttaaaaagaggttctgctaggagaataactgcagttattccttactttggttatgcaagacaagacagaaaatctggaccgagaactcctatttctgcaaaattagtagcaaatcttattacagttgcaggagctgacagggttttgaccattgatttacatgcagctcaaatacaaggcttttttgatattccaactgacaatttatttgctgttccagtttttatagaaaatattctgcaaaattataatcctaaagatttatgtattattgcacctgatgtaggtggagttttgcgcgctagagctattgctaaaagattaaatacagatttagcaattatagataaaagaagagaagcacctggacaatctgaagttatgaatattattggtgaagtgaagaatcgtcattgtttattagttgatgacatagttgactcaggcggtacattatgtaacgcagctgaaaccttaattgattctggagcaattactgttgatgcttatgttactcatggagtgctgtcaggtggagcagttgccagagttgcatcctcaccattaaactcacttgttacaacagatagcatagctgcaacagaagcattcagggttgctaaaaatttaaaacatatttctatatcaccgcttcttggtgaagctgtaaaaagaattcatatggaaagatctgtatcttcattatttgattaa

SEQ ID NO: 253303 - DNA, 955 bp, Unknown
  Bacterial polypeptide expressing nucleotide sequence isolated from the Sargasso Sea
atgagtatttcaaatattatgatatttagcggtaatgcgaatccaaatctggctctaaagaccgtcgaatttctcaatatgccgcttggtaaaattacagctggtaaatttagcgacggtgaagtgatggtggaagtaaatgagaatgttcgcggtagagatatctatataatgcagccaatttgtgcgccaactaatgataatttaatggaattattggttatatccgatgctttgcgcagagcttcggcggagagaataacagcagttattccttatctgggatatgcaaggcaggatcgtcgtacccgctcgtcacgtgttccaattacggcgaagatggtagcaaatatgatttcttcagcaggaattgacagagtattaactgttgatttacatgcagatcagattcaggggttttttgatatacctctagataatgtttatgggtctccggttttattaggtgatatttggaaacacaaatacccagatttaatggttatttctcctgatgttggtggtgtagttagagcccgagctcttgctaaaagacttgatgatacagatttagcaataatcgataaacgtcgaccaaaccctaacgaatcagaagttatgaacattattggcgatgtcgacgggaggacttgcgtaataattgatgatttagtagacactgccggaacgttgggtaatgcagcgggcgctttgaaagattttggagctaaaaaagtagtcgcatactgcacacatgctgtactatctggcaatgctgtgaagaatattgaaaattcaaagcttgatgaattggtagtaaccgatacaattccgcttcgttcagaggcgaagacctcagatcgcataagacagcttagtgtagctggaatgttagcagagagtataagacgtgttgcggaaggagaatcactaagctcaatgtttcttgattagt

SEQ ID NO: 253304 - DNA, 613 bp, Unknown
  Bacterial polypeptide expressing nucleotide sequence isolated from the Sargasso Sea
tatgaataaaataaacaagggcctagatatttttacaggtactgctaatcctgaatttgcatcagaggtatcagaaatactaggaatcaaaatctcaaaagcagatgttggttatttttctgatggagagttaaaggtagaaattgaagaaaatgttagaggtcatgatactttcataattcaatctacttgttctccaactaataaaaatgtgatggaaataatgttaattgctgatgcattaaagagatcatcggcttcaagaattactgcagttgttccatattatggatatgcgagacaagatagaagagttagatctgcaagagttcccattagtgcaaaggttgttgctgatatgtttgcaactgttggtattgatagagttttaactattgaccttcactcagagacaattcaaggcttttttgacatgcctgctgacaatgtttatgcaacaaaatttatggtcgacgatattaaagataataatgatagaaatgaagttgttgttgtgtctccagacgttggtggagttgtgagatcaagagcgcttgcaaaattattagatgatacagatttagctattattgataaaagaagagcagtagca

SEQ ID NO: 253305 - DNA, 695 bp, Unknown
  Bacterial polypeptide expressing nucleotide sequence isolated from the Sargasso Sea
aatgaagcttcttacaggaaatagtaataaaagcctcagtcaaaaaatatcaaagcatttaaaaactaaactagttcattctagcatcaaaagatttgcagatggcgaaatttatattgaaataaatgaaaatataagaggcaatagtatattcttaattcaatctatttcatctcccgcaaatgataacttaatggaacttttgttatgtgtggatgcattaaaaagatcttctgcaaaaaatattacaactgtaattccttactttggatatgctagacaagatcgaaaagttgcacccagaacttctatatctgcaaaattagtttcaaatcttataactaaggccggagcagatagagtggtaactgttgacttgcatgctggacaaatacaaggattttttgatataccagttgacaatcttttcgctactccaatttttgcacggcatgttaaaaaacatttaaatagaaagaatttaatttgtgtagcgccagatgttggtggtgtcgaaagaacaagagctcttgcaagaaaattagatatcggcatagcaatcatcgacaagagaagacctactccaggaaaatctcaggtaatgaatgttattggaaatgttaaaggaaaaacctgtataattatcgatgatataattgattcaggtggaacaattgtaaatgctgcccaagctt

SEQ ID NO: 253306 - DNA, 946 bp, Unknown
  Bacterial polypeptide expressing nucleotide sequence isolated from the Sargasso Sea
aatgaaaagagaacgtaaaatatttagtggtagaagtaatcttgaattagcaaaaaaaattgctatttcagccgattgtcaattgggcgatatttcaattaagacattttcagatggggaaatatgggtaaaatatgaagaaaatattagggagcaggatgtatttatcattcaatctacaaacggtccatctgaaaatataattgaattagctctgatgacagatgctgctgttagagcatctgctagcacagttaacataattatgccttattttggttatgggaggcaagatagaaaagatcaaccaagagtgcctatttcatcaagagtgatgattgatatttttactagcatgggagctgatagaatagtaacaatggatttacattctactcaaattcaaggcttcgcgaaaataccctttgatcatttatatagtagaatggtattaatgaaggcaatatcagatttaggccttgatccaaaaagatcagttgttttagcccctgatgtaggttctgctgctataagccaagcttatgcaaaaagattaaaaatgcattttgcattgattgacaagaggaggtttgctcctaatcaagctaaagtaagtcacttaataggtgatttagacagtatggatgttctcatcattgatgatatgattgataccgcggggaccactgtaggcgcagctaatgcagccatggaaaaaggagctaaatctgtaactgctatagcaactcatggagttttgtcagggcctgcaactgaaagattaaaaagcgctccaataaaaaatttagttgttactgatacaatacaaataccagaagaaaaaatattaagtaatatgaaaattatcacagtcgctgatgtgtttgcggcagcgataaatcgtattcacaatggtgaatccgttagcgcattatttgaattttaa

SEQ ID NO: 253307 - DNA, 590 bp, Unknown
  Bacterial polypeptide expressing nucleotide sequence isolated from the Sargasso Sea
aatgaaattattatctggaactagcaataagcctctcagcaaggacattgcaaagtttttaaaatctaaactagttaattcaagtatcaagaattttgcagatggtgagatatatgttgaattaaatgaaaatataagaggaaatagtattttcataattcagtctatctcatctcctgctaatgataaccttatggaacttttgttgtgcatagatgctttaaaaagatcctctgctaaaaatataacagcagttattccatattttggttatgcaagacaagatagaaaagttgttccaagaacatctatctcagcaaaacttgtatcaaatttaataacaaaagctggcgcagacagagttgtaacagttgatttgcatgcaggtcaaattcaagggttttttgatataccggtagacaacttattttctacacccatttttgcaagacatgtaaaaaaaaacatcaaaagtaaaaatattgtatgtattgcacctgatgttggaggtactgaaagagcaagagcacttggaaagattttgaatgttggtcttgcaatcgttgataaaagaagaccaaaacctggtc

SEQ ID NO: 253308 - DNA, 946 bp, Unknown
  Bacterial polypeptide expressing nucleotide sequence isolated from the Sargasso Sea
atgaaagaaacattaaaaatatttagcggaagaagtaatctaactctctcaaaaggaattgttgagcatcttgggttagatctaggtaaggttactatacgcaccttttcagatggagagctatgggtaaagtttgaggaaaatatacgaggtaatgatgtatttataattcaatctacatgtgggccagctgaaaatttgatagaattatttttacttcttgatgcagcggtgagagcatcagctagaagagttactgctgtaattccatattttggatatgggaggcaggatagaaaggatcaacctagggttcccatatcatcaagagtaatggtagatatcattacggccactggtgcagatagaattattagtatggatttacattcaacacaaattcaaggatttgcttcaataccatttgatcatatttacagtcgtatggttttattagacactttaaaatcgttaaacctagacccagaaaattgtgctgttttagctcctgatgtaggttctgcagcgatgggccagtcttatgctaagcgcttaggttttcattttgctctcatagacaaacgtcgttatgctcctaataaagctgaggtaagtcatcttataggggagttaaaaggtaaagatgtattgattgttgatgatatgattgatacagcagggacaactgtttctgctgctatcgctgctattgataaaggcgctaattcagttatagctgttgctactcatggagttttatcaggggaagcaatagaaagattagatagcgcaccaattaataaaattattataacagatacaatttttgtagatgataataaacaaatatcaaaaatgcatatagtttcagttgctgatgtttttggagaagcaattaaacgtattcatagaggcgaatctgttagtgcattatttaatttataat

SEQ ID NO: 253309 - DNA, 1024 bp, Unknown
  Bacterial polypeptide expressing nucleotide sequence isolated from the Sargasso Sea
atgcccgccttaaatgaaccgaagttaatatccggaaacgcaaacaaaaatttagcaaaagcgattacacggcgcatgactgtccatcgggggcttaatgtcgatttagttgacgctcgaattgaaagatttaatgaccaagagatttttatagaagtttacgaaaatgttcgtggtgaggatatgtttataattcagtcgacatccaatcctgccaacgataatcttatggagcttctcattatggccgatgctttgcgtcgctcatcagcaagccgcattacagccgtaatcccttactttggctatgcaaggcaagatcggcgaacaaaggctcgaacccccataagtgctaaacttgtagctaatttattagtagaggcaggggtggaaagaattctaacactcgatcttcatgctacgcaaatacaagggttttttgatatacctgttgacaatttatatgcagcacctgttttcgctctggatattattcaccagttttctgacaaacttaacgacgtaatggttgtttctcctgatgttgggggggttgctcgtgctagagaactggccaagcggataaatgccccgctatctattgttgataagcgaagagaaagagctggagaagtggccgaaatgacaatcatcggcgatgtcacaggtaaaaaatgcattattgttgacgatatttgcgatacagcgggcacactttgtaaagcagctgaagtccttatcgagaatggcgcagccgaagtgcattcatacatcacccatggggtgctatctggaccagctgttgaacgaattagcaactctgtgatgaaatctttagttataacagattcaattcaagccacagacccaatagcaaaagcttcaaatataagaatagttccaacagctccaatatttgctcaggctatcctcaatatttggaatggaacctctgtttcatcactattcgaaactgaaactttggagcctatttatgatggccaattacagagattattataga

SEQ ID NO: 253310 - DNA, 937 bp, Unknown
  Bacterial polypeptide expressing nucleotide sequence isolated from the Sargasso Sea
atgaaaataatcgcctgtaacagtagcaaatccttagctaaaaaaatttctaatcatattgatgttcaattagcagatgcctcagttagaacttttaatgatagagagatatttgtggaaataaatgaaaatattagaggtgaagatgtttttattattcaatctacatcacacccagcaaatgaccatttaatggaacttttaattacgattgatgctgcaagaagaggttcagcaaaaaggattactgctgttattccatattatggatatgcaagacaagatagaaagactggacctagaactccaatcactgccaaacttgttgcaaatctaattacatctgcaggagctgatagggttttaacaatggacttgcatgctggtcaaattcaaggtttttttgatatccctttagataatattttttctgtaagaccaataattgatgatgttaaagaaaaatttaatggaaataaagatttagttgtagcttcacctgatgttggtggtgttgttagagctagagcttttgctaagagattagatgctggactggcaattgctgataaaagaagagaaaggcctggcgagtctgaagtaatgaatattatcggagatgttaaagataaaacttgtattttactagatgatatagctgactctgcaggtacactgtgtaatgcagctgatgctcttagtaaaagtggagctaaagatatttattcatatattgttcatggcgtgttatctggagaggcactcaaaaagattgaaaattcaagcataaaagagttggtgttaacagatacaatagaaccgactaaagaggtaaaaagcacaaaaaacattagacatattagtattgctcctttaatgggtgatgcgattaaaaggatcaacactgatacttcagtgtcagccctttttgattaac

SEQ ID NO: 253311 - DNA, 358 bp, Unknown
  Bacterial polypeptide expressing nucleotide sequence isolated from the Sargasso Sea
atgaaaaaacaagatcaaaacataaaaattgttgccggaaactcaaatatgaggcttgcaacagatattgcaagttatcttaaaatacccctaaccgaatgcaacgttcgtagatttgctgatatggaagtatttgttgaaattcttgagaacgtgaggggtgaagacgtttttgtcatacaatcaacttcatatcctgctaatgatcatttaatggaattattaatacttattgatgccctaaaaaggtcttctgcgcgcagaattactgcggtaataccctactacggatatgctcgccaagataggcgaacatcgggtagaactccgatctctgccaaattagttgctaacctca

SEQ ID NO: 253312 - DNA, 928 bp, Unknown
  Bacterial polypeptide expressing nucleotide sequence isolated from the Sargasso Sea
aatcttatctggaactagcaatttaaagctcagtaaagatatagcaaagcacctcaagctaagattggttaatactaatattagaagattttcagatggtgagatttacattgaaataaacgaaaacataagaggcaatagtgtttttgttatacagtcaacatcaaatccagcaaacgataatctaatggaacttttattagttattgatgcactcaaaagatcttcggcaaaaaatattactgctgtaataccttattatggttatgctagacaagatcgtaaggttgcgccaagaacttctatatcagctaaagttgtggctaatcttattacgaatgctggcgcaagtagagtagtaactgtcgatttacacgcaggtcaaatacaaggtttttttgatatgcctgtagataatttatttacaactcccctatttgctaaacacattaaaaaaaaattaaaaaacaaaaaattaatttgcgtctcccctgatgttggtggggttcaaagaactaggggacttgctactcgcttgaaggctgatttagctatcattgataaaagaagacccgctccaggaaaatctgaagtgatgaatatcattggtgatgtaaaaggaaagacttgcattatagttgatgatattattgatagtggaggaacaattgtaaatgcggccaacgccttaaaaaggagtggagcctcggatgtttatgtttttatcacgcacgcagttttaagtggagatgcggtaaataagataaaaaaatcaaaaataaaaaaattagttataacagacactattaacaatagttcaaaaattaagaataacaataaaattgaagttttatctattgcccaattaatggctgaggcaattaaaagaatatcaaattccaattcggtatcagatttattcaattaa

SEQ ID NO: 253313 - DNA, 661 bp, Unknown
  Bacterial polypeptide expressing nucleotide sequence isolated from the Sargasso Sea
tatgaattcaaacggaaaacttaaaataatatcaggtaattctaatattctacttgcaaaagcaatatcaaaaagagttggattgcatataggtgaaaaaattcctttggttaaagctagagttgaacggtttaaggatcaagaaatctttgtagaagtcttcgaaaatgtgcgcggagaagatatgtttatcattcaatccacatctaacccagccaatgataatcttatggaactattaataatcgctgatgctctaaaaaggtctagcgcaaaacgaattactgcaataattccttactttggatatgcaagacaagacagaagaacaaaggccagaacaccaataagctcgaagctagttgctaatctcctcgctgagtctgggataaatagagttttgacattagatttgcatgcatcacagatacaaggattttttgatataccagtagataatttgtatgcgtcacccatttttgctatcgatataagacaccatttttcaagagatggatcgttaatgatagtctctccggacgtgggaggagtagggagagcacgggagctagctgaaaaaataaatattgatctggcagttgtcgacaagagaagaaaagctcctggagaaataaattccatgacgataatggagacgtaa

SEQ ID NO: 253314 - DNA, 743 bp, Unknown
  Bacterial polypeptide expressing nucleotide sequence isolated from the Sargasso Sea
tatggaacttctgctatgcatagatgcgcttaaaagatcttctgctaaaaacattactgcagttataccttattttggttacgcgcgtcaggatcgtaaggtagcaccaagaacatctatatcagcaaaattagtttcaaatttaattactaaagctggagcagacagaattgttactgtagacttgcacgcaggtcaaattcagggattttttgatattcctgttgacaacctttttgctactccaattttttcaagacatataaaaaaaaatataaaaggaaaaaatttaatttgtgtatctcccgatgttggtggcgttgaaagaactagagctcttgcaagaaaattagatattggaatagctataattgataaaagaagaccggcaccaggaaaatctcaagtcatgaatgttataggaaatgttagtaataaaacttgtgttatagttgatgacattatcgactcaggtggaacaattgttaatgcggctcaagctctaattaatagaggagcaaaagaagttcatgtgtatataactcatggagttttaagtggagaggcagttgaaaaaattaaaaaatctaaaattaagaaattagttataaccgatacaattgataactctagtaaggtaaaaaaagctaaaaatatagaggtattatcaatttgtaatttattaggagaagcaataaaacgtatatcaaattcaacttcggtatcagatttatttaaataaa

SEQ ID NO: 253315 - DNA, 859 bp, Unknown
  Bacterial polypeptide expressing nucleotide sequence isolated from the Sargasso Sea
atgaaattattaactggaaacagcaacaaattattaagcaaaaaaattgctaaatttcttagatctaaacttgttaactctagtataagaaaattttctgatggagaaatttatgctgaaataaatgaaaacattagaggtaatagcatttttatacttcaatctatttcatctccagcaaatgataatttaatggaattattgctttgtatagatgccttaaaaagatcttcagctaaaaatataaccgcagtaattccttattttggatacgcaagacaagatagaaaagttgctccaagaacttcaatatcagcaaaactagtttcaaatttaattacaaaagctggtgcagatagagttgtaactgtagatttacatgcgggtcaaattcaaggattttttgatataccggtcgataacttattttctactcccatttttgcaagacatgctaaaaaaaagataaaaagtaaaaatattatttgtgttgcaccagatgttggtggaactgaaagagcaagagctctaggaaaagctctaaatgttggactggctattgttgataaaagaagaccaaaaccaggacagtctcaagttatgaatgtgataggaaatgtaaaaaataaaacatgtattatagtagatgatatcatagactctggaggcactatcgttaatgctgctaaggcacttagaaataggggcgctaaggaggtttatgtttatattacgcatggagtgttaagcggagaagctgttaaaaaaatcaaaaattctttaattaaaaatttagttattaaagacactatagataatagtgaaaaaattaaaaatgttaaaaatatcgaggttttat

SEQ ID NO: 253316 - DNA, 955 bp, Unknown
  Bacterial polypeptide expressing nucleotide sequence isolated from the Sargasso Sea
tatgagtaatagtaactttgatatctttacaggatcagctaatcctgaattggctactgaagtttcaaaaattcttggtattgatatttctcatgctgatatcggacaattttctgacggtgaaataaaagttcaaattgaagataatgtaagaggtcatgatacatttataattcaatcaacttgtgcgccaacaaataaaaatgtaatggaaattatgctaattgctgatgctctaaaaagatcatcagcatctaaagttactgctatcgttccctattacggctatgcaagacaagatagaagagtaaggtcagcaagggtacctataagtgctaaagttgttgcagatatgtttgcttcggtcggtattgatagagtgctaacaatcgaccttcattcagaaactattcaaggtttctttgatatgcctgctgataatgtgtatgcaacaaaattaatggttgatcacattaaagataataatgaaagaaaagaagtcgtagttgtttccccagatgttggcggagtagtaagatcaagagccttggcaaaactattagatgatacagatttggcgattattgataaaagaagggctattgctaaccaatcagaagtaatgaatatcattggtgatattgatgggaaagtttgcattgttccagatgatcttattgatactgctggaacattatgtaacgcagcagatgcattaaaagaaaaaggcgctaaggctgttaaggcatatataacccatccagtgctgtcaggtcctgctattgaaagactaaacaattcatcaattgatgaattagtagtaactaattcaattcctttgaacaaagaagctcaaaaatgcagtaaaatacgcgtcatttcactagcatcaacaatagctgagtgtataaaacgattaagtaatgaagaatcgctaagtgaaatgtttttatag

SEQ ID NO: 253317 - DNA, 493 bp, Unknown
  Bacterial polypeptide expressing nucleotide sequence isolated from the Sargasso Sea
atgaagaaagaaaagctaattctttttgcgggcccagcatcaaaagacttgggttcacaaattgctagatatttaaatgaaccacttggttatatccaggttggagccttcagtgatggtgaaaccagcattgaggtttcacaaaacattagggggatggatgtatttttggttcaatcgacttatcaaccaggcaatgaacatctgatgcagcttctattgatggcagatgcatgcaaaagggcatcggctaaatctgtttcagctgtcattccttattttggttattctaggcaagacagaagaccaaggaatatcagaggccctgtttctgcaaaattggttgcggatttgattgaaacagcagatatcaaaagactcataactttggatcttcatgcagatcagatcgaaggtttcttctcaattccagttgataacatctactcctcaaccattctgatgagtgacatgtggagacaaggctatccag

SEQ ID NO: 253318 - DNA, 772 bp, Unknown
  Bacterial polypeptide expressing nucleotide sequence isolated from the Sargasso Sea
atctatttcatctccggctaatgataatctaatggagttattactttgcattgatgctcttaaaagatcttcggcaaagaatattactgctgttattccctattttggatatgcgagacaagatcgtaaagtagtcccaagaacctcaatttctgcaaaacttgtttcaaatttaatcactaaagcaggagcagatagagtggtaacacttgatttgcatgcgggccagatacaaggattttttgatattcctgtcgacaatctatttgcaacaccaatctttgcaagacacataaaaaaaaatattaaaaatagagatatgatttgtgtagcgcctgatgtcggtggaactgaaagagcaagagcattaggaaaaattttagatgttggtttagcaatagtagacaaaagaagaccagcgcctggaaaatcaaaagttatgaatgtaatcggaaatgtaaaaaataaagtttgtatacttgttgatgatattattgattcaggcggaacaatagtaaatgctgccaaagaacttaaagatagaggtgcaaaagaagtatatgtttatataacacatggagttttaagtggagatgcagttaagaaaattcaaaaatcaaatataaaaaagttggtaatcacagatagcatagataataacgaaagagttaagaattcaagaaacatagaagttttaagtatatctaacttattgggagaggctatgaaaagaatctcaaactcaacatctgtttcagatttatttaaataa

SEQ ID NO: 253319 - DNA, 655 bp, Unknown
  Bacterial polypeptide expressing nucleotide sequence isolated from the Sargasso Sea
tatgaaagataatgcttttgacatttttacaggcacggctaatccagaattagctgaagaagtatcaaaaatacttaagatagatattgctcctgctgatgttgggtatttttcagatggcgaactaaatgttcaaattcaagaaaacgtcagaggtcatgatacttttatcattcagtctacctgctcaccaacgaataagaatgtaatggagattatgttaattgctgatgctctcaaaagatcatctgcatctaaaattaccgctattgttccttactttggttatgctagacaagacagaagagttagatcagccagagttcctataagtgctaaagttgttgcagatatgtttgcttcagttggtattgatagagttcttactattgatcttcactcagaaactattcagggcttttttgatatgcctgctgataatgtttatgcaacaaaatttatggttgacgacatcaaggacaataacgaaagagatgaagttgtggttgtttctccagatgttggtggggttgtaagagccagggcattagcaaagttattagatgacactgatttagctataatagataaaagacgtgctgcagcaaatcagtcagaagtaatgaacatcattggtgatatccaaggaaaagtt

SEQ ID NO: 253320 - DNA, 640 bp, Unknown
  Bacterial polypeptide expressing nucleotide sequence isolated from the Sargasso Sea
atgaaaatattatctggaacaagcaatcttaagcttagcaaagatatttccaaaaaccttaaattgaaacttataaatactaatataagaaggtttgctgacggagaaatatatatagaaattaatgagaatattagaggcaatagtgtttttgtaattcagtcaacatcaaatcctgccaacgataatataatggaacttcttttggtaattgatgctctcaaaagatcttcagcaaaaactgtaacagctgtaattccatattttggttacgcaagacaagataggaaagtggctcctagaacttctatttctgcaaaagttgtagcaaatctaatttcaaatgcaggtgcaactagagttgtaactgttgatttgcatgcaggacaaattcaaggtttttttgatatgccggtagacaatttatatacggcaccactatttgcgaaatatatcaaaaaaaaacttggatcaaaaaaattaatatgcgtttccccagatgttggtggtgtcgcgagaactagagctttagcaacaagaataaaagctgacttagcaataatagataaaaggagaccggctccaggtaaatctgaggtaatgaatattattggggatgtaaaaaataaaacttgtataa

SEQ ID NO: 253321 - DNA, 579 bp, Unknown
  Bacterial polypeptide expressing nucleotide sequence isolated from the Sargasso Sea
tatgaaaattcttacaggaaatagtaataaacatctaagcggaaaaatatctaaatatcttaaaaataaacttgtcaattcaagtataagaaaattttcagatggtgaaatttatatagaaataaatgaaaatattaggggtaatagtatttttattattcaagcaatttcttcaccggctaatgataatttaatggaacttttgttgtgtattgatgcgcttaaaaggtcatcagcaaaaaatataactgcggtaataccttattttggatacgctagacaagatcgtaaggttgttccaagaacttctatatctgcaaaacttgtttcaaatcttattacaaaagcaggagcagatagaattgtaactgttgatttgcatgcaggtcaaatacaaggatttttcgatattccagttgataatcttttttcaactccaatcttcgctagacatattaagaaaaaaattaaaagtaaaaatttaatttgtgtagctccagatgtaggtggagttgagagaactagagctttaggtagaaaattagacgttggattagccataattgacaagagaagacc

SEQ ID NO: 253322 - DNA, 934 bp, Unknown
  Bacterial polypeptide expressing nucleotide sequence isolated from the Sargasso Sea
aatgaaactattatctggaactagcaataagcctctcagcaaggacattgcaagatttctaaaatctaaactagttaattcaagtatcaagaattttgcagatggtgaaatatatgttgaattaaatgaaaatataagaggaaatagtattttcataattcagtctatctcatctcctgctaatgataatctaatggaacttttgttgtgtatagatgctctaaaaagatcctctgctaaaaatataacagcagttattccatattttggttatgcaagacaagatagaaaagttgttccaagaacatctatctcagcaaaacttgtatcaaatttaataacaaaagctggcgcagacagagttgtgacagttgatttgcatgcaggtcaaattcaagggttttttgatataccggtagacaacttattttctacacccatttttgcaagacatgtaaaaaaaaacatcaaaagtaaaaatattgtatgtattgcacctgatgttggaggtactgaaagagcaagagcacttggaaagattttgaatgttggtcttgcaatcgttgataaaagaagaccaaaacctggtcaatcccaagtgatgaatgtaatcggagaagtaaaagataaaacttgtgtaatagtggacgacatcattgactctggtggaactatagtcaatgcggctaaagcattaaaggatcggggtgcaaaagaagtttacgtttatatcacccacggtgttttaacaggtgaggctgtaaaaaaaattaaaaattcggtaattaaaaaattagtaatcacagatacaattgacaataaagacaaaacgaagagtgcaaaaaacatagaagttctatctatttcagccttgatgggagaagctattaaaagaatatcaaactcaacctccgtttccgatttatttaaataa

SEQ ID NO: 253323 - DNA, 412 bp, Unknown
  Bacterial polypeptide expressing nucleotide sequence isolated from the Sargasso Sea
tagagcacttggaaaacttctgaatgtaggactagctattgttgataaaagaagaccaaagcctgggcaatcagaggttatgaatatcattggtgatgtaaaaggacaaacttgtattttagttgatgatataattgattcaggtggtacaattgttaatgcggcaaaagctttgaaatctcgaggagcaaaagatgtttatgtttacattactcatggggttttaagtggagatgcaattaaaaaaattaaaagttcagtaattaaaaatttagttataaccgatacaatagacaatgttcataaaactaaaaatgttaaaaatattgaggttttacccatatcaggtcttatgggtgaagcaataaagagaatttcaaattcaacatccgtatcagatttatttaaataa

SEQ ID NO: 253324 - DNA, 480 bp, Unknown
  Bacterial polypeptide expressing nucleotide sequence isolated from the Sargasso Sea
aatgaagattctcactggaaatagcaataaacagctaagtaataaaatttctaaaaatcttaaaaataaattagttaatacaagtatcagaaaatttgctgatggtgagatttatattgagattaatgaaaatataagaggaaatagtatttttataattcaatctgtatcctctccagcaaatgataacctgatggaattacttctttgcatagacgcacttaaaagatcatctgcaaaaaatatcactgcagtaattccatattttgggtatgcgagacaagatcgtaaagttgtaccgagaacttctatttctgcaaaattagtatcaaacttaattacaaatgcaggagctgacagagtggtaacagtagatttacatgctggtcaaattcaaggtttttttgatattccggttgataacctttttgctacaccaatctttgcaaaacatattaaaaggaaaattaaaagtaataa

SEQ ID NO: 253325 - DNA, 934 bp, Unknown
  Bacterial polypeptide expressing nucleotide sequence isolated from the Sargasso Sea
atgaaattagtatctggtaattcaaatataaatctagcggaaaatattggtaagtatttagacacgcctttggcagattgtactgtcaaaaaattttctgataaggaaatttttgttgaaatgaatgaaaattgtagaggtgaagatgtttttattattcaatcaacatcctttcctgcaaatgataatttaatggagcttcttattttaattgatactttgaaaagagcttcagcaaaaagaattacggctgttattccttattttggatacgccagacaagatagaaagcctgggccgcgaacaccaataacagctaaactagttgctaatctaattgctaaatcaggagcagatagagtattaagcatggatttacatgcagggcagattcaaggtttttttgatattccgacagataatctttttgctgcaccgattctcttatctgatattgaaaataagataggatcaaatgacgctatggtagtatctccagatgtagggggtgttgtaagagcgcgtttaattgcgagtagaataaactctgatctagccattgttgataaaagacgtgaaaaagcaggtgaatcagaagtaatgaatattattggcgatgtatcggatagaagttgttttatgattgatgatattgttgattcagccggaactttatgtaatgcagcagaggcattaataaattctggcgctaaggaagtttttgcacatgtaactcatggtgttttatctggggaagctataaaaagagtaaacgactccgctcttacaaaattggtaattacagataccattaatgagactgatgatattaaaaattccaataaaatagaaacggtaagcgttgtccacctacttggagaagcaataagaaggatttctgaagaaagatcagtatcgagtttgtttgattaac

SEQ ID NO: 253326 - DNA, 934 bp, Unknown
  Bacterial polypeptide expressing nucleotide sequence isolated from the Sargasso Sea
catgaaaattttatcaggtactagcaatcttcaattaagcaaagatatttcaaaaaagctgaagttaaaattagttaatacaaatattagaagattctccgatggcgagatctatattgaaataaatgaaaatattagaggaaatagtgtttttgtcattcaatcaacttctaatccagcaaatgataatttaatggaacttttattagtaattgatgctttgaaaagatcatcagcaaaaaatattactgcggtaatcccttattttggttacgcgagacaagacagaaaagttgcgcctaggacttccatctctgccaaagttgtagcaaatttaattactaatgctggagcaagtagagtagttacagtagaccttcatgcaggacaaatccaaggattctttgacatgcctgtagacaatttatttacaaccccgctttttgcaaagtatataaaaaaaaaattaaacaataaaaaattaatttgtgtatcacctgatgttggtggagttcaaagaactagaggattagctactagaataaaagctgatctagcgataattgataaaagaaggccaactccaggaaagtctcaagtaatgaatatcattggaaacgtaaaaaataaaacttgtatcatagtagatgatattattgatagtggaggaacaatagtaaatgcggttgatgctttaaagaaaaatggagctcaagaagtttatgtttttattactcatgcagtattaagcggggatgcagtgaaaaaaattaaaaattcaaaaattaaaaaacttataatcactgatactattaataactctcaaaaaattaaaaataacaataaaatagaggtcttatctatctcgtcgttaatgtctgaggcaataaaaagaatagcaaattcaaattctgtgtcagatttattcaattaa

SEQ ID NO: 253327 - DNA, 487 bp, Unknown
  Bacterial polypeptide expressing nucleotide sequence isolated from the Sargasso Sea
atgaaattattaactggaaatagcaataaagttttaagtaaaaacattgctaaatacttaaaaacaaaactggtaaattcgagtattagaaaatttgctgatggtgaaatttatattgagataaatgaaaatataagggggaacagtatctttattgtacaatctatctcctctccagcaaatgataatttaatggaattattgttgtgtattgatgctctaaaaaggtcatcagcaaaaaatataacagcggtaataccgtattttggatatgcaagacaagatagaaaggttgttccaagaacttccatatctgcaaaacttgtctctaatttaataactcaagcgggtgctgatagagtggtaacagtagatttacatgctggtcaaattcaaggtttctttgatattcctgttgataacttattttctactccaatatttgcaagacatgctaaaaagaaaattaaaagtaaaaaaattattt

SEQ ID NO: 253328 - DNA, 934 bp, Unknown
  Bacterial polypeptide expressing nucleotide sequence isolated from the Sargasso Sea
atgattttttcaggtaatgcgaacaggccacttgcaaagttggttgcaaagaatcttggtacaacacttggtaaagcttccgttaagacattctctgatggtgaaatttccgttgaaattgaagaaaatgtaagaggacaggatgtctatatcattcagcctctgtgtgacccggtcaataataatttaatggaattattaataatggcggatgccttgaaacgttcttctgtggataggatatctgttgtcttgccatattttggatactcacgtcaagacagaagagctagatcggcgagagttccaataacagcaaaggtagttgctaatatgttaaccggtatgggagttgagagattattaaccattgatttacacgcagatcagatacaggggttttttgatataccagttgataatatctatgccacgcctctatttttagcagatatacacaaacaaaattatgacgatattattgttgtatcacccgatgtcggcggtgtagtgcgcgcaagagcgctagcaaaacaactcaatactgatcttgcaatcgtagataagagacgtcctgaggcaaatgtctctgaggtaatgcaaatcataggtgatatcaaaggcaaatgttgtgtgatagttgacgatatatgtgatactgccgggacactatgtcacgcagcagacgcacttaaagataagggtgcatcagcggtatatgcgtacataacacatcccatattttcaggtaaagctgaccaaaatattatagaatcaagtattgatagcctaattgttacagataccattaaactgtcaaaaaaaatcatcgatactggaaaaatccggcagattactgtctcggaaatgcttgcggagaccctaagacgtatcgataataaagaatctgttagttcacttttcgtagaataag

SEQ ID NO: 253329 - DNA, 934 bp, Unknown
  Bacterial polypeptide expressing nucleotide sequence isolated from the Sargasso Sea
aatgaaaattctcacaggaaatagcaataaacagctaagtagtaaaatttcaaaaaatttaaagaataaattagtcaatactagtattagaaaattcgcagatggtgagatctatattgaaattaatgaaaatataagaggtaatagtatttttataatccaatctgtgtcttcaccagcaaatgataatttaatggagttgcttctttgtatagatgctctcaagagatcatctgcaaaaaatatcactactgtaataccttattttggatatgccagacaagatcgtaaggttgtaccaagaacttctatctctgcaaaattagtctcaaacttaattacaaatgcaggagctgacagagttgtgacagtagatttgcacgcagggcaaattcagggttttttcgatatcccagttgataacctttttgctaccccaatctttgcaaagcatattaaaaggaaaattaaaagtaataatataatttgcgttgcacctgacgttgggggagttgaaagagcaagagctttaggtaaaaaattagatgtcggtttagcaatagttgacaaaagaagacccagtcctggaaagtcacaagttatgaatgtcattggaaatgttaaaaataaaatttgtattttaactgatgatataattgattctggaggaacaattgttaatgcggcggatgctttattaaaaagaggtgcaaaagaagttcatgtatatgcaactcatggtgtttttagcggtgatgcggttaaaaagataaagaattcaaaaattaaaaacttagttattacagatagtatagacagttcagacaaattaaaaaaagtaagaaatattgaagtattatcaatatcaatattgttggctgaagctataaaaagaatttctaattcaacatctgtttcggatttatttaaataa

SEQ ID NO: 253330 - DNA, 493 bp, Unknown
  Bacterial polypeptide expressing nucleotide sequence isolated from the Sargasso Sea
ctgatgttgttcaccgggcgatctaattctgccttggctactaaagttgccgaagagttgaatattgaactgggcagtgctgacgtaggtagttttagtgatggcgaagccctagttgaaattcatgaaaatgtgagagggaaagatgtttttttgcttcaatcgacttgcccgcccaccaatgacaacttaatggaactgctgatcatggcggatgccttgcatcgggcatcgtctcaacgaattacagcggttattccatattatggttacgctaggcaggacaggcgaccgagatcagctagggtcgcaattagttctaaagtggtggcagatattatcagtacgactgggatagatcgcattctaacggttgatctgcatgcggaccaaattcagggtttctttacgataccagttgacaatgtatatggttctcctgtcctggtggatgatatattgcttaagaattattcgatgccgatagtcgtcg

SEQ ID NO: 253331 - DNA, 838 bp, Unknown
  Bacterial polypeptide expressing nucleotide sequence isolated from the Sargasso Sea
gaaataaaagtagaaattcttgaaaatgtccgaggtcacgagacatacatcattcaatcaacatgtgctccaacaaactctaatctaatggagttaatgctaattaccgatgctctaaagcgttcttcagcatttaaaataacagccattcttccttattatggttatgctcgtcaagatagaagagtaaggtctgcaagagttcctattagcgcaaaagttatagcagatatgttaaattctgctggtgtagatagagtgctaactgtagaccttcactcagaatctattcaaggtttttttgatatgcctgcagacaatgtttatgcaactaagattatgcatgatgatattaggtcaagaacttcaaaagatgaagaaatattgattgtttctccagatgtaggcggagtagtcagagcaagagctcttgcaaaattcttagatgagtctgatcttgccattatcgataaaagacgagcaacaacaaacgaatctgaagtaatgaatataattggagatgttaaaggaaaaagttgcattgtccctgatgatattattgatacggctggtacattatgtaacgctgcagaggccttaaaagacgcaggagctgccaaagtaaaggcttatatcactcatccagttctatctggtcctgctattgaaaggatttctgattcttcgatagatgaattggttgtaaccaattccatatctttatccccagaagcaaaaaaatgcagtaaaatacgcgtcatttctcttgcccctactattgcagagtgcatcaggagattgaacaatgaagagtcgctaagcgctctatttttataaa

SEQ ID NO: 253332 - DNA, 796 bp, Unknown
  Bacterial polypeptide expressing nucleotide sequence isolated from the Sargasso Sea
atgtattttgtggttcaatcgacttatcaaccaggcaatgagcatctgatgcagcttctattgatggcagatgcatgcaaaagggcatcggctaaatctgtttcagctgtcattccttattttggttattctaggcaagacagaagaccaaggaatatcagaggccctgtttctgcaaaattggttgcggatttgattgaaacagcagatatcaaaagactcataactgtggatcttcatgcagatcagatcgaaggtttcttctcaattccagttgataacatctactcctcaaccattctgatgagtgacatgtggagacaaggctatccagatcaggtgattgtttctccagatgtaggcggtgtacaaagggcaagagcaatcgccagaagattaggtaatgcaagtttagcaatcatcgataaaagaagggaagcggcgaataaatctgaagtgatgaatatcattggtgatgttgatcaaaaaacagcgatcatatttgatgacatggtcgatacagctggaacactttgtaatgcagcagctgcactcaaagagaaaggcgcactgaagacagtggcttatgctgcacaccctgtgctttcagggcctgcaatagagagaatagctgattctgaactcgatgagctggttgtgactgacactatacctttgacgcaggaagcaaaagatacaggcaaaattagacaactttcaattgctgagcttctgggtgaaacgatagagagaatagtggcagatcaatccgtcagttctctatacgcagaataag

SEQ ID NO: 253333 - DNA, 934 bp, Unknown
  Bacterial polypeptide expressing nucleotide sequence isolated from the Sargasso Sea
ctgcggctgttcagcggcactgccaaccccgcactggcccgtgagatcgccggctatctgggcgtttcagacggcccccgcgtcagcaagcgctttgccgacggtgagctctacatacagatccaggaatccatccgtggctgtgatgtctttctggtgcaacccacctgcgctccggtgaacgatcacctgatggagctgctgatcatggtggacgcctgccgccgcgcctccgcccgtcagatcactgcggtggtgccctactacggctatgcccgcgctgaccgcaagacggctgggcgggaatccatcaccgccaagctggtggccaacttgctggtgcaatccggcgtcagccgtgtgctggccatggatctgcactcggctcagatccagggctatttcgatattccttgcgatcacatctatggggcgccggtcctggtggattacctggccacgcgtgatctcggcgaagtggttgtggtctcaccggatgtgggcggcgtcgcgcgcgccagggcattcgccaagcgcatggatgatgcaccgctagccatcatcgacaagcgtcgctctgcccacaacgtcgctgaaagcctgacggtgatcggagatgtagcaggtaagaccgccatcgtcgtcgacgacatgatcgacaccggcggcacgatttccaaaggggccaagctgctccgccagcagggcgccgagcgggtgatcgcctgcgccacacacgcggtgttctcaccaccggcagtggaacgtctctccgagcctgggcttttcgaagaagtgctggtcaccaacagcatcccggtggcggaggagctgcgcttccctcagctgaagaccctgtcagtggccaacatgctgggcgaggccatctggcgcatccacgaggaaagctccgtcagctccatgttccgctgac

SEQ ID NO: 253334 - DNA, 914 bp, Unknown
  Bacterial polypeptide expressing nucleotide sequence isolated from the Sargasso Sea
cagcaataaagctttaagcagaaatattgcaaaatatttaaagactaaaattgtaaattctagtatcagaaaatttgctgatggagagatatatatagagataaatgaaaatattcgaggaaatagtatttttataattcaatctatatcttcaccagcaaatgataacttaatggaactattgttatgtattgatgctttaaaaagatcatctgcaaaaaatataacagcagtaattccttattttggatatgctaggcaagatagaaaagttgttccaagaacctcgatttcagcaaagttagtttcaaatttaattactaaagcaggagcagatagagttgtgactgttgatttgcatgcgggtcaaatacaaggattttttgatattcctgtagataatcttttcgcaacaccaatctttgcacgacatattaaaaaaaagataaaaattaaaaatatgatttgtgtagcaccagatgttggtggaactgagcgagcaagagctttaggaaaaattcttaatgttggattagctattgttgataaaagaagacctaaacctggtcaatcacaagtaatgaatatagttggagatgttaaaggaaaaacttgtgtaattgtagatgatataattgactctggaggtacaattgtaaatgctgcaaaagcacttaaagatagaggggcaaaagaagtttatgtttatattactcatggagtattaagtggtgaggctgtaaaaaaaattaaaaattcagttataaaaaatctagtgataacagatactatagataataatgtaagaacaaaaaatgttaaaaatatagaagttttgccaatttcaggtctaatgggagaagcaattaaaagaatctcaaattcaacctcagtatcagatttattcaaataat

SEQ ID NO: 253335 - DNA, 848 bp, Unknown
  Bacterial polypeptide expressing nucleotide sequence isolated from the Sargasso Sea
aatgaaattgctaactggaaatagtaataaaaacctaagcaaaaaaattgctaaaaatttaaaatcaaaattaataaactcaagcattagaaaatttgcagatggagaaatttatgtagaaataaacgaaaacataagaggtaatagtattttcataatccaatctgtatcttctccagccaatgataatttaatggaattattattatgtatagatgctcttaaaagatcctctgcaaaaaatattactgcggtaattccatattttggatatgctagacaagatagaaaagtagttccaagaacttcgatatctgcaaaattagtttctaatttgataactaaggcaggagcagacagagtggttacggttgatctacatgctggtcaaatccaaggtttttttgatataccggtagataacttatttggtactccaatctttgctagacatattagaaaaaatattaaaagtaaaaatattatttgtgtggctccagatgttggagggactgagagagcgagagctttaggaaaattattagatgttggtttagcaatagttgataaaagaagacctgctccaggaaaatctcaagtaatgaacgtgataggaaatgttaaagacaaaacttgtattctagtagacgatataattgattctggcggaacaattgttaatgcagcaaaagcattgaaagatagaggcgcaaaagaagtttatgtttatataactcatggtgttttaagtggtgatgcaattaataaaattaaaaaatcaataataaaaaaattagtaattaccgatactatagataacttaggcaaaactaataaagctaaaaata

SEQ ID NO: 253336 - DNA, 457 bp, Unknown
  Bacterial polypeptide expressing nucleotide sequence isolated from the Sargasso Sea
atgaagcttcttacaggaaacagtaataaaagcctcagtcaaaaaatatcaaagcatttaaaaacaaaattagttcattctagtattagaagatttgctgatggtgaaatttatatagaaattaatgaaaatatcagaggtaatagtatattcttaattcaatctagttcagctccagctaatgataatttaatggagctcttattatgcattgatgcccttaaaagatcttctgcaaaaaatattaccgcagtaataccctattttggatatgcgagacaagaccgtaaagttgctccacgaacatctatatcggcaaaattagtttctaatttaataactaaagctggagcagatagaatagtaactgttgatttgcatgctggtcagatacaaggtttctttgatatcccagttgacaacctttttgcaactccaatttttgcaagacatataa

SEQ ID NO: 253337 - DNA, 928 bp, Unknown
  Bacterial polypeptide expressing nucleotide sequence isolated from the Sargasso Sea
atgaaaattatttctggaaatagtaacattgagttatctaaagagatttcagaatatattaaaatacccctatctgaaacaactatgacaagattttctgataaggagatatttgttgaaattgctgaaaatgtaagaggagaggatgtttttttaatacaatcaacttcattccctgctaatgacaatttaatggagttgttagttgcaattgatgctttaaaaagaggatctgctaaaagaattactgctgtattaccatattttggttatgccagacaggaccgaaaaactgggccaagaactcctatttcggctaaactagtcgctaatttaattacaacagcaggcgccaatagagttttaactatggatttacacgcaggacaaattcaagggttttttgatatcccattggataatctttatgcattaaatatgtttgtaaatgatatcaaatcaaataaaagagatgagaacttagtatttgtctctccggatgttggtggtgttcttagggccagagcatttgcaaaaaaactcaacgctgacttagctataatagataaacgtagggatgctcctggtgtctcgaatgctatgaatgttataggatcagtcgatggcaagaaatgtatcattgttgatgatttagttgactcaggaggaactatttgtaacgcagcaaaggctctaaaagaaaagggagctactcatgtttatggttattgttcccatggtgtatactctggaaaagctttagaaaatattaataattctgttttagaagaaatggtttgtaccaatactattaagcccacatttgaagttccgactggtatgagatatttgtcagtggcgccactatttggagaggctataatgcgcataaataacgaaacatctatatcttctctgtttgattaat

SEQ ID NO: 253338 - DNA, 382 bp, Unknown
  Bacterial polypeptide expressing nucleotide sequence isolated from the Sargasso Sea
atggaaaaacaattactatttagcggaaactcaaataaacaactagcagagtcagttgcgaaaaacctcggaaaaaaactagctccaatcaaagtgagtacttttagtgatggcgaagtgagcgttgaaatcgatatcaatgttagaggctcagatacatttataattcaatctacagactcgcctgctgaaaaaaatttaatggagttagttctgattgcagatgctttaaaaagagcttcagcaaactcaattacagctgtaattccttattttggttatgccagacaagacagacgagtaaggtcagcaagagttccaataagtgctcgtgttattgctgaagtcttaaccagtggtggcatttccagagttaatactc

SEQ ID NO: 253339 - DNA, 928 bp, Unknown
  Bacterial polypeptide expressing nucleotide sequence isolated from the Sargasso Sea
ttgcctgcaacagtaaataaaatattagctgaatcaatttgctcatacattggtgttaaaatagcaaacacatctttaagaaaatttgcagatagagaaatttttgttgaaataaatgaaaatattagaggggaagatgtcttcatcattcaatcaacttcacaccctgctaatgaccatcttatggaactacttattactattgacgccgctaaaagaggatcagcaaaaaggataactgcggttatgccctattacggatatgctcgtcaggatagaaaaactggcccacgcacacctattactgcaaaacttgtagctaatctaatcacttcagctggggctgatagagttttaacaatggatttgcatgcaggtcaaatacaaggtttttttgatattcctctagataatatattttcagcaccaccaataataaaagatatgaaaaataaattctctaataataatgatttagtgattacctctcctgatgttggaggtgtagtaagagctagagcttttgcaaaacgtttaaacgcaggtttagcaattgcagataagagaagagaaaaagcaggtgaatctgaagtaatgaatataataggtgaggtaaaagacaaaacctgtattttacttgatgatattgctgactctgcaggcacattgtgcaatgctgctaaagctttgaaagaatttggagctaaagaaatatattcatacattgctcatggagtattatctggggaagcattgagcaggattgaaaactcggctattaaagaattagtccttacagatagtattcatgcttcaaatgaagtaaaaaatacaaaaaatattagacatattagtgttgctcctttaatgggagaggccataaaaaggataaatagtgattcatctgtttcagccctttttgattaat

SEQ ID NO: 253340 - DNA, 982 bp, Unknown
  Bacterial polypeptide expressing nucleotide sequence isolated from the Sargasso Sea
catggaattggtaacaaacaaaaagctttacttggtatcaggtagaacttaccaaccactagcggaaagtattgcttcagaattaggtgtcaacctaggcgaaccaaacctcgcagaattcgccaacggtgaagttcattgcaggttttctgaatcaatacgcggttgcgacgtatttatagtgcaaacccacagtggatctgaagactcgtcaatcaatgattcgctaatggaacaattaattatggtggatgcagcaaaacgcgcatcagcgaagaggatcaccgtggtttgccctgcttatggctacgggcgacaagaccggaaagcttcaggacgcgaaccaattacagccaaacttgtatccaaccttttcaaagcagctggagcaagcagactggtcagtgtcgacctccactccggtcaaactcaggggttttttgatgggccagtagatcacctaacagctatgccagttttggtcgaaaggctttcttctttaaaaggtgatttaactattgtctcaccagatgccggaagagtgaaagtagctgaacgttacgccatgactttaggtgcagagctagcgatagtacacaaaagaagaagccatagttcatttaatactgttgaagcacaagaggtagttggagacgttgatggtcgcgtatgtattcttgttgacgacatgatagatacagcaggaacaatctgttcagcagctgaacaattgtctgaaagaggagcctcacagatcattgcagcagccacccatggagttttttcaggacctgcatctgaaaggctttcttcatctccaatagaaaaaatcattgtcacggacacacttccacttccggaaaatatgcaaactgataaagttgaagtactttcagtagctcctttgattgcagaggctattagagcagtgttcgaagacacgtcggtttcagagatatttggcggaaataatctagtttaa

SEQ ID NO: 253341 - DNA, 946 bp, Unknown
  Bacterial polypeptide expressing nucleotide sequence isolated from the Sargasso Sea
aatgaataataaactaaaaatctttagcggcagaagtaatcctggcttagctcttggtatagcaaaatcgcttcatcaagatttaggcagcatttcgattcgcactttttctgatggtgagttatgggtaaagtatgaagagaatgtgcgaggatgtgatgtatttattattcaatctactaacgggccatcagagaacataattgaacttgcactgatggttgatgctgcagttagggcatctgcagataccgtaacagttttaattccatattttggctatggtaggcaagatcgaaaagatcaacctcgcgttccaatctcatctcgtgtaatgattgacattttaacagccatgggttcagatagaattattactcttgatcttcattcaactcaaatacagggttttgctaaaataccttttgacaacttatatagcaggtctgtcttgtttgaggctattcaagatgaaaacttttcttcagataatacggctgttttagcgcctgacgtaggctctgttaaaatgagtcaaggttatgcaaaaaacttaggcatgcattttgcactaatagataaacgacgttttgctccaaatcaagcagaggttaatcatcttatagggaacttagatggaatggatgttttaattattgatgatatgattgatactgcggggacaacggttaacgcttctcaagcggcaatggatgaaggtgcgcggtcagttaccgtagtggttacacatggtgttttatctggatctgcaattgaaagattaaatgaatcaactattaaaaaaattattgttacagatactatagcaattcctaaagaaaaacagattgataaaatgaaaatagtaacggtagcaaatatttttggtgaggcagttagccgagttcataatggtgaatcggttagtgctttgtttgaattttaa

SEQ ID NO: 253342 - DNA, 934 bp, Unknown
  Bacterial polypeptide expressing nucleotide sequence isolated from the Sargasso Sea
gatgaaaattctcacaggaaacagtaataaacatcttagtcaaaaaatatctaaatttttaaaaaatagactagtaaattcaaatataagaaaatttgcagacggagaaatctatgtcgaaattaatgagaatattagaggcaatagtatttttttaattcaatccgtttcatctcctgcaaatgacaatttaatggaattactactatcgattgacgctttaaaaagatcatcggccaaaaacataactgcagtgatcccatattttggatatgcaagacaagatagaaaggtggttcctagaacatctatatctgcaaaacttgtatctaatcttattgcaaaggcaggtgcagacagagtcgttacagttgatttacattcaggacaaattcaaggattttttgatattcctgtagataacttatttgcaactccaatatttgctagacatataaaaaagaaattaaaaaaaaataatataatctgtgttgctccagatgtcggtggcaccgcaagagcaagggctttaggaaaattgttaaatgtagatttagcaatagtagacaaaagaagacccgctcctggaaagtcagaagtaatgaatgtaattggaaatgtgaaaaataaaacttgtatattagttgatgatataatcgactctggtggaacaattgtaaatgcagcttctgaattaaaaaaaagaggagctaaagatgttcacgtgtatgtaacacatggagtattaagtggtaatgctgttgaaaaaattaagaaatcttcgataaaaaatttagttgtaactgatacaatagataattcaatgaaagttaaaaaagctaagaatattgaggtattaacaatctctaatttggttggagaagctataaaaagaatatcaaattctacttcagtatcagatctatttaaataa

SEQ ID NO: 253343 - DNA, 775 bp, Unknown
  Bacterial polypeptide expressing nucleotide sequence isolated from the Sargasso Sea
acttgttctccaactataaaaaatgtaatgaaaataatgttaattgctgatgcattaaagagatcatcggcttcaagaattactgcagttgttccatattatggctatgcgagacaagatagaagagtaagatctgcaagagtacccattagtgcaaaagttgttgctgatatgtttgcatctgttggtattgatagggttttaactattgaccttcactctgagacaattcaaggtttttttgacatgcctgctgacaatgtttatgcaacaaaatttatggtcgacgatattaaagataataatgatagaaatgaagttgttgttgtgtctccagacgttggtggagttgtaagatcaagagcgcttgcaaaattattagatgatacagatttagctattattgataaaagaagagcagtagcaaatgaatctgaggttatgaacatcattggcgaagtcgaaggaaaggtttgtatagttccagatgacattattgatactgctggaacactttgtaatgcagcaaaagcattaaaagataaaggtgcaaaagctgtaaaagcatatattactcatccagttctatctggaccagcaatagaaagattgaataaatctgaaattgacgaattaattgttacaaattcaattcctttgaacaaagacgctaaaaaatgcagtaaaatacgcgtcatttcaattgctaatataattgctgagtgtataacacgtctaagtaatgaagagtcattgagtgaaatgtttttataga

SEQ ID NO: 253344 - DNA, 934 bp, Unknown
  Bacterial polypeptide expressing nucleotide sequence isolated from the Sargasso Sea
atgaaaattctcacaggaaacagcaataaaaatctcagttcaaaaattgcaaaatatttaaaagaaaaacttgtaaattctaatataagaaaatttaaagacggtgaaatttatgtagagataaacgaaaatataagaggtaataatatttttttcattcagtcagtttcttccccagcaaatgacaatttgatggaaatgttgctttgcatagatgctcttaaaagatcttctgcaaaaaatattacagccgtaataccttattttggttacgctagacaagatagaaaagtggtgcctagaacctctatttctgcaaaattggtttcgaacttaatcacacaagcaggggcggatagagttgttactgtagatttgcacgctggacaaattcaaggtttctttgatattcctgtagataacctttttacaaccccattatttgcaagacatattaagaaaaaaattaaaagtaaaaatataatttgtgttgcgcccgacgtaggaggagttgaaagatcaagagccttaggtagaattttaaatgtaggacttgcaattgttgataaaagaagacctaagcctggtcaatcacaagtcatgaatgtcattggagatgtgaaaggaaaaacttgcataatcgttgacgatataatcgactctggtggaacaatcgttaatgcagctaaggcacttaaacaaagaggtgccaaagatgtttatgtttacatttctcatggtgtcttaagtggagatgctgtgaaatctattaaaaattctccaatcaaaaaacttgtaattacagacacaattaataatgagaataaagtaagatccgcaaaaaatattgaaattttgtcaatttctaacttaatgggtgaagcaattagaagaatttcaaattctacatctgtttcatttttgtttaaataat

SEQ ID NO: 253345 - DNA, 949 bp, Unknown
  Bacterial polypeptide expressing nucleotide sequence isolated from the Sargasso Sea
tatgcaaagaaacaaactgaaaatatttagtggacgtagcaatccaagacttgcagaaaatatcgctaaatcgctagatagacatttaggagaaatatccataagaactttctctgatggtgagatttgggttaagtatgaagaaaacatcagagggtgcgatgtttttattattcaatcaactaatgggccatcagaaaatataatggaacttgcacttcttgttgatgctgctgttagagcctcagcagatactgtgacggtagtaatcccttattttggttatgggcgacaagacaggaaagatcagcctagagttccaatatcttcaagagtgattgtagatattttaacagcactaggtacgaacagaatcattactttagatttgcattctactcagatacaaggctttgcaaacattccatttgataatctttatagtagaactgtcttatatgatgcaataaaagaggaaggctttaatcctgaagagacagttgttcttgcgcctgatattggttctgttaaaatgagtcaaagctatgcaaagacactggggatgcatttcgcattaattgataaaaggaggttcgcaccaaatcaggcagaggttaaccatttgattggagatttggaaaatttagatgtgttgataattgatgatatgattgatacagccggaacaactgttaatgcttctaaagcagcgatggaaaaaggtgcaaagtctgtaactgcagtcgcaactcatggagtgttatcgggtcctgcaattaagagactcaatgattctgatattaataaaatcataattactgataccatatcaaatgataaaaagagaaaaacagacaagataaaagttgtttctgttgcaaaaatatttggagaagctgtcaatagagtacataatggggaatccgttagtgctttatttgaattttaa

SEQ ID NO: 253346 - DNA, 325 bp, Unknown
  Bacterial polypeptide expressing nucleotide sequence isolated from the Sargasso Sea
tatgaaaaatacacaaaaaggaccgcttattataagtggaaatgctcataacaatcttgctattgatattgccaactacattggacaagacttaaccaaagcagaggtctttaaatttaataatgacaatacatttgtaaaaattcttgaaaatgtcagagaaagagatgtttttattattcaacctactgcttttccagtgaatgataatattatggaacttcttataatgatagatgctgctaaaagagcatctgcaggtagaataacagctgtgattccttatttttcatatgcaagaaccgataaaaaagaccagccaagg

SEQ ID NO: 253347 - DNA, 934 bp, Unknown
  Bacterial polypeptide expressing nucleotide sequence isolated from the Sargasso Sea
atgaaattattatccggaaatagtaacaagccattaagcaaagatattgccaaatatctaaaatctaagttagttaattctagtataagaaatttttccgatggtgaaatctatgtagaaattaatgaaaatattagaggaaatagtatttttttaattcagtctatttcatctcctgcaaatgataacttaatggaactactattgtgcattgatgcacttaagagatcgtctgcaaaaaatattactgctgtcatcccttactttggttatgcgagacaagatagaaaagttgcaccaagaacatccatatcagcaaagcttgtctcaaatctaatcactaaagcgggagcagatagagttgttaccgttgatttgcatgcaggtcaaattcaaggattttttgatattccagtagacaacttgtttgcaacacctatttttgcaagacatgcaaaaaaaaagataaaaagtaaaaatacaatttgtgtagctccagatgtaggtggcactgaaagagctagagcactaggaaaaattttaaatgtcggattggctattgtagataaaagaagaccaaagccaggtcagtctcaagtaatgaacattattggggatgtaaaaggaaaaacttgtatcattgttgatgatattatcgattcaggtggtacaattgtaaatgcagctaaagctcttaaagatagaggtgctaaagaagtttatgtttatataacgcacggtgtgcttagtggtgaagctgtaaaaaaaataaaaaattctgtaattaaaaatttagtaataactgacaccattgacaacatgaacagagttaaaggtgctaaaaacattgaggttctgtcaatttccagccttatgggtgaagcgattaaaagaatatctaattcaacctcagtatcagatttattcaaataaa

SEQ ID NO: 253348 - DNA, 934 bp, Unknown
  Bacterial polypeptide expressing nucleotide sequence isolated from the Sargasso Sea
aatgaaaattttatcaggaacgagcaacccttcactaagcaaaagtataagtaaacagcttaagcttaaattaattaacacaaatatcaaaaattttgcagatggagaaatatatgttgagattaatgaaaatataagaggaaatagtgtatttgtagttcaatctacatctacgccggcaaatgataatttgatggaattgctcttatgtatagatgccttaaaaagatcttcagccaaaagcgtaacagctgtaattccatattttggttacgcaaggcaagatagaaaagttgtacctagaacctcaatttctgcaaaggtagtatcaaacttaattaccaaagccggtgccaataggattgttacagtagatttacatgctggtcagattcaaggtttttttgatatgccggtagataatttgtttacaacccctttatttgcaagatatataaaaaaaaatattaaaagcaaaaatttgacatgtgtatctccagacgcaggaggaattgaaagaacaagaggtttggcaaaaaaaattaacgccgatttggcgattatagataaaaggaggccacaagctggaaagtctcaagttatgaatgttattggtgaaataaaaaataaaaattgtattattgtggatgatattattgatagcggggggacaatagtaaatgctgttgaagctttgattaaaaaaggagctaaggatgtccatgttttcgtaacgcatgctgttcttagcggggacgcagtaaataaaattaaaaagtctaaaataaaaaaattaattattaccgatactatagataatagtagaagaataaaaaatgttggtaaaatacaagtattatcaattgctcctcttatggcagaagcaataaagaggatttcaaactctacatctgtgtcagatctattcaattaa

SEQ ID NO: 253349 - DNA, 527 bp, Unknown
  Bacterial polypeptide expressing nucleotide sequence isolated from the Sargasso Sea
aatgaaattattatctggaactagcaataagcctctcagcaaggacattgcaaaatttttaaaatctaaactagttaattcaagtatcaagaattttgcagatggtgaaatatatgttgaattaaatgaaaatataagaggaaatagtattttcataattcagtctatctcttctcctgctaacgataatctaatggaacttttgttgtgtatagatgctcttaaaagatcttctgctaaaaatataacagcagttattccatattttggttatgcgagacaagatagaaaagttgttccaagaacatctatttcagcaaaacttgtctcaaatttaataacaaaagctggtgcagatagagttgtgacagtagatttgcatgcaggccaaattcaaggattttttgatattccagtagacaatttattttctacacccatttttgcaagacatgtaaaaaaaaatattaaaagtaaaaatatagtatgtgttgcacctgatgttggtggtactgaaagagcaagag

SEQ ID NO: 253350 - DNA, 955 bp, Unknown
  Bacterial polypeptide expressing nucleotide sequence isolated from the Sargasso Sea
aatgaaaaataagagtgtagacatttttactggtacagctaatcctgaatttgcacaggaggtctctgatattctgggtatcaaaatttctgctgctgatgttggatatttttctgatggagaattaaaagttgaaatcgaagaaaatgtaagaggacacgatacatttattattcagtcaacctgctctcctaccaataaaaatgttatggaaatcatgttaattgctgatgcgttgaaaagatcatctgcatctagaatcactgctgttgttccttactatggctatgcaagacaggatagaagagttagatctgctagagttcctataagtgcaaaagttgttgcagatatgtttgcatctgttggaattgatagagttctaacaatagatcttcactcagaaactattcagggtttttttgatatgccagctgataatgtatatgccactaaatttatggtcgatgatataaaagaaaataatgatagaaatgaggttgtagttgtatcacctgatgtaggtggtgtagtaagatcaagagctttagcaaaactgctggatgatacagacctagcaattattgataaacgaagagctgcggctaatcaatcagaagtgatgaatataattggcgaagttcagggtaaagtctgtattgtaccagatgatattattgatacagctggaacattatgtaatgctgcagaagctttaaaaaataatggtgctaaagcggttaaagcctatataacccatcctgttctttcaggacctgcaatagaaaggctaaataagtctgctatagatgaattagttgtaacaaattcaatacctttaaacaaagaggctaaaaaatgcagtaaaatacgcgtcatttcaattgcaaatataattgctgaatgtattacacgtttaagcaatgaagaatcgcttagtgaaatgtttttatag

SEQ ID NO: 253351 - DNA, 961 bp, Unknown
  Bacterial polypeptide expressing nucleotide sequence isolated from the Sargasso Sea
aatgattaataaacaaacagttggaatcttctcaggctcagcttcaaaagttttatctgaagaagtagcaaaaatactaggcataaagctaggtgaaattgatttaggtaaattttcagatggagaaattaaggttgaggttttggaaaatgtccgagggcatgaagcttatatcattcaatcaacgtgctctccatctaatgcaaatttaatggaattaatgttaattacggatgctttaaagcgctcatctgcatcaaaaattacagcaattcttccttattatggttatgcacgccaagatagaagagtaagatcagcaagagttccaataagtgcaaaagtaattgcagatatgttgaattctgttggcgttgatagagttctgacagtagatcttcattctgaatctatacaaggtttttttgatatgccagctgataatgtttacgcaacaaaaatcatgcatgatgatattaagtctagaacagcaacagatgagcaaatacttgttgtctctcctgatgtaggtggtgttgtaagagcgagggcattggcaaaatttctagacgaatctgatttagcaattattgataaacgaagagcttcatcaaatgaatcagaggttatgaatataattggagacgttaagggaaaaagctgtattgttcctgacgatataatcgatacagctggcactttatgtaatgcagctaaggctctaaaagatgctggtgctgctaaggttaaagcatatatcactcatccagtattatctggaccagctattgaaagaatttctgattcggctatagatgaattagttgtaaccaattcaatttctttatccccagaagcagaaaaatgcagtaaaatacgcgtcatttctcttgcccctacaattgcagagtgcattagaagattaaacaatgaagagtcgcttagtgctctatttttgtaa

SEQ ID NO: 253352 - DNA, 931 bp, Unknown
  Bacterial polypeptide expressing nucleotide sequence isolated from the Sargasso Sea
gatgtataaagaaagtgtcctaatgaaaattttatcaggaacaagtaatcccacactaagcaaaagtatatctaagcatcttaaaacaaagcttgtaaatacaaatattaaaaaatttgcagatggcgagatatacgttgagattaacgaaaatattagaggtaacagtgtgttcgttatacaatcaagtgcaaccccagctaatgataatcttatggagcttttattatgcattgatgctcttagaagatcttctgcaaaaagtatcactgctgttattccatattttggttatgcaagacaagacagaaaagttgtcccaagaacctctatctcggcaaagctggtgtccaatttaattacaaatgctggtgctcatagagtggttactgttgacctgcatgcaggtcaaattcaaggattttttgatatgcccgtggataatttatttactacgccaatttttgcaagatttataaaaaaaaatataaaaagtaaaaattttatttgtgtttcacctgatgcaggagcaatagagagaacaagagccctggctacaaaaattaatgctgacttagctataattgataaaagaagacctgaaccaggtaagtctaaagttatgaatattattggaaatgttaaaggtaaagattgtattatcatagatgatataattgatagtggaggaacaattataaatgctgcagatgctttagtaaaaaaaggtgcgagaaatgtttatgtttttattacgcatgctgtattaagtggagacgcagttaaaaatattcaaaaatctagaataaaaaaattgataattacagatacgatagataattcaaataaaattaagaaagctaacaaaatacaagttttatctatttcacagctaatggctgaggcaataaagaggatttcgaattcaaca

SEQ ID NO: 253353 - DNA, 934 bp, Unknown
  Bacterial polypeptide expressing nucleotide sequence isolated from the Sargasso Sea
atgaaattattaactggaaatagtaataaaattttaagtaaaaatattgctaaatatttaaaatcaaaacttgtgaactcaagtattagaaaattttcagatggtgaaatctatgtagagattaatgaaaatataagaggaaatagcatttttattattcaatctatatcttcaccagcaaatgataatttaatggaattattattatctatagatgctttaaagagatcctctgctaaaaacattacagcagttattccatattttggctatgcaagacaggacagaaaggtagtacctagaacatcaatatctgcaaaattagtttcaaatttaattactaaagctggtgctgatagagttgttactgttgatttgcacgctggtcaaattcaaggcttcttcgatattcctgtagataacctatttgctacaccaatatttgcaaggcatgtaaaaaagaaaataaaaagtaaaaaaattatttgtgttgcacctgatgttggtggaactgagagggctagagctcttggaaaacttcttaatgttggtctagctattgtagataaaagaagaccaaaagctggacaatcacaagtaatgaatgttattggagatgtaaaagataaaacttgcataattgtagatgatataattgattcaggtggtactataataaatgcggctaaagctttaaaaaacagaggtgctagagaagtttatgtttacattactcatggagttttaagtggtgatgcagttaaaaaaataaaaagctctgtaattaaaaatttagtgattaccgacacaatagataatgggaaaaaaactcaaaatgttaaaaatatagaagttttacctatttctggccttatgggagaggctataaaaagaatatctaactcaacttctgtttcagatttatttaaataat

SEQ ID NO: 253354 - DNA, 316 bp, Unknown
  Bacterial polypeptide expressing nucleotide sequence isolated from the Sargasso Sea
atgttaaagcctgctaaaaatcttattttattttcaggtaatgctaacaatgtgttagctggaaagattgctaaaaaacttggtaaaaatttaggaaaagctgaagtaaaaagattcagcgatggcgagtcagatgtaaggataaacgttaatgtcagaggaaaggatgtattcataatccaatcaacttgttctcctgcaaatgaaaatcttatggagttatcaattatgatagatgctttaaggagagcatctgcatccagaattactgcagtgattccctattttggttatgccagacaggatcgaagagtta

SEQ ID NO: 253355 - DNA, 856 bp, Unknown
  Bacterial polypeptide expressing nucleotide sequence isolated from the Sargasso Sea
aatgaaaaataataatttaaaaatctttagtggacgaagtaatattgatcttgctactgatatagcaaaatctcttaaacaagacttaggagctatttctattcgaacattctctgatggtgagttatgggtaaaatatgaagagaatatacgaggctgtgatgtttttattattcagtctaccaacgggccatctgaaaatattattgaattggcattaatggttgatgctgcagtcagagcttctgcagatactgtaaccgttgtaattccatattttggctatggaagacaggatagaaaagaccagccacgtgttcctatttcttcacgtgttatgatagatattttaactgcaatgggtgctgatagaattattactcttgatctccactcaactcaaatacagggttttgctaaaattccttttgataacttatatagcagagcagttctatttgatgcaattaaaaatgaaaacctagagccaagcacttctactgttttagcgcctgatgttggttcagttaaaatgagccaaggttatgcaaagaacttaggtatgcattttgcacttatcgataagcgacgttttgccccaaaccaagctgaggtaaatcatctcataggtgagttgaaaggaatggacgttctaattattgatgatatgatagacacggctgggacaattgttaatgccgccaaggaagcgctcgatgaaggtgcaaaatcagtgactgtagttgctactcatggcgtattgtccggtcctgcaattgaaagattaaaaacagcaagcataaaaagaatcatactcacagatactatatcaattcctctggaaaaacgacttgat

SEQ ID NO: 253356 - DNA, 934 bp, Unknown
  Bacterial polypeptide expressing nucleotide sequence isolated from the Sargasso Sea
aatgaaattattatctggaaatagcaacaaaccattaagtaagaaaattgctaaatatctaaaatctaaattggtcaattctagcattaggaatttttctgatggggagatttatgtggaaattaatgaaaatattagggggaatagtatttttttaattcaatctgtttcatctcctgcaaatgataaccttatggaactactattgtgtattgatgcacttaagagatcgtcagcaaaaaatattactgctgttatcccttactttggttatgccagacaagatagaaaagttgcaccaagaacatcaatatcagcaaaacttgtctcaaatctaattactaaagcaggagcagatagagttgttactgttgatttgcatgcaggacaaattcaaggattttttgatattccagtggataacttgtttgcaacaccaatatttgcaagacatgtaaaaaaaaagatgaaaagtaaaaatctaatttgcgttgcaccagatgttggtggaactgaacgagcaagagcgctaggtaagctcttaaatgttggattagcaattgtagataaaagaagacctaagccaggtcaatctcaagtaatgaatattattggagatgtgaaaggaaaaacttgtattcttgttgatgatattatcgattcaggtggaacaatagtaaatgcagctaaagctcttaaagatcgaggtgctaaagaagtttatgtttacataactcacggtgtacttagtggagaggctgtaaaaaaaattaaaaattctgtaattaaaaatttggtaataactgatacaattgataacatgaacagggttaaaggtgctaaaaacattgaggttctgtcaatttctagccttatgggtgaagcgattaaaagaatatctaattcaacttcagtatcagatttattcaaataa

SEQ ID NO: 253357 - DNA, 658 bp, Unknown
  Bacterial polypeptide expressing nucleotide sequence isolated from the Sargasso Sea
aagacaagaccgtaaagttgctcctagaacatctatatccgcaaaactagtttctaatttgataactaaagctggtgcagatagaatagtaactgttgatttgcatgcgggacaaattcaaggattttttgatataccagttgataacttattcgctacacctatctttgcaagacatgtgaaaaaaaaattaaacaaaaaaaatttaatttgtgtagctccagacgttggtggagtggaaagaacaagggcactagcacgaaaattagatgttggaatttctataatagataaaagaagacctacaccaggtaaatctcaggtaatgaatgttataggtaacgtcaatggaaaaacttgtattatagttgacgatataattgactctggaggaacaattgtaaatgctgcacatgctttaatagaacgaggagcaaaagaagtacatgtttatattactcatggagttttgagtggggaggctgtaaataaaattaaaaaatcaaaaataaaaaatttggtaattactgatactatagataattttagtaagattaaaaaagctaagaatattgaggtattaacaatatccaacttattagctgaagccattaaacgtatttcaaattctacttctgtatcggatttatttaaataa

SEQ ID NO: 253358 - DNA, 934 bp, Unknown
  Bacterial polypeptide expressing nucleotide sequence isolated from the Sargasso Sea
atgaaacttttaacaggaaacagcaataaacaactcagccaaaaaatatcgaaacatttaaaaacaaaattagttcattctagtattagaaaattttctgatggtgaaatctatattgaaattaatgaaaatataagaggtaacagtattttcttaattcaatctagctcggcgcctgcaaatgataacttaatggaactattgctctgcattgatgcattaaaaagatcatcagcaaaaaatattacagctgttatcccctactttggatatgcaagacaagatagaaaagttgctccaagaacatcaatatctgcaaaattggtttcaaatttaataactaaggcaggagcagatagaattgtaactgttgatttgcatgcgggtcaaatacaaggtttttttgatattccagtggataacctgtttgcaacaccgatttttgcaagacatgttaaaaaaaatataaataaaaaaaatttaatttgtgtagctcctgatgttggtggagttgaaagaacaagagctcttgcaagaaaattagatattggaatagccataatagataaaagaagacctgctccaggaaaatctcaagtaatgaatgttattggaaatgttaaaggtaaaatttgtataatcattgatgatataattgattcaggcggaacaatagttaatgcagcacaagcattgataaatagaggtgctaaagaggtacatgtttatataacacatggtgttttaagtggtgaggcagttgatagaattaagaaatctcgaattaaaaaattagttattacagatacgattgataactcaagcaaaataagaaatgctaagaatattgaggtattaacgatatctaatttattagcggaagcaattaaaagaatttctaattctacatcggtttctgatttgtttaaataat

SEQ ID NO: 253359 - DNA, 964 bp, Unknown
  Bacterial polypeptide expressing nucleotide sequence isolated from the Sargasso Sea
cctgctaaataaggcgaagggaagtttaaaaatgaaattagtatctgggaattcaaatagaaatttagccgaaaatatcggtaagtatttaaatacacctctagcagattgcactgtcaaaaaattctctgataaagagatctttattgaaatgaatgaaaactgtaggggtgaagatgtttttattattcaatcaacatcttttcctgcaaacgataatttgatggaactactaatccttatagatactttaaaaagagcctcagctaaaagaattactgctgttattccttattttggttatgctagacaggacagaaaacctggcccaagaacgccaatcactgctaagttagtagcaaatcttattgctaaatctggagcagatagagtgttaagtatggatttgcatgcaggtcaaattcaagggttttttgatataccaacagataatctcattgctgcgccaattctattatcagacatacaaaataagataggaacaaataatgcaatggttgtatcacctgatgtaggtggagtggtaagagctagacttattgcaagcagaattgattctgatttagctatagttgataaaagaagagaaaaagcaggagaatctgaagtaatgaatattataggtgatgtaacagatagaacttgtttcatgattgatgatatcgttgattcagctggaactttatgcaatgcagcagaggcattaataaatgcaggagctaaagaggtttatgcgcatgtcacacacggtgttttatctggtgaagctataaaaagagtaaataattcagcgcttacaaaattagtaataacagacaccataaacgagaccgacgatatcaagaattctgataaaatagaaatagttagtgttgtacatctccttggtgaggcaattagaagaatttccgaggaaagatctgtatcgagtttgtttgattaa

SEQ ID NO: 253360 - DNA, 934 bp, Unknown
  Bacterial polypeptide expressing nucleotide sequence isolated from the Sargasso Sea
atgaaacttctaacaggaaatagtaataaaaaattaagtggaaaaattgctaaatatttaaaagaaaggctcgtcaattcaagtattagaaaatttaaagatggggaaatatatatagagattaatgaaaatattagaggtaataatatttttattattcaatcaatctcatctccagctaatgataatctgatggagatgttattatgtatcgatgctttaaaaagatcatctgcaaaaaatatcactgctgtaattccttattttggatatgcaaggcaagatagaaaagttgtgccgagaacatctatatcagcaaaattagtttctaatttaattactaaagctggtgctgatagagtcgtaacaatcgatttacatgcaggacaaattcagggtttttttgatataccagtagataatttatttgctactccgatatttgcaagacacataaaaaaaagaattaaatcaaaaaatataatttgcgtgtcaccagacgttggtggtgtagctagaacaagaggattaagtaagtttcttaattcaggtttagcgattatagataaaagaagaccttctccaggaaaatctgaagtaatgaatgttataggaaatgttaaagataagtgttgtattatggttgatgatataattgactcaggaggtacaattgtaaacgctgctaaagttctaaaagaaaaaggtgcaaaggagatacacgtttacataacacatggggtattaagtggtgatgcagttaataaaattagaaaatcaactattaaaaatttagttattacagacacaatagacaattataacaaaataaaaaacgctaaaaatattgaaattttgtctgtatcaaatttaatgggtgaagcaataagacgtatttctaactcaacatctgtatcttttctgttcaaataat

SEQ ID NO: 253361 - DNA, 943 bp, Unknown
  Bacterial polypeptide expressing nucleotide sequence isolated from the Sargasso Sea
gatggcaaatcaggatccaatagcaaaaatcttttcatgtacacaaagtatagagctttctaaaaaaattgctaaacatttcggtgctgaactaggtaatgtaaatttttctcactacagtgatggagagtttcaaccatcattcgaagaatcagtaagaggagctagattatttataatcggatctactcaaccaaactcagaaaatttgatggaacttctcttaatgatagatgctgccaaaaggtcctctgcaagacatattacagctgtaataccatattttggttgggccagacaagatcgtaaggataaacctagagtcccaattggtgcaaaattaatagctaacctaattgaagctgcaggtgctacaagattaattacaatggatttgcatgccgatcaaatacaagggttttttgaaaaacctgtcgaccacttatatgcatcaactattttcatcccttacattcaatcattaaacctaaaaaaacttacaattgcatcacctgatatgggtggttctaaaagagcatatgcttactcaagattcttaaaaagcaatgttgttatctgctacaaacaaagaaagaaagctaatgtagtttctcatatggaactaattggtaaagttgaaggtaaaaatgttatcattgtagatgatatggtagatactgcaggaacccttacaaaagctgcagatttaatggtagaaagaggtgcaaaatcagttagagctatatgtactcatggcatactttctggaaaagcttatgaaaatatagaaaaatccaagttaaaagaattgatagttacagattctatcgctcaagaaaaaaaatctagtaaagttaaagtgctttcatgtgcaaaattatttgccgatgtaatgcataatgtaaatagtaataaatcaattaattcattttttataaaataa

SEQ ID NO: 253362 - DNA, 937 bp, Unknown
  Bacterial polypeptide expressing nucleotide sequence isolated from the Sargasso Sea
aatgaagattattgcctgcaatagtaataaaattttagctgaagcaatttgctcatacattggggttgatttagcaaatgcctcacttagaagatttgcagatagagaaatatttgttgaaattaatgaaaatataagaggagaagatgtttttataattcaatcaacatcacatccagctaatgatcatcttatggaattattaattacaattgatgcagctaaaagaggttcagcaaaaagaatcactgccgttattccttattatggatatgctcgtcaagatagaaaaacgggaccgcgcactcccattactgcaaagcttgtggcaaatttaattacatcagcaggagctcatcgcgttttaacaatggatttacatgcaggacaaatacaaggtttttttgatattcctcttgataatattttttcagctccaccaataataaaagatatgaaagaaaaattctcaaaaaattctaatttagtcattacgtctccagatgttggtggtgttgtgagagctagagcttttgctaaaaggttaaatgctggtttagcaattgctgataaaagaagagaaaaagctggagagtctgcagtaatgaatattatcggtgatgtaaaaggaaagacatgtattttattagatgatattgctgactctgcgggcactttatgtaatgcagcaaaagctcttaaagatagtggtgcaatggaaatatattcatatattgcacatggagtcttgtcaggcgaggctttaaatagaatagaaagttcagccattaaagagctagtcctcacagatagcattgaagcatcaaatgaggttaaaaatacaaaaaatattagacatatcagtattgctcctttaatgggagaggccataaaaaggatcaacagtgattcatctgtttcagccctttttgactaa

SEQ ID NO: 253363 - DNA, 937 bp, Unknown
  Bacterial polypeptide expressing nucleotide sequence isolated from the Sargasso Sea
atgaagattatttcttgcaatagtaatcaagaattagcaaaatcaattgcctcatatattggtgtaaatttagcagatgcatccatgcgtaaattttctgatgatgaaatttttgttgaaatcaatgaaaatattcgtggagaagatgttttcataattcaatctacttctcaccctgcgaatgatcatctaatggaattattaataagtatagatgctgcaaagagaggttcagcaaaaagaataactgcagtaattccatattacggatatgctagacaagataggaaaactggccctaggacacctataacagcaaaattagtcgcaaatttaatcacttcagccggagcagatagagttttaacaatggatttacatgcaggacaaattcaagggttttttgatattcctcttgataatattttttctgcccctccaatcattagagatatgaaagaaaaatttgctggaaataatgaccttgttatttcttctccagatgtaggtggagtggtaagggctagagcttttgccaaaagattaaatgcagggcttgcaattgctgataaaagaagggaaaaagctggtgaatctgaggtaatgcatataattggtgaggttaaagataaaacttgtattttgctagatgatatagctgattcagcaggtacattatgtaatgcagccaaatctcttaaagaacatggggcaagagaaatttattcttatattgcacatggagtattatcgggaaaagcactggaaaaaatacaaaattcaaacatcaaagaactcgtattaacagacagtattctagcatcggatgcagtaaaaaaatcaaaaaatattagacatattagtattgctcctttaatgggggaggcgattaaacggattaatagtgactcttctgtctctgctctgtttgattagt

SEQ ID NO: 253364 - DNA, 943 bp, Unknown
  Bacterial polypeptide expressing nucleotide sequence isolated from the Sargasso Sea
atggcatctcaggaaccaattgctaaaatatttacgtgtactcagagtcatgaattatcaaaaaaaattgctgaacattatggggctaaacttggaaatgtaaatttttctcactacagtgatggtgagtttcagccatcattcgaagaatcagtaagaggggctagattatttataatcgggtctactcaaccaaactcggaaaatttgatggaacttctattaatgatagatgctgccaaaaggtcctcggcaagacatattacagctgtaataccatattttggttgggctcgacaagatcgtaaggataaacctagagtcccaattggtgcaaaattaattgctaatttgattgaagctgcaggtgctacaagattaattacaatggatttgcatgccgatcaaattcaaggattttttgaaaaacctgttgaccacttatatgcatcaactattttcatcccttatatccaatcgctgaagttaaaaaaattaactattgcatcacctgatatggggggttctaaaagagcatatgcctactcaagatttttaaaaagtaatgttgttatttgctataagcaaagaaagaaagctaatgtggtttcgcatatggaattaattggtaaagtagaaggtaaaaatgtcataattgtagatgatatggtagatactgcaggaaccctaacaaaagctgcagatttaatggttgaaagaggtgctaaatcagttagagctatatgtactcatggtatactctctggaagtgcttatgaaaacatagaaaaatccaagttaaaagaattgatagttacagattctatcgctcaagaaaaaaaatctagcaaagttaaagtgctttcatgtgcaaaattatttgcagatgtaatgcaaaatgtaaatagtaataaatcaatcaattcattttttataaaataaa

SEQ ID NO: 253365 - DNA, 949 bp, Unknown
  Bacterial polypeptide expressing nucleotide sequence isolated from the Sargasso Sea
tatgagcaatagggtactttttacaggtaattcaaatatagatctagcaaagaaagttgctaagaatctagaaacagatcttggcccaatgaaagtgggaacttttagtgatggtgaaataaatgtagaagttaatgagaatgtaagaggtaaagacacttttattattcaatctaccagtaatcctgctgagaaaaacttaatggaattaattctaatggtggatgctttgaaaagagcttcagcaagatctgtaacagctgtaattccctactttggctactcaagacaagacagaagagtgagatctgcaagagtacccataagtgcaaaggttattgcagacatgttaagtgaagttggaatttctcgaataattactttagatattcactcagagcagatacaaggattcttttcattcccagttgataatatttataccgcaaacatcatggtgaagggcttacttgaaaaatatgatgttgaggatctacaagttgtatcaccagatacaggtggagttattagagctagatcagtagctaagacattaggagtgcaagatcttgcaataatagataaaaggcgagagaaagcgaatgaatcagaagtaatcaatcttataggtgatgtagaaggaaaagtgtgtatagtgccggatgatttgattgatacagccggaacattaagtaatgcgagtcatgctctaaaagacaagggagcaaaagaaataattgcctatattacacatccagtattatcgggcgatgctattaagaatttaaacaattctgcaatagataaattggtagtatcaaactctatcgatattggtgacaaatctaaaaaatgccctaaaatagacgtctttgatatatcacctatattgtcagaggcaattacgcgtatagcaactggtgattcaattagcgaattatttaaataa

SEQ ID NO: 253366 - DNA, 682 bp, Unknown
  Bacterial polypeptide expressing nucleotide sequence isolated from the Sargasso Sea
ccttattttggctatgccagacaagacagacgagtaaggtcagcaagagttccaataagtgctcgtgtaattgctgaagttttaactagtgttggcatttctagagttattactctcgatattcactctgaacaaattcaaggtttcttttcttttccagtagataacatttacacatcaaatattatgtgcaaagaaattattgggaaatataaagttgaagatttacaggtagtttcaccagatactggtggtgttataagggcaagatcagtggcaaaaacgcttggtgtcaaagatttagcgattattgataaaagaagagaaaaagctaatgaatcagaagttataaatctaattggtgatgtaaaagataaagtttgtatagttccagatgacttaattgatacagcaggcactctaagtaatgctagccatgcattgaaggcagagggtgcaagagaagttatagcatatatcactcatcctgtgctctcgggaaatgctatcgaaaatttgaataaatcagctattgataggcttgtggtgtcaaactctattgatattggtgacaaatcagaaaaatgtcctaaaatagacgtctttgatatatcgccaataattgctgaatcaattaaaaggatcacaacaggcgactcaataagcgaactttttaaataat

SEQ ID NO: 253367 - DNA, 661 bp, Unknown
  Bacterial polypeptide expressing nucleotide sequence isolated from the Sargasso Sea
catgaaaatcttatctggaacaagtaatttaaagctcagtaagagtattgcaaaaaatcttaaattaaaattaattaataccaacatcagaagattcgctgacggagaaatctatattgaaatcaatgagaatattaggggtaatagtgtttttgtagttcaatcgacttgcgaccctgcaaatgacaatattatggaactgctgctagtgattgatgcattgaaaaggtcatctgctaaaacaattactgcagtcattccttattttggttatgcaagacaggatagaaaggttgctccaagaacttcaatttctgcaaaagtaatggcaaatttaattacaaatgctggcgcaactagagtggttacagtagatcttcacgcaggtcagatacaaggtttttttgatatgccagtagacaatttatatacagctccattgtttgcaaaatatatcaaaaaaaaattgggtaataaaaaactgatttgtgtatctcctgatgtaggtggggttgcaagaaccagagatttagccaatagaataaaagctgatctggcaataattgataaaagaagaccagcacctggtaaatccgaggtgatgaatattctcggtgaagtaagaaataaaacttgtattatagttgatgatataattgac

SEQ ID NO: 253368 - DNA, 955 bp, Unknown
  Bacterial polypeptide expressing nucleotide sequence isolated from the Sargasso Sea
atgaagaaagaaaaactaattctttttgcgggtccggcatcaaaagacctgggttcacagattgcaagatatttgaatgaaccgctgggattcattcaagttggagcgttcagcgatggcgaaaccaccatcgaaatctcgcaaaatattcgaggaatggacatattcttggttcaatccacctatcaaccaggcaatgagcatctgatgcagctcttattgatggccgatgcatgcaaaagggcgtcagcaaattcagtgtcagctgtcattccttattttggttattcccgacaagacagaagaccaaggaacacgaggggacctgtttctgcaaaactggtggcagatctgattgagacagctgatatcaaaagagtaatcacagtggatcttcatgctgatcagatcgaaggttttttctcaattccagtcgataatatttattcttcaaccatcctaatgagcgacatgtggagacagggctatcccgatcaagtgattgtgtctccggacgtgggtggcgtgcaaagggcgagagcaatagccagaagactgggcaatgcaggacttgcaatcattgataaaagaagagaggcagccaataaatcagaagtcatgaatatcattggcgatgtcgatcagaagacagcaatcatatttgatgacatggtcgatacagccggaacgctttgtaatgcagcagcggccttgaaagagaagggcgcgctaaaaacagtagcttatgcagcacatccagtgctctcaggaccagcaatagagagaattgccgattctgaacttgatgagctggttgtgaccgatacgattccgctgacacaggaagcaaaagataccggcaaaattagacaacttacaattgctgagcttctgggcgaaacaatagagagaattgtggccgatcaatctgtcagttctctttatgcagaatagg

SEQ ID NO: 253369 - DNA, 955 bp, Unknown
  Bacterial polypeptide expressing nucleotide sequence isolated from the Sargasso Sea
atgagcaaagataaatttgatctttttacaggaactgcaaatcctgagctcgctaatgaagtatcaaaaatacttggaatacctctttcggctgcagatgttggctatttttcagatggcgaaatcaaggtacaaattgaagataatgtaagaggtcatgatacctttataatccagtcaacttgtactcctcaaaataaaaatttaatggagctaatgttgctagcagatgcattaaaaagatcatctgcttctaggattactgcagttgtgccttactatggttacgctagacaagatagaagaattcggtctgcgagagtacctataagtgcaaaagttgttgctgacatgttctcatccgtaggaatagatagagttttaactattgatcttcattctgaaagcattcaaggtttttttgatatgccagctgataatgtttatgcatcaaagcttatggtggatgatattaaagataataacgaaagaaaagatattgttttggtttctccagatgttgggggtgtggttagaactagagcaatagcaaaattattagatgactcagatttagcaataattgacaaaagaagagctgctgccaatcagtctgaagttatgaatataatcggtgatattgaaggtaaggtatgcatagtgcctgacgatataattgatacagcaggtactttatgcaatgcagctaatgcattaaaagaaaaaggtgctaaagcagtaaaagcttatattacgcatccagttctttctggtcccgctatagagaggttagaaaaatcagatatcgatgaattagtggtaacaaattcaattccattgtcacaagaagctcaaaaatgcagtaaaatacgcgtcatttcgctaggatcaacaattgctgaatgtataaagcgtttaagcagtgaaaaatcactaagtgaaatgtttttataga

SEQ ID NO: 253370 - DNA, 308 bp, Unknown
  Bacterial polypeptide expressing nucleotide sequence isolated from the Sargasso Sea
aaaggtttgtattgttcctgatgatattattgatactgctggaactctttgtaacgcagccattgctttaaaagaaaaaggtgctaaagctgtaaaagcatacattactcaccctgttctatcaggtccggcaattgaaagaataaatgattctgctatagacgaattggtagtcacaaattcaatccctttaaacaaagaggcacaaaaatgcagtaaaatacgcgtcatttcaatagcgaatataattgctgaatgtataactcgtttaagcaatgaagaatcattaagtgaaatgtttttataga

SEQ ID NO: 253371 - DNA, 955 bp, Unknown
  Bacterial polypeptide expressing nucleotide sequence isolated from the Sargasso Sea
atgaagaaagaaaaactaattctttttgcgggtccggcatcaaaagacctgggttcacagattgcaagatatttgaatgaaccacttggtttcattcaagttggagcgttcagcgatggcgaaaccagcatcgaaatctcgcaaaatattcgaggaatggacgtattcttggttcaatccacctatcaaccaggcaatgagcatctgatgcagctcttattgatggccgatgcatgcaaaagggcgtctgcaaaatcagtgtcagctgtcatcccttattttggctattctcgacaagacagaagaccaaggaacacgaggggacctgtttctgcaaaactggtggcagatttgattgagacagctgatatcaaaagagtgatcactgtggatcttcatgctgatcagatcgaaggttttttctcaattccagtcgataatatttattcttcaaccatcctaatgagcgacatgtggagacagggctatcccgatcaagtgattgtgtccccggacgtgggtggcgttcaaagggcgagagcaatagccagaagattaggcaatgcaggacttgcaatcatagataaaagaagagaggcagccaataaatcagaagtcatgaatatcattggcgatgtcgatcagaagacagcaatcatatttgatgacatggtcgatacagctggaacgctttgtaatgcagcagcggcattgaaagagaagggcgcgctaaaaacagtagcttatgcagcacatccagtgctctcaggaccagcaatagagagaattgccgattctgaacttgatgagctggttgtgaccgatacgattccgttgacacaggaagcaaaagataccggcaaaattagacaacttacaattgctgagcttctgggagaaacaatagagagaattgtggccgatcaatctgtcagttctctttatgcggaatagg

SEQ ID NO: 253372 - DNA, 526 bp, Unknown
  Bacterial polypeptide expressing nucleotide sequence isolated from the Sargasso Sea
catgaaaattttatctggaacaagtaatcctaaactaagcaaagaaatttcaaagcttcttaaactcaaacttgttaatacgaatattaaaagattttccgatggagaaatttatatagaaataaatgaaaatattagaggaaatagtgtatttgtaattcaatcaacttcaaatccagcaaatgacaatttaatggagttgctattgtgtatagacgctttgagaagatcatcggcaaaaaatatcactgcagttattccttactatggatatgctagacaggatagaaaagtagttccaagaacatctatatctgcaaaagttgttgctaatttaattacaaatgctggagctagtagagtggttacagttgatttacatgctggtcaaattcaaggattttttgatatgcccgttgataacctttttacaacccctttatttgcaaggtatatcaaaaaaaaattaaaaaataaaaaattaatatgtgtttcaccagaatgttggtggagttcaaagaactag

SEQ ID NO: 253373 - DNA, 556 bp, Unknown
  Bacterial polypeptide expressing nucleotide sequence isolated from the Sargasso Sea
catgaaattattatcaggaaatagcaataaacctcttagtaagaatattgctaaatatttaaaatctaaattagtcaattcaagtattagaaatttttctgatggtgaaatttatgttgagattaatgaaaacataagaggaaatagtatttttattattcaatctgtttcttcaccagcgaatgataatttaatggaacttttattatgtatagatgctttaaaaagatcgtctgccaaaaatataactgctgtaattccatattttggttatgcaagacaagatagaaaagttgtcccaagaacttctatttcagcaaaacttgtatctaacctgatcacaaaagcaggagcagatcgtgttgtaacagtagatttgcatgcaggacaaattcaaggattttttgatattcctgtagataacttgtttgctactcctatttttgcaagacatgttaagaaaaaaattaaaagtaaaaatatgatttgtgttgctccagatgtgggtggtactgaaagagcaagatctcttggaaaacttttaaatgttggtcta

SEQ ID NO: 253374 - DNA, 709 bp, Unknown
  Bacterial polypeptide expressing nucleotide sequence isolated from the Sargasso Sea
tttggattctgcatcaatagcaattatctcaggaaatgcacacccaaaattagcgcaagatatcgcaaaatatttgcatttaccactcactaaagctcaggtaggacgctttagtgatggagaatttaatgttgaaatacttgaaaatattcgtggtaaagacgcttatatagtccagtccacctgtccacctgctgctgaaaacctaatggagctacttgtaatgaccgatgcatgtaggagggcgtctgccaatcaaattacagccgtggttccttattttggttttgctagacaagatagaaggccaaggtcatcaagagttcctatcacagcgaaactggttgctagattatttgcatctgctggaattgatagagtgttaaccgtcgatcttcacgctgaacagattcaaggattctttgatattcctgttgataatgtttatgcatctccaatccttcttggtgatgcatggaagaaaaaacacaaaaaaatggtagtggtgtctccagatgtaggaggagttgttagaggaagagcgctagcaaaaagattggataatgctgacctagtaattattgataaaagacgatcaaaggcgaataaatcagaagtaatgaatatcataggcgatgtggaggaaaagaattgcatcatgatagatgatatggtcgatactgcaggaacattatgtcaagctgcagac

SEQ ID NO: 253375 - DNA, 955 bp, Unknown
  Bacterial polypeptide expressing nucleotide sequence isolated from the Sargasso Sea
gatggccacaaaaatattatcttgtaacagtaaccggccactagctgacgccatttcaaagtatatggaactccccttaacaaaagctgacgtaaaaagattttcagacatggaagtttttgttgaaattcaggaaaacgtcagaggcgaggatgtttttttaattcagtctacctcctcaccaactaatgacaatcttatggaattacttgttgccttagatgcattaaaaagaggttcagcaaatcgtataacagcggttatcccctactatgggtacgctcgacaagatagaaaatcgggtccacgaacacctatatcagccaaactagttgctaacctaataacggtcgcaggcgctcatagagtagtaactgtcgatctgcatgctggccaaattcaaggttttttcgatataccaactgataatcttttcgcagctcccgtatttcaatcggatatcaaagaaaaatatggagataaatcactagtcattgtgtcaccagatgtcggtggagtggttcgggctagagctcttgcgaagagtttagacgctgacttggcaattattgataagcgtcgagagcgcgctggtgtatcggaagttatgaatataatcggtgaagttgatgatagacattgtattctagttgacgatatcgttgactctggcgggacactgtgtaacgcagcggaggctctcatggctgcaggtggtttatcagtgtctgcttatataagccacggcgtgctatccggaggtgcggctgcacgaattaaagattctcctttaaccgaacttgttacaacagatagcattcaggcgaccgatgcggttctagcagctccaaatatgcgccagataacaatcgccccgttattaggggaagccatattgagaatcgctgagtcacgctcagtgtctagcctctttgattacaacacatctaattaa

SEQ ID NO: 253376 - DNA, 934 bp, Unknown
  Bacterial polypeptide expressing nucleotide sequence isolated from the Sargasso Sea
aatgaaaattctcacaggaaatagtaataagaatcttagcagcaaaatatcaaaatatcttaaaaacaaattggtaaactctagtattagaaaattttcagatggtgaaatttatatagaaataaatgaaaacataagaggcaatagtatatttattattcagggaatttcttcgcctgctaatgataatttaatggaactgttgctttgcatagatgctcttaaaagatcgtctgcaaaaaatattacagcagttattccttattttggatatgccagacaagatcgtaaggttgttccaagaacttctatatctgcaaaacttgtttcaaatctaattacaaaagcaggagcagatagaattgtaactgttgaccttcatgcaggacaaatacaaggattttttgatattccagttgataatcttttttctactccaatattcgctagacatattaagagaaaaattaaaagtaaaaatttaatttgcgtagcccctgatgttggaggagttgaaagaaccagagctttaggaagaaaattagatgttggtttagcaataattgacaagagaagacctgcgccaggaaaatcacaagtaatgaatgtaataggaaatgttaaaggcaaaacctgtataattaccgacgacataattgactctggaggaacaattgtaaatgcagcagatgcgttaattaaaagaggagccaaagaagtttatgtttatgtgactcatggagttttgagtggggaagctgttgaaaaaattaaaaagtctaaaattaaaaatttagttgtaacagacaccattgacaactcagataaagtaaaaaaatcaagaaatatagaggtattatcgatatcaaatttattggcagaagccatgagaaggatttctaattccacttctgtatctgatctatttaaataa

SEQ ID NO: 253377 - DNA, 955 bp, Unknown
  Bacterial polypeptide expressing nucleotide sequence isolated from the Sargasso Sea
tatgagtaatagcaactttgatatctttacaggatcagctaatcctgaattggcttctgaagtttcaaaaattcttggtatcgatatttctcatgctgatgttggggaattttctgacggtgaaataaaagttcaaattgaagataacgtaagaggtcatgacacatttataattcaatcaacttgcgcacctacaaataaaaatgtaatggaaattatgttaattgctgatgctctaaaaagatcatcagcatctaaagtaactgctatagtcccctactacggctatgcaagacaagatagaagagtaagatcagcaagggttcctataagcgctaaagttgttgccgatatgtttgcttcagttggtattgatagagttctaacaattgaccttcattcagaaactattcaaggtttcttcgatatgcccgctgataatgtgtatgcaacaaaattgatggttgatcatattaaagataataatgaaaaaaaagaagttatcgtcgtttctccagatgttggcggtgtagtaagatcaagagctttggcaaagctattagatgatacagatttagcgattattgataaaagaagagctgttgctaatcaatcagaggttatgaatattattggtgatattgacggaaaagtttgtattgtccccgatgatcttattgatactgctggaacattatgtaatgcagcagatgcattaaaagaaaaaggagccaaagctgttaaggcatatataacccatccagtactatcaggccctgctattgaaagactaaacaattcatcaattgatgaattagtggtaactaattcgattcctttgaacaaagaagctcaaaaatgcagtaaaatacgcgtcatttcactggcatcaacaattgctgagtgtataaaacgattaagtaatgaagaatcactaagtgaaatgtttttatag

SEQ ID NO: 253378 - DNA, 934 bp, Unknown
  Bacterial polypeptide expressing nucleotide sequence isolated from the Sargasso Sea
atgaaattagtatctggaaattcaaatagagatctagctgagaacattggtaagtatttaaatacaccactagcaaattgtactgtcaaaaaattttctgataaggaaatttttgttgaaatgaatgaaaattgtagaggtgaagatgtttttattattcagtcaacatcatttcctgcaaatgataatttaatggaacttcttattttaattgatactttaagaagagcttcagcaaaaagaattacagctgttattccctattacggatatgctagacaagacagaaaacctggtccacgaactccaataacagctaaactagtagctaaccttattgctaaatctggagcggacagagtattgagtattgatttacacgctggtcagattcaaggcttttttgatataccaacagataatctgtttgccgcaccggttcttttatctgatgttgaaaaaaagataggttcgaatagtgctattgtggtatctcctgatgtaggaggcgttgtaagagcaagattaattgcaagtagaataaattctgatctagcaattgttgataaaagacgtgaaaaagcaggtgaatctgaagtgatgaatattataggcgatgtatctaatagaagctgttttatgattgatgatatagttgactcagctggaactttatgtaatgccgcagaagcattattaaacgcaggggcaaaagaagtttacgcacatgtaacacatggagttttatctggagaggccataaaaagagttaataactcttcccttacaaaattggtaattacagacaccattaatgaaactgatgatattaaaaactctgataaaatagaaacagtaagcgttgttcaccttcttggggaagcaattagaagaatttctgaagaaagatctgtatcaagtttgtttgattaac

SEQ ID NO: 253379 - DNA, 622 bp, Unknown
  Bacterial polypeptide expressing nucleotide sequence isolated from the Sargasso Sea
ttcagcaaaagttgtttcaaatttaattacaaatgctggtgcgaacagaattgtaacagtagatttacatgcaggtcaaattcaaggtttttttgacatgccagtggataatttatttaccactcctatatttgcaagatatataaaaaaaaatattaaaagtaataatctaacatgtgtatcacctgatgcgggcggtatagaaagaacaagaggtttggcaaagaaaataaatgctgaattagcaattatagataaaagaagacctcaggctggaaaatcgcaggtgatgaatattattggggacataaaaaataaaaattgcataatcgttgatgatattatcgatagcggtggaactattgttaatgctgtagaagcattaattaaaaagggagcaaaagacgttcatgtgtttgttactcacgctgttttaagtggagatgctgtaaacaaaattaaaaaatctaaaataaagaaattaataattactgatactatagataatagtagaagaataaaaaatgtaagtaaaatacaagttttgtcaatcgcacctcttatggctgaggcaataaaaaggatttcgaactctacttcagtgtcagatctattcaattaa

SEQ ID NO: 253380 - DNA, 715 bp, Unknown
  Bacterial polypeptide expressing nucleotide sequence isolated from the Sargasso Sea
atgaaaattctcacaggaaacagtaataaacatcttagtcaaaaaatatctaaatttttaaaaaatagactagtgaattcaaacataagaaaatttgcagacggagaaatctatatagaaattaatgaaaatattagaggcaatagtatttttttaattcaatccgtttcatctcctgcaaatgacaatttaatggaattactactatcgattgatgctttaaaaagatcatcggccaaaaacataactgctgtgatcccatattttggatatgcaagacaagatagaaaggtggttcctagaacatctatatctgcaaaacttgtatctaaccttattgcaaaagcaggagcagatagagtagttacagttgatttacactctggacaaattcaaggattttttgatattccagtagataacttatttgcaactccaatatttgctagacatataaaaaagaaattaaaaaaaaataatataatctgtgttgctccggatgtcggtggtactgcaagagcaagagctttaggaaaattgttaaatgtagatttagcaatagtagataaaagaagacctgctcctggaaaatcagaagtgatgaatgtaattggaaatgtgaaaaataaaacctgtatattagttgatgatataatcgactctggtggaacaattgtaaatgcagcttctgaattaaaaaaagaggagctaaaga

SEQ ID NO: 253381 - DNA, 735 bp, Unknown
  Bacterial polypeptide expressing nucleotide sequence isolated from the Sargasso Sea
tgatcatggctgatgcccttcatagggcgtcgtctcagcggattacagcggttattccctactacggttatgctcggcaggacagacgccctagatcagctagggttgcaattagttctaaagtggtggcagacattatcagtacaactggaatagatcggattctaacggttgatttgcatgctgaccagattcagggtttctttacgataccagtagacaatgtatatggttctcctgttctggtggatgatatattgcttaagaattattcgatgccgatagtcgttgcccccgatgtggggggggtcgtaagggcgcgagctatcgctaagcaaattggcgatttggacttggcgataatagataaaagacgacccagagctaacgaaaccgaagttatgacggtaatcggcgatgtggctggcaagacgtgtattattgttgacgacattgttgatactgcgggaactttatgtactgcggctgcagcgttgaaaaaagaaggagctgagaaagtagtagcttacataacgcatgcagttttttctggtagtgctattgaaagaatatcgaattctgaattggatgagatagttgtaacagatacgatacctttgcatgcaaaagcccaagagtgtagtaaaatagatcagctaagccttgctaatcttctagctgaatcgataagacgtgtaagtaatgaagagtcgattagtgcgatgtttaggtgat

SEQ ID NO: 253382 - DNA, 686 bp, Unknown
  Bacterial polypeptide expressing nucleotide sequence isolated from the Sargasso Sea
tgttccatactttggttatgccagacaagacagaagagttagatcagccagagttcctattagtgctaaagttgttgcagatatgtttgcttcagttggcattgatagagttcttactattgatcttcactcagaaactattcagggcttttttgatatgcctgctgataatgtatatgcaacaaaatttatggttgatgacatcaaggacaataacgaaagagatgaagttgtagttgtttctccagatgttggtggagtagtaagagccagggcattagcaaagttattagacgatactgatttagccattatagataaaagacgtgctgcagcaaatcagtcagaagtaatgaacatcattggtgatattcaaggaaaagtttgtattgttcctgatgacataatcgatacagctggtactttatgtaatgcagcaaatgctttgaaagagaatggagcaaaagctgtaaaagcttatataactcatccagttttatctggccctgcaattgaaagactggaaaactcatctattgatgaattaatagtaacaaattcaattccattgaccccagatgcaaaaaaatgcagtaaaatacgcgtcatttcattagcgaacataattgctgagtgtataaaaaggcttagcaatgaagaatcattaagtgaaatgtttttataga

SEQ ID NO: 253383 - DNA, 706 bp, Unknown
  Bacterial polypeptide expressing nucleotide sequence isolated from the Sargasso Sea
cttcggtggagagaatactgctgttgtgccatattttggttattcaagacaagatagaagggttagatctgccagagtgccaataactgcaaaagtagtagcaaacatgattgagagtattgatatagatagattattaacaattgacttacatgcagatcaaattcagggattttttgatataccggtagacaatatatatgcaacacctctattcgtggcagatatatataagcaaaaatatccaaaaatgttagtagtttctcctgatattggcggagtagtcagagcaagagctcttgcgaaacagttaaactgtgatttagctattatcgataaaagaagaccagaagctaatgtctcagaggtaatgcagataattggtgatgtgtcagaaaagacctgcattatggttgatgatatcgttgatactgctggaactctatgtggcgctgcgaaagcccttaaaggagagggagctaaaaaggtactcgcatacatcacacatccagtgttgtctggcaaagcatacgaaaatattaagaaatcaatgcttgatgagataattgtaactgatacaatcccattacatgaaaaagcaaaaaatattacaaatattaggcagatctctgtatcagagatgcttgctgaaacaatcagaaggattcatcaaagagaatctgttagtacacttttcatggattag

SEQ ID NO: 253384 - DNA, 688 bp, Unknown
  Bacterial polypeptide expressing nucleotide sequence isolated from the Sargasso Sea
actgctgttattccgtactttggttatgctagacaagatagaaaagttgcaccaagaacctcaatttcagcaaaacttgtctcaaatctaattactaaagcaggagcagatagagttgttactgttgatttgcatgcaggacaaattcaaggattttttgatattccagtagataacttgttcgcaacacctatttttgcaagacatgtaaaaaaaaagataaaaagtaaaaatctaatttgtgttgcgccagatgttggtggtactgagagagctagagcactaggaaagattttaaatgttggactagcaattgtagataaaagaagaccaaagccaggtcaatctcaagtaatgaatattattggagatgttaaaggaaaaacttgtattcttgttgacgatataatcgattcaggtggtacaattgtaaacgcagctaaggctcttaaagatcgaggtgccaaagaagtttatgtttacattactcacggtgtacttagtggagaagctgtaaataaaattaaaaaatcagtaattaaaaatttagtaataactgatacaattgataacatgaacagagttaaaggtgctaaaaacattgaagttctgtcaatttcagggcttatgggagaagcaattaaaagaatatctaattcaacctcagtatcagatttattcaaataaa

SEQ ID NO: 253385 - DNA, 721 bp, Unknown
  Bacterial polypeptide expressing nucleotide sequence isolated from the Sargasso Sea
aatgaaaattattacctgtaatagtaataagattttagctgaagcaatatcttcttacattggtgtgcccttggctaatgctacactaagaaatttcgcggatcgtgaaatatttgtagaaataaatgaaaatattagaggtgaagatgtttttattattcaatcaacatcccatccagctaacgatcatttgatggaattgttaattgcaattgatactgtaaaaagagggtcagcgagaagaataacggcagtaattccttattatggatatgctcgacaagatagaaaaacagggcctcgtaccccaataactgcaaagttagttgccaatctaattacatctgcaggtgcggatagagttttaactatggatcttcatgcagggcaaatacaagggttttttgatatacctctagataatattttttctgcaccacctattatcaaagatatgaaaagaaaatttgctaataataatgaacttgtaattgcttctccagatgttgggggtgttgttagagcaagagcgtttgcaaaacgcctaaatgctggtcttgcaattgctgataaaagaagagaaaaagcgggtgaatctgaggttatgaatattattggtgatgtaaataataaaacttgtatattgctcgatgatattgctgattcagcaggaacactatgcaatgctgctacagcattaaaagaaaatgagccaaagaaa

SEQ ID NO: 253386 - DNA, 665 bp, Unknown
  Bacterial polypeptide expressing nucleotide sequence isolated from the Sargasso Sea
aatgaaattattatccggaaatagtaataaaccactaagcaagaatattgccagatatctaaaatctaaactagttaactctagcataagaaatttctctgatggggaaatctatgttgaaattaatgaaaatattagaggtaatagtatttttttaattcaatctatttcatctcctgcgaatgataacttaatggaactattattgtgcattgatgcacttaaaagatcttctgcaaaaaatattactgctgttatcccttactttggttatgctagacaagatagaaaagttgcaccaagaacatcaatatcagctaagctagtatcaaatctaatcactaaagcaggagcagatagagttgtgactgtcgatttgcatgcaggtcaaattcaaggattttttgatattccagttgataatttgtttgcaacacctatttttgcaagacatgtaaaaaaaaagataaaaagtaaaaacctgatttgtgtagccccagacgtaggtggtactgaaagagctagagcactaggaaaaatgttaaacgttggattagctattgtagataaaagaagaccaaaaccaggtcagtctcaagtaatgaatattattggagatgtaaaaggaaaaacttgtatcattgttgatgatataatcgactctg

SEQ ID NO: 253387 - DNA, 748 bp, Unknown
  Bacterial polypeptide expressing nucleotide sequence isolated from the Sargasso Sea
aatggaaattatgttattggctgatgctttaaaaagatcctcagcttccaggattaccgctgttgtgccatattacggatatgcaagacaagatagaagagtaaggtctgcaagagtacctataagtgcaaaagttgtagctgatatgtttgcatctgttggaattgatagggttcttacaattgatcttcactctgagacaattcaaggattctttgatatgcctgcagataacgtttatgcaactaagcttatggttaatgacattaaagatacaaatgaaagaaaagaagtcattgttgtatcccctgacgttggaggagttgtcagatcaagagccattgcaaaacttttagatgatactgatttagcaatcattgataaaagaagagcagctgctaatcaatcagaagttatgaatataatcggtgaaattaaagataaggtatgtattgttccagatgatattattgatacggctggtacattgtgtaacgcagctaatgcacttaaagaaaaaggagctaaagcagttaaagcctatataacacatcctgtactttctggacctgcaattaatagaataaatgaatcagaattggacgagctagttgtgacaaattcgataccattatccaaagaagctcaaaaatgcagtaaaatacgtgtcatttctatagcaaaaactattgcagaatgtataacgcgcttaagtaacgaagaatcgcttagcgaaatgtttttataa

SEQ ID NO: 253388 - DNA, 437 bp, Unknown
  Bacterial polypeptide expressing nucleotide sequence isolated from the Sargasso Sea
aatgaagattctcactggaaatagcaataaacagctaagtaataaaatttcaaaaaatctaaaaaataaattagtaaataccagtattagaaaatttgcagatggtgagatctatattgaaattaacgaaaatatacgaggaaacagtatttttataatccaatcagtgtcctcgcctgcaaatgataatttaatggagttgcttctttgtatagatgcacttaaaagatcatctgcaaaaaatatcactgcagtaattccatattttgggtatgcgagacaagatcgtaaggttgtaccaagaacttctatttctgcaaaattagtctccaacttgattacaaatgcaggagctgacagagtagtaacagtggatttacatgcaggacaaattcaaggtttttttgatatcccagttgataacctttttgctaccc

SEQ ID NO: 253389 - DNA, 626 bp, Unknown
  Bacterial polypeptide expressing nucleotide sequence isolated from the Sargasso Sea
cactgccaaacttgttgcaaatttaattacatccgcgggcgctgatagggtattaacaatggatttacatgctggtcaaattcaaggtttttttgacattcctttagataatattttttctgtaagaccgataatcgatgatgttaaagaaagatttaatggaaacaaagatttagttgttgcttcacctgatgttggtggtgttgttagagccagagcttttgctaaaagattagaggctggactggcaattgccgataaaagaagagaaaaagctggtgagtctgaagtaatgaatatcatcggagatgtaaaagataaaacttgtatcttactagatgatatagctgactctgcaggcacgttatgtaatgctgctgaagctctaagtaaaaatggggctaaagaaatttattcttatattgttcacggtgtattatctggagatgcgcttaaaaagattgaaaattcaagcataaaagaattggtattaacagatacaatagagccttctaaagaggtaaaaagcacaaaaaacattagacatattagtattgctcctttaatgggtgatgcgattaaaaggattaacactgatacttcagtgtccgcccttttcgattaaa

SEQ ID NO: 253390 - DNA, 943 bp, Unknown
  Bacterial polypeptide expressing nucleotide sequence isolated from the Sargasso Sea
ataatagatatcttttcagggtcatcttctattgatctatcagatgaagtcgcaaaacttttaaataatgagctatcttctattgaattgggaaccttttcagatggtgaaatacaagtagaaattaatgagaatgttagaggtcatgatacctttataattcagtctacctgctttccagctgataaacatctcatggaactaatgttactagctgatgccctaaagagatcttctgcttctaagattactgcagttgttccttattttggctatgctagacaagaccgaagagtaagatcttcaagagtcccaattagtgcaaaagttgtgtctgatatgtttagctctgtgggcattaatagggttctaactctagaccttcattctgagacaatccaaggttttttcgatatgcctgctgacaatgtttatgcaacaaaacttatggttgaagatatatctaaaaattattctaaagataatttagttattgtttcaccagatgtaggtggtgttgttagatcgagagcattagcaaaatatctagatggccttgatcttgcaattattgataagcgaagagataaggccaatgagtcagaggtgatgaatattatcggtgatgttgctggaaaagaatgtattgttcctgatgacatcatcgatacagcaggaacattatgcaatgcagctaaagctttaaaagactctggggcaagcaaagtaagtgcatatataactcatcctgttttatcaggtccggctattgaaagaataagtaattctgagattgatgaacttgttgtaactaattcgattcctcttaccaaagatggtcaaaaatgcagtaaaatacgcgtcatatcaatcgcaccattaatatcagagtgtattaagaggctttctaatgaagaatccttgagtgcggtttttttataag

SEQ ID NO: 253391 - DNA, 571 bp, Unknown
  Bacterial polypeptide expressing nucleotide sequence isolated from the Sargasso Sea
aatgcttaaatctgaagaattaatcaataaggtaaaaaattataacaagtttcttaatccagaaactttgtcaaaagcctatgattttgctctaaaggcacatgaaaagcaaaaaagagatgaaggctctccgtatatcattcatccaattgcagtagcaaatattttaactgagttaaagctagacagtgcaactatagcgactggcttgcttcacgacacaatagaagatactcatgcaacttataatacaattgaagcagaatttggaaaagaagttgctgatttagttgacggtgttacaaaaatctcagagttcgaaaatcaggctatatcgaactctaaagcagaaaattttagaaaattaatactagctacatcaaaagatatccgagttttactggtgaaactcgctgatagactacacaatatgcgaacaatcaaagttgtagaaaaagaaaagcaaattagaaaagcaaaagaaactatggaaatttatgcaccacttgcagataggatgggtatgcaccgtataagagatgaattagagacctttcatttgaggttctaa

SEQ ID NO: 253392 - DNA, 579 bp, Unknown
  Bacterial polypeptide expressing nucleotide sequence isolated from the Sargasso Sea
gatgcgtcaatttcaacttgtggaaaaggttcggagttacgatccgagtgcagatgaagaggcgcttaaccgcgcctatgttttttcaatgaaggcacacggcacgcagcagcgtgcatcgggtgatccttatttttcacacccggtggaagtcgccggaattctctcagaaaaaaaactagataccgcatcaatcgtcaccggtcttttgcacgatacggtcgaagataccgttgctacattggaggatatcgaaagtctcttcggaaatgaaattagtcgtttggtggatggggttactaaacttggtcaattggagttgcagtcagacaaaaccaaacaggcggaaaattttcgcaaacttctcttggccatgtcagaggatatccgtgttctcttggtaaaactagcggatcgcctgcataacatgaggaccctttcttacatctcgagttctgaaaaacggattcagatcgcgcgcgagaccatggatatctatgcgccgcttgctgaacggatcggtattcgcgattggaaagacgagctggaagacctggcattcatggaattgaatgctga

SEQ ID NO: 253393 - DNA, 811 bp, Unknown
  Bacterial polypeptide expressing nucleotide sequence isolated from the Sargasso Sea
atgtctgaggcagctgcaaattcaaagaaaaaaaaagaaattgaagtttccaaaactattttgcctgaaaataaaaaatgtgaaagtgaatctttgaattatgagataaaaataccggattggcttttaaaagatattaataattttgaaaattcaaatgacctaaaagataagaatcaaaaccttattgtaaaggcctttaaacttgcttataaagctcatgaaggacaacttcgtgcgagtggtgaaccttatattattcacccagtggctgttgcaaatcttttgaaagaaataggtgccagttcatctgttattgctgcaggacttttacatgatgttgttgaagatacaggcattgatttagcggaaatagaagcaaatttcggattagaagtaaaaatacttgtggagggtgtaacaaaattaggaggaattcactttaataataggactgaagcacaagctgaaaatcttagaaaaatgtttttggctatggctagcgatatcagagtagttttagtaaaacttgcagatagacttcataacatgagaacaattgaatggctcaatgatgagaggaaacaaagaatagcgagagaaacaagagagatttatgcacctttagctaatcgattaggaataaatagatttaaatgggaattagaagatttagcatttaaatttcttgagcctaaacaatatcaagatctaaaagatcaaatctctgttaaaaggagtgatagagaaaaaagattaaaagtaaccttgaatcttatgaaagaaaacttagtctcagcggggtttaaat

SEQ ID NO: 253394 - DNA, 867 bp, Unknown
  Bacterial polypeptide expressing nucleotide sequence isolated from the Sargasso Sea
gatgaaattggtcgtttggtggatggggtcactaaacttggtcagttggagttgcagtcggaccagactaagcaggctgaaaattttcgcaaacttctcttagctatgtcggaggatatccgagtactcttggtcaaattagctgataggctgcataatatgcggaccctttctcatgtgccgagccctgaaaagcggtcaaggatcgcgcgtgagaccatggatatttatgcgccccttgctgagcgaatcggtattcgtgactggaaagatgagcttgaagatttggcttttatggaattaaacgcggacgctcgggattcaatattaaatcgtctcgggtttttgcgcgaacaaggcgaagacctggttggtcaagtggtgaaggagttggaacacaccttggctgtttcaggtgtcgaagcgcgggtcctgggacgcgaaaagaaagcctattctatctggcgtaagatgcagcgtcgcgatgtcgagtttggtcagctttccgatattgttgcttttaggattattgtcgacggtattgaagattgttaccggacgctcggaattatccataatcgttatcaagtcgttccgggtcgctttaaggattacatatcaatccccaaacctaacggatacagttcgattcatacgggtgtcatgggaccccagatgcaaagagtcgaagtgcaaatccgcacacagttaatgcatgaaatcgcagaactcggtgttgcagcgcattggcagtacaaacaaggaaattccgaactggcgaaagaggggcgtcagtatcgctggctccgagagcttttagaaattcttgaacacgcggtggagccagaagattcctcgagcatacga

SEQ ID NO: 253395 - DNA, 836 bp, Unknown
  Bacterial polypeptide expressing nucleotide sequence isolated from the Sargasso Sea
tttgcctgaaaataaaagatatgaaagtgaatctttgaattatgagataaaaattcccgattggcttctgagagacatcaataattacgaaaaatcaaataaagacaacgatgataatcaaaaccttatcgtaaaggcttttaaacttgcttataaagctcatgacggacaactccgcgcgagtggggagccatacattatccacccagttgctgttgcaaatcttctcaaagaaataggcgctagttcatctgttattgcagcaggacttttacatgatgttgttgaagatactggaattgatttatccgaaatagaaacaaattttggattagaagtaaaaatccttgtggaaggagtaacaaaattaggagggattcactttaataacaggactgaagcacaagctgagaatcttaggaaaatgtttttggccatggccagtgatatcagagttgtcttagtaaaacttgccgatcgacttcataacatgagaacaattgaatggctaaatgatgagagaaaacaaagaatagccagagaaacaagagagatttatgcacctttagctaatcgattaggaataaacagatttaaatgggaattagaagatttagcttttaaattcctggagcctaaagaatatcaagatctaaaagatcaaattgctgttaaaagaagtgatagagaaaaaagattaaaagtaactttgaatcttatgaaagaaaacttagtctcggcaggtttaaaaaattttgaaataactggaagaccaaaacatctttatggcatctggagcaaaatggaaagacaacaaaagcattttcatgagattt

SEQ ID NO: 253396 - DNA, 953 bp, Unknown
  Bacterial polypeptide expressing nucleotide sequence isolated from the Sargasso Sea
cgacttaaagcttgatgaatctaccataaaaacagcccttttgcatgacacaattgaagatacaagtagatccttaaaacaactagagcttgcttttggtaaggaggtgtctcaactagttgatggagtgacaaaacttactaatttagaactaagttcattagaaacaaaacacgcagaaaattttagaaaactattcatggctatgagtaaagatgtcagagttttgctagttaagcttgcagacagattgcataatatgagaaccattaaagcattacctattgataaacaaattagaaaatctaaagaaacaatggaaatttttgcgccattagctggtaggatgggtatgcaatttatgagagaagaattagaagatcttagttttcgagttcttaattctgaagctcgtaattcaattataagaagatttataactttaagaaaagaaactgatgatttagttcctaaaattattgatgacattaaacaacaattaaaaaaagagaatataaatgcaatagttactggcagagagaaaaagccctattccatttggagaaaaatgcaatataaaaaggaaggttttacaagactttctgacatctttgcttttagaattgttactaaaaatgagactgatgcatatattgcaatgggttcagttcatcggagatggagagcagtcccaggaaattttaaagattatattagtcaccctaagagtaatggttatagatcaattcatactacagtctctggaagagatggaaaaagagttgaagttcaaattagaactgaagaaatgaacgaagtagcggaaagtggtgttgctgctcattggtcgtatagggatggagaacgtgttaagaatccttttgttgtagacccttttaagtggctaagaggattaagtgatggttttattaacagtgataatccaagtgagt

SEQ ID NO: 253397 - DNA, 755 bp, Unknown
  Bacterial polypeptide expressing nucleotide sequence isolated from the Sargasso Sea
tttgttgcatgacactatagaggacacgaataaatcttttagagatgtattggatatatttggaagcgaaattgctaatcttgtagacggagtgacgaagctatcaaatctggaggttgcatcattggagagaaagcaagctgaaaactttagaaaattgatagtcgcaataagcaaagatctaagagttcttttggttaagcttgcagacagattacataatatgagaaccataagagcagtgagtaatgataggcaattagttaaggctaatgagactatggatatatatgctcctttagctggtagaatgggtattcaatcaattagggatgagttagaagatcttagttttcgaatattaaatccagagggaagaaattctataattaggcgatttctaaagttaaaaaaagagagcgatgaccttattccaaaaatcatcaatgatattgaagatcagttggactcagttggtgttacagcaacagtttcaggccgggaaaaaaaaccctactccatttggagaaagattcaggataagcaacaagctttttataaattgtccgacatttttggatttagaataattacggcaaatgaaaaagatgtatataccgctttgggggctgtacatagccgttggtccgctgtgccaggacgatttaaagattatattagtcaaccaaagtccaatggttaccgatccatccacactactgtttcaggaagagatgggaaaagagttgaggtcc

SEQ ID NO: 253398 - DNA, 904 bp, Unknown
  Bacterial polypeptide expressing nucleotide sequence isolated from the Sargasso Sea
actggaccagctgcgcggttatctgaaaaagaacggcatcggtggtgccgaagtgaatggtcgtgccaagcatatctacagtatctggcgcaagatgcagaaaaagcatctggactttggtgaagtctatgatgtgcgcgcggtgcgtattctggtgccggaagtgcgcgattgttatgccgctctgggggtggttcattcactttggcagcatgtgcctaaagagttcgatgactacattgccagccccaaaggcaatggctaccagagcctgcataccgcggtagtcggcccggaacgcaagatgcttgaagtgcagattcgtaccttcgatatgcatgaagaggcggagctgggtgtctgcgctcactggcgttacaaagaaggggccaagaaaggcaaaagtggggttaccgattacgaacagcgtatcgcctggcttcgtcaggtgctcgagtggcacgaagagctgggcgatgatagcccggatgccatggtggatgaactgcgccacggcctagtcagtgaccgggtgtatgtcttcaccccggaagggcatgtggtggacttagaatctggcgctacgccggtggactttgcctatcacattcataccgaagtggggcatcgctgccgaggcgccaaggttaacggccatatcgtgccattgaactacagcctgaacaccggcgaacaggtcaccattctcaccaccaaggaaggtggccccagccgtgactggttgaccccgtcgctgggttatgtggctacctcgtcagctcgggcaagaatccaacaatggtttaaacgtcaggaccgcgatgtccacatcgtccaggggcgcaccatcctggaaaaggaaatgtcgcggttagcgttggataaagtagaccttgatactctg

SEQ ID NO: 253399 - DNA, 487 bp, Unknown
  Bacterial polypeptide expressing nucleotide sequence isolated from the Sargasso Sea
tatgcttaaatctgaggaattaataaataaagttaaaaattataacaaatttttaaatcctgaaactttatcaaaagcttacgattttgctttaaaagctcatgaaaaacaaaaaagagatgaaggatcgccatatattattcacccaattgcggttgcagatattttaacagagttaaaactcgatagtgccacaatagcaacaggactacttcatgatacaatcgaagatacttacgcaacttacaacactatagaatctgagttcggtaaagaagttgctgatttggttgatggagttacaaaaatttcagtttttgaaaatcaagcaatttcaaattctaaagctgaaaactttagaaaactaattttagcaacttctaaagatataagagttttgcttgttaaactagcagacagattgcataacatgcgaacaataaaagttgtagagaaagaaaaacaaattagaaaagcaaaagagact

SEQ ID NO: 253400 - DNA, 870 bp, Unknown
  Bacterial polypeptide expressing nucleotide sequence isolated from the Sargasso Sea
gcgcgccgtggtgattaaactggccgagcgtgtttgtttgctgcgtgccgtgaaaaatgccgatgaagaaacccgtgtcttattggcccgcgaaattgccgacatctatgcgccgctcgctaaccgtttgggtattggtcaattaaagtgggaattagaagatatttccttccgttatctgcatccagatacttacaaggacattgcgaaacagttagacggtaagcggttagaccgcgaagtctatatcgaaaagtttgtcgagcagttgcaacagcgcctcgatgaggatcatattcgcgctaaggtctatggtcgtccaaaacatatctacagcatctggcgcaagatgaagggcaagcacctcaagtttgatgagttgtttgacgtgcgcgccgtgcggattgtcaccgagcgtttgcaggactgctacggcgccttaggggttgtgcacacgctttggcaccatattccgcgcgagttcgacgactacgtggccaaccctaaacctaacggttatcaatccatccatacggttgtggtggggccagaaggtaaaaccgttgaaattcaaattcgtacccaagatatgcacgaagatgccgaacttggggttgccgcgcactggaaatacaaagagggtaatcactccggcaaacagagcggctacgaagaaaaaatcaattggctgcgtaaaattctgcaatggcaggaagacgtggtcgaaagtggcaacttggtcgaagaagtccgcagccaagtgtttgaagatagagtctatgtctttaccccaagcggtgaggttgttgacttgccactcggttcaaccgtgctcgactttgcctactatattcactcgcaggttggcca

SEQ ID NO: 253401 - DNA, 802 bp, Unknown
  Bacterial polypeptide expressing nucleotide sequence isolated from the Sargasso Sea
tatgattaataatagtgaactaattgataaaattaaatcatataacaaatttttaaattcaaagtctttgaataaagcctacagcttcgctttaaacgctcatcaaaatcaaaaaagagaagagggtgttccatacattattcatcccgtagcagtagcaaatattttaacagaattaaaacttgatagcgctacaattactactggtttattacacgatacaattgaagatacgaatgtaacttatgaaactgtaagaaaagagtttggtgaagaagttgcaaatttagttgacggagtaactaaattgtcagccttagaagacaaagcttcaaataattcaaaagcagaaaactttagaaaattaatattagccacatcaaaagatataagagttttgctcgttaaattagcagacagacttcataacatgagaacaattaattttgtaaaagataaagaaaaaattattagaaaagccaaagaaactatggaaatttatgcaccattagccgatcgtatgggaatgaataggataagagatgaattagaagatctttctttttctgttttaaacaaaccggctagagatctgatattagatagattaaaatttataaaaagtaacagagaagacacttttaaattgatagcagcagaattaattaaattattaaaagataatggagttaatgcaacaattactggaagagaaaaaactcctttttcaatatggagaaagattcaaaacaaaaaagtatccttagaacagctcactgatataatcggatttagaatttta

SEQ ID NO: 253402 - DNA, 696 bp, Unknown
  Bacterial polypeptide expressing nucleotide sequence isolated from the Sargasso Sea
gatgctcgacgcttcctcaccacaggactcctcccggaccgacagtgctccggctcctgttgtgtgcggtcgtcctgagctgaggcgtcatccggtccgccacccggacgaatacaacatccctctgccggagtggctccggcaatgcatcctcaacgttccaccgggcctggggcagagctgtccgacagatcctgaagcgctgctggtggcggccttcgatttcggttttcagctgcacgagggccaattccgggccagcggtgacccttatatcgttcatcccgttgccgttgccgatctgctgagggacatcggcgccagcgccagcgtgatcgccgccgggttcctgcatgacgtggtggaagacaccgacgtcacccttgaccagatcgaactgcatttcggctctgaagtgcgcgagctggtggagggagtcaccaagctgggtggcattcacttcaacaaccgcaccgaggcccaggccgagaacctgcggcgaatgttcctggcgatggccagtgacatccgcgtggtgctggtgaagttggcggatcgacttcacaacatgcggacgcttggggcgctcaaagaggagaagcgccagcgcattgcccgggagaccaaagagatctatgcccccctggccaatcggctgggcatcggtcgcttcaagtgggaactggaagacctggc

SEQ ID NO: 253403 - DNA, 883 bp, Unknown
  Bacterial polypeptide expressing nucleotide sequence isolated from the Sargasso Sea
aggggctagttcatctgtggttgctgcaggacttttacatgatgttgttgaagatacaggcattgatttatcggaaatagaagcaaattttggattagaagtaaaaatacttgtagagggtgtaacaaaattaggaggtattcactttaataacaggactgaagcacaggctgaaaatcttagaaaaatgtttatggctatggcaagcgatataagagttgttttagtaaaactggcagatcgacttcataacatgagaacaattgaatggctcaatgatgagagaaaacaaagaatagcgagagaaacaagagagatttatgcacctttagccaatcgattaggaataaatagatttaaatgggaattagaggatttagcgtttaaatttctagagcctagagaatttcaagatctaaaagatcaaatcgctgttaaaaggagtgatagagaaaaaaggttaaaagtaactcttaatcttatgaaagaaaatctagtctcagcgggtttaaaaaacttcgaaataactggaagaccaaaacatctttatggcatctggagcaaaatgcaaagacagcaaaaacagttccatgaaatttatgatgttgctgctttaagaattatcgttgacaattcagatagttgttatagagctttagcggttgtacatgatactttcaaaccaattccaggcagatttaaagactatataggattaccaaaacccaacggatatcagtccctacatacttcagtgattggaagacatcgaccaattgaagttcaaatcagaactacttccatgcatcaaattgcagaatatggtatcgccgctcatttggcatataaagagggtggttctcctgccaaaagcaatgccgaa

SEQ ID NO: 253404 - DNA, 568 bp, Unknown
  Bacterial polypeptide expressing nucleotide sequence isolated from the Sargasso Sea
aatgcttaaatcagaagaattaattaataaggttaaatcttataacaaatttttaaacccagaaacattaagcaaagcttatgactttgctttaaaagcacacaaaactcagagaagagacgagggagttccatatattgttcatcctttagctgtagcagatattttatcagatctaaaactagatagcgcgacaatagcaactggtttattacatgatacaatcgaagataccgaagctacatacgaaaccataagagaagaatttggttcagaagttgcagatttagttgatggagttactaaaatttctcaatttcaaaaaaaagcaggcgaaaattcaatagctgaaaattttagaaaattaattttagcaacttctaaagatatcagagttttgttagttaaaattgctgaccgtcttcacaatatgagaactattaagtttgtaaaaaataaggataaacaaataagaaaagcaaaagaaacaatggaaatttatgctcctttagcagatagaatgggaatgaatagaattagagatgaacttgaagatctttcatttcaa

SEQ ID NO: 253405 - DNA, 550 bp, Unknown
  Bacterial polypeptide expressing nucleotide sequence isolated from the Sargasso Sea
atgctcaaatcagaagaattaattaataaagtaaaatcgtataataaatttttaaatcctcaaacattaaccaaagcttatgattttgctttaaaagctcacaaaactcagaggagagatgaaggcgtaccttacattgttcatccaatagctgtagcaaatattttatcagatttaaaacttgatagcgcgactattgcaacaggtttattgcacgatactattgaagatactagtgctacttatgaaaacattaaagaagaatttggagttgaagttgcagatttagttgatggagtaactaaaatctcacaatttcaaaaaaaagcaggagaaaattcaaaagctgaaaatttcagaaaattaattttagcaacatcaaaagatataagagttttgttagtaaaaattgctgatcgacttcataacatgagaacaatcaaattcgttaaagataaagaaaaacaagtaagaaaagctaaagagactatggaaatatatgctcccttagctgacagaatgggcatgaatagaatcagagatgaattag

SEQ ID NO: 253406 - DNA, 517 bp, Unknown
  Bacterial polypeptide expressing nucleotide sequence isolated from the Sargasso Sea
aatgcttaaatctgaagaattaattaataaggtaaaaaattataataagtttcttaatccagaaactttatcaaaagcctatgattttgctttaaaggctcatgaaaaacaaaaaagagatgagggctcaccttatattattcacccgatagcagttgcaaatattttaactgagttaaaactagacagtgcaactatagctactggtttacttcatgatacaattgaagatactcatgcaacttataatacaatagaagctgaatttggaaaagaggtcgctgatttagttgatggtgttacaaaaatttctgagtttgaaaatcaagcaatatcaaactcaaaagcagaaaattttagaaaattaatattagcaacatcaaaagacatccgagttttactggtgaaactagctgatagactgcacaatatgcgtaccattaaagttgttgataaagaaaagcaaattagaaaagcaaaagaaacaatgggaaatttatgcgccactcgcagatag

SEQ ID NO: 253407 - DNA, 890 bp, Unknown
  Bacterial polypeptide expressing nucleotide sequence isolated from the Sargasso Sea
cacgatcgaagacaccaaagccagctacgccgaggtcgaaacgcgtttcggcaccgaggtcgccgaattggtcgatggcgtgaccaagttgaccaatctacagctcagctcgtcggaaaccaaacaggccgaaaactttcgcaagcttttcatggcgatgagcaaagacttacgggtcattctcgtcaaactcgcggaccgtttgcacaatatgcgcacgattgatttcatgcgccccgaaaaacaggcacaaaaagcccgcgagacgatggaaattttcgcgccactggccggccgcatgggcatgcaatggatgcgcgaagagcttgaagacctcagctttaaggttctgaaccccgaaggccggctgtcgattatgcgccggttcgtgaccttgcaacgtgaaagcggcgatgtgatcgaacggatcaccgccgatatgcgcaaagagctggacgcgaaagggatcgaggccgatgtgttcggacgggccaaaaaaccctattcgatctggcgcaagatgcaggaaaagaaccaggggttttcgcgtttgtccgacatctacggatttcgcatcatcacccgatccgaagaagattgttaccgcgtgctgggcgcaatccatcaacgttggcgcgcggtgccggggcggttcaaagattacatcagccaaccgaaaacaaatggctatcgttcgatccacaccaccgtgtcgggccgcgatggcaaacgggttgaggcgcaaatccgcacgcggcaaatgcatgacgtggccgaaaccggtgttgcggcgcattggtcgtatcgggacggcgtgcgcacgcagaacccttttgcggtcgatccggcgaaatggattgcgcgcctgacggaacaaatgggcagcgaag

SEQ ID NO: 253408 - DNA, 582 bp, Unknown
  Bacterial polypeptide expressing nucleotide sequence isolated from the Sargasso Sea
tatgctcaagtctgaagaattgataaacaaagttaaaaactataataaatttttaaatcctgaaactttatctaaagcttatgattttgcattaaaagcacatgaaaaacaaaaaagagatgagggttcaccttatattatacacccaattgcagttgcaaatatattaactgagttaaagttagatagcgcaacaatagcaacaggattacttcatgatacaatagaggacacctacgcaacctacaacaccatagagtctgaatttggtaaagaggttgctgatttggtcgatggagttacaaaaatatcggtatttgaaaaccaagcaatttcaaattcaaaagcagaaaactttagaaagttaattctagcaacatccaaagatatcagagtcttgcttgtaaaactagcagacagattacacaatatgcgaacaataaaagttgttgaaaaagaaaaacaaataagaaaagcaaaagagacaatggaaatatatgcgccccttgctgatagaatgggtatgcaccgtattagagatgaactagaagatctatcatttgaagttttaaatgaagatgc

SEQ ID NO: 253409 - DNA, 925 bp, Unknown
  Bacterial polypeptide expressing nucleotide sequence isolated from the Sargasso Sea
gatgctcaacgctgcctccacacccaaagagccccgaaccagcacgggttcggccactgcgcgctgcgcgttgcccgaggtgaggcgtcatcccgtccgccatccggacgattacggaatcgatctgccggactggttgagggagtgcatcgccaatgtgccgcccggcattggccagagctgccccaccgatcccgaggcgctgctggtgtcggcctttgatttcggctttcagctccacgaaggccagttccgcgccagtggggacccctatatcgtccatccggtggcggtggctgatctgttgcgggatatcggcgccagcgctccggtgatcgccgcaggcttcctccacgacgtggtcgaagacaccgacgtcacccccgatcagatcgagctgcacttcggttccgaggtgcgtgaactggtggagggggtcaccaagctcggcggcatccacttcaacgaccgcacggaagctcaggcggagaatctgcgccggatgttcctggcgatggccagcgacatccgtgtggtgttggtgaagctggccgaccgcttgcacaacatgcgcaccctgggtgcgttgaaggaggagaagcgtcagcggatcgcccgcgaaacccgtgagatctatgcccccctggccaaccgccttggcatcggtcgcttcaagtgggagctggaagatctggccttcaaattgctggaaccggaggccttccgggagattcaggaggaggtggccaccaagcgcagtgaacgggagcagcggctcggcgtcacggtggggctcttgaacgagcggttggaacgggccggcctagagcactgcgaggtgagtggtcgccccaaacatctgtttggcatctggagcaagatgcagcgccagcagaaggagttccacgagatctacgacgtggcg

SEQ ID NO: 253410 - DNA, 724 bp, Unknown
  Bacterial polypeptide expressing nucleotide sequence isolated from the Sargasso Sea
gatgcgccaatacgaacttgttgaacgggttaaggcatatgaccccgacgcgtgtgaaaccacgctgaaccgggcctatgtctatgcaacccagaaacatggttcgcaaaagcgcgcatccggtgacccgtatttttcccatccgatcgaagtcgcaggcattctgacgaattacaagcttgattgcgacacgatcatcacagcccttctgcacgacaccatcgaagataccgatgcaacgcccgaagagatcaccaagcttttcgggtcgaacatcatgaagctggtcgatggtgtgaccaagctgacccagatcgagcttaaatcagcagattccaagcaggcggaaaacttccgcaagttgcttttggcgatgtccgaagacattcgtgtgctgctggtcaagctggccgaccgtctgcataacatgcgcaccctgcattatatctccaaaccggaaaagcgcgtgcggatcgctgctgaaacgcttgagatttatgccccgcttgccgagcgcatcggtatgcatgacatcaaggaagagcttgaagatcttgccttccagcatatcaatcccgaagcaagggattcgatcctggcgcgcttggagttcctgcgccagaaggacgacaatgttgtcagccggattgtttcggaactgaccgatgttgtgtcgcggcaggggcttaaggtcgatatttacgggcgtgagaagcggccttat

SEQ ID NO: 253411 - DNA, 640 bp, Unknown
  Bacterial polypeptide expressing nucleotide sequence isolated from the Sargasso Sea
tttgaaacagttaaaaaagaatttggtgaagaagtagctagactagttgatggtgtaacaaaattatctgctttggaggataaagcaacaaataattcaaaggctgaaaattttagaaaattaatattagctacttctaaagacattagagttttattagttaaattagctgacagactacacaatatgagaaccatccattttcttaaagacaaagaaaaaatcataagaaaagctaaagaaactatggaaatttatgctccattagctgatagaatgggcatgaatagaataagggatgaactcgaagatctttcattttctgttttaaataaacctgctagggaattaattttagatagattaaaatttattaaaagtaatagagaggatacttttaaattaatttctgcagaattgattaaacttttaaattcatgtggtataagcgcaaaaatcaatggaagagaaaaaactcctttttccatttggagaaaaatacaaaataaaaaaatatctttagaacaactaaccgatattattggatttagaataatagttgacaatgttgaagattgttacaaaaccttaggaatttttcatagtaaattttctgctatacctggtaagtttaaagatt

SEQ ID NO: 253412 - DNA, 493 bp, Unknown
  Bacterial polypeptide expressing nucleotide sequence isolated from the Sargasso Sea
atgatcagacatgaagacctgattgaaaaggtcaagtcttatgaaccacatgtagacccgatggcactgggtgaggcctacaatttttccatggccaggcacggtgctcaacgccgtgcctctggtgccccctatttttcacatccagcagaggttgcagttattttagctgatcttcggctggacgtggattcgatcattaccgcgctgttacacgatactgttgaagatggagttgcggaattaggagagatcgaagaaaagtttgggccaaatgtagcaaaattagttgatggcgttaccaagcttggaaaattagagttgggtagagacactaccgttcggcaggctgaaaattttcgtaaactcttgttagctatttccgaggatattcgtgttttactcgtaaaattagctgatcgacttcataatatgcgaacccttcattacatctctaattcaggaaaacgtttaaggattgctcgagaaacct

SEQ ID NO: 253413 - DNA, 727 bp, Unknown
  Bacterial polypeptide expressing nucleotide sequence isolated from the Sargasso Sea
atgatccgccaatacgaactggtggagacagtcaaatcttatgaccgcaacgctgatgaggaagcgttgaacaaggcctatgtgttcgccatgcgagcacatggcgcgcaaactcgtgcatccggtgacccatacttttcccatccgctagaggtcgcaggcattctgacagagtacaagcttgatgctaagtcgatcatcacggctttgctgcacgataccgtcgaggataccgaggtaacgccggacgatatttgcagtcaattcggagatgagattggtcagcttgtagatggtgttacaaaactcacacagatcgagctgcaatccgatcaatcggatcaagcggaaaacttccgcaaactagttctggccatgtcagaggatatccgtgttttgttagtgaaattggctgaccgcctgcacaacatgcgcacactcaaatttattactagccaaagcaaacggcagcgcatcgcgctcgaaactatggaaatttacgcccctcttgccgagcggattggcatgcaggaaatgaagaatgagcttgaggaccttgcattcgcggttcttaatgaggaagcacgggagtccatcacagcgcgcttgcagttcctgagggacgaggggaaggacaacgtggcatccattgtcgaggaactcggcagaacgcttgccgctgaggggttgagagcctccgtgaccggccgagaaaaaacaccctatt

SEQ ID NO: 253414 - DNA, 663 bp, Unknown
  Bacterial polypeptide expressing nucleotide sequence isolated from the Sargasso Sea
aatggtgtgtattgaagagcttataaggaagattaaatcatataatcccaatgctgattttgatttaataaagaaatcatacaattatggttttaatgctcataaaggtcagtatagagcttcaggagaaatatattttacccatcctgttgaggtggctaatatagtaattgatttaaagcttgatgaatctaccattaaaacagctcttcttcatgatacaattgaagatactagtagatccttaaaacaattagaggttgcttttggtaaggaggtgtctcaactagttgatggagtaacaaaacttacaaatttagaactaagttcattagaaacaaaacacgcagaaaattttagaaaactattcatggctatgagcaaagatgttagagtcttacttgtaaaacttgcagacagattgcacaatatgagaaccatcaaggccttacctattgataaacagattagaaaatctaaagaaacaatggaaatttttgcaccattggcaggtagaatgggcatgcaatttatgagagaagaattagaagatcttagttttcgagtgcttaattctgaagctcgtaattcaattattagaagatttataactctaagaaaagaaactgatgatttagttcctaaaattatagatgacattaa

SEQ ID NO: 253415 - DNA, 709 bp, Unknown
  Bacterial polypeptide expressing nucleotide sequence isolated from the Sargasso Sea
gatagtgacaaggatcagctgcgaaccgtctaccagtactgtctgacgcttggtgacgaagcgctcaccaaccgcctgctggtccgcggggtcgagatggtgggtatcttgctgatgctcagcatggatctcggcaccctcaaggccgccatcatctaccccttcgtcgaagccggcctcatcagccaggagcggatggacgaggacttcggccccaagatcgccaagctggtggaaggggtactggagatggaggccatccgctccctgcagaccctgcaccgcagtgaaacctcgccggaacaggtcgacaacgtgcgccgcatgctgctcgccatggtcgaggatgtgcgcgccgtggtgatcaagctggcggagcggatcgcctgcctgcgggaagcgaagaaggcggatgaagagacccgggtgctgatggcccaggagatcaccaacatctacgccccgctggccaaccggctcggcatcggtcagctcaagtgggagctcgaggatctcgccttccgctacctgcacccggatacctacaagcagatcgccaaacagctcgacgagaaacggctcgatcgggagcgctacatccgcgagttcgtgcagtctctgcgcgatgcactgaaagaggcgggggtcgaggccgaggtctacggccggccgaaacacatctacagcatctggcgcaagatgcagaaga

SEQ ID NO: 253416 - DNA, 786 bp, Unknown
  Bacterial polypeptide expressing nucleotide sequence isolated from the Sargasso Sea
ttcgacgacgtgctcgcgttcgtgcgcgagcgggctggcgacgtgcgcctgttttcgggcgaactgctcgccgatcactcggcgggcacggcgtcgatcatgcgcacgctgaacgtcgatccgtccgcgatgcaggcggccgcgctgttcgtgctgacgccgcacctgagcgaccccgagcgcgagctcaccgagcgtttcggcgacgaagtggcgcggctcgtgtccgacgtgcgcaagctgttgcggctcggcaccgtcagcctgcgtgccgcgcagaacgcgggggccgatgccgggcgcgatgcggccgaagagcggcgcacgcagatcgaggcgctgcgcaagatgctgcttgcgttcgcgcaagacatccgcgtggtgctgatccggctcgcgtcgcgcttgcagtcgctgcgctactacgcggccgcgaagatcgacccgccgcccgacgtcgcgcgcgagacgctcgagatctatgcgccgctcgcgaaccggttgggtatttggcaactgaagtgggaactcgaggatctcgcgttccgcttcgaagaccccgtcacctacaagcggatcgcgaagctgctcgacgagaaacgcatcgagcgcgaagcgtacgtcacgcaggcgatcgaccggttgcagcaggagctggcggacgcgcacatccaggccgacgtgagcggccggccgaagcatatctacagcatctggcgcaagatgcgcggcaaggaactcgacttctccgagctgtacgacgtgcgcgcgtttcgcgtgatcgtg

SEQ ID NO: 253417 - DNA, 613 bp, Unknown
  Bacterial polypeptide expressing nucleotide sequence isolated from the Sargasso Sea
atgcttaattctaacgatttaataaataaagtaaaaacttacaataagtttctaaatcctgagactttaaccaaagcttatgattttgctcttaaagctcatgaaaaacaaaaacgtgacgaaggttcaccttacatcattcacccagtcgcagtagcagatattttaactgatttaaaattagatagtgcaacaatagctactggattattgcatgacactatagaagatactcacgcaacatatcaaactattgaaaaagaatttggtaaagaagttgctgatttggttgatggagtaaccaaattatctgaatatgaaaatcaagcaatatcaaattctaaggcggaaaattttagaaaacttataattgcaacttcaaaagatattagagttttattagtaaaaattgcagacagacttcataacatgagaacaattaaattcgttgttgatcaagaaaaacaaattaggaaagccaaagagacaatggaaatttatgctcctttagcagacagaatgggtatgaatagaattagagatgaacttgaagatttgtcttttaatattttaaatcctgaagcgagaaaattaataaaagatagattagata

SEQ ID NO: 253418 - DNA, 697 bp, Unknown
  Bacterial polypeptide expressing nucleotide sequence isolated from the Sargasso Sea
cttgctatctgctcatgatcttgttgatgctataaaggaatacaatccaagcactaacgtccacttaattgaaaaagcataccactttgggttagatgctcatgcgggacaaatgagaaagtcaggtgagcccttcttttcgcacccagttcaggtggctaaaatactctccgagctcaaactagatgacgcttcgattatcacagctctgttgcatgatactatagaagacactaataagtcttttagagatgtatctgacttatttggaagcgaaattgctaatcttgtcgatggtgtgacgaagctttcaaatctcgaagttgcttcattggagagaaagcaagccgaaaactttagaaaattgattgttgcaattagcaaggatctaagagttcttttggttaagctcgcagaccgattacataatatgagaactattagagcggtgaacaatgataggcaattagtaaaggctaacgagactatggatatatatgctcctttagccggtagaatgggaattcagtcaattagagacgagctagaggatctaagttttcgaatattgaatccagagggaaggaattcaataatcagaagatttctaaagcttaaaaaagaaagtgatgacctcattccaaaatcatcaatgatattgaaaatcaactggcttcagttggcgtcaaagcaatag

SEQ ID NO: 253419 - DNA, 760 bp, Unknown
  Bacterial polypeptide expressing nucleotide sequence isolated from the Sargasso Sea
cgaaccagcaccggttcggccacggtgggctgcgcgttgcccgaagtgaggcgccatcccgtccgccatccggacgattacggcatcgctctgccggactggttgcgggagtgcatcgccaatgtgccgcccggtatcggccagagctgccccaccgatgccgaggcgctgctggtgtcggccttcgatttcggctttcagctccacgaaggccagttccgcgccagtggagacccgtacatcgtccatccggtggcggtggctgatctgttgcgggacatcggcgccagcgctccggtgattgccgcaggcttcctccacgacgtggttgaagacaccgacgtcacccccgatcagatcgaactgcacttcggttctgaggtgcgtgaactggtggaaggggtcaccaagctcggcggcatccacttcaacgaccgcacggaagctcaggcggagaatctgcgccggatgttcttggcgatggccagcgacatccgtgtggttttggtgaagctggccgaccgcttgcacaacatgcgcaccctcggtgcgttgaaggaggagaagcgtcagcggatcgcccgtgaaacccgcgagatctatgcccccctcgccaaccgcctcggcatcggccgcttcaagtgggagctggaggatctggccttcaaattgctggaaccggaggccttccgggagattcaggaggaggtagccaccaaacgcagcgaacgggagcaacggctcggcgtcacggtggggc

SEQ ID NO: 253420 - DNA, 672 bp, Unknown
  Bacterial polypeptide expressing nucleotide sequence isolated from the Sargasso Sea
tatgcttaaatctgaagaattaattaataaagtgttggaatataataagtttttaaatcctgaaacacttactaaagcttataattttgcacttaatgctcacaaaaaacaaaagagagatgagggagttccctacataaatcatcctgtcgcagtcgctgatattttgtctgatttaaaattagatagcgcaacaattacgactggtttattgcacgacactatcgaagatactgatgctacttatcaaacaattaaagaagaatttggtcaagaagttgcagatttagttgaaggtgtaactaaaatatcagtctttgaaaatcaagttataagtgaaaaaaataaacaaaaattttctaaggctgaaaactttagaaaattaattatagcaacttcaaaggatataagagttcttctagttaaacttgcggatagacttcataacatgagaacgattaaatatttaaaagatgatgaaaaaaaaataaggaaagctcaagaaacaatggagatttatgcaccattagctgatagaatgggaatgaacagaataagagatgagctagaagatctatcatttgaagtattaaataacgaagcaagagcattaataaaaaatagacttgacgaaattaaatataacaatttgatgaattttaattcgctatc

SEQ ID NO: 253421 - DNA, 529 bp, Unknown
  Bacterial polypeptide expressing nucleotide sequence isolated from the Sargasso Sea
atggcggctgtagctagggttttaccttggcgccgatcggtagcgcctgttcatactgaaattcaaggggtcgtagatcggtacaaagcgcgatggcccaaaagttccgctgacttgctggtgcgagcttatgaggctgcgcttgcagcccaccaaggccaaagaaggaagtcaggggagccctacattttgcatccggtagcggttgcttctgtcgttgcggaaatgggtttggacgacgtttcgattgctgcagcccttctccatgatgccgttgaagacactggtatagagctacttgaaatccgagctgaatttggcgatgacgtagcagcaatagtcgatggagtaacaaaactagatcgcgttagattcgccaccaagcaggcgcaacaagcggcaacgttgcgaaaaatgctcgtagcaatggcgcgcgacttgcgggtgctgctgatcaagcttgcagaccgactacacaacatgagaacccttggggctctggaattaacaaaacaagagcagatagcgc

SEQ ID NO: 253422 - DNA, 856 bp, Unknown
  Bacterial polypeptide expressing nucleotide sequence isolated from the Sargasso Sea
ggtggccgtggcggatctactgcgggacatcggcgccagcgccgcggtaatcgccgccgggttcctgcacgacgtggtggaagacaccgacgtcagcctcgagcagatcgaagcccacttcggaaaggaggtgcgccatctggtggaaggggtcaccaaattgggcggcattcacttcaccaatcgcaccgaagcccaggccgaaaacctgcgcaagatgttcctggctatggccagcgacatccgcgtcgtgctggtgaagctggcggaccgcttgcacaacatgcgcaccctcggagcgctgcgtccggagaagcagcagcgcatcgccaccgaaacccgcgacatctacgccccgctggccaatcggctgggcatcggccgcttcaagtgggagctggaggatctggccttcaaggtgctggaacccgaagccttccgcagcatgcagcaggaggtggccagcaagcgcagcgacagggaggaacggctgggggtgacggtgcaactgctgcgcgatcggctggaagcctctggcgtgcgggactgcgaggtggagggccggccgaaacacctctacggcatctggagcaagatggagcgtcagcagaaggcattccacgagatctatgacgtggcggccctgcggatcgtcaccccatcagtggagtcctgctatcgcgccctggcggtggtacacgacaccttccgccccatccccggtcggttcaaggactacatcggcctgcccaaacccaacggctatcagtccctgcacacggcggtgattggccggcatcggccggtggaggtgcagatccgcaccgctgagatgcacgaagtggcggagtacggc

SEQ ID NO: 253423 - DNA, 597 bp, Unknown
  Bacterial polypeptide expressing nucleotide sequence isolated from the Sargasso Sea
ttatgatacggccgccaacgaggatgctttaaataaagcctatgttttttcaatgaaggcgcacggatcacagagacgggcctctggtgatccctacttctctcaccccttagaggtcgcaggcattttaacaaaaatgcgtttagaccattacactatcataacagccttacttcacgacactgtggaagacacaaatgtgacggtagaagagataggtagaatgtttggaaaagagatagcaagtctagtcgatggagtaacaaaattaagtcgtattgacttagtctctgataacaggaaacaagcggaaaattttcgaaaactagtaatagcgatgtcggatgacatacgtgtgctgttggttaaattagcggaccgtttgcataatatgcggacactgcacttcatttctgacaaagaaaaacgtagacgaatagcttttgagacaatggatatctattcaccattggcagaacgaatagggatacatgaacttaaggatgagctagagtttctggcctttaaagaactcaatgaagatgctttcgaaactgttacgtcgaggctcgatgttttagttaaagagggaagcaa

SEQ ID NO: 253424 - DNA, 765 bp, Unknown
  Bacterial polypeptide expressing nucleotide sequence isolated from the Sargasso Sea
gatggtagcgacacgtcgagttgctccatggcgtcgacgagcctcaggacagagcgatgaaacaacagctttaatagacgcttatttagaacggcatccaaaaggtgacgttgcgttaatagaacgtgcatataaaacggcattacgcgcacatgagggacaaacccgtaagtctggagagccctacgttcatcatcctctggctgtagctactatcgtcgctcatcaaggtctcgacgatgtaaccataggagcagctttgcttcatgactcgatagaagacacagagatagatctaacagatcttgaaagagatttcggttctgaagtcgcgagcatagttgatggtgtcacaaaactagacaggatcaattttgattctcgtgaggaccaacaagccgcaagcatgaggaaaatgctcgtagcagtagcaaaagatctaagagtcttagtcataaaactcgctgaccgtctacataacatgcgaaccctcgcagctttaccggaatttaaacaggaaagaacagctagagaaactcttgatatatatgctccgctggctaatcggttaggaatgcaggatgtgaaagtccagttagaagatctttcattagcgacacttcacccaaagcgttacagcgaaattgcacaaatggtccaagatcgcgctcccgaaagagacatgtaccttacacagctagtagtgaacgtgaaagaacggtttaacgacatgggtatcaaagcggatgtgtcaggaagacctaa

SEQ ID NO: 253425 - DNA, 1837 bp, Unknown
  Bacterial polypeptide expressing nucleotide sequence isolated from the Sargasso Sea
atgctcgacgcttcctcaccacaggactcttcccggaccgagagtgctccggcgcctgtgcagtgcggtggcccggagctgaggcgtcatccggtccgccatccggacgagtacaagatcgccctgccggagtggttgcggcagtgcatcctcaacgttccaccgggcctggggacgagctgcccgacggatccagaagccctgttggtggcggcctttgatttcgggtttcagctgcaccagggccaattccgggccagtggtgatccctacatcgttcaccccattgccgttgccgatctgctgagggacatcggtgcgagcgccagcgtgatcgcggccgggttcctgcacgacgtggtcgaggacaccgacgtcacccccgatcagatcgagctgcatttcggttctgaggtgcgtgagctggtggagggggtgacgaaactgggcggcattcacttcaacaaccgcaccgaggcccaggccgagaacctgcggcggatgtttctggcgatggccagtgatatccgggtggtgctggtgaaactggccgatcggctccacaacatgcggacgctgggggcgctcaaggaggagaagcgccagcgcatcgcccgggagacccgcgagatctacgcccccctggccaaccgcttgggcatcgggcggttcaaatgggaactggaggacctggccttcaagttgctggagccggaggcgttccgggagattcagcaggaggtggccagcaagcgcagtgagcgggaggagcgtctcggcgtcacggtcgccctgctgaacgaccgcttggcgcaggccggactcgagggttgtgaggtgagtggtcgtcctaagcacctctacggcatctggagcaagatgcagcgtcagcagaaggcgttccacgagatctacgacgtggccgcgctgcggatcatcacgccgagtgtcgagagctgttatcgcgctctcgcggtggtgcacgacaccttccgacccattcccggtcgcttcaaggactacatcggcctgcccaaaccgaacggctatcaatccctgcacaccgccgtcatcggacgccatcggccgattgaggtacagatccgcaccatcgagatgcaccgggtggcggaattcggcatcgccgcgcactggcaatacaaggagggcggctcaccggccagcagcagcagcgcggcggaacgcttcaactggctgcggcaactggtggactggcagcaggagggtggcaacgacgaccacaacgactacctctcgtcgatcaaggaggacctcttcgatgaagaggtgttcgtgttcacgccgaagggcgatgtggtcgggctgcgcaagggggcaacgccggtggacttcgcctaccggattcactccgaggtgggcaaccactgccatggtgcgcgcatcaacgaccggctctgccccttggccacggcgttgcagaacggtgactttgttcagatcctcaccagcaacacggcccatccgagcctggactggctcaatttcgtcgccacccccacggcccgcaatcgcattcgccagtggtacaagcgcagtcaccgggacgagacgatcgaacggggcaaggagttgctggagcgcgaactgggacgggatggcttcgaagctctcctgaacggtgcggccatggcccgggtggctcagcgctgcaacgttggttccaccgatgacctgctggcctcgctcggcttcggtgcggtgacgttgcaacaggtgctcaatcgcttccgcgaggagatccgcctgatcgccgagcaggacacggctccccccagcaacgaggaagtggcccggg

SEQ ID NO: 253426 - DNA, 643 bp, Unknown
  Bacterial polypeptide expressing nucleotide sequence isolated from the Sargasso Sea
tatgcttaagtctgaagaattgataaacaaagtcaaaaactataataaatttttaaatcctgaaactttatccaaagcttatgattttgcattaaaagctcatgaaaaacaaaaaagagatgagggttcaccttatattatacacccaattgcggttgcaaatatattaactgagttaaagctagatagcgcaactatagcaacaggattactgcacgatacaatagaggatacatacgcaacctacaacaccatagagtctgaatttggtaaagaggttgctgatttggtcgatggagttacaaaaatatcagtgtttgaaaaccaagcaatttcaaactcaaaagcagaaaactttagaaagttaatcctagcaacttccaaagatatcagagtcttgcttgtaaaactagcagacagattacacaatatgcgaacaataaaagttgttgaaaaagaaaaacaaataagaaaagcaaaagagacaatggaaatatatgcgccccttgctgatagaatgggtatgcaccgtattagagatgaattagaagatctatcatttgaagttttaaatgaagatgctcgaaaattaattaaagatagattagataaaataaaagaaaataatcttataaattttaat

SEQ ID NO: 253427 - DNA, 1300 bp, Unknown
  Bacterial polypeptide expressing nucleotide sequence isolated from the Sargasso Sea
atgcttaaatctgaagaattaattaataaggtaaaaaattataacaagtttcttaatccagaaactttgtcaaaagcttatgattttgctttaaaggctcatgaaaaacaaaaaagagatgagggctctccatatattattcatccaatagcagttgctaatattttaactgagttaaagttagacagcgcaactatagcaacagggttacttcatgatacaatagaagatactcacgccacttacaacacaatagaggcagaatttggaaaagaggttgctgatttagtagacggcgtcacaaaaatctcagtttttgaaaatcaggctatatcaaactctaaagcagaaaattttagaaaattaatacttgcaacatctaaagatattcgagttttattggttaagttggctgatagacttcacaatatgcgcacaatcaaggttgttaataaagaaaagcagattagaaaagcaaaagaaactatggaaatttatgctccgcttgcagacagaatggggatgcatcgtataagggatgagttagaagatctatcttttgaagttttaaatgaagacgcaagaaaattaatcaaagacagattagataaaattaaagaaaataatcttataaatttcaataatatttctgatgaattttctgaaatacttaaaattaaaaatattgagccaaaaataattggaagagaaaaaacccctttttcaatttggagaaaaattcaaaaaaaaagaacctctcttgaacaaataacagacataattggttttagaattattttagataatattgatgattgctataaagctttaggaattttccatagtaaatggaattgtataccaggtaaatttaaagattatatttcatctcctaaaatcaacaagtatcaatcattgcacacagctattattggaccaaataaaagacctattgaaatacaattaagaacaaagcaaatgcatgagttcgcagaaagaggtattgcttcacactggaaatacaaatcatctgaaaaatttaattctttaacttggaaggaatatgattggttagcagatttggtagaaattatagataaaaacgaaaaccctgatgactcatacgaatatacaaaacttcaaatgtttcaagaaaacgccttttgttttactccaaaaggatcaattattaagttacctaaaaatgctacacccatagattttgcatatgcagtccatacccaaataggagatgctgctgttggttgtgaaataaacggaaaagaaagcgcttgcaatc

SEQ ID NO: 253428 - DNA, 2209 bp, Unknown
  Bacterial polypeptide expressing nucleotide sequence isolated from the Sargasso Sea
atggtctctgttcgcgaagcgcactttaatgatcccgattttcatcttgaagattgggtggctcgctatgtcagtcatgtcgaggaggcccagaccttactcaccctgattgcacaggtggaagccttacccgctaagagtcctgccgcgaaaagagaactgctcgaacgtgcccgcgagatgattgaaatcctcgcgccattgaacatggatatcgagacgctgcaagcggccatcctatttgtggtgtttgatgccggcttactaaacgaagaagcgatcaaagaaaaatttggcgagccgctggcgcggttagtcgccagcgtcgtgaccatggatgccattggcgcgttaaaaatcaatcccaatagccgctcaaccgagccgcaaatcgacaatatccgccgcatgttgctggcgatggtcgaagacgtgcgcgccgtggtgattaaactggccgagcgtgtttgtttgcttcgcgccgtgaaaaatgccgatgaagaaacccgcgtcttgctggcccgcgaaattaccgacatctatgcgccgctcgcgaaccgtttgggtattggtcagttaaagtgggaattagaagatatttccttccgttatctgcatccagatacctacaaggacattgcgaaacagctagatggtaagcggttagaccgcgaagtctatatcgaaaaatttgtcgagcagttgcaacagcgcctcgatgaggatcatatccgcgctaaggtctatggtcgtccaaaacatatctacagcatctggcgcaagatgaagggcaagcaccttaagtttgatgagctgtttgacgtgcgcgccgtgcggattgtcactgagcgtttgcaggactgctacggcgccttaggcgtcgtgcacactctttggcaccatatcccgcgtgagttcgacgattacgtggccaaccctaaacctaatggttatcaatccatccataccgtagtggtggggccagaaggtaaaaccgttgaaattcaaattcgtacccaagatatgcatgaggatgcagagctgggtgttgccgcgcactggaaatataaagagggtaatcactccggcaaacagagcggctacgaagaaaaaatcaattggctgcgtaaaattctgcaatggcaggaagacgtggtcgaaagcggcaacttggtcgaagaagtccgcagccaagtgtttgaagacagagtctatgtctttaccccaagcggtgaagtcgttgacttgccacttggctcaaccgtgctcgactttgcctactatattcactcgcaggtcggtcataagtgtattggtgccaaggtcgatggccgcattgtgccgtttacttatcaagtggagactggcgagcgtatcgagatcatcacctcgaagcatccaaatcctaagcgcgattggctcaatccaaacttaggttatatccgcacatcgcgggcacgctcgaaaattcagcattggtttaagcagcaggaccgcgataaaaacattatcgctggtaaagaaatgctcgaagctgagctggcgcgagtcagccttaaaatcaaagatgctgccatcgccgttgagcgctttaatatggcgagtatggacgacttgcttgccgctatcggcggcggtgatgtgcgtttacatcaggtcgttaaccatattcaaagtaagttgcgcctcgatgaggcgagcgaagaagatgcggttgaagaattagttaagaagagccaacccaaatctggcaccaatagccgaggacaggtggaagtgaatggcgtgggtaacttactcagccatatcgcccgttgttgccagcccgtgcctggggatgagattttaggctttatcaccaaaggacgcggtatttcggtgcatcgctccgactgtgagcaggtgaaagagttgatgcgcgttcacccagaacgtggcgtcgatgtggtttggggcgaaaattactccggcggttatcgtatgcgcctgcgtgtcttagcccatgatcgcagcggcttattgcgggatctcacctcggtactcgccgccgaaaagtccaatgtgcttgccatgagctcctcatcggatattaagaatcagacggcagccattgagctggaattagagctatacaacctcgatggcttatcgcgggtgttatctaagctctcccaagtcgatagcgtgatagaagcgcgcagattgtagc

SEQ ID NO: 253429 - DNA, 1744 bp, Unknown
  Bacterial polypeptide expressing nucleotide sequence isolated from the Sargasso Sea
aatgcttaaatctgaagaattaattaataaggttaaaaattataacaagtttcttaatccagaaactttaacaaaagcttatgactttgctttaaaggcccatgaaaaacaaaaaagagatgaaggatctccatatatcattcatccaatagctgtagcaaatatattaactgaacttaaattagatagtgcaactatagccactggtttacttcatgatacaattgaagatactcatgcaacttataaaactatagagacagaatttggaaaagaagttgcagatttagttgaaggtgttacaaaaatttctgagtttgaaaatcaggccatatcaaattctaaggcagaaaattttagaaaattaatactagcgacatcaaaagatatccgagttttactggtaaaattagccgacagacttcacaatatgcgtacaatcaaagttgttgataaggaaaagcaggttagaaaagcaaaagaaactatggaaatttacgctccacttgcagatagaatgggtatgcatcgtataagagatgaattggaagacctttcttttgaggttctaaatgaagatgcaagaaaactgattaaagatagattagataaaattaaagaaaataatcttataaactttaataatatttctgatgagttttttgagatacttaaaaccaaaaatatagaaccaaaaatagttgggagagaaaaaacacctttttcaatttggagaaaaattcaaaaaaaaagaacttctcttgaacaaataacagatataattggttttagaattattttgggtaatgttgatgattgctataaagcattaggaatttttcatagcaaatggaattgtataccaggtaaatttaaagattatatttcatcacctaaaatcaataaatatcaatcattacatacagcaattattggaccaaataaaagaccaattgaaattcaactaagaacaaagcaaatgcatgaattcgcagaaagaggcattgcttctcactggaaatacaaatcatcagaaaaatttaattcattaacttggaaagagtatgattggttagcagatttagttgaaattattgataaaaatgaaaatccagatgactcatacgaatatacaaaacttcaaatgtttcaggaaaatgccttttgtttcactccaaaaggatcaattataaaattacctaaaaatgctacaccgatagattttgcttatgcggttcatacacaaataggagatgcagctgttagttgtgaaataaatggtaacgaaagcgctcttcaatcaatattacgaaatggcgatgttgttaaaattataacctcaaaaaaagcttccccttcactacattggttaactagcactaaaacaggaaaagctcgtgctgcaattagacgttattggcagtaccgtgaaaatagtaaaccgattaaggaaaaaagatataatactacactttggatttcactaccggatgagcctggaaaaatgggtgatgttacaacaatgattggagaaaactttgttaatatttcaagtgtagaaatggtagaaaaactcaatggaaggattaattttaaatttaatttaataattcatgaccttaagaactttacaaaattgataagtgaactaaaacaaaaagaatataaatttaaaattattagacataaaaataaaaaatatgctttctttaaaaaactctttagcagttttaagaaaaactga

SEQ ID NO: 253430 - DNA, 2113 bp, Unknown
  Bacterial polypeptide expressing nucleotide sequence isolated from the Sargasso Sea
aatgcgtgaaacggacctagttgatcgcattgtttcgtataatcccaaagttgacactaggataataaaaaaagcatttcattttggcatgttaatgcatggttctcagctaagagagagtggggatccttacttttctcatccaatagaggtggcaaatattttagctgagctaaatctagacacatcatcccttgtctgcgctcttctgcacgatactattgaagatacaaaagcaactataaaagatattagagaaaattttggtaaagagattgccaaacttgttgatggtgttacaaaattaaatgaattagaaagtaagccagatcaatctaaagccgctgaggattttcgaaaattaatattagcaagttcttcagatatcagggttcttcttataaagttagctgatagattgcataatatgagaactcttaagcacttaaaaaataaagaaagaagaaagagaatagcgaaagaaactatagacatatatgcgcctcttgcttcaaggattggaatgcatgaaatcagggaggaattggaagatcttgccttttcagaaacagaacctgaaataagatcaatactcttggaaagaataaaggtatcaaaaaagaaaaataataaaattgtaaaagatatctccgacaaactatcaaaagcacttaagtcaaataaggtaaaggcatttgtctcaggaagagaaaaatcaatttattctgtttggttaaaattagaaaataaaaataagtcattagagcaattgtcggacctgtttggttttcgaatatatgttgacaaaatagaagattgttatgctgttcttggagtattgcatcaaaattggcaagcagttccaggtttattcaaagattatatctcaacaccaaagaagaatggttatcaatctatacatactaccatagtagggcctagtaatcatcgagtagaaattcaaataagaacgaataaaatgcatgaaattaatgaaagaggtgttgctgcgcactgggcatataaggaaaaagactcatcaaatggtgagtatttaacttctattgcctggatggctgatttaattgatattcttcaaaaagatggcgctacagatgaattccttgaaaatacaaggttagagctatctcatgatcaagtttattgttttacaccaaagggaagactcattgccctgccaaaagactcaacagcattggactttgcttttgccttgcatactgatttaggtttattttgttcgggagttaaaattaatggtgaaaaaaaacctagaagaacaaaattaaaaaatggagatgaggttgaaattataaaatctaaatcagaagttccattagactcatatgaggatcttgtaactacaggaagatcaaaatcctcgataagacgtgcaataagagaaaatatgattaagaatcaaagacttttaggaaaagaaattattaaaagtgttttttcttctcatagaaaaaaaccaacaagagatattcttgaaagatcgtttggtccattgagcgtaaagtctcttgttgatctttatcaattagttggttctggaaaatcatctggctctgaagtttatgatcatgtttatccaaacacgaaacgaaaaataaaaagaaaaagattttatggtaaaaatatttccctacctatttcaggattacttcctgatatggatgttagttttcaaaaaaactctttacttgtaccgggtgacaatattatcggaataactattcctggaaaaggaattacaatctatcacgctaaggatgaaggacttcataagcatgaaaataatcctgaaagatggttgagattgcaatggaaaaaagagattgatgtaacatttacggcaagagtaatgctaagtattataaatgaggttggttccttgggagttattagcgctgctattggtgattatggtggaaatataactaatttaaatttaacagaaaaagatactgatttttataacttaaggattgatattgatgtagatgataaaagccatattgataacataattaagtcattaaggggtttacctgaggttaattcagtagaaaggtcaatacactga

SEQ ID NO: 253431 - DNA, 607 bp, Unknown
  Bacterial polypeptide expressing nucleotide sequence isolated from the Sargasso Sea
aatgcttaaatctgaagaattaattaataaggtaaaaaattataataagtttcttaatccagaaactttgtcaaaagcttatgacttcgctttaaaggctcatgaaaaacaaaaaagagatgagggctcaccatatattattcacccaatagcagtcgcaaacattctaactgagttaaagctagacagtgcaactatagccactggtttacttcatgatacaatagaagatacccatgcaacttacaaaacaattgaagcagaatttggaaaagaggttgccgatttagttgatggtgttacaaaaatttctgtgtttgaaaatcaggctatatcaaattccaaagcagaaaattttagaaaattaatactagctacatcaaaagatatccgggtcttactggtgaaacttgctgatagactacacaacatgcgtacaatcaaagtagtagacaaagaaaagcaaattagaaaagcaaaagaaactatggaaatttatgcaccactagcggataggatgggtatgcatcgtataagagatgaattagaggacctttcttttgaggtactaaatgaagatgcaagaaaattgataaagatagattag

SEQ ID NO: 253432 - DNA, 2025 bp, Unknown
  Bacterial polypeptide expressing nucleotide sequence isolated from the Sargasso Sea
tgaaaatcctcgcgcctctgaatatggacattgagacgctgcaagcggccatcctgtttgtggtgtttgatgccggtttattagacgaagaagcgatcaaagaaaagtttggtgagccgctggcgcggttagtcgccagcgtggtgaccatggatgccattggcgcgttaaaaatcaatcccaatagccgctcaaccgagccgcaaatcgacaatatccgccgcatgttgctggcgatggtcgaagacgtgcgcgccgtggtgataaaactggccgagcgtgtttgtttgctgcgcgccgtgaaaaatgccgacgaagaaacccgcgtcttgctggcccgtgaaattgccgatatctatgcgccgctcgctaaccgtttggggattggtcagttaaagtgggaattagaagatatttccttccgttatctgcatccagatacctacaaggacattgccaaacagcttgatggtaagcggttagaccgcgaagtctatatcgaaaaatttgttgaacagttgcaacaacgcctcgatgaggatcatatccgcgctaaggtgtatggtcgtccaaaacatatctacagcatctggcgcaagatgaagggcaaacacctcaagtttgatgagttgtttgacgtgcgcgccgtgcggattgtcaccgaacgtttgcaggactgctacggcgccttaggggtggtgcatacactttggcaccatatcccgcgcgagttcgacgattacgtggccaaccctaaacctaacggttatcaatccatccatacggttgtggtggggcctgaggggaaaaccgttgaaattcaaattcgtacccaagatatgcatgaagatgcagagctgggggttgccgcgcactggaaatacaaagagggtaatcactccggtaagcaaagcggttacgaagaaaaaatcaattggctgcgaaaaattctgcaatggcaggaggacgtggtcgaaagcggcaacttggtcgaagaagtccgcagccaagtgtttgaagatagagtctatgtgtttaccccaagcggtgaagtggtcgacttgccacttggctcaaccgtgctcgactttgcctattatattcactcgcaggtcggccataagtgtatcggtgctaaggtcgatggccgcatcgtgccgtttacttatcaggttgaaacgggtgagcgtatcgagatcatcacctcgaagcaccccaatcctaagcgtgattggctcaatcccaacttaggttatatccgcacatcgcgtgcgcgctcgaaaattcagcattggtttaagcagcaagaccgcgataaaaacattatcgccggtaaagaaatgctcgaagccgagctggcgcgactgagccttaaaatcaaagatgctgccatcgccgttgaacgttttaatatggcaagtatggacgacttgcttgcggcaatcggcggcggggatgtgcgtttacatcaggtcgttaaccatattcaaagtaagttgcgcctcgatgaggcgagcgaagaagatgcggttgaagaattagttaagaagagccaacccaaatctggtaccaacagccgtgggcaggtggaagtgaatggcgtgggtaacttactcagccatatcgcccgttgctgccagcccgtgcctggggatgaaattttaggttttatcaccaaagggcgtggtatttcggtgcatcgctccgactgtgagcaggtgaaagagttgatgcgcgttcacccagagcgtggcgtcgatgtggtttggggcgaaaattactctggtggttatcgtatgcgcttgcgcgtcttagcccatgaccgcagcggcttattgcgggatctcacctcggtacttgccgccgaaaaatccaatgtgctcgccatgagctcctcatcggatattaagaatcagacggcagccatcgagctggaattagagctatacaacctcgatggcttatcgcgggtgttatctaagctctcacaagtcgatagcgtgatagaagcgcgcagattgtaat

SEQ ID NO: 253433 - DNA, 1741 bp, Unknown
  Bacterial polypeptide expressing nucleotide sequence isolated from the Sargasso Sea
atgagtgatacctcaataaaagaacaagatagattatttaatgaactatcaaataactattctcaaaaagataaagttattttaaaaaaagcttatgatattgcatctaaaggacatagtgaacaaaaaagattctctggagagccttacataactcaccctctttacgtagcattatatttatctaatttaagtatggatattgagacgattgtatcagctattttgcatgacttaatagaagatactgaaattacatataaagacttaaagaaagagtttggtaaagaagttgctgacattgtagatggcgtaactaaattagataaaattaattataactctaaggaagaagccaaagccgacgccattaggaagatggtaatagcaatggcaaaagatattagagtacttattctcaaactagctgacagattacataatattgaaacaatagaatatttgaatgaatggaaaaaagaaaaaatagcacaagagacattgtatgtatatgctcctttagctcatagattaggacttcaaaatattaaacatagattagaagatgtttccttcaatatattatttaaaaaccaaaatgaagaaattaacaatctaatttcaaaatcagcacctaatagagataaaaatattaacgaatcaataaaaattattcagaacttattatcagataattcattatcagcagaagtagttggtagacctaaacacaattattcaatttataagaagataattaataacgggttgtcgtttaatgagataaatgatctagttggtatacgtattcttactgatgatgttaagaattgttatacaatacttggattgatacatgcgaactttcaaccagttcttggacgatttaaagattttatttcaatgccaaaatttaatttatatcaaagtttacatactacagttctcacaggtgaaggacagagaatggaaattcaaataagaactcacgacatgcactacagagcagaattcggtgttgcatctcattggaagtataaagaagcccccaagaatgatcttcaagagtggactaacgaattaaaaaatatttcagatgagtatcctgaacctaacgaatttctttcgcacatgaaactagatttatatgaacaagaaatattttgtttaacacctaatggagatgtaataactttacctacaggggcaacacccgttgattttgcttttgccgtacatacacaagttggagaaaaactaatcggagcaaaaattgatggtaagttagtaaatttaggtaccttacttaaaactggcgatactgtagaaatattaactactaaagatacatcaaaaggacctagtagggattggttaagttttgtaaagactactagagcaagatcaaaaataaaacaatggcatcaaaaacagatgaaggatgaagacattcaaaagggtaagcaaatattaaatacttggttagatgataatcaagatgtattaaatttttctaacaaggaagagatattagctcatttattagacaattatcatttgccaaacaatgaaacactttatttacaattaggaactaataatttaaaaatagataacttaggaacaaaaatacgaaaatatgtatttcctgaagaaatttcagaagaagaagatttactgtcacctgatccatcaatggaacttaaggatcaacaagtgctagtcgaaggttatgatgata

SEQ ID NO: 253434 - DNA, 1604 bp, Unknown
  Bacterial polypeptide expressing nucleotide sequence isolated from the Sargasso Sea
ctcgttgatggggtgacaaaactaaccaaaattcaacttagctctatggaaacccaagaagcagaaaacattcgaaagctgttgatggctattgctcaagatatcagagttattcttgttaaactcgctgatagattacacaatatgcgcacaataaaggcaatgcctcgcgttaaacagcagcaaaaagcacgagaaacaatggatatttttgcacctctagcgggtcgaatgggtatgcaatttattcgcgaagacttggaggatctagcatttaaggttcttaatcctaagggacgggaatctataatacgaaggtttattaatctacaaaaagatgcaggcgatgtaattcagcgaatctcacgtgatatgcatacagaatttggaaaagaatatatcgaagctgaggttttaggacgagcgaaaaagccttattccatgtggcgcaaaatgcaagaaaaagagctatctttttcgcgtctttcagatatttatggatttcgaattatatgtgcctccgaagtagattgttatagaattcttggagtgatacatcgccgctggaaagctgtcccgggccgtttcaaagattatattagtcaacccaaatcaaacggctatcgatctattcatacaactgtatctggacgtgatggaaaacaagtagaagtgcaaatcagaacccgacagatgcacgatgtggcggaaagtggtgttgctgcccactggtcatatcgggatggtgtaagaagcgaaaaccctttcacggtcgatcctgtgcagtggattacacgtttaatcgatgatttcgatagcgaagaagatcatgaagtttttttagaagccgttaaactggaaatgtatgctgataaagttttttgtttctcgccaaaaggtgatgttttaacttttccgacaggcgcaaccccaatagattttgcgtatgctattcacacaagaataggtaattcctgtgttggagcgaaagtcgatggtctaagagttcctctttggactaaattgcgtaatggtcaatctgttgaagttataactgctcaggggcagaacccgcagcctacatggttggacatgactgagaccggtaaagcaaaaactgcaatccgtagagctcttagggaggttgataaagaacgcatggttgttatgggtaaggccctattgagaactgcgtttgaacatattggtaagaaagctaccgataaatcacttgagcttgcagcttcaaaaatgcgattttcggattccaaagaacttttagctcgcgttggcagtactgaagtacgaccaggccatgttgttcagttagttcatcctgaggttgctgcggctgatgattttgatgtggatcaagcgagtgcagtcataggtttaaatgaaggtcagtttctagatcgaaggccatgttgtgggcctttgcctggtgagagaattgttggcattgcttcagggggatctggagtttctattcatgctatagactgtcttgaattggctcgttttgaagaaaagccagaactttggatagatctgcattggcatgttggtaagcacgcagcagtttatcctacaggtattgaaat

SEQ ID NO: 253435 - DNA, 2113 bp, Unknown
  Bacterial polypeptide expressing nucleotide sequence isolated from the Sargasso Sea
atgcgtgaaactgatttagttgatcgtattctgtcatacaatcccaaagttgatactaggataataaaaaaagcatttcatttcggaatgttaatgcatggatctcaacttagagaaagcggtgatccgtatttttctcatccaatagaagtagcaaatatattagctgaactaaatcttgatacatcatctctggtatgtgctcttcttcatgatacgattgaagatacaaaagcaaccataaaagatgtaaaagaaaattttggtaaagaaatagccaaacttgttgatggcgttacaaaattaaataaattagaaagcagacccgatcaatcaaaagctgctgaagattttcggaaattaattttagctagttcatcagatataagggttcttcttattaagttggctgacaggctgcacaatatgagaactttgaaacatctaaaaaataaagacagaaggcaaagaattgctaaagaaactcttgatatatatgctcctcttgcctcaagaataggaatgcatgaaattagagaggaactagaagatcttgctttttcagaaacagaaccagaaattagagcaattcttatagaaagaataaaagattcaaaaaagaaaaataataaaatagtaaaagatatttctgatgaattatcaaaggttttaaaatcaaataaactaaaggcatttgtatctggaagagaaaaatcaatttattctgtttggttgaaaattgaaaatcaaaataaatccttagagcaattatctgatctatttggttttcgaatacatgtagataaaattgaagaatgttactctgttttaggcgtgcttcatcaaaattggcaagcagttccaggtctttttaaggattatatttcaaccccaaaaaagaatggatatcagtcaattcatacaacgctagtaggtccaaataatcatcgtgttgaaattcaaataagaacgaataaaatgcatgagattaatgagagaggagtagcagctcattgggcttacaaagaaaaagattcatcaaatggtgaatacttaagctctattgcttggatggctgacttaattgacatccttcaaaaggatggtgctacagatgagtttcttgaaaacacaagattagaactgtcccatgatcaagtttattgttttacacctaagggtcgtttaattgccttaccccaagattcaactgcattagacttcgcttttgccttacatacagatttaggtttattttgttcaggagttaagattaatggagaaaaaaaaccgagaagaacaaaattaaagaatggtgatgaggttgaaataattaaatctaaatctgaagtgcctttggactcttatgaagatcttgtaaccacaggtagatcaaaatcttcaataaggcgagctattaaagaaaatacgataaagaaccaaagacttttaggaaaagaaattataaaaagtgttttttcttctcatagaaaaaaaccgacaagagatattttggaaagatcatttggaccattgaatgttaaatccctaatggatctctatcaattagtaggttcaggaaaatcatctggttctgaagtttatgatcatgtttatccaaaaaccaaacgaaagacaaagagaaaaagatattacagtaaaaatatttctttacagatttccggattacttcctgatatggatgtgagctttcaaaaaaattccttgcttgttcctggagataatataatcggaataactgtcccaggtaagggaattacaatttatcatgctaaagatgaagagcttcataaacatgaaaacagtcctgaaagatggttaagacttcaatggaaaaaagaaattgatgtaacatttactgctagaattatgttaagcattattaatgaggttggttccttgggtattatcagtgctgcaattgcggattatggtggaaatataacaaatttaaatttaacagaaaaagatactgacttttacaacttaaggattgatattgatgttgatgataaaggtcatattgataatatagttaaatctttgaagggccttccagaggttaattcagttgagaggttaatacattaat

SEQ ID NO: 253436 - DNA, 2311 bp, Unknown
  Bacterial polypeptide expressing nucleotide sequence isolated from the Sargasso Sea
atgtccgaggcagctgcaaattcaaaagaaaaaaacgaaattgaagtttccaaaactattttgcctgaaaataaaaaatatgaaagtgaatctttgaattatcaaataaaaattcccgattggcttcttaaagatattcataattttgaaaaatcaaataaagaaaatgatgagaatcaaaaccttatagtaaaggcttttaaacttgcttataaagctcatgatggacaattccgcgcgagcggcgagccatacattatccacccggttgctgttgcaaatctccttaaagaaataggtgctagttcatctgttattgctgcaggccttttacatgatgtagttgaagatactggcattgatttatccgaaatagaaacaaattttggattagaagtaaaaatacttgtagagggtgtaacaaaattaggcggcattcactttaacaacaggactgaagcacaagctgaaaatcttaggaaaatgtttttggctatggccagcgatatcagagttgtcttagtaaaacttgcagatcgacttcataacatgagaacaattgaatggctaaatgatgagaaaaaactaagaatagcgagagaaacaagagagatttatgcaccattagctaatcgactaggaataaacagatttaaatgggaattagaagatttagcttttaaattcctagagcctaaagaatatctagatcttaaagatcaaatcgccgttaaaagaagtgatagagaaaaaagattaaaagtaactttgaatcttatgaaggaaaacttgatttcagcaggtttgaaaaattttgaaataacaggaaggccaaaacatctttatggcatctggagcaaaatggaaagacaacaaaagcattttcacgagatttatgatgttgctgccctaagaattatcgtggacaattcagatagttgttatagagctttagcagttgttcatgatactttcaaaccaattccaggtagatttaaagactatataggattaccaaaacccaatggatatcagtccttacacacttctgtgattggaagacatcgacctattgaagttcaaattagaactacttcgatgcatcaaattgctgaatatggtattgccgctcattggcaatacaaagagggtggttctcctgctaaaagtaatgccgagagatttaattggctaagacaattagtagaatggcaacaagaaggtaatgaaagggatcataatgattatttagcttcaattaaagaagatttatttgatgaagaagtatttgtaatcactccaaaaggagatgttgttggtttaaggaaaggatctaccgcgatagatttcgcctacagaatccattctgaagttggaaatcactgtaatggaataagaattaatgaaaagctttctccattatctacagcacttcaaaatggtgacttcatagaaattttgacaagtaataatgctactccaagcttggattggctgaactttgtagttacgccaactgctaaaaatagaattcgccaatggtataagaaaagccatcgtgatgaaacgattaaaagaggtagagatttacttgaaaaagaagtaggtagaaacggttttgaagcattactttctagtgaagccatgaaaaaagttgcaaatcgatgcaatttaaaaactactgaagaccttcttgcatctcttggttttggtggtttaactttgcatcaagtattaaacagactaagagaagaaataaaattacagacagaagatgtaaaaaatgattctgactctgaaatagcaaaatctcttaaaagtaataataatttatccactaatcaatctaatacagcagctaaatcaccaatttccgggatagaaggtcttgattacagaataggtaaatgctgttccccactcccaggcgaggatattatcggaactgtgtcgctcggcaaccatgggataactatacatagggaagattgtgaaaatgtaataccaattccaatagagagaagattacctgtcggttggaatcaagataataaaactggcgataataagtttccaattcagctacgaatagaagtaattgatcgagttggagttcttaaagatattcttatgcggttatctgataaaggtataaacgttagtgatgccaatgttaaaactgcttatggtaaaccagctattataaatctttgtgtaggtcttgaaagttataatcaacttcacaaaacaattgaacaaattaaatcaatggcagatgttttagatattgccagagttggacaaagttaat

SEQ ID NO: 253437 - DNA, 2167 bp, Unknown
  Bacterial polypeptide expressing nucleotide sequence isolated from the Sargasso Sea
tatgtcgactaaaagtcctgtgaaaacagctgatgaactatttaatagtattttagaaaactatcctaaatcttctcataagcttttaaatgatgcatataagtttgcagctaatggacataaaaaccaaaaaagaaaatcaggtgaagactacattactcatccactacaagttgctctatatctcgctgaattgaatcttgataaagaaacaatcatagctgcatttttgcacgatttgatagaagatactgatgtaacttattctgatatcaaaaaagattttggcaaagaagttgctgatatcgttgatggtgtaacgaaattagataaaataaattacaactcaaaggaagaagctaaagcagacgcaataagaaaaatggttattgctatgtcaaaagatattagagtgttaattctcaaattagcggacagacttcataatatagaaacaatacaatatcatactgattggaaacaagagaaaatcgctaatgaaacactttacgtgtacgcaccattggcacatagattaggtttgcaatcaattaaacataaattagaagatacttccttcaagatcctttttgataaacaaaataatgaaattcaagaacagataactcaaacaaggccagatagagaaaatcaacttgaagaatctttaaatataattaagtcattgttatcagataactcaatttctgcagaagcatacggcagaccaaaacataattattcaatatacaaaaaaatagttaataatggattaacgtttgatgaaattaatgatttagttggaataagaattattactgatgatgtaaaaaattgttatacgatacttggattaattcatgcaaattttcaacctgttctaggtcgatttaaagattttatttcaatgcctaaatttaatttgtatcaaagccttcatacaacagttattacatctgatggtaataaaatggaaattcaaatcagaactcatgatatgcattacagagcagaatttggagtggctgcacattggaaatacaaggagaaaccatctaacgatctaactagatggactaatgagcttacagagatgtcatcagaatatcctgatcctaatgaatttttacagcatatgaagttagatttgtatgaaaatgaagtattttgtcttacacctgaaggcgatgtcttatcattaccacaaggctccacaccagttgattttgcttttgccattcatacacaggtaggtgagaaactgattggtgcgaaagtaaatggaaaattagtaaatttaagtaatgaactaaaatctggggatacagtagaaatacttacaagcaaggataagaacaaagggccaagtagagattggttaaatatagtaaaaactactagagctagatccaaaataaaacaatggtatcaaaagcaacttaaaaatgaagacatccaaaaaggaaaaacagtattaaatacctggttagatgagaataatgatgttttggaagtaaattcaaaagaccaaatattaaatgaattgttattagacatgaagcttcctaatatcgaaactttgtatcaaagtcttggaaatggaaatacaggtataaatattgttggtaacaagatacgtaaaatagtatttccaaatgaaatatctgttgatgacgatttatattcacctgaaattaagagtgatagtaaatcagatttaattattgttgaaggatatgatgacatacaagtcagaatggcaaaatgctgcgtacccgtacctggtgacgatattttaggatttataaccatatcaaatggtattgcaattcatcgttctgattgtttaaatataaaaattgatccaaataaaggtgaaagaattttagatgtaagttggggatttgaacctaatactggaactattgtttggcttgaaatagaagctattgacagaccttacttactcagagatgcgactattgcaatttctgataatggaggaaatatattggtagcaaaatctgttacaagtagtaaaagaattgtaagtttgatatttcagattgaagttagtgatgttactcaattagatgcaatattaaatgatgctaaagatattgagaatgtttttgaagcaacaagaatctatccaggaagaaaatga

SEQ ID NO: 253438 - DNA, 850 bp, Unknown
  Bacterial polypeptide expressing nucleotide sequence isolated from the Sargasso Sea
gatgctcaacgctgcctccacacccaaagagccccgaaccagcaccggttcggccacggtgggctgcgcgttgccagaagtaaggcggcatcctgtccgccatccggacgattacggcatagctctgccggactggttgagggagtgcatcgccaatgtgccgcctggcattggccagagctgccccaccgatgccgaggcgctgctggtgtcggcctttgatttcggcttccagctccacgaaggccagttccgcgccagtggagacccttacatcgtccatccggtggcggtggctgatctgttgcgggacatcggcgccagcgccccggtgatcgccgcagggttccttcatgacgtggtcgaagacaccgacgtcaccccagatcagatcgagctgcacttcggttccgaggtgcgtgagctggtggagggggtcaccaagctcggcggcatccacttcaacgaccgtacggaagctcaagcggagaatctgcgccggatgttcctagcgatggccagtgacatccgtgtggtgttggtgaagctggccgaccgcttgcacaacatgcgcaccctgggtgcgttaagggaggagaaacgccagcggattgcccgcgaaacccgtgagatctatgcccccctggccaaccgtcttggcatcggccgcttcaagtgggagctagaggatctggccttcaaattgctggaaccggaggccttccgtgagattcaggaggaggtggccaccaaacgcagcgagcgcgaggagcggctcggcgtcacggtgggtctgctgaacgagcggctggaacgggccggcctagagcactgcgaggtgagtggtcgt

SEQ ID NO: 253439 - DNA, 1329 bp, Unknown
  Bacterial polypeptide expressing nucleotide sequence isolated from the Sargasso Sea
tatgccaaaagtcacctctgcacaaaattcaaaccagacaaatacggtctgtgatgaattttttgatggccagccacgacttagaactcatcagattaaacatattgatgattatgaaattattttgccagaatggttaaaaaattgcattgaaaatatcccaccgggaataggcgcaagttgcccaagagattctgaagcacttttagttgctgcttttgatcttgcatatcaattacataaaggccaattcagaaaaagtggtgagccctacataacccatccagttgctgtagctgacttattaagagaaattggtgcaagtgctagtgtaatagcagcaggttttttgcatgacgtcgtcgaagatacagacatcacaccagaacaactcgagggttattttggtagtgaagttagatatttagttgaaggtgttactaaattaggcggaatccattttaacaatcggacagaagctcaagcagagaacctacgtaaaatgtttctagctatgtctagcgatattcgagttgtactagttaagcttgcagacagacttcacaatatgcgcactatcagttacttaggagaagaaaagcaaactcgaatagctagagaaacaagagaaatttatgctccactcgctaaccgcctaggaataggacgtttaaaatgggaattagaagacttagcatttaagcttttagaacccgatcccttccgcgagattcaacaacagatagctagtaagcgtagtgaaagggaggagagattgaatacaactgttcaattactgaaagatcgcttgaactccgcaggacttcatcaatgtgaagtaagtggtagaccaaagcatttatatggaatttggagcaaaatgcaaagacaaaaaaaagagtttcatgaaatttttgatgtagctgctctaagaattattgtctcagatgtcgagacatgttatcgagctcttgctgttgtacatgatacatttagaccaatacctggacgcttcaaggattacataggccttcctaaaccaaatggctatcagtccctgcatacagccgtaattggcaggcacagacctattgaagtacaaattagaactccagaaatgcatagagtttcagagtttggaattgcagctcactggaaatataaggaaggaggatctccagcaaatcctgattcagaaaaattcaattggttgcgtcaattagttgaatggcaacaagaagatggtgttaatgatcataatgactacctagcatcaatcaaagaagatttatttgacgaggaagtatttgttttcactccaaaaggaga

SEQ ID NO: 253440 - DNA, 898 bp, Unknown
  Bacterial polypeptide expressing nucleotide sequence isolated from the Sargasso Sea
aatgcttaaatctgaagaattaattaataaggtaaaaaattataataagtttcttaatccagaaactttatcaaaagcctatgattttgctttaaaggcccatgaaaaacaaaaaagagatgagggctcaccttatattattcacccgatagcagttgcaaatattttaactgagttaaagctagacagtgcaactatagctactggtttacttcatgatacaatagaagatactcatgcaacttataatacaatagaagcagaatttggaaaagaggttgctgatttagttgatggtgttacaaaaatttctgagtttgaaaatcaagcaatatcaaactctaaagcagaaaattttagaaaattaatattagcaacatcaaaagacatccgagttttactggtgaaactagctgatagactgcacaatatgcgtaccattaaagttgttgataaagaaaagcaaattagaaaagcaaaagaaacaatggaaatttatgcgccacttgcagataggatgggcatgcatcgtataagagatgaattagaggacctttcttttgaagttttaaatgaagatgcaagaaaattgataaaagacagattagataaaattaaagaaaataatctaattaactttaataatatttctgatgagttttttgaaatacttaaaaacaaaaatatagaaccaaaaatagttggaagagagaaaactcctttttcaatttggagaaaaatccaaaaaaaaagaacttctcttgaacaaataacagacattattgggtttagaattattttaaataatattgatgattgctataaagctttaggaatttccatagtaaatggaattgtataccaggtaaatttaaagattatatctcatcgccaaaaa

SEQ ID NO: 253441 - DNA, 1762 bp, Unknown
  Bacterial polypeptide expressing nucleotide sequence isolated from the Sargasso Sea
tatgagtgaaacctcaataaaaatagaagatagtttatttaatgaactatctaaaaactattcagataaggaaaggattaccttaaaaaaagcatatgatttagcatctgaaggacatagtgaccaaaaaagacattctggagagccatatataactcatccattgcacgtagcattatatttatctaatttaagtatggatattgagacaattgtctccgctattttgcatgacttgatagaagatactgatataacttacaaagatttgaagaaagaattcgggaaagaagtagcagacatagtagatggtgtaactaaattagataaaattaattacaactcaaaagaagaagctaaagccgatgctattaggaagatggttatagcaatggctaaagatataagagttcttattcttaaactcgctgatagattgcataatattgaaacaatagaatatttaaatgaatggaaaaaagaaaaaatagctcaagaaactttgtatgtttatgctccgttagctcatagattaggacttcaaaatattaagcataaattagaagatgtctcatttaatatattgtataaaaatcaaaacgaagaaattaataaccttatatcaaaatctgcaccaaatagagataaaaatataaatgattcaattcaaataattcaaaacttattatcagataattcactttctgctgaagttgttggtaggcctaaacataattattcaatatataagaaaattattaacaacggcttgtcatttaatgaaattaatgatcttgtaggtatacgtattcttactgatgatgttaaaaactgttatacaatacttggattaattcatgcaaattttcaaccggttctaggaagatttaaagactttatatctatgcctaaatttaacttgtatcaaagcttacataccacagttttaactgctgaaggtcaaaggatggaaattcaaataagaacacacgatatgcactacagagcagaatacggcgtcgcttctcattggaaatataaagaaactccaaaaaatgatctacaagaatggactaatgaattaaaaaatatctcagatgattacccagaacctaatgaatttctttcgcatatgaaacttgatctatacgaacaagaaatattttgtttaacacccaatggtgatgtaatcacgttacctacaggagctacaccagttgattttggttttgccgttcatactcaagttggtgaaaaactaatcggagcaaaaattgacggaaagttagtaaatttaggtacgttacttaaaaccggagataccgtggagatattaactacaaaagatacgtctaaaggacctagtagagattggttaagttttgtaaagactactagagcaagatcaaaaataaaacagtggcatcaaaaacaaatgaaagatgaggacattcaaaaaggtaagcaaatattgaatacttggttggatgaaaatcaagatgttttaaacttttcaagcaaagaagatatattaaagcatctgttagcagattatcatataccaaacaatgagactctgtttttacaattgggtacaaacaatataaaaatagaaaatttaggtacgaaaatacgtaaatacgtatttcctgaagaaatatctgaagaagaagatctattatcaccagacccatcattggatcttaaagatcagcaagtattggtcgaaggctacgatgatattaaagtaagaatggctaga

SEQ ID NO: 253442 - DNA, 710 bp, Unknown
  Bacterial polypeptide expressing nucleotide sequence isolated from the Sargasso Sea
tatgcttaaatctgaagaattaataaataaggtaagggaatataataagtttttaaacccgacaactttaactaaagcttataattttgctcttgaggctcacaagaaacaaaaaagggatgaaggtgtgccatatattattcacccaatagctgtagcaaatattctttcagatttaaaacttgatagcgcaactattgcaactggattattacacgatacgattgaagatactagagctacttataaaacaatcaaggaagaatttggtcaagaagttgctgatttagtggaaggtgtcacaaaaatctctgcatttgaaaatcaagcagctgaagattctaaagctgaaaattttagaaaattaattatagcaacctctaaagatataagagtccttcttgtaaaattagctgacagacttcataacatgagaacaattaaatttgtaaaactcaaagaaaaacaaattagaaaagccaaagaaacgatggaaatatatgctccattagcagacagaatgggcatgaatagaattagagatgagttggaagatctttcttttgaaattttaaatcctgaagcaagaaatctcgttaaagaaagacttgatgaaataaaagaaaataatatttcaaattttaatttgatttctgaggagtttcaaaaaattttaaaagcagaaggattaaatgttaaaatatttggta

SEQ ID NO: 253443 - DNA, 1726 bp, Unknown
  Bacterial polypeptide expressing nucleotide sequence isolated from the Sargasso Sea
gagtttatgcttgttaagctggcagacagacttcataacatgagaactatcagcttcttatcaattgacaaacaaaagcgaatttcaaaagagacactcgagatttatgtacctattgctcatagactaggtatgaataaaattagattagaactagaggaactatccttcaagactctaaatccgcgaaggtatcaaattatcactgaaaatgtaaaagaatataaaaagaacaaacgtaaagtagtagagaaaactaaagcaaaaataattgaaagacttcttgaaaataagattatagctgaggtcatcggtcgagaaaaaaacccttacagcatatataagaagatgaaatataagaaactaagttttaaaaaagtttatgatatttttggttttcgagtagtaactgaatcaattgacgagtgttatcaaattttaggacgattacataacttatataaacctgttcctggacgatttaaagactatatagctttaccaaaatcaaatggttatcaaagtctacatacggttttgtatggtccaaatggaattataatggaaatccaaattagaactacagaaatggataagtttgcgggatcaggaatagcctcacattggcagtataaaattggaggaaaattttcagcacaagcatttgcacacgattggcttaaatcaattatagacattaaaaaaacagcctctagttcctttgattttttagaaaatatgaaagtcaacttacttccagatgaaatatatttatttacaccggctggagctataaaaagacttcctaaagattcgtctgtaattgactttgcttattctgtgcatacagatattgggaataagtgtgttggtgcaaaaataaacggtgtaaatcaaccgttaagtacacctctttcaaacgggcaaactgtagaaatattaacttctccaattggaaagcctaacccttcttggttagagtatgtagtaaccggtaaagcaagaacaaatataaaaaactatttaagagatctaaaagaggatagtgcatacgagctagggttaagaatttttgatcaagcacttaacgattatgggacaagcttcattgatcttaaagaagacgagtataaaaaagttttatcaatatatggttatagtaacccgcgacaattaataattaatattggattaggaaatgttatacctcatctattagcacgagatatcactgagaaaaaaaatattatttcgtcaacttataatagttggttgaaaaaagttataaaaagtaaaaaacaaaatataccaatcaaaggcacagagggattaatagttaagtacgctaactgctgccatcccatacctggtgacgatataataggagtaatgtcagctggcaatggatttgtagttcatagagcagcatgtaaaaatttaaaaaaaggacttcaaagaattaatattgaatggtctgataaagttgagggagaatttttggttgaaattcaagttatctcaacaaacgaaagaggggtattatcaaaagtcgcaggtgtaatttcatcattttcttgtaatattgagaatgttcgctttaacgaagtcgaaattccatatgcctcaatttgcttttctataaaagttacatcaagggatcatgttgcagaagtaataaaagaattaaggaaattaccagatattaataaagttgtgaggacatagt

SEQ ID NO: 253444 - DNA, 1678 bp, Unknown
  Bacterial polypeptide expressing nucleotide sequence isolated from the Sargasso Sea
tgggagctcgaggatctcgcgttccgtttcgaagagccggtcacgtacaagcgcatcgccaagctgctcgacgagaaacgcgtcgagcgcgaaagctatgtcgcacaggcgatcgagcggttgcagcaggagttggccgcggcgaatgtgcaggccgaagtgagcggccggcccaagcatatctatagcatctggcgcaagatgcgcggcaaggaactggacttcgccgaactgtacgacgtgcgcgcgtttcgcgtgatcgtgccggacatcaaggattgctacacggtgctcggcatcgtgcataacctgtggcagccggtgcccagagagttcgacgactacatctcgcggccgaagccgaacggctataaatcgctgcatacggttgtgatcggcgacgacggccgtgcgttcgaagtgcagatccgtacgcaggaaatgcatcagttcgccgagtacggcgtggcggcgcactggcgctacaaggaagcgggcacgcggggttacggcggccagttcagcgccaacgagaagtacgacgagaagattgcgtggttgcgtcaactgctcgcgtggaaagacgaagtgtcagaaggcgagcacggcgagaagcgcgcggcgcagccgtgggagcaactgcgccaggccacgctcgacgacgaccacatctacgtgcttacgccgcaagcgcgggtgattccgttgccgcatggcgcgacgccggtggacttcgcgtatcacctgcatagcgagctggggcatcgctgccgtggcgcgcgcgtcgacggcgcgatggtgccactcaatacgccgttgcagaacggtcaaacggtcgagatcgtcgcggtgaaggagggcggtccgtcgcgcgactggctcaacccgcaactcggatatctgcagagccatcgggcgcggcagaaagtgcgcgcctggttcaacgcggtcgaagtgcaggagcacatcgcgagcggccgggcgatggtcgaaaagaccctgcagcgcgagggtaagacgtcggtcaatcttgatcagcttgccgccaaactcggtttcaagaccaccgacgatctgttctcggtggtcggcaaggaggagttcagtttacggctcgtcgagcaggcgttgcacgatgcgccgccgcccgaacctgtcgtcgaggcgccggaacagttcgagaagcgcagtagcggcgcgagtgtcgcccgtggcgcttcgaccggcgtgctggtggtcggcgtcgacgcgctgcttacgcaactcgcgcgctgttgccgtcccgctccgcctgacgagatcagtggcttcgtcacgcgcggcaagggcatgtcgattcaccgcagcgattgcccgagcttcctgcgcatggccgaacgcgcgccggagcgtgtgctgcaaactgcatggtcggccgatgtgatgagcgggcgcgggcaatcggtctatccagtcgacctcagcatcgaggcaacggatcggcaaggcctgctgcgcgatatctccgaagttttcgcgcgagagaagatgaacgtaatcggggtgaaaacgcaatcgcggcgtaacgccgcgttcatgcaatttaccgtcgaggtatcgagtgcggcgcagattcagcgcgcgtgtacgttgctcggtgaggtgacgggcgtgatgcgcgcttcacgcaagaactgag

SEQ ID NO: 253445 - DNA, 604 bp, Unknown
  Bacterial polypeptide expressing nucleotide sequence isolated from the Sargasso Sea
aatgatatttgaaaagataaaagagctcgaagaacaaatcagttacttaaataaagtagataaggatgttatatccaaagcaataaaatttagtaaagatgcccatcttaatcaaataagacattctggcgatccatttgtaacacatccaattgaagttgctaaaattttgacatcaattaaattagatgcttcatctattgctgcgggcctattgcatgacactgttgaggatacagaaataacaaactcttctattaaggatgcttttggcgatcaaatttcacaattagttcagggtttaactaaaattaataaattatctctaaaagttaataagttaaaattaggtgaaaattatagaaaattacttttagccgcaaccgaagatctaagggttatcttagttaagttggccgatagattgcataatatgagaactattgagtttataaaagatcatactaaaagattgaatacatcaatggaaacactagaagttttctcacctttagctcaaagacttggtatgaaagaatgggcagatgagcttgaagacttagcttttaatcaattaatcctgatgccagaaattccattatag

SEQ ID NO: 253446 - DNA, 839 bp, Unknown
  Bacterial polypeptide expressing nucleotide sequence isolated from the Sargasso Sea
gccatccgctccctgcagaccctgcaccgcagtgaaacctcgccggaacaggtcgacaacgtgcgccgcatgctgctcgccatggtcgaggatgtgcgcgccgtggtgatcaagctggcggagcggatcgcctgcctgcgggaagcgaagaaggcggatgaagagacccgggtgctgatggcccaggagatcaccaacatctacgccccgctggccaaccggctcggcatcggtcagctcaagtgggagctcgaggatctcgccttccgctacctgcacccggatacctacaagcagatcgccaaacagctcgacgagaaacggctcgatcgggagcgctacatccgcgagttcgtgcagtctctgcgcgatgcactgaaagaggcgggggtcgaggccgaggtctacggccggccgaaacacatctacagcatctggcgcaagatgcagaagaagcacctcgaattcaacgaactgttcgacgtgcgggcggtgcgggtggtgaccaagcggctgcaggattgctatgcggcgctcggcatcgttcacacccacttccatcacattccacgcgagtttgacgactacgtcgccaaccccaaacccaacggctaccagtccatccacacagtcgtggtggggcccgaaggcaagacggtggagatccagatccgtaccgaccagatgcaccaggacgccgagctcggcgtggcggcgcactggcgctacaaggaaggggcgcaggccggcggcaaggccaacaccttcgaagacaagatcgagtggctgcgcaagctgctcgcctggcaggaggatctctccgagagcggctccctgct

SEQ ID NO: 253447 - DNA, 764 bp, Unknown
  Bacterial polypeptide expressing nucleotide sequence isolated from the Sargasso Sea
aacatcgaaacattcgtatggaccaagtcaagattgggtgaaagtagctcaaacatctcatgcaaaaaacaaaatacgtcaattctttaagaagcaacgtagagatgaaaatattgaaaaaggccgtgaacttgttgagaaagaagtgcgtagcctagagtatgagatgaaagaagtgttagctcctgacaatttaaaacgtgttgctgaaaaattcaactttgcaaatgaagaagatatgtttgcagcagttggatataatggcatcactgcatcacaaattgttacgcgactaacggacaagttccgtaagcaacgtgaagaagaagagattgttgaagttaaagaagttcgtaaaccgatgaaaattcgaaaatgggattctggcgttaaagtaagcggtgcggataatttattaattcgtttatcaaaatgctgtaacccagtacctggtgatgatatcgttgggtatattacgaaaggccgaggcgtatcaattcaccgccgtgattgtgtaaatgttcatacagaagaagctatagaacgtttattagaagtagaatgggaaggtagtcctgaaaaagaaattgagtataacgttgatattgaaatttcaggttacgatcgccgtggtttattaaatgaagtcttacaagctgttacagagacgaaaacgtacatttcagcagtttctggtagaagtgaccgtaataagatggcgacaattaatatgtcaatctctattcgtaacttacagcattgaa

SEQ ID NO: 253448 - DNA, 2236 bp, Unknown
  Bacterial polypeptide expressing nucleotide sequence isolated from the Sargasso Sea
atgaccgaacccgtttccgcttctcccgtcgcggggccgtcgttcgacgacgtgctcgcgttcgtgcgcgagcgggctggcgacgtgcgcctgtcgtcgggcgaactgctcgccgatcactcggcgggcacggcgtcgatcatgcgcacgctgaacgtcgatccgtccgcgatgcaggcggccgcgctgttcgtgctgacgccgcacctgagcgaccccgagcgcgagctcaccgagcgtttcggcgacgaagtggcgcggctcgtgtccgacgtgcgcaagctgttgcggctcggcaccgtcagcctgcgtgccgcgcagaacgcgggggccgatgccgggcgcgatgcggccgaagagcggcgcacgcagatcgaggcgctgcgcaagatgctgcttgcgttcgcgcaagacatccgcgtggtgctgatccggctcgcgtcgcgcttgcagtcgctgcgctactacgcggccgcgaagatcgacccgccgcccgacgtcgcgcgcgagacgctcgagatctatgcgccgctcgcgaaccggttgggtatttggcaactgaagtgggaactcgaggatctcgcgttccgcttcgaagaccccgtcacctacaagcggatcgcgaagctgctcgacgagaaacgcatcgagcgcgaagcgtacgtcacgcaggcgatcgaccggttgcagcaggagctggcggacgcgcacatccaggccgacgtgagcggccggccgaagcatatctacagcatctggcgcaagatgcgcggcaaggaactcgacttctccgagctgtacgacgtgcgcgcgtttcgcgtgatcgtgccggacatcaaggattgctacgcggtgctcggcatcgtgcatcacctgtggcagccggtgccgaaggaattcgacgactacatctcgcggccgaagccgaacggctacaagtcgctgcacacggtcgtgatcggcgacgacggccgcgcgttcgaagtgcagatccgcacgcaggagatgcaccgtttcgccgagtacggcgtcgccgcccactggcgctacaaggaagccggcgcgcgcggctacggcggccagttctcggcaagcgacaagtacgacgagaagattgcatggctgcgccagttgctcgcgtggaaggacgacgtcgaggacggcgcggaaaagtcgggcgacaaggcgtgggcgcaattgcgcgagacgtcgctcgacgacgatcacatctacgtgctgacgccgcaggcgcgcgtgatcgcgttgccgcagggcgcgacgccggtcgatttcgcgtaccacctgcacagcgagcttgggcatcgctgccgtggcgcacgcgtcgacggcgcgatggtgccgctcaatacgccgctcgcaaacggccagacggtcgagatcgtcgcggtgaaggagggcgggccgtcgcgcgactggttgaacctgcagctcggctatatgaagagcccgcgcgcccgtcagaaggtgcgggcgtggttcaactcgatcgagcaggaagaaaacgtcgcgcatggccgcgcgctcgtcgaaaagacgctgcaacgcgaaggcaagacgtcggtcagcctggacaatctcgctgcgaagctcggcttcaagtcgccggaggagctgttctcggtcgtcggcaaggaagagttcagcctgcgcaatgtcgagcacgcgctgtccgatgcgccgccgcccgaaccggtgcccgaggcgcctgccgatttcgagaagcgcagcagtggcgcgagcgtggcgcatggcgcgtcgaccggtgtgctggtcgtgggtgtcgacgcgctgctgacccagctcgcacgctgctgccgtccggcgccgcccgatccgatcagtggattcgtcacgcgcggcaaggggatgtcgatccaccgcaccgattgcccgacgttccgccggatggtcgagcgtgcgccggagcgcgtgctgcagacgacctggtcggccgacgtgctcggtgggcgcggtgcgtccgtctatccggtcgacctgatgatcgaagcgagcgaccggcaaggattgctgcgtgacatctccgaagtgttcgcgcgcgagaagatgaacgtggtcggcgtgaagacgcagagccgccgcaatgcggcattcatgcagttcacggtcgaggtgtcgaactcggcgcaggtgcagcgcgcgtgcacgttgcttggtgaggtgcagggcgtcgtgcgggcggggcggaaggcgtgat

SEQ ID NO: 253449 - DNA, 736 bp, Unknown
  Bacterial polypeptide expressing nucleotide sequence isolated from the Sargasso Sea
gatatggactcgagacgtaagattcaagcggggatcgataagctcgcggacgcggtgggcgtgacgctcggtccgagagggagaaacgtcgtgctcgaggaaaagtttggcatgccccaagtcatcaacgacggcgtgaccatcgctcgggcgattgaattgtcggatccggtcgaaaatgcgggtgcgcagctcatcaaggaagtcgccggtcgcacgaacgattctgcgggtgatggaacgacgacggcgtctgtcctcgcgcgcgagatgatcaagtatggcttgcaatccgtcgccgccggcgccaacccggtgacggtgaagcgcggcatcgacaagacttccgagttttgccgcgagaagctcgatgaactcaccattccggtgagaaaccaagacgacattcgcgccgtcgcgtccatttctgcgggtaacaacgcggagattggtgacatgattgctgaagccatcgaaaaggttggtccggatggcgtcttgtccatcgaaaacggtacgggtttggacaccgtcgtcgaggttgaagagggtatggaaatcgaccgcggttacatttctccgcaattcgtcaacaacaacgaacgcttgacggttgaatacgaaggctgccgcgtattgatcactgacgaaaagattgagcaagtgcaaatgctcgtcccgctcttggaggaaatgaaccaagccggttctcccccgctcttgatcatcgccgaag

SEQ ID NO: 253450 - DNA, 860 bp, Unknown
  Bacterial polypeptide expressing nucleotide sequence isolated from the Sargasso Sea
gatgacgattgtcatgacaggccatgggacgatgcacaataccatcgaagccatgaaggccggcgctttcgaattcgttaccaaaccttttgatatcctccagatagaagaactcgtccggcaggcgctcaaggttcgtcatgccgagaaacgcgatagttccgacttgaagtgcagttcagaagaactccttgtgggacaaggtcacaaaatgagagaattgttcaaatcgatcggacgtgttgcatcaaccgaactaacggtgcttattcaaggagaaagtggaaccggaaaagaactgatcgcgaaaaccatccaccagcattcaaatcgtgccaagggtccttttgtggcgatcaactgtgcggccattccttctgaactgcttgaatcggaattgtttggtcatgaaaaaggagccttcaccggcgcagttgaacgcaaaagaggaaaacttgaacaggctggaaacgggacactttttctggatgaaattggagacatgcctctcaaactccaatccaaattgcttcgggttctgcaggaacgtcagtttgagagaattgggggacaggaactgctgaccaccaacatgcgtgtgattgccgcgactcatcgcgacctcgagcaactgatgcaacaggaacaatttcgaacggatctctattaccgcctcaatgttttccctttgtccattccgcccttgcgagagcgtgtcgaagacctgcctttgttggtggaacatttcctcaagagaggagccagggaaatggctgtcggcaacaaatctctgtcccccgaagcgatggatgccttgaagcgctatccttggccgggaaatgtgagggaactggaaaaca

SEQ ID NO: 253451 - DNA, 784 bp, Unknown
  Bacterial polypeptide expressing nucleotide sequence isolated from the Sargasso Sea
cttcaccggcgcgattgaacgcaaaagaggaaaacttgaacaggctggaaacgggacactttttctggatgaaattggagacatgcctcttaaactccaatccaaattgcttcgggttctgcaggaacgtcagtttgagagaattggggggcaggaactgctgaccaccaacatgcgtgtaattgccgcaactcatcgtgacctcgaacaactgatgcaacaggaacaatttcgaacagatctctattaccggctcaatgttttccctttgtccattccgccattgcgagagcgtgttgaagacctgcctttgttggtggaacatttcctcaagagaggagctagggaaatggcagtcggcagcaaatctctttcccccgaagcgatggacgcccttaagcgctatccctggccgggaaatgtgagagaactggaaaacaccctgaaaagtctgatgatcaccaatgtcagcaacttcatcagccttgattccttaccgggacacttgatgaaaaaaggggaatctgttcaggaatcggggaatcttgaagaatggatcgaagataaaattgcccctctcgtacgggaaggtatttccaaaaataccgacagcctgatgcaagaggttttgcataaagtggaacgtccattgttgaaactactgctagaggaaacaggctggaatcagcagaaaacttccaaacttcttgggatcaaccgaaatactctcagaaaaaaaattgatatcctgagaatccgcagaaaggtggtgcttgatgcctga

SEQ ID NO: 253452 - DNA, 501 bp, Unknown
  Bacterial polypeptide expressing nucleotide sequence isolated from the Sargasso Sea
aatgaataattattttataatactagcatcaggacaaagcaaaagatttaattcaaaaaaaccgaaacaattcattatttataaaaacaagcctctttttaaacattctattgaaaaagcaatgaaatcaaagctgtttaaaaaaattatattagtcataaataataaaaaaaaagttaaagaaaaatttcctaaaaatgttttaattattacaggaggaaaagaaagatctgattcctcattaattgcattaaaatatattaaaaaatataagccaacaaacgtattaattcatgatgctgctcggccaaatttcacacttaagcttttaaaaaatttaattagatcacttaataataataaagcagtaatacctgctataaattctatagattcaataaagtataaagtaaaaaaccatctttttaacttaaatcgaaataattcaattttaacgcagacaccacaagcatttaaatttaaagatttatacaatctttc

SEQ ID NO: 253453 - DNA, 900 bp, Unknown
  Bacterial polypeptide expressing nucleotide sequence isolated from the Sargasso Sea
tattttttacatataagcttggaataatttggagagaatggctttcaaaaagtttagtcagagattatatgactaataaagcttattaccaattaaatcccaatgatgaagaacaaacggatgtagataatcctgatcaaagaatcacagatgatacccgagcttttaccgggcaaagtctctctttcacattaggtatttttgatgccctactaacattttcacttaatattcttattttatggagtattagtacaacacttactttttctttatttggttacgccgcatttgcaacttctatccttttaattgctggaaaaaatcttgtaaagattgactttgatcaactcagatatgaagcagattttcgatatggcttagtacatattagagataatgctgaatcaatagccttttactctggggagaatcctgagcgaaatgaaactgaaagacgcttaggagaagtggtgagaaactttaatttactaattatatggagagtaataatagacgtcatgagaagatccattaattatgctggaaatttctttccatatttaataatggcaataccttactttaaaggtgacattgattatggacgctttattcaggcaagctttgcatttggaatggttgaaggttcgttatttttcattgttaatcaaatcgaagaacttgcaaaatttactgctggcattggcagattagaaggattccaatcaaaagttgaatccattagtcaaaccaacccaacaagcaatcaaaacgttatctcagattacccctcaattcttatcaataatgctgacctttgcccaccaggatcaaataaaacaattattaaaaatttaaatttgagcatcaacaataaccaatcacttttggtgtagg

SEQ ID NO: 253454 - DNA, 637 bp, Unknown
  Bacterial polypeptide expressing nucleotide sequence isolated from the Sargasso Sea
tcctgcagctgggataagtgaaagatttggaaccactaataagctgtatataaaagtaaaaaataattttttgatagaaaactctattaaaccttttataagactttctcaaatatatcggattattattcctttaaataaacttgataaaaagtggaaaaaaacaaaatattataattcaaataaagttattacactaattggaagtacttctagacagaaaagtgtatacaaatcattgtgtaaaattaaagaacttggtgcaaaaaatagtgactgggttattattcatgatgcagctaggcccttttttagtcaaaaagatttaaaaagatttatttctattactttaaaatcaaattggggggcagtaattggtcttccagcttctgatactattaagttggttgaaaaaaataaaattataagcacaattgaaaggaataaggtttggttagctcatacgccacagatgtttagaatcaaggatcttttaaaaggttatgaattttgtaagaagaacaaattattagttaccgatgattctcaagtaattgagtctataggtataaaaccgcttattatagaatcaagctgtaaaaatattaaagttacaaataaaattgatattaggtag

SEQ ID NO: 253455 - DNA, 752 bp, Unknown
  Bacterial polypeptide expressing nucleotide sequence isolated from the Sargasso Sea
catgaaattagcagcaataattctcgcagcaggtaaaagtagtcgatttaaaagtgatacacctaaacagtttcattttcatagcaatgatctcattttaaatcatagtataaaaaaattaagtcaaattaaagaaattaaagaaatttatatagctttaaacaataaatatcgaaaaaaatatagttcgttgataaaaaaaacaaacaaaattaaattttttaatggtgggagacatcgtagtgagtcagtaaagaagggtattcaaaaattataccaaaaatatacacatatattaattcacgatgcagcacgtccaaattttactataaaacttgttttaaaattaattaaagaattaaaaaaaaattcatgtgttgtgcctgcaatacccgcttctgatacaacagtttatgaaaaaatttatgttgatcgaagtaaaattaaatttttacaaactccccaagcatttgacttaaagaaaatatataaatatcacaaaaaaaataaaattaaaaatatttcagatgactcgattttatttttacaaaataaacaaaaaataaaatttattaatggagaaactgaaaataaaaaaattaccttcattcaagacattaaaacaaaagataaatattatggcattggttacgacatccatcaaataactaagggtaatggcttatatatcggcggggtcaaaataccctctgagtatcgaagtgtgggacatagtgatggcgatagcctat

SEQ ID NO: 253456 - DNA, 568 bp, Unknown
  Bacterial polypeptide expressing nucleotide sequence isolated from the Sargasso Sea
attggataagaatttgatacgtaagacagtcctacgccagcgaagggcgctgtctgcacttgaaaaatcgcaagctgaatcagtcatgctggaatcactgcttaattgggaagttttcaaaaacgctggagtgattcatattttcatctctaaaccagacgaacctgatacaagaccaataattgagcattgctggagttccgggaaaaaaattgctgtacctgtagtccttcctaacacatttgatctttttcattctgaaattaaatcatttgatgacttagttcctggaatgcatggaactcatgaaccttcccctgaacgacagacaaaaataaatctggacagttttgatcttgtaattgttcccggagttgcttttgacagaaaaggaggtaggcttgggcacggtaagggatactacgaccgattccttgaactcactaaggcattccgtctaggattaactttcgaatgtcagctacttgaaaatatacccactgaattacacgatgtcctgatgaatgcaattttatcagaatcaggaattgttgaaacaaatgcgtga

SEQ ID NO: 253457 - DNA, 367 bp, Unknown
  Bacterial polypeptide expressing nucleotide sequence isolated from the Sargasso Sea
accaaaaacaaagataaaccttgagcgatctcttttacccactactcgattagggggccattttgttcaaggtcatgtcgatactacaattaaattaattaatattgaaaggcagaaagattctgctgaattcacttttgagaaaattaatgatattgctgactacattgttgaaaaaggttcaatatgtttggacggaattagcttaacaattgctaaaaataataaaaataattttaaaattgccctaataccacatacattgggggttacaaactggaaatatatagaaataggtgatatggtgaatgttgaaatagacatgatggcaaagtatatcaaaaattttatggatctcagacaatga

SEQ ID NO: 253458 - DNA, 264 bp, Unknown
  Bacterial polypeptide expressing nucleotide sequence isolated from the Sargasso Sea
aatgaaaagaaacatacttttaaaccctggtcccggcacaacaacaaatacagttaaacaggcactagtagttccagacatttgtcctcgagaagaagaatttggcgcacttacacaatcagtgttgaaaaaaatagtgaaagtagtaaacggtcaatcaacacattctacagttatttttgctggttccggaacagcaggagtagaatctgcactttcttcagtagtccctgataatgggaaaatattaattctaaaacatgg

SEQ ID NO: 253459 - DNA, 858 bp, Unknown
  Bacterial polypeptide expressing nucleotide sequence isolated from the Sargasso Sea
ggcaaggtgcgcatgggcgtgtcgaccgctgcggttgaggccgacctgcaagccttggataagcgctttgccgcgctgatcgccagcggtgatcaactggtgggtgatagcctcaagggagccgccgctgacagcgccaacgccatgggtgcccggctgcaatcggcacaagccactgccacgcaaatgacggctaacactgccgccgccgtgcaagacgcggcgggcaccctgcgctggcgcatcggcatggggctggcactggtggggcttggggtattgctgctgatcgccattgtgctggggcgacgcgtggtcaatcgcctgaagttgctgattgccgcgatggatgatttggcggccggcgagggcgacctcaccaagcgcgtgcagatcaacagcaaggatgaaatcggcgatatggcctcggcggtcaatcgctttgtggataagttgcagcccatcgtgcgggaggcaggcgacgtggcccagcgtactggcgtggaaatcggcgccatgacgttgcgcaatgctggcgccgatgcggcggcgggcttgcagcgtgatgaagtggccgagagtttgcgcgctttgtcgcaaatggccgatgaggcccaggccgaaagccacgccatgcaggcggccctgcagcaggtggtggatattcgccaggccacggatgagaactcacggacctcggccgaagttggcagcttgatcgaggcgttggcggggcaggtgcaggccggttcccaggtaatcgaacggctggcgcagcaaagcgaacagattgaagtggtgttgaccgtgattcacggtatcgccgagcaaaccaacctgctcgctctcaacgcggcc

SEQ ID NO: 253460 - DNA, 947 bp, Unknown
  Bacterial polypeptide expressing nucleotide sequence isolated from the Sargasso Sea
cagaaaagtttatgatgatttatttaatgctgaaaatgaagctgaaatggatcatatatcactttcaaggtggtctgatttaatattggttgcaccagcaacagcaaataccatttcaaaactaagcgtgggatcctctgatgatttagcctcaactgtaatacttgcctcaaataaagatatatttttaacccccgctatgaatgtcagaatgtgggaacatccttcaactaaagagaatttaaataaattaaaaaaatatggttataaaataattggtccagagataggagatatggcatgtggcgaatttggtgaaggtaaaatgaccgaacctaatgaaattataaaaaaagttgaaacatatttttttaatttaaataaaactaaaaaatttaaggcattaattacagcaggacctactcatgaatatattgatcctgttaggtttattaccaacaaatcaagtggtaaacaaggttttgaaatagcaaaagtactatcaaaaaaaggttttgaaactacattaatatcaggtccaacaaatttgaaaattaataatgagataaatttagtacaggtagaaacagcagaagaaatgttcaattctacacaaaataatttgccagttgatgttgctattttttgtgcagctgttgcagattttaaaattaaagaaaaaaagaaagaaaaaattaaaaaaaaagattttataaatttaaatctagaaaaaaatattgatatattaaattatgtttcaaatcataattctctaagaccaaaacttgtgataggttttgctgcagaaacacacaacatggaagaaagttcaagaaaaaaattaatggaaaaaaactgtgattggattattgcaaatgatatttctaataaatcgattggttttgactcagactttaatgaagtgacaattttatataaaaataaaa

SEQ ID NO: 253461 - DNA, 352 bp, Unknown
  Bacterial polypeptide expressing nucleotide sequence isolated from the Sargasso Sea
tatgaacaactgttttataatattagctgctggaaaaagtaatagatttaaatctaaaattccaaaaccatttgttcaatataatggtgatatactaattaaacattctataaataaggcaattttatcaaaaaaattctcaaaaatagtagttgcagttaataaaaaccacaaaaaatacattagaggactaaaattgaataaaataaaattcattaatgggggaaaaactagggctgattctgcaagaaattgtttaaattttataaaaaaatataacccaaataacgtatttattcatgatgcagcaaggccaaatttctcattaaatttgataataaaattattaaaa

SEQ ID NO: 253462 - DNA, 487 bp, Unknown
  Bacterial polypeptide expressing nucleotide sequence isolated from the Sargasso Sea
atgaacagaactataataataattccctctagaatgtcagcaagtcgcttaaaaggtaagcctctattggagattaatggactaccaattatatgtcatgttttaaataaagctaaatatacaggcatagatacagtagtggctacggaagataaagaaattgtaaaagtcgttgagagtaatggtggtaaagcggtcttaactggaaagcatgaaactggaactgacaggatatttgaagctttaataaaattagataaaaaagatattaagtacgtattaaacttacaaggtgacgagccaatgattgaaccatcggatataattaatttaaatgaattaatgattaaaaacgattgtgaaattggaactttagcatgtgaaattaaagaaaatgaaattttaaataataaaaacgtagtaaaagtaatcactgaaaaaaagttagaaaaaaataactttgtaagagctaataaatttttttaga

SEQ ID NO: 253463 - DNA, 493 bp, Unknown
  Bacterial polypeptide expressing nucleotide sequence isolated from the Sargasso Sea
gaagttgcaaaaaaagttaattatgatttaattattgatatccaaggtgatgaaccacttttagattttaatcatattgatgaagtagtggactttcatacttccaatatgaaatttgatataattataccgcatcttgattttcaatccccagaaagtccaaatatagttaagctattaatagataaaaacaattatattaaatacatgagtagagccgtcattccatatccttttttaaaaaaacctaaattttataaaaaacatctatctattatttcttttaaatctgaatctcttcaaagatatgccagtttaaaacaaagtaaattagaaaaaattgaatcaattgagcttttaagggctctggaaaatgattttagcctaggttcttttggtttgtctggagactcattttctattgatgttaaagaagattttgaaaatgcattaaaagttatgccaaaagacaaatatagaaaactatactaaa

SEQ ID NO: 253464 - DNA, 622 bp, Unknown
  Bacterial polypeptide expressing nucleotide sequence isolated from the Sargasso Sea
tatgttcagaatatttaatgataatggttatgaagtaacaacttattacgataatttttggtttggaagacataaaggtaaatatatttatgattacatcgttaatcaatcaggaggtaagtttaatacttgtgcatttgatacaggctatggtcttcattttaaaatatcgtttcttgggtactgtttgattgctgatgaaattaaatttaaattagcatcatttttcttaaacaaagatttaaaaaaaaccacctctattgaaaaaataatggaaatcatgaaaaaaaatatcaataaaaagaacccacaatttttaatggcacatcatataaatcctgggcatacaggtgagtatatttatggaagagagggggactttgaaaattatcttaattattataaaaaaaaaagtgaaattgtcaaaatagagttagaactaataattaattttattaaagataatgatccaaatgcacttttatttgtttatgcggaccatggcccaaaattgagttatggtattgaatttgaggataataactcatttaaaattttagattcatttgcagtttattcgggtatatatccaaaaaataaatgtaaaaaatttatctaccct

SEQ ID NO: 253465 - DNA, 466 bp, Unknown
  Bacterial polypeptide expressing nucleotide sequence isolated from the Sargasso Sea
aatgataaaatctaataactataaaggaatagtccttgctggagggtcagggtcacgtctctatccattaaccaaagtaatttctaagcaattgctaccaatttataatcgtccaatggtctattatccactatcaattctcattaatgccaaaataaaagatatattaataattacaacacctgaagatcaagaaagctttaaaagtttacttggcgatggttcgcaatgggatgtaaggcttgattattctgttcaagagaagcctgagggtattgctcagtcgctaattattgcagataaatggcttactggaaatcctgtagtattaattcttggagataatcttttttttggtcctgatctatttttaaaaatagaaaaagctataaatgaaaatgatggagcaactatatttggttatcatgttgacgatcccgaaagatatggtgtattggaacttgat

SEQ ID NO: 253466 - DNA, 1351 bp, Unknown
  Bacterial polypeptide expressing nucleotide sequence isolated from the Sargasso Sea
atgttcaaaaaactattctacgttccacttatttcatttttagtattttctaatttcattgtctcagatgatgttgaagaggttgttgtaacaggtagttatatcaagggaagtcctactgatggagcttctccagtagagctatatgatcgatctactattgaggctataggtgcagttaatgttgcagatataactgcgaatattgctgttaattctggttctgaaaaccaagctgattcatttacatcgggagcactacaaggcagaacaaatgtaaacttgaggggattaggtctatcctctactttggtacttttcgatggtagaagacaaacggtagccggtgcaactgcaaatgatggtagtgtatttgtagacacgtctgctattccaattatagctctagagagagttgaggttcttaaagaaggtgcagcttctatttatggatcagacgctgtagctggagtcgtgaactatatcttcagaagagattttactggttttgaagttgatttaactcatcaagaaactgatctaggctcacaggaagatgacagagttagtttcatttggggtgcaggtagtggagatactaacttagtgcttgcctatagtgcacttgatagatcgcctttatctcaaagtgagttggagcttgctcctcttggaatcagtggattaggaacaagcttcctcttatttggtccttcaactgtagaatcagggccttatgctggaacatatagtgtcttcgaaaatgttccagatccaaactgtgtagctaacaaaggtatattaattcctcaagcgagtggaagtcgttgcggatttaagtacggtcctagatttaatattgttaatgatgaagaacataaccaactttatgtttcacttaaaacggtcctaacaaatggtataaatgctgaacttgattatctaaaagctgaaactgacgtttttgataatccacagtcaccttcgtatccagccttatcgtatcttagtcccgctttagcaattcaacctggcactggaggtaatccatttggagtcccagctctttggcttggtagacctctagcgtctgcttttccttcgccatttgcgccaagagaaatcgaaatggatagggtatctttcggtttatcaggaacattagatagtggtttcgattgggattttcatatgactcgcagtgccgaagattcatatggaagacaaccagacactggaacctcagctcttgcggctgcgatcaatggaacaggtggacctaccggagatccaacctttgatctcttccatccgtctgctaattcacaagaattaagaagattggctaaga

SEQ ID NO: 253467 - DNA, 772 bp, Unknown
  Bacterial polypeptide expressing nucleotide sequence isolated from the Sargasso Sea
atgaaagcagtagcaataataccagctcgtatgggttctagtaggttccctggaaagccgttagcaaatatcttaggattacctatgatagaacatgtgcgcagaagagtcgcgatgtcaaagatactttctgaggtatacgtagccacttgcgatcaggaaattcatgatgcagttacacaactgggcggaaatgccataatgacatcctcttcacatcagcgtgctagtgacagaacagctgaagctgctgaagctttagacgctgaactgttcgtaatggttcaaggggacgaacccatgacctaccccgatatgatagatctagctttaaggcccatgcttcaagactctaagataatatgtacaaatcttatgaagcgtattaccgaacattcagactacctaaacccaaacactattaaagtggttgtcaacaatgaatcggatgcattatatatgtcgcgaagtcctattcctcatctagctgacgtttcaaatttgtccaccactcctatgtacaaacaagtttgtatcataccattcacccgagctggtctaaaactatacactgaactatctcctacacaactagaaattaccgagtcagtagatatgaaccgttttatggaacacggatacaatgtccgtatgatagaaagcgaatatgatagtcatgcagttgataatttagaagaccttcacctagtaacacaacttattagagaagaccctttaacaagacaatacctagaatcattttctgaataat

SEQ ID NO: 253468 - DNA, 1234 bp, Unknown
  Bacterial polypeptide expressing nucleotide sequence isolated from the Sargasso Sea
atgattgaaactactatttctggaattgttgtttttagtggggttataacaatattagttgtgatattaaattttgctcaatcaaaattattaccacaagatgaggtagccctagtaataaatgataaaacagatgaagctattaatattaagcctgggtctactttattatctgcattatcaggacaaaaaatcttcttaccttcggcttgtggaggaggtggtacctgcgcgttgtgtaagtgtcaagttttagatggaggtggagatattcttcctacggagacagggcatatcaatagacaagaggcgaaagataattggcgtctttcctgccaagtaaaaattaaacaagatatgaaaatccgtgtccctgatgaaattttcaatatacaaaaatgggattgtacggtaagatcaaacgaaaatgttgctacattcataaaagagttaattctagaactgccagaaggagaaaatctcaactttactgcaggaggatatatacaaattgatattcctgaataccacaatttaacctatgcagatttcgcagttgaaaatcaatatcatcctgattgggataaatttaatatttgggatttagttgctaataatgatgaggaatgctttcgagcgtattccatggcaaaccaccccgctgaaggaaacaaagttatgttaaatgtacgtattgcaacccctccgcctccgctttgggatacagcgcctcctggtattgcatcgtcgtatatatttaaccttaaagaaggtgataaagtaaccatttcaggtccttatggtgatttttttgtgaagaatacagatagagaaatgatttatattggaggcggcgctggtatggcaccaatgcgtagtcatttatttgatttatttcatactcaaaagacaaatagaaaagtttcattttggtatggagctagatctttaagagaaatgttttatgaaaaagactttgatgaaattgttgaaaaatttccaaacttttcttttcatgttgcaatgtctgaacctttaccagaagataattggaatggtccaactggttttattcatcaagtgcttctagataattatcttaatgaacatgatgaccctactgaggtagaatattatctctgtggtcctccaccaatgattgatgcgtgccaaaaaatgctttatgaattaggtgttgaacctgaaatgattgcttatgatagttttggataat

SEQ ID NO: 253469 - DNA, 1150 bp, Unknown
  Bacterial polypeptide expressing nucleotide sequence isolated from the Sargasso Sea
attgccatataccggtattgtcaagtatcacgttaaactatcattcgaagttgacggacttgtcgaacgagcagatataatcggagctatattcggacaaactgaaggtcttttgggacctgaaatgaatctgaatgagttacaacgagtatctaaagtcggtcgaattgaagtaaatacattcagtactgaaaatactactaaaggtgacgcattgttaccaatgagtactgatattgacacatgctcattaatctctgcagctattgaaagcatcgataaagttggtccatttgatagtgcattcagattagatgacatagaagatgttagagcaaacaaaaaacaggatattttacaacgtgctaaagaaatcaagcaaaagtggtcaacaaactcagttagtgaaggacaggaaatgcttgaagaagttcatgaaaataattctgaaaaaattacaacatacggtccaaaaaaactccattgtagtactggaatacatgattctaaatgggtaattcttgtagaaggtcgtgctgatatcattaatcttttgagagctggttatgataatgcattggcctttgaaggtggacgtatagatgaatcaatcaaagaattatgtgaacaaaaagaaaaggttgtagcattcactgatggcgatagagctggtggatttatcttaaaagaattaaaatcagttgtacatgttgacgttgaattacgtgcagatactggaattgaagttgaagaattaactccaaaaagagttgatgagattttagcacctgtgaaaaaacagatggaagaagaattgtctgcacctgaaattaaaaatgtcgatgatggtcctcttgcagaattgtgtaaaaataaattctcagaattaaatgaatccttagaagcaatcgctcttgattcaaatgatactgaagtctttagagttgcaattcctgaattagttggaaaaatatctggtcaatctggaataaaatatctaattttagatggaataattactcaaagattagtagacgctgcaaaaactgcaggtgttgaaagtataattggtcatagaactgcaaaattatctaactctgatggtgtttcattaaaaacatttagagaacttggtatagcatctaattaa

SEQ ID NO: 253470 - DNA, 948 bp, Unknown
  Bacterial polypeptide expressing nucleotide sequence isolated from the Sargasso Sea
gatgaacgactgggcaggtcttcctgccacatacggcgacgtactccgccgggcgatggaatcgctcttccggacgttcgaaaatttcagtgaaggcacattcatcgtcgacgccgaggcacgcgtcgtctggatcaacaagcgctacgcggcgcgcttcggtttttcggacccgcagcaggcgatcggccgggattgcgaggaagtgattcctaacagcctgatgcgcgaggtcgtgaataccggcaaaccgattctgctcgacatcctcgaaacggatcgcgagccgctggtggtgacgcggctgccgttgaaagacgacgccggcgaaacggtcggcgcggtgggtttcgcgttgttcgacgaactgaaggcgctcacgccgctcttttcccactattcccgcgtgcaggaagagttgatcgcgacgcgtcagtcgctcgcgcaggcaaggcgggcgaagtacacgttcggcagttttgtcggcacgagcgcggcgagtctcgaggtcaagcgccaggcgcgccgcgccgcgcaactcgagtcgcccgtactgttgctcggcgaaaccggcaccggtaaggaattgctggcgcatgccattcacggcgggtcggcgcgggcgaatcagccgctcgtgacggtcaacgtggcggcgattccggacacgttgctcgaagtcgaattcttcggcgccgcgcccggcgcctataccggcgcggaccggaaagggcgggtcggcaaatttgagctcgcgaacggcggcacgctgtttctcgacgaaatcggcgacatgccgctgcctttgcagggcaagctgttgcgcgtgctgcaggacaaggagttcgagccgctcggctcgaaccggatcgtgcgcgcggatgtgcggatcatcgccgcgacttctgccgatttgccggcgctggtcgcagcggggcgtttccgcgc

SEQ ID NO: 253471 - DNA, 1066 bp, Unknown
  Bacterial polypeptide expressing nucleotide sequence isolated from the Sargasso Sea
tctgcacgtcgacgctgacgctcaagcagcatacggtcgtcgatgtgctgggtggcgtggcgctcgcgatggtcagtgcgcggtgggtcgagcggcgttcgctgcgcgggaggcttgcgtgacggatgcccatgttcatcatgccgggtcgaatgtcgagcttgcgcgcttcgtgcccgatcccgcgctgtttcgcgtgagcacgttgcgtgtgggtgcggcgctggcgggcgactggctgatgattgcggtcgcgttcgcggttgcgatcgtgtttgtgcatccgctcgtgtacgcgttggccgcgatcgtgatcgcgcgcagccagcttgcgctcgcggtgatgatgcacgaaggcgcgcacgggttgctggcgcggaactggcatgtcaacgacgcggtgggccaactgttcgcggccgggccgctgtggctgtcgctgcgtacgtatcgtgcgggccacctgaagcatcatcgagcgccgatggagcaggacgatcccgtcgcgctgctgttcggcgtgcacgactatccggtgacgcgcgggcggctgatcggccgcctgctcgcatacgcatgcgggatcggctacgtgacgagtgtcgtgaagctcgcgcgcggcgagtttgcgcatgcaatgccgaaggtcgggaagtcgcgtgcgtacgccgcgtgggaagttgcgtcgatgctggccggcaacggcgtgctgttcgccgcgctcgcatgggccgggcatccgctgctgtacgtgacgttatggatcgtaccgtccgtcacgctgctgccgctcgcggggcaggtgcgggcgattttcgaacatgcggggctgccggcctgtgcggaccagagccgcaacgcgcgcacgatcgtccggcgttcgtggcagacgttcctgttcggcccgcacgcgattcattttcatatcgagcatcacctgttcgcgcggatgccgtttcatcacctgccggtcgtgcatcggcagcttgcgcagcggcagttgctgccggacggcaatctgtacgcgggatatggtggtgtgctgcgcgacgtcagtgtgcgctga

SEQ ID NO: 253472 - DNA, 2005 bp, Unknown
  Bacterial polypeptide expressing nucleotide sequence isolated from the Sargasso Sea
tatgatcgctaagagccccgtagtaaagcacctcgtcttgattggcggaggacatagccacctcgcagtattgaagcatcttggcatgcttcctgtgcctggcttagccgtcacactaattagtcgagacattaatgttccctattcgggtttacttccaggttttatttctggagcatatgacgctaaagaaatttctatcgaccttcgcccattagctcagttcgccaaggcaagaataattcaggcagatattaaaaatattgatcttaatgataaaaaactgatcttacccaatcgcccagatatttcttttgacttactttccataaatataggttcagagcctaagttaagcatgatacctggtgctcaagaccatgcaattgggatcaaacccctacccgcttttttggaactgtggccccaattacttcagaggactatcagtaccttgactcaaaaagaacaatttaagtttgctattgtaggaggaggtccagccagcgtagagctcgcattctcaatacaccatcgaataaaaaacgacttgaatttaacaagcacggaaaagtcaaatctgcagatgcaaatcattagcgcagagagaacaattctgcagtttcacaataacagagttcaaagatttgctgctaaagaacttactagtcggaatatcgatattttacttgagaagaaaatgtctgcttgcgagaaaggcactattatttgtgaagatgaaacggagatagcggcagatgcgataatatgtgccactggtgcgagcctcccctcttggccagcaaagtgtggtctcgctatcagtcaggacggttttattgaagtagatagctaccttaaatcaacctcccatgactatgttttcgcagctggtgatgctgcaactataaaaggacagaaaagaccaaagtctggagtatatgctgtaagacagggacttcctttagcaaataatttaataagacaggcgacgagtaaacgccttaaaaagtataaaccacaaactcatgcactagcattaatgagcatgtgcaataaaactgctatcgcgtcaagaaacaaattttttatgcatggaaggattgcctggttaatcaaagacaggatcgatataaatttcgttaaaaagtactcaaatttccctcaaatggaaaataatttaggcctcgaaaaaggtcttgtggacaataaaactcagcaactcctggaatctcatgcaatgcgttgtgctggctgtggcgcaaaagtcgcaaacagtgtgcttcaagaggtgcttcgtcaacttcccaataccgagaaacaggaaatcttaactaacttttcatctgcagaggatgccgcattaattcagctggagggcaacaaggttcttctccaaagcgttgaccaaattaaagctttcattaacgatccatgggtttttgcccgcatagccacgaaccattgcttaagcgatatctacgcaatgggttgcaaacctcattccgcactggcgattgttggtctaccgtttgcgtcaaaaaagtattctcaatcagagttacgtcaactaatgctctcgtgcagtgaaacactgaaagagcagaattgttctcttattggagggcactcagcggagtcagaagatttaacttttggcttgtctgtcaatggatttacgactcaagataaggtgctttgtaaaaatggaatgcaaaaggatgatgtcctgattttgacaaaacctctaggctctggaaccctcctggcggcagacatgcgctcaaaagcttctcattccaatattcaaggtgccttaaacgcgatggcaatttcaaaccaggaggcatcatcgatcttggttaagctaaaggcaaccgcctgtacagacatcacaggtttcggtctggcaggacacttgttagaaatgttagccaaagacaggatcgaagtttcaatcaacttggatgacataccaattatggatggtgcagtagacagttaa

SEQ ID NO: 253473 - DNA, 980 bp, Unknown
  Bacterial polypeptide expressing nucleotide sequence isolated from the Sargasso Sea
tttgccgaaacaaaactttttctcttatttacatgaaaaatacgacacagaatttatatatttcgacacttttatggaggaagctttatattcggatctaggattttttaatactgatcaagtaaggtctgataaagaaggagattttttaacatctccagaagtttctaaatattttggaaaaataatacgaaattggatccattctgaaagtaatttaaaaaatattattgaaataggttctggaacaggttccttgattgaacaaataggaataaaagaaattacagcagttgaactgtcttctactgcaagagaagagttaattaaaaaagggatagacacacatacaactattgatgaattgactactaaaacttctgatttaatttttggaaatgaaatattagacaatatcccatgctctattggattatataaagatgaaggttggtatgaaaaagtagtgttattagaggagaactcactggtatatggcttaagacctatcagaaataaagaacttgattggataaataaaaataatatcgttccgaatgaagattatgagttcgagattcaagtcaatattgataaatttttaaattcagtcattaaaaaaatcaatccgggaaaaatattactttttgattatggttatgaacaaaaaaacagggacaagagaatgtatagttcattgttaagaacatacaaaaatcatcatctatctgttgatcctattgatgatccaggaaacatagacattacttacgacgtaaacttctcatctatatctagtgagcttaaataccttggttatgatgtaactttaaaattacaaagagattttttacttgataatggattcaatatattttttgatgagctgcaagaaaagtatatagctgctgaaggaattgagaaattaaagattaattccgagttgaatgggatgaaagcaattgttgattcaaatggct

SEQ ID NO: 253474 - DNA, 1225 bp, Unknown
  Bacterial polypeptide expressing nucleotide sequence isolated from the Sargasso Sea
atggataaagggaatatttgggtagttgatgatgatgagtctataagatgggttctagaaagaggcttatctgaaaacggaatagcagtagagacgtttgattctgcaaagaaagtaataaaaaaattagaaaccgaaaaccctagtctaattcttactgatataaaaatgcctggtaaaagtggaatagatttattagatgaagttaaagagataagacctgaaattccgatcattattatgaccgcccattctgatttaaagagtgcagtagaatcctatgagcatggagcttgggaatatcttcctaagccttttgatatcgaagaagctgtctctatggtccaaagggcaacaacaaaagataatactgaaatagaagagaccgatgaatcacaagcagaaataattggcgaagcgccggcaatgcaagaagtatttagagcaataggcaaattatctaactcaaactctactgtgctgctaatgggacaatcaggaacaggtaaagagcttgtagctaaagctttatttcaacatagccctagaaaagagaatgcatttattgctctaaatatggctgatattcctaaagatcttctggaagcagaattatttggtcacgaaaagggtgcttttactggtgcggatgaaaaaagactgggaagatttgaacaagccaataatgggactctatttcttgatgaaattggagatatgccacttgaaacccaaacaagacttttaagagttttatcaaatggggaattttatcgtgttggtggtagacagccaattaaagtagatgtaagaataattacagctacgcatcaaaatcttgaagagttagtaaagagtggaaattttagagaagatttatttcatagattgaatgtgattaagctcttacttccaaaactcaatgaaaggaaagaagacatacctgaattagcaaaacacttctttacaaagtcctcagaagagctgaaagaggaaaagaaatttttgtctgaagaagttgaaaattattttaaaacacttgcttggcccgggaatgtaaggcaacttgagaacgcctgtaggtggttaacggtaatgtcgcccagtaaggaagttaaattagaagatttacctgatgaattaaaattggaaaatgcagaagaagaaaataactggaaagtagttcttaggtcttggtcagagaattatttagaaaatgggtaat

SEQ ID NO: 253475 - DNA, 367 bp, Unknown
  Bacterial polypeptide expressing nucleotide sequence isolated from the Sargasso Sea
gatgaagaataaaattttagcagtaattccagcagcaggatctagtgaaagatttaatagtgaagaattaaaacaatatgccgattgtggaggacgctctgtattagagatggcagttagtccatttcttgattcagaaattatcacaaaagttattatatgtatatctaccaatgatacatttataaaaaatcaaaatttcattaatgatcctaaaattttattaatagagggtggttctactagagctcattcagtattgaacgcacttcaacatgaagagtttaatgattaccaatatgtgatagtccatgatgcggctagaccaaatattactgaagctgatataaataaaatacacaacgat

SEQ ID NO: 253476 - DNA, 880 bp, Unknown
  Bacterial polypeptide expressing nucleotide sequence isolated from the Sargasso Sea
gatgccagattctcctagggccgcagtcatctggatgatattcggaagcttctgctttggaaccatgaatgcactggtcaaatggactagcgatcacactgatgtttggatgattatcatggtcaggtcagcagttatcgcattcgcagttgcggcattcgctgcctctagggggattagtctgaaggtcaacgatcacagaaccatgttgcttaggtgcatagtaggactaattgccatgattctgtacttcaccgcacttggaaggattccaattggtcaagccgtgactctccagtacactggtcccctattcgttgccctcctttctgggaggatactggccgagagggtttccgcatcggtggcaagtctggtattgactgcattcgctggaatcgttctaattgtctctccagaggtaggcactgtagacccaaacgcactgcttgctctcggctctggattcttcgcagcattggcgtacatgtacgtcagggaactcagaaagacagactctccggctaccgtcatattctggtttgcagccttctcagtcgttggaagcatcgtccagtctgcaccacatatctccgagcttgactcaaacacgattgcagccctcatcggcatcggcatcggtgctggaggggggcaggtaggaatcacaatggcttaccacaaggcgaatgctgcctgggttagtgccttttcctacctcacagtactggttgcaactttctacggcttctctctattcggcgaaaccctctctctcgcggattggctgggaggcgcattggtcgtaggatccggaatcgcacttgtcttcgtcttcccacctgatgagaaaagcgaatcaggaaacgctgcccagtga

SEQ ID NO: 253477 - DNA, 1135 bp, Unknown
  Bacterial polypeptide expressing nucleotide sequence isolated from the Sargasso Sea
atgattcaatccgccccgcttcgccgcctcgcgacgggcgcactggccgccgccgcgctgacggccgccgccggcgcactcgccgagccgcaaggtttcctcgagaccgtgcatcgccacaccacgctcgtcaacacggtgccggacaacggcgaccagaacccgtacgcgatcgcggtcgcgccggtgtcggccggcacgatccaggcgggcgacgtgctcgtcgacaacttcaacaactcggcgaacctgcaaggcaccggcagcacaatcgtcaactaccgcccgtcgacgaagcagctgagcctgttcgcgtcgatcccgcgcgacctgaaggcgtgccccgggggcgtcggcctgtcgacggcgatgacgatgctcaagtcgggctgggtgatcgtcggcagcacgccgagcaacgacggcacgaccaacaccaagggcgccggctgcctgatcgtgctcgatccgcaaggcaagatcgcgtcgacgtggtcgacgcccaacatcaacgacccgtggggcaacatggccgtggtcgaccgcggcgacagcgcgacgctgttcgtcagcatggccggcttcggcgtcggcggcgcggacggcaatccacctatctacaagcaggcgacggtactgcgtctcgacctcgacgtgccggccggcaagccgcccgtgatcaagcaagaaacggtcgtcgcaagcggcctcggcgcgcaggccgacaagggcgtgttcctggtcggcccgaccggcctcgcgctgtcgggcgaccagaagaagctgtacgtgtcggacgcgatcggcaaccgcatcgtcgagatcgacgacccgctcacgcgcgacaccagcgcgggcgtcggccgccaggtcaccgccgacggcttcctgcgccgcccgctcgcgctcgccaccgcaccgaacggtcacctgctcgcaaccaatgcgcagaacggccaggtcgtcgaaatcgacccggttgccggcaagcagatctacgcgcgctggatcaacaccgacaaggcgcagacgccccccggcaacggcaacctgttcggcatcgcgatgacacctgaaggcgacggtttctactacgtcgcggacgacgtcaacacgctgttgctcgcgaagtaac

SEQ ID NO: 253478 - DNA, 459 bp, Unknown
  Bacterial polypeptide expressing nucleotide sequence isolated from the Sargasso Sea
tttggataaagtctctgctataattcttgctgctggcagcggtagtagatttggtgaaaaaaaacagtttaaaaagctcaatgggaagcctatttggatttattcattaaatactttcattcaatctaaatgtattaatgagttaattttagtgtttcctaaggattcattagagactttaaaacagtctcaagttttcacatctttaaataaaaaaaataacattaaattagtctcaggtggtgaatctagaagagattcagttctaaatggtctcaaagcagtaaaaaaaataaatgatgtaatttgtattcatgacgctgcaaggccatttattaagccctcttacattaaagattcgattgaggcttgtagagaatttgatggtgcgataatagcaatacctgctattgatacagttaaaaaagccgataataaaataattaaaaatacaattga

SEQ ID NO: 253479 - DNA, 907 bp, Unknown
  Bacterial polypeptide expressing nucleotide sequence isolated from the Sargasso Sea
atgaaaatattgatcacgggagggacaggcttcatcggtcgccgtctggtggcccatctcaaggtggcccacgaggtactggtgctgacccgccagggcagccgcgcctatgatctgctcggccacgacgtcaagctgctcgacagcctggatcggctcgacaacctcaacgacgtggacgcggtcatcaacctggcgggggagcccatcgccaacggccgctggagcgagcggcgcaagcagttgctgtgtgacagccgctggctgctgaccgaacagctggtcgatctggtcaagctctccgatacgccgcccagggtgctgatcaacgcctccgccatcggctggtatggccgccagggcgatgagccgctggacgagcagtgccagacccctcacgacgaattcacccatcagctctgtcagcagtgggaaaccctggcccgcgaggctcgcagcaagcatacccgagtctgcatcgtgcgcatcgggttggtgctcggcaccgacggcggtgccctgcccaaaatgttgcctccctatcgcgtcggcctcggtggccccatgggcacggggaaccaggtcatgagctggatccacatccaggatctggtgcgcgccatcctgttcctgctggagcacgacgagtgcgacggcctcttcaacggcacggcgccgcagccggtcagcaaccgcgagttcagccagactctggcaggcaccctgcaccggccgcacctcttcttcgtgccggcccccctgctgcagttgctgatgggcgaagcggccgatctgctgctcaccggtcagagggtgctgccgacccgtctgcagcaggcaggcttccacttcacctacccggcgctgccccaggcccttgccaatctgctgagcactccccgctgac

SEQ ID NO: 253480 - DNA, 954 bp, Unknown
  Bacterial polypeptide expressing nucleotide sequence isolated from the Sargasso Sea
tccagcaccggcaagcagggactgatccaggccgcccagcaggggacttgtttctcgacgagataggggacatgccgctcaccatgcaggccaagctgctgcgggtgctggagctgcgggaggtgacccccatcgggcgccagccggccggtgccggtggacattcgcatcatagccgcgacccatcagcatctggagcagtacatcgccgagggcaagtttcgcgaggatctcttctatcgcctcaacgtcattcccatccacctgccgcccctgcgcgagcgggagggggacgtggcgctgctgacccactacttcctcaacctgcacaccagccgcatcggcctgctgtatccggggctgagcccggaggtgatggcactgctggagggctaccgctggcccggcaacgtgcgcgagctcagcaacctcatcgagtacctggtgaacgtggtgcaggcgggggaggtgatcgagagcatcctgctgccccccaatattctgcgcaaccagcgcagcggggcggacgagccgtcacgcagcgcggcgcaaatcgcgcgcatgccgctctcgcccgacccttattcccatggcgtgctggccgaccctgcgctcagtcctgccgctggcaacccggcatcggctacgggggcgccctggtcattgccagaggcaagccagccagagccgggggccggccaggtcgagcgcgggttggcgctgccacttggcgaaaacgggctggagaacatggaaaagcagatgatagaggagaccctgctacgccttggcaacaagaagctggccgcccaggcgctcgggatcggcatcgctaccctctatcgcaagataaagaagtacgagatagccgtgcaggcctgatctcgcagcgggtcgcctggcggccccgcttgactgcgccgcgaccgacaatcgcggcgttatcattatgag

SEQ ID NO: 253481 - DNA, 1477 bp, Unknown
  Bacterial polypeptide expressing nucleotide sequence isolated from the Sargasso Sea
gatgaatgactgggtccgcctgcccgtcaactacggcgacgtgctgcggcgcgccgccgagtcgctgttccggaccttcgaggattcgagcgcgggcacggtggtcgtcgatcgcgatgcgcgtgtcgtgtggatgaacgagcggtacgccgcgcgcttcggtttcgccgatccgcagcaggccgtcggcctcgactgcgaggccgtgattccgaacagcctgatgcgcgaggtcgtgtcgaccgggcagccgatcctgctcgacatcatggagacgggccgcgagccgctcgtcgtcacgcggctgccgctgaagaacgaggccggcgagacggtcggcgcgatcggcttcgcgctgttcgaccagttgaagacgctcacgccgattttttcccgctacgcacagcttcagcagcagctgatcgcgacgcagcgttcgctcgcgcaggcgcgccgcgcgaaatacacgttcgcgagcttcgtcggcacgagcgccgcgagcctcgaaaccaagcgccaggcgcgccgcgccgcgcaggtcgattcgccggtgctgctgctcggcgagacgggcaccggcaaggaactgctcgcgcatgcgattcacgcggcgtcggcgcgtgcactccagccgctcgtgaccgtcaacgtcgccgcgattcccgacacactgctcgaaaccgaattcttcggcgcggcacccggcgcgtacacgggcgccgatcgcaaggggcgcatcggcaagttcgaactggcggatcgcggcacgctgtttctcgacgagatcggcgacatgccgctgccgctgcagggcaagctgctgcgcgtgctgcaggacaaggaattcgagccggtcggctcgaaccggatcgtgcgcgccgacgtccggatcatcgcggccacgagcgccgacctgccggcgctggtcgcggccgggcgttttcgcgcggatctctattaccggttgaacgtgctgacgatccacgcgccgccgctgcgcgagcgcgcgtccgacatcgcggcgctcgtctacgcgacgctcgaggagctggccgcgcagcacgggcgcgccgcccattgcgagctgaccgacgatgcgctgcggatgctgtgcgcgtatccgtggccgggcaacgtgcgcgagttgcgcaatacgctcgaacgcgcgctgatgctgtcggaccggtcggtgatcgatgcgcgcgcgctcgcgccgttccttgggccggtgcgcgtatcgacggacgcggccgcaccgacgcaaccgctggccgcgccaccggtcgaacgacgcgcgggcgagcggcccgctgcgccggccgcttcgtatgccgatgcattggcggcgtgggagcgccagttcctgaccgatgcgctggcagcctgcgacgggaaggtggtggaagcggccgcgcgcatcggaatcggccgcgcaacgctgtacaagaaactggcggcgctgggcatcgaccggtaa

SEQ ID NO: 253482 - DNA, 1453 bp, Unknown
  Bacterial polypeptide expressing nucleotide sequence isolated from the Sargasso Sea
gatggctcatccccgacacgatcacccggcgtttcgcgcggaggcgctgcgctggtgcggcacgcgcgcgatgcgggaacgcacgctcgacgtgatggacccgtatacgggcacgcgtgtcgggacggcgccgctggcgagcgtcgacgatgtgcgcgtggcattcgactacgcgatggcgtaccggccgacgctcacgcggtacgagcgttcgcagatcctcgagcgtgcggccgcgctgctgcgcgagcgcaccgaggaagcgtccgacctgatcacgctcgaatcggggttgtcgaaacaggactcgcgttacgaaatcggccgcgtggccgacgtgttgaagtttgcggcggtcgaggcgttgcgcgacgatgcgcaaagtttctcgtgcgacctgacgccccacggcaaggcgcgccgcgtgttctcgcagcgccagccgctcgacggtgtgatcgtcgcgatcacgccgttcaatcacccgatgaaccaggtggcgcacaagattgcgccggcgatcgcgaccaacaaccgcgtgatcgtgaagccttcggagaaggtgccgctgtcggcgttctacctggccgacctgctttacgaggccggtttgccggagccgatgctgcaggtgctgaccggcgatccgcgcgagatcgcggacgagctcgtcacgcacccgcatgcgtcgctgattaccttcacgggcggcgtggcgatcggcaaggcgattgccgcgcgggccggctaccgccgcatcgtgctggagctgggcggaaacgatccgctgatcgtcctcgacgatgccgatctcgaacgcgcggcgtcgctggccgtgctcggctcgtaccggaattcgggccagcgctgcacggccgtcaagcggatgctggtgcagcgttcgatcgcgccggcgttcaccgaattgctcgtcgagaagacgcgcgcatggaagtacggcgatccgttcgatcccgccaacgaaatgggcacggtgatcgacgaggaagcggcgcggctgttcgaggcgcgagtggcggaggcggtcgcgcagggcgcgcgcctgctgaccggcaacgtgcggcgcggcgcgctgtatgcgccgaccgtgctcgacaacgtcgatccatcgatgacgatcgtgcgcgaggagaccttcggcccggtgtcgccggtgatcacgttcgacacgatcgacgacgcgatccggatcagcaacggaacggcgttcgggctgtcgtcgggcgtctgtacggacagcacggcggcggtcgtgcggttcgtgaacgagctgaacgtcggcacagtgaatgtatgggaagtgcccggataccggatcgagctttcgccgttcggcgggatcaaggattcggggctcggttacaaggaaggcgtacaggaggcgatgaagagcttcacgaacctgaagacgttttcgctgccttgggagtga

SEQ ID NO: 253483 - DNA, 4504 bp, Unknown
  Bacterial polypeptide expressing nucleotide sequence isolated from the Sargasso Sea
tttgagccatccagtccttaaacttttcttcggcacgctctgcttactaagcttgtgcggggcgccgctcacaggctcagcattacctttaaatgcggctaacacacagctgaaatttgaacatatccgcagcgaagaaggcttaaatcaaaatacaattaccagcctgtttatggacagtgcgggtatgctttggattgggactcaggacggcctacatagttacaatggctataatttcaatctctttattcattcgccgaataatcccagcagcatttcagaaagctttatctcagacattattcaagatgctgaaggttatctgtggattggcacctttagccaaggggttaatcggctcgatctcaatacggggacctttgagcgctttggccttgaacagggcctaaccgatcctagagtgaccaagctcaatattgtcggcaatacgctgtggattggtacccaaggcgggttgttttcactgtcgattaaaactcagcggatcacgcaagtctccctcggcaacagcgtcgaaccacatattactagcctcgccaatgttgaaaacacctatctactagcgggaacaagggccagtggcacctttgcgctgagttcaaatgccatcactaggctgaatgtgccgcaggatctgactgcctaccagattaaagcgaattcgactcgcgccatcaccttagcgttgggcaatcagctatggcattacgatttggtttcacaccaaggaagtattctctggcaggcagaggacgatattccttacctcaaggattttattcaaacaccccaaggacagttttgggtggtcggccccgaagcgggtcttattcagctagagcgtgaggcggggcgtttcgttgcggcttatcataaatacgatatgcagcgtcccaacagtatcagcgacaataatattctctgtttattgcaggaccccttcggtaatctctggctcgggggaagttattcaggcttgaataagatcaacacccgtcgtcagtacttccaacatctatttgaatatacaaccgaattacctcagcagagcaataatatccgcaccatgtttcgtagtcaggataaagcactgtggataggtaccgagggcgcgggcctcaagcgcttagccttcaatgctaaacaatatgaacattacacctcggcttttgctaaggcgctcggtaaagaaacgcgccatttaaatcttgtcctgcgtgcgatcacccaagacagacaaggcgtgctctggtttgccagcaattatggcttagggcgcttaaccccgagcggtgaatttagtctgcttaagcttactcaaagccaagatccggcctcagaagcgaactatattcgtagcttagagctggatgctcagggccaactctgggtagcgacctcccacgccttgtatcgaaaagcgcttgaaaaggatgagtttacctctgtcccactcacagatattgagaattttcatcccacacaaaacctgctgctgatgctcagagccgacggcaatactctgtggattggttcactcaatggtttagttaaactcgatatgcaaacgggtcaaggccaagccttttaccatgaccccgaaaataaaaacaccattattaacaatcggattcgagacgttttagtcgcaagtaatggtgacgtctggttcgcgacccacggcggtattagcaggctatcggcccaagccgaggatatggtttttagggattacacccgcgaacaaggcctgccgagcgacacgatttacgctctgctcgaagacgatgagcaccatatttggttcagcagcaatgcgggcatcggcaagttgaatcccaccaatggcaaaatcatcaacttcaacgagcaagaaggtttgcaggcgttggagtttaacggcggagtcaaactcaaagacagcgatggcgacctctggtttggtggcattaacggcatcaaccgctttaatcctaaggcgatacccgaccaaagaagcgaagccaaagtcgccctaacagcctataaaattgcgggaaaacgacacactatcctcgatcttagccatccgcctaaaatcctgatgaactatgacgaccagctcgtcagctttgaggtcacctcactcgatttcagttacacggggaaaaatcgctttagttattatctcgaagggtttgataaccaatggcatgatctgccctcggggaatgagatcacctttaccaatatcaaccccggccactatgtgctccatgttcgccattctttggagtacaacagcgagggcagctatgcactgctggtcgatttaacggtcaaagcgcccttctatcgctcgcaaattgcctatgcactctatgtcctgctagcacttggtctactgggctggatagtgttgtggcgtaaacagaagcgcgaacagcaacaagagtttgaaaccagcatccgtgcctcagaagaacgactcaaactggcgctctgggcctcgggcgatggcatgtgggactggaatatccaagaacagcaggtctatcgtactcatacggatattccggtttcccaatggagcagccacacgctgctgcacgacaatgctcacccagaagatagagagcgctttaaacaagtcttgaccgaccatttacaagggcgcacaccgttttttgaaatggaatatcgcatcgagcactcaccgggcaactggctgtggatcctcgagcgcggcaaagtggttgagaccaacactcaggaacagcccattcggatgacaggcaccacccgtaatatcacctcgcgcaagctgattgagaacgagctggtgctctcctcccaagtgcttaacagcatgaacgaagccgttgtggtagcaggtttagactatcgtatccgctcggtaaaccccgcctttagcgcgattaccggatattcggagcggcaaatcagtgataaatatttaattcacttagcctacagccggcagcagcgagatctgttcaacagtattgagcagcaactgctacgccataaacattgggcgggtgaaatttggatccgcaacagggcgcgtaaggcgattctggtgtggcttgagatcaatcaagtgatcgatgtaaaaggcgaaactagccactttgtggcggtatttaccgatatcacagagcgtaaaaaggccgaagaggatcttcgcttcctcgccagtttcgacaccctgacaggactgccgaatcgcaccttattccaggacaggctcaaccacgccatatctcaagcccataggtcgaataatatcgtcgccctgctgtttttagacctcgaccgctttaagcatatcaatgactccatggggcaccatattggcgatctactcctcaaagccgtagcccacagactgcaaaatgccgttcgcgaaggggacactgtggcccgcttaggtggcgatgaatttactattattttagaaggcgtggcgaaaaccaaagcggcgacgctgatctccgagaaagtgctcaaagccttccaagctcccttcttactcgatgataagtccctaaccatttcgacctcgattggtatcagcctctatcccaacgatgcagaagatgtggattcgctgattaagtttgccgacactgccatgtaccacgctaaggcgctcgggcggaataacttccagttttacactaataaactcaatgagatggcaacacgccatgtgcaactcgaggcggggcttaagcaggctatttctcgcaatgagttaagcttggtgtatcagcccaaattctgtctgcgcaaaggttctctgaccggacttgaggcgttactgcgttggcaccattccgaattaggccccatctcacccgccgaatttattccgctggcggaggaaaccggcattattaaccagattggccattgggtaatcaaccacgcctgccaacagcttgccgagtggagtgagttaggttttggcgatatcagcatggcagtgaacctgtcagcgcggcaattgaaggccgatattatctcgagcatcgaagtggctcttgcggtatcgggcctacccgccaaggcgctcgagctggaattaaccgaatcgatgatcatgggtaatccgcaggaatcggtaaatatcctctctaaactcaaggcgttgggtttaactatcgcagtggatgatttcggtacaggttactcgagcttgagttatctaaaacgtttccccatcgataccttaaagattgaccgtgagtttgtgcgcgacattaccaacgaccccgacgacgcggccattaccagcgcgattatcgccctcgcccacagcctagagttaaatgtggtggcggaaggggtagaaacccaagagcagctaaacttcttagcgctacaaggttgcgatcaggtacagggcttcctgctgagtaaaccgctcagtgcccaagattgcttagcgctgttgcaacaacggataaaataa

SEQ ID NO: 253484 - DNA, 487 bp, Unknown
  Bacterial polypeptide expressing nucleotide sequence isolated from the Sargasso Sea
tatggttagggggatatatattgggcgctttcaaccttatcataatggccaccataaagtggtagaaaaaatttcaggagaagtggacgagatggtattaggaataggaagtgccggagattcccacacgaggaaaaatccattcactgcaggagagcgaatgttaatggttacaagggcaattgaagaatttgatgttccctcttatgtggtacaaatagaggatttaaaacgaaactccatttgggtgagtcatgttgagagcataagcccgagctttgatgtggcttattctaataatccacttgtgattcaattgtttagagaagcagggaaagagatccggcaagttccaatgtttgatcgagaagtgttggaaggggcagaagtgagaaggaggatggaaaatgaagaggattggcagtctctggttccagttccagtgagagatataatagaagaaataggagggattcgaagaattcaa

SEQ ID NO: 253485 - DNA, 610 bp, Unknown
  Bacterial polypeptide expressing nucleotide sequence isolated from the Sargasso Sea
aggcgctattaacggctgctctaatccgcatcctcatggtcagatttgggccaacagcactgtgcctactttgcctgccaaagccgatcaagcgcagcgtgaatatttagctaaacacggcaaaaacctgttactcaattatgctgctttggagcaacaaagtggcgaacgtactgtagtggaaaacgagcattggctggtcgtagtaccattctgggccagctggccttttgaaactctggtattgccaaaagctcatgtacgccggatggaagaattaacttcagagcagcaggtggcgctggctgatattcttaagcaaatcactattcgctacgataacctattccagtgctctttcccttattcgatgggctggcatagtgcgccttatcagaatgatgctggcgctgagacgtcagaaagcatcgatcactggcagctgcatggccatttttacccgccgttattgcgttctgccaccattaaaaagtttatggtgggctacgaaatgctggctgaaacccaacgtgatatgactcctgaacaggctgctgaacgcttaaaacagcaaagtcctgtgcattacaaacagcagagcaaggtttaa

SEQ ID NO: 253486 - DNA, 964 bp, Unknown
  Bacterial polypeptide expressing nucleotide sequence isolated from the Sargasso Sea
agaaaaaatccactatcaggagaatgggtactggtttctccgcatagaaataacagaccatggcttggggctacggaagccgtagccactgaagaattaccaaaacacgatccgtcctgtcctttgtgccctgggaaccaacgagcaaactcggatacaaatccgcactattcttatacccatgtgtttgtaaatgattttggcgcattaaactctatatcacctcaggccgaatcaagtacggatccactatttacatacgatgcagcagagggcgaatgccgtgttatttgtttctcgcccgatcataataaaacgctgccagagatgtcgttaacagaattatccgaagtgattaccgcctggcagcagcattaccgggaattaagtcttcgctacaactgtgtgcaggtctttgaaaataaaggggctattatgggctgttcgcagccgcacccacatggacagatctgggcacacccgcatttatctacagaaattgagcgcgaagacgcccagcaatccagttattttcagcttcatggccgagccttgcttgcggactatgcagaaaaagaaatcgctgatggcagcagggtggtttttgaaaacaagcattggcttgtcgtagtacctttttgggcggcttggccatttgaaactttagtattgcctaaggacgagttgcaaagactggatgcgttgaatgacgcacaaaatagtgcgcttgcagaaaccttaaaagtgcttaccaccaagtacgacaacctatttcgctgtagcttcccttattctatgggttggcataatgcgccagcaaatctggactcttctgcatcatactggcgcttacacgcccatttttacccgcctttgttgcgctcagctacagtaaaaaagcatatggttggttatgaaatgttggccgaaagccagcgcgatcttactccagaaactgcagcgt

SEQ ID NO: 253487 - DNA, 624 bp, Unknown
  Bacterial polypeptide expressing nucleotide sequence isolated from the Sargasso Sea
catgacgcaattcaatcctgtcgatcatccacaccgccgttttaacccgctcaccgggcagtggattctcgtatcaccgcatcgcgccaaacgcccgtggcaaggggcgcaggaaactccgtctaagcaggtactacctgcacatgacccggactgcttcctgtgcgctggcaatacgcgcgttaccggcgacaaaaacccggattacaccgggacctatgtctttaccaatgactttgcggcgttgatgtccgataccccggacgcgccggacagtcacgatccgttgatgcgctgccagagcgcgcgcggtaccagccgcgtgatttgcttctcacccgatcacagcaaaacgttgccggaactcagcgtccctgcactgacagaaatcgtaaaaacgtggcaggagcagaccgaagacttagggaaaacctatccctgggtgcaggtatttgagaataaaggcgcagcgatggggtgctcgaacccgcacccacacggacaaatttgggccaacagctttttgcctaacgaagccgaacgtgaagatcgcctgcagaaagcgtacttcgccgaacaaggcgcgccaatgctcgttgattacgtccagcgcgaactggcgga

SEQ ID NO: 253488 - DNA, 550 bp, Unknown
  Bacterial polypeptide expressing nucleotide sequence isolated from the Sargasso Sea
cacccccatgggcagatctgggcctcggatcgtcttccgacagaaattgaaaaggaagatgctcatcaaagatcttattttgaagagcacaggaagcctcttctgctggatgtcgtggaagaagagctgaaaaaggaagaaaggattgtcgaaaaaaattcttcatggcttgcggtggttccctattgggcggtttggccttttgaactccttttgctccccagaaggaatgtgaagcatttggaggaaatcgatgaacaggagaaacaagaactcgcggaaatcctgaaaaaaatcctgagtcggtacgataatctttttcaaacctcctttccctactcgatgggctggcacggtgcccccttcgacgaaaagggagatcattggctgcttcatgctcatttttatcctcctctgttaagatctgccagggtgaggaagttcatggtaggttatgaaatgcttgccgaaacgcaaagggacctgaccccggaacaggcgacagaacgcctttgtaaactctcctcaatccactacaaacactcatgaa

SEQ ID NO: 253489 - DNA, 514 bp, Unknown
  Bacterial polypeptide expressing nucleotide sequence isolated from the Sargasso Sea
tatgacaaatcttcatgatttacctcatcgacgtttcaatccactcacaaatgagtggttgcttgtttctccaaatcggatgaagagaccatggcagggcaagatagaagctgaggtaaaaaaaataattccagtatatgatcccaattgtgccctttgtccaggaaatgaaagaacagggggtactaaaaatccagactacactggaacacacgtatttaaaaatgattttagtgctttactagaagattcaaatattactattgaaaaaggaaacaaaaattcagatctttttctttcaaaggaagtttatggtacatccagggttatatgtttttccccaagtcattgtaaatctctacctgaaatgaataattcggagattcttgaagttgttcgaacctggattgaccaaacaattgaacttggtgaaaattatcgctgggtgcaaatatttgaaaacaaaggtgaaataatgggatgttctaattcgcatcctcatggtcaggtatgg

SEQ ID NO: 253490 - DNA, 334 bp, Unknown
  Bacterial polypeptide expressing nucleotide sequence isolated from the Sargasso Sea
agatttaaccaaagagcagcaagctgctttggccgatattcttaagcgaatcaccattgcctacgacaacctgttccagtgttctttcccttattccatgggctggcatagtgcgccttatcagaatgaaagctcggatgctgttgaaagcatcgaccactggcagctgcatggccatttttatccgccgttattacgctcagccaccatcaaaaagtttatggtgggctacgaaatgctggctgaaactcaacgtgatatgacccctgaacaggccgctgaacgtttaaaacagcaaagtcctgtgcattacaaacagcagagcaaggtttaa

SEQ ID NO: 253491 - DNA, 616 bp, Unknown
  Bacterial polypeptide expressing nucleotide sequence isolated from the Sargasso Sea
tggcagcaaataccgttgggtccagattttcgaaaacaaaggggcggaaatgggctgttccaaccctcacccccatgggcagatttgggcctcggaccgtcttcccacagaaattgaaaaggaagatgctcatcaaagatcttattttgttgagcacgggaatcctcttctgttggatgtcgtgaaagaagagctgaaaaaggaagaaaggattgtcgaaaaaaattcttcatggcttgcggtggttccctactgggcagtatggccgtttgaactccttttgctccccagaaggaatgtgaagcgtttggaagaaatcgatgaacaggagaaacaggaactcgcggaaatcctgaaaaaaatcttgagtcgctacgacaatctttttcaaacctccttcccctactcgatgggctggcatggtgccccctatgacgaaaagggagatcattggctgcttcatgctcatttttatcctcctctgttgagatctgccagggtgaggaagttcatggtgggttatgaaatgcttgccgaagcgcaacgggatctaaccccggaacaggcgacagaacgcctttgtaaactctcttctattcactacaaacactcatga

SEQ ID NO: 253492 - DNA, 709 bp, Unknown
  Bacterial polypeptide expressing nucleotide sequence isolated from the Sargasso Sea
ttttctccgaatcatgccaagaccctccccgaactcgaactgcagcaaatcactgagttgattgaaacctggcagaagcagttccaagaccttggcagcaaataccgttgggttcagatattcgaaaacaaaggggcggaaatgggctgttccaaccctcatccccatgggcagatctgggcctcggatcgtcttcccacagaaattgaaaaagaagatgctcatcaaaaatcttatttccatgagcacgggaagcctcttctgctcgacgtcgtgggagaagagctgaaaaagggagaaaggattgtcgaaaaaaattcatcatggcttgtggtggttccctattgggcggtttggccttttgaactccttttgcttcccagaaggaatttgaagcgtttggaggaaatcgatgaacaggagaaacaggaactcgcggaaattctgaaaaaaatcctgagtcggtacgacaatctttttcaaacctccttcccctactcgatgggctggcacggtgctccattcgacgaaaagggagatcattggctgcttcatgctcatttttatcctcctctgttgagatctgccagggtgaggaaattcatggtgggttatgaaatgcttgccgaagcacagcgggatctgaccccggaacaggcgacagaacgcctgtgtaaactctcttcaatccactacaaaaactcatgaa

SEQ ID NO: 253493 - DNA, 595 bp, Unknown
  Bacterial polypeptide expressing nucleotide sequence isolated from the Sargasso Sea
gggctgctccaacccttcaccccccacggccagatctggggcagcgacttcctgcccaacgagatcgcccgcgaagagcagcaccagcgtgactggctggccgagcatggccgccccatgctgctggagtatgtggagcgggagttggcggatcgctcgcgcatcgtggtggagaccgagcactggctcgccgtggttcccttctgggccgcctggccgttcgaaaccctgctgctgcccaaggcgcacgtcccctccatgctcaacctgaccaaggcccagcaacaggatctggcagtggcgctcaaggagctcaccagccgctacgataatctgttcgagtgcagcttcccctactccatgggctggcactttgcaccgcccaaatcggattgccccgaggcgtggcaactgcatgcccacttctatccgccactgctgcgttccgccaccgtgcgcaaattcatggtcggcttcgagatgctggccgaaacccagcgcgaccttacccccgagcaggctgccgagcggctgcgcgctctgagccccattcactacacccagaccagccacaccaatgaggaggccctatgac

SEQ ID NO: 253494 - DNA, 535 bp, Unknown
  Bacterial polypeptide expressing nucleotide sequence isolated from the Sargasso Sea
gagatcgcccgcgaagagcagcaccagcgtgactggctggccgagcatggccgccccatgctgctggagtatgtggagcgggagttggcggatcgctcgcgcatcgtggtggagaccgagcactggctcgccgtggttcccttctgggccgcctggccgttcgaaaccctgctgctgcccaaggcgcacgtcccctccatgctcaacctgaccaaggcccagcaacaggatctggcagtggcgctcaaggagctcaccagccgctacgataatctgttcgagtgcagcttcccctactccatgggctggcactttgcaccgcccaaatcggattgccccgaggcgtggcaactgcatgcccacttctatccgccactgctgcgttccgccaccgtgcgcaaattcatggtcggcttcgagatgctggccgaaacccagcgcgaccttacccccgagcaggctgccgagcggctgcgcgctctgagccccattcactacacccagaccagccacaccaatgaggaggccctatgac

SEQ ID NO: 253495 - DNA, 574 bp, Unknown
  Bacterial polypeptide expressing nucleotide sequence isolated from the Sargasso Sea
cccccacggccagatctggggcagcgacttcctgcccaacgagatcgcccgcgaagagcagcaccagcgtgactggctggccgagcatggccgccccatgctgctggagtatgtggagcgggagttggcggatcgctcgcgcatcgtggtggagaccgagcactggctcgccgtggttcccttctgggccgcctggccgttcgaaaccctgctgctgcccaaggcgcacgtcccctccatgctcaacctgaccaaggcccagcaacaggatctggcagtggcgctcaaggagctcaccagccgctacgataatctgttcgagtgcagcttcccctactccatgggctggcactttgcaccgcccaaatcggattgccccgaggcgtggcaactgcatgcccacttctatccgccactgctgcgttccgccaccgtgcgcaaattcatggtcggcttcgagatgctggccgaaacccagcgcgaccttacccccgagcaggctgccgagcggctgcgcgctctgagccccattcactacacccagaccagccacaccaatgaggaggccctatga

SEQ ID NO: 253496 - DNA, 721 bp, Unknown
  Bacterial polypeptide expressing nucleotide sequence isolated from the Sargasso Sea
gccggatcacggcaagaccctgcccgagctgcccctgcctgccatcgagcaggtgatcaccacctggatggagcaggtggccgagctgtcgacccactgggaatgggtgcaggtgtttgaaaacaagggcgccgtcatgggctgctccaaccctcatccccacggtcagctgtggggcagcgacttcctgcccaatgagattgcccgcgaagagcagcaccagcgcgactggctggcggagcacggccgcccgctgctggtcgactacgtggaacgggagctgcaggatcgctcccgcatcgtggtggagaccgcccactggctggcggtagttcccttctgggcggcctggccgttcgagaccctgctgctgcccaagcgccacgttccctctctgctcgacctcacccccgagctgcagcaggatctggccatcgcgctcaaggagctcaccagtcgctacgacaacctgttcgagtgcagcttcccctactccatgggctggcactttgccccgccccgctccgactgcccagaggcgtggcaactgcacgcccacttctatccgccgctgctgcgctccgccacggtgcgcaaattcatggtgggcttcgagatgctggccgagacccagcgtgatctcactcccgagcaagccgccgaacggctacgtgccctgtccccgattcattacaaccaggctgacggggagaagcgatga

SEQ ID NO: 253497 - DNA, 1057 bp, Unknown
  Bacterial polypeptide expressing nucleotide sequence isolated from the Sargasso Sea
tatgggaacccctttcgaccctaccaacgatccacatcgccgttacaaccctttgttgggtgagtgggtgttagtgtcgcctcacagagcgaagcgcccttggcagggagcctcagaagagccaaacaacgaacaaaagccatcttacgactctacgtgttatttatgtccaacaaacacccgcgtgaatggcgaagttaaccctgactataaaggtacgtttgtttttcaaaacgattttgccgcccttaagcaagatacagaacaagccagtgagaaaaaggggctgtttcagttcgaaactgagcaaggctgcagtcgtgttatttgtttttcccctgatcacagcaaaacgttacctgagctttccgatgaagaacgcgtagacgtagtcaacacgtggaaagcacaaaccgctgaacttggtgaaacctatcgctgggtacaagtttttgaaaacaaaggctcgatgatggggtgttcaaatcctcaccctcatggtcaagtatgggcgcagcagcatgtgcctaccgacccagcgaaaaaagtcgtgcagctacagcaatactttggtgaaaacggcacgcctatgctgttggactatgccgaacaagaggtagcgaagcaagagcgagtcgtgtgtcaaaatgatgattgggttgtagttgtaccatactgggccgcttggccttttgagacgctactgttacccagatttgacgtgcaatctatgcacatgctctcggattctcagtcgctatctcttgctaagatcattggcgaaattacagcgaagtacgacaacttatttgaaacgtctttcccatactctatgggatggcacagtgccccatttgatagtgaagcgcaccctgaatggacgctacatgcgcatttcttcccaccacttctgcgctcagcaagtgtacgcaagtttatggttgggtacgaaatgatggcagaggcacagcgagatttgacccctgaacaagcggcagacagattaaaagcactatccacagtgcactataagaaacgtgagaatgcgaatggataa

SEQ ID NO: 253498 - DNA, 1558 bp, Unknown
  Bacterial polypeptide expressing nucleotide sequence isolated from the Sargasso Sea
ttgccagcacggtttttcatttggttaggcgtgagctatgataggccgctatttttttggcctccccgtcaatttgaagtcataacgaggtgtaccattttttcccagatcgcaaacttttgccgcaaagtgctcggcaaggaagacggcgagcagtcggcggagtcccccattccggcccgtgtcgccggacaacgtcgtaccttgagccgtgaccagcacccgatttcgcgcaaagagatcagcgagaatgcactcaaggtgctctatcgcctgaacaagggcggctacgaagcctacctggtcggcggcggagtccgggatctgctgctcgggaagacgcccaaggatttcgacatcgccaccgatgcgacgccggagcagatcaagtcgctgttcagcaactgccgcctgatcggccgccgtttccggctggcccacatcgtctttggtcgtgacgtgatcgaagtggccaccttccgcggtcaccaccatcaggtcaataccagcaaacatgtgtcggcccaatccgatgaaggcatgctgctgcgcgacaacgtctacggcaccatcgaagaggatgccgagcgtcgcgactttaccgtcaacgccctctactacagtgccaaggatttcaccctgcacgatttcgagggcgggctggaagacttggccgagcgcaagctggagctcattggcgatcccgagacccgctaccgcgaagatccggtgcggatgctgcgcgccgtgcgcttcgccgccaagctggacatgaccatcagcccgcgcaccgcagcccccatcaaggagctggcgccgctgctgcaggatattccggcggcccgcctgttcgaggaaaccctcaagctgttcctggctggcgatggcctggccacctacaagctgctgcgcgaatatggcctgttccaacagctgttcccgcaggtggcggcgctgtttaccccgcacggcaactcgccctacgagcagttcatcgagcaggcactgatcgataccgacacccgggtccgggaagacaagcgcgtcacccccgccttcctctacgccaccctgttgtggggctgtgtcgaggcccgcggccgggtgctggagaacgagagcggcctgccctggtatgacgccttcatgctggcgatcaacgaggtgctggacaaccaggtgcggatcatcgccgtcccgcgccgcttcaccaccgatgtccgcgacatctgggccctgcagcagcggctgacccgccgtcagggccgccaccccgagcgggccatggaacatcccaagttccgtgcggcgtttgacttcctgctgctgcgcaaccgggtcgaacgcggtctgggcgagctggccagctggtgggaacgctacgtggagtccaatccggacgtgcgcccgcagctgcaacgggaggcgacccgccgcccggcaagcggtgagcgcggtcaggccggtgaagcccgcagcaacgatggcgagaagcgcagcagcaacagccgcaaccgtcgtcgtccccgtcgccgcaaaccgaaagcggccgagtgac

SEQ ID NO: 253499 - DNA, 346 bp, Unknown
  Bacterial polypeptide expressing nucleotide sequence isolated from the Sargasso Sea
atgaaatcgaataaaattttaccagtaattttatgtggtggatcaggtagtagattatggccattatcaagacaaagttttcctaaacaatttcttaatttagcttttactgagggtttatctcttcttcagaggactcaaaaaaggacaagaaaacttaaaaatattcaggatccaattctgatatgcaatgaagagcatagatttattgtggctgagcagatgagacaattaaaagtaaagcccaaatcaattattctcgagccttttggtagaaatacagcccctgcaattacagttgcagcactaaaatcattagaattttatgaagatcctaatttttaat

SEQ ID NO: 253500 - DNA, 598 bp, Unknown
  Bacterial polypeptide expressing nucleotide sequence isolated from the Sargasso Sea
aatgaagaaaaaaataattcctattattctttgtggaggagtcggatcaaggttgtggcccttatcaagagctagtttccctaaacagtttttatcaatcataaaagatgaaaaaaagtcattactgcaacaaacatatctaagaatattagaagttaataatattacagatcctattattatatgcaatgaagaacatagatttatagtcgctgagcaaatgagagagataaatgtgaagcctaaggcaattatattagagccaacaggaagaaatacttgcccagcaattacattagctgctctaaaagcctttagagaagaaagtgaatccatattgcttgttttatcagctgatcataaaataaaaaacaacaaagaatttgttaaggtaattaacagagcttacgattatgctgatgcaggcagattaattacttttggagtaatcccgacatcacctgagacaggttacggttacatagagagttcaaaaccactgaataaagatagttatgatggttttgaaataaataaatttattgaaaaaccagcacaagaattagcaaaaaaattatgtcaggataaaagatatact

SEQ ID NO: 253501 - DNA, 745 bp, Unknown
  Bacterial polypeptide expressing nucleotide sequence isolated from the Sargasso Sea
gacacggcagatctggaattcctgcgtctcgagcgcgaagccttcgccaagtgcccgaacgtggccatcgacgtggctgtgatggaaaaaacagaccttggctccgtcctgccactggatgccggctggagcgatgtaggcagttggagtgcgttgtgggaaacgggaacgcaagacagcgagggcaatgtgctgcagggacgggtgatttcagaagggagccgcaactgctacatacgcagcgagcatcgccttgtggtgggtctaggggttgaaaatcttgtggtggtggaaaccgacgatgccgtgctgattgcggaccgctctcaggcacaagccatcaagaaggtggtgaaacagctggaaacggatggcagtccggaaggcaaagcgcaccgcaagatttacaggccatggggctcatacaccggcgtggtggaggaccaccgctggcaggtgaaacggatttccgtgaagccaggtgccagcctctcgctgcagatgcaccaccaccgtgccgaacactgggtggtggtgcgcgggaccgctctggtggaacgggacggcgaacagcagctgctcggtgagaatcaaagcacctacatccctgtgggctgtcggcaccggctttccaaccccggcaaaatccctgttgaactgatcgaggttcagagcggtgagtacctcggagaagacgacatcgtgcgtttcgaagaccgttacggccgcagcaatctgagcatca

SEQ ID NO: 253502 - DNA, 640 bp, Unknown
  Bacterial polypeptide expressing nucleotide sequence isolated from the Sargasso Sea
tatgattgcagttatacttgcgggaggaactggtacacgtctctggccatacagtcgtagcataacaccaaaacaatttctcaatcttgggtcaagtcatatatcgctttttcagcaaacatctaagcgtcttgaatctctggtttctcctgatcagatttatatagttggaggagatgcacaaaaagaccagttgcgtaatcaaattttacaaattttccctgattttccgattgatcaactattgttagagccttttggtagaaatactgctccagcaattttgtggagcatactcagaatacctcaaaggaatcataatgttcccattgcagtattagcatcggatcatttaatcaaaaatcacaacagctttacccatgccttaaaacttggagaaagattagcctatttaggatatatagtgacttttggaataaagcctgatcgtgctgaaactggctatgggtatattaaatctgggcaatctcttgaaatcggttttaaagttgaagagtttgttgaaaaacctgatcagcaaactgcagagcaatacctagaatcctctaattattcgtggaatgctagtattttcatggctacagctcaaacttggctgcaggaatttcgtaaacatgcc

SEQ ID NO: 253503 - DNA, 724 bp, Unknown
  Bacterial polypeptide expressing nucleotide sequence isolated from the Sargasso Sea
ttgataaatatagacaaaaaatcaaatttaaattcagagttaatccctgtaattctctctggggggtcaggtacgagactttggcctatatcaagaccaagttttccaaaacaatatttaaatctaaaagaaaataataaatattctcttattcaaaatacatatttaagacttataggcatcaaaaatttaagtaatccaataattatttcctctgaagagcaaagatttattgtggctgaacaaatgcgagaaatcaatataaaacctaattcaatacttttagaaccagtaggaagaaatacagctccggcaatagctcttgcagcattaaaagcattagaacaaaatagtgatcctattctgataatactttcttctgatcacgaaattaacaatgtgaaaggatttcataaagtaattgaagatgggttaattcaagcaaatgaaggaagaattgtcacttttggaattattcctgatagtcccgagacaggctatggctatattgaaacttatgaagaaatatcagtaaaaaatccttcaagcaaaataaaaaaatttattgaaaaacctaatattgaacttgcaaagaatttcattaaagacaaacattatctatggaacagcggcatcttcttatgcaaatcctcagtaataatacgagaattagaaaaattagagcctgaaatagtaaaaatttgcaaagaatctctcaaaaaag

SEQ ID NO: 253504 - DNA, 803 bp, Unknown
  Bacterial polypeptide expressing nucleotide sequence isolated from the Sargasso Sea
tatgatagcagttatacttgctggtggaaccggtacgcgcctctggccatatagtcggaacgatacacccaaacagtttctcaatcttggatcaagtctagagtctctttttcaggagacttctaaacgtcttgagtctttggtcctaccagaaaatatttatgttgttggatcaaatgcacacaaagacctattgcgtcatcaaatattaaaaatatttccagattttccgatagatcaactattgttagagccattgagtcgaaacacggctccagcaattttatggagcatacttaaaatacctgaagtcaataaaaaagttcctgttgtagtattagcatcagatcatttaataaaaaatcttcaaagatttgataatgccttaaaaattggagaaaaattggcttctttaaattatattgtcacttttggaataaaaccagatcgtccagaaactggttatggatatataaaatctggagaacctttggatgttggttttaaagttgaagagtttgttgagaaaccagatcagtcaaaagcagagcaatacttggcatcgcagagttacacttggaatgctagcatttttatggcaacagcagaaacatggctaaatgagtatcgaaaacatactcctgaattacttgatttatttgaaaaagaagcttctctaggaggtctttcagataaagaaagaattaggaagatttatgattctatttctgcagattctatcgattacgctcttcttgaaaaatctgatcgtgtggctgttatcccagttgatattgaatgga

SEQ ID NO: 253505 - DNA, 665 bp, Unknown
  Bacterial polypeptide expressing nucleotide sequence isolated from the Sargasso Sea
tatgcttcccataacaccaatattgttagctggtgggtcgggaacccgtctctggccgttatcacgtaaaagctatcctaaacaatttatgcaattaactacaaatgaaacattatttcagcaaacagcgaaaagggttgtagaatgtgatggtttgcaatttaatccacatattataattactaattcagattttaggtttattgtaagtgatcaattgcaagctattgaattaaatccaagaagaatattaattgaaccaaaagcaaaaaatactgctccagcaatacttgctgcaactatttttgcgcaaaaggatgataagaatgcaattattattacaatgcctacagatcacgttattagcgatacccaaaattttcatgaagcaatcaaagttgggcttgaagagatagaaaatgaaaaaattgttacttttgggatcagtccattatatcctgaaacaggttatggatatattcaagtagaaaaatcaagtattaaaagtccaaataaagttttgaaatttattgaaaaacctaatgaaacgaccgctaaaagaatgctcgaggagggcaattatttttggaattctgggatttttatgtttcgcgctaaggatatgattagagcgtttgaattatatgcaaaggatatattatcaa

SEQ ID NO: 253506 - DNA, 400 bp, Unknown
  Bacterial polypeptide expressing nucleotide sequence isolated from the Sargasso Sea
gccgtggtcaacagactaaaagctgaaaaacgccctgagttcgaattccatcgcgaagttttccgtccgtggggtagctacgattcaattgacagcggtgcacgctttcaagttaaacgtattacagtaaaacctggtgaaaaactatctgtgcaaatgcaccaccaccgcgctgagcattggattgtggtatcgggcagtgccaatgtgactattgatgacaatactcaattagtaacagagaatgaatctgtctatatcccaatcggtgcagtacacgcattagaaaaccccggaaaaatcccgctagagcttatagaggttcaatcgggcgcataccttggtgaagatgatatagttaggttttcagaccgctacgggcgtgtagagaaaaaataat

SEQ ID NO: 253507 - DNA, 769 bp, Unknown
  Bacterial polypeptide expressing nucleotide sequence isolated from the Sargasso Sea
atgaaaaaagtaactgtaattttatcaggtggctctggttcgagattatggcctgtttcaagaagaacatttccaaaacctttcatggaagtttctggcaaaactttgttggagcatacaattgatcgagctaagcttgtcagtaataatttggtaattgttactaatcaagatcattattttttaactaaagaccttgtagatgccatgggcattgacatgaatataacatacatacttgagccagttggaaggaatactgctccagcaattacccttgcttctatgatagtaaaagaaaaatttggaaaggatacgtcatgtttggctcttccatcagaccatctaattggagacttaccaaaatttgaagaaaatgtttcaagtgcatttaatgagtgttctaatggctcaatagttgtattcggcataaagccaacatttcctgaaacgggctatggttatatcgaagtcaatgaaatctccaatgagattcaaaaagctaaacgttttattgaaaaaccctcattagatagagcaaataagtatttaaaaagtgaaaagcatttctggaatagtggtatgttttgcttttcagttaaatcgatactgaataatattaatattcatgcaaaagatatacacaatagcagtcttgagactcataaaaatgtcattaatgaagatagtatctacagatttgatgacaaaatttttatgaatatgcccgatgaggaagtattgattatgcggttaggagaaatcagat

SEQ ID NO: 253508 - DNA, 807 bp, Unknown
  Bacterial polypeptide expressing nucleotide sequence isolated from the Sargasso Sea
tattctcgaaccgaaagggcgtaataccgcaccggcattaaccattgctgcattaaatcagcaagacagcatattgttaatgatgcctgcggatcatctgatcagtcagattgatttatttcatgacgcgattaatgccggcattgaaatggcacgacaggataagttagtgacgtttggtattaaacctcattcagcggaaacaggttatggctatatccacatgggcgcagaacttcagttctttaataatcaatctattcatgcgataaagggctttacagaaaaaccacaattatccgttgctgaaacctatctgagttccggtgaatatctttggaacagtgggttatttatgatgaaagctccagtttggttagacaagattaaacagtttcaaaagcctattcatgatgcttgcgcattagcctatgagaaagggcagcaagatggtttattttatcgcttggatgaaacagccttcataaattgcccggctgattcaattgattatgccgtaatggaaaagttggcagaaataaatgatgagcaattggctgttatccctattgatgtaggttggtccgacgtcggtgcctggtcttcagtatgggatactcaggacaaagacagtaataataatcacatagaaggtgatgtgattgctgaagacacatcaaattgtttgattcgaagtgaacggggtttgatagtcacaataggttgtgacgatatggtcattgttgatacagatgatgccattatgatcgccaataaaaataagacgcaagatgttaaaaaaattgt

SEQ ID NO: 253509 - DNA, 358 bp, Unknown
  Bacterial polypeptide expressing nucleotide sequence isolated from the Sargasso Sea
atgcagaaagcggtgctgttggcaggcggggtgggatcgcgattgtggccgctgtcgcgtcagctttatcctaaacaattattatctatttatggtgacgagtccttattgcaagcgacgttgcggcgtgtgtggagaatggggatggaatcgtgtgtgattgtggcatcgcatgaccatcgtttttatattcgtgaacagattatagaaatggggttgccggcgtccttttcagtggaaattattttagagccgtgtgcgcgaaataccgcgccagcgattgcacttgccgcctatgaatcagctaaagatgacgtgttatgtgtgtttccggctgatcattacttgctggaaaagc

SEQ ID NO: 253510 - DNA, 445 bp, Unknown
  Bacterial polypeptide expressing nucleotide sequence isolated from the Sargasso Sea
gatgccaaaacccatttttcctgtaattctctctggtggaataggtgcgcgcttatggccactttctcgaaggcttagaccaaaacaatttttaggtcttcttgatgaaggtttaagtttatttcgggaatcgttaaatcgcgttaatagggaagaatacgctcctcctttgatcgtgtgtaatgatgaccacaggttcctaattgctgaagagctgcgggaaatggggctgtctgcgagtgatattatacttgaaacagttgctcgtaataccgcgcccgctataactgttgctgctcttagggtatcttcagtcaaccctgatggtattatgcttgtcatgccctccgatcatgtgattcccaatagccaagcatttacaaaagccgttctcgccgccggagaattggcatctgagggcaggttagttacattcggcgtcgag

SEQ ID NO: 253511 - DNA, 778 bp, Unknown
  Bacterial polypeptide expressing nucleotide sequence isolated from the Sargasso Sea
tctttagaggttgcggagggatttctgaattctgatgattatttatggaatagcggaacatttttatttaaagcaagtaaatatctagatgaattaaaaaagtttcagcctaagatctatgaggcatgcaaaaaagctattgaaaataaaacaaatgaccttgattttattcgtgtttcagaagagatattcaataagtgccccaaagactcaattgattatgctgtaatggagaatacagatgatggcgttgttattgaaatggatgctgggtggaatgatatcggttcttggtcatcaatatgggatgtcagcgagcatgataaaaactcaaacgctattctcggtgatgttatgactcacaatacttccaactcatacattagatcagataatggattggttgcagcagttggagttgataatttagtaataatatcaacaaaagaagtttttttagttgcaaaaaaaagtagatcgcaagatctcacaaagataattgataagttaaaaaatgaggaaagaccagaatggaagcttcatagagaggtccatcgaccttggggaaaatttgattcagttgataatggttttcgatatcaagtaaaaagaataacggtcaagcctggagctaaattaagcattcaaaaacatcatcatcgagctgaacactggatagttgttcaagggacagcaaaagtcacaaaaggtgatgaaacgtttcttctatcagtagatcaatcaacttatattcccctggggactattcactccctgg

SEQ ID NO: 253512 - DNA, 804 bp, Unknown
  Bacterial polypeptide expressing nucleotide sequence isolated from the Sargasso Sea
tatgcattcgaatacagtaattcctgtaattctatgtggaggatcaggttccagactttggccattatctagagagacttttcctaaacagtacttatcattaaactcttcaaatgataaatcactacttcagactactagagagagaataattggacttaaagatttatcaaatccaattttgatatgcagtgaggaacatagattcattgttgcggagcaaatgagagaaataaatactgaaccatattcaattattttagaaccttttagaaaaaatactgctgcagcaattactcttgcagcaataaaagctttagaaaatcatgaagacccaatactggtaattttatcttctgatcataaaatagataatgaaaagaaatttagaaatgttcttgaattaggtttagattatgcaaaaaaagaacgtttagtaacttttgggataattccaacttcaccagaaactggttatggatacattaaagcagaaacacctttttcttcagataaagtcgtagggaaaaacatcttagagtttactgaaaagcctgatttaaaaactgcaaagaattttttaaaggataaatgcttcacatggaatagtgggattttcatgtttaaagcaaaatcttttctaagtgagataaaaaagttttcaaatgaaacctttgaagcttgctctgaatctataaacaaaagtgaactagatttagatttccaaagaatagataaggaatcatttaataaatgtccaaacatctcagttgatgtggcagtaatggaaaagacagcaaagga

SEQ ID NO: 253513 - DNA, 403 bp, Unknown
  Bacterial polypeptide expressing nucleotide sequence isolated from the Sargasso Sea
tatgactcaaaattccattattccagtaatattgtgtggaggttcaggtactaggctttggccactatcaagaggaagctaccctaaacaatttttaccattaatatcagataataaaaaatcattactccaaaacactcaagagagaatttcaagtataaagaaccttctagagccaatcttaatttgtaatgaagatcatagatttattgttgcagagcaaatgcgtgaaataaatataaagccttactctatacttcttgaacctttcggaagaaatacagcccctgcgatagccttagctgcaatgaaagctttggaaaatcaatctaatccaatattactaatactctcatctgaccacgaaataaaaaataaacaaaatgtttatcaatacaaataa

SEQ ID NO: 253514 - DNA, 463 bp, Unknown
  Bacterial polypeptide expressing nucleotide sequence isolated from the Sargasso Sea
gatggtaacagcagtattattagccggtggcgtgggttcaaggttgtggccgttgtctcgtgaattatacccgaaacaattgttatctatttatggcgacgagtcgttgctgcaggcaacgttacgtcgtgtcgtgcgagctggggtgcaatcgtgcatcattgtgggatcggagcaacatcgtttttatttgcgtgaacaggttgaggagttacgcctgtcgaatgatgttaatgtgaagatcttattggagccagcggcgcgcaatacagcgccggccattgctctggcggcacactatttgacgcctgacgaagtgatgtgtgtatttccggctgatcattacatggaagagcgacaatttaacgggcaattacagcgtgctgttgatttggcgcagcaaggttatttgacgacgtttggggtgcgaccatcgtcagcggaaactggttatgggtatgtt

SEQ ID NO: 253515 - DNA, 836 bp, Unknown
  Bacterial polypeptide expressing nucleotide sequence isolated from the Sargasso Sea
agttcctgggccctcaccggcagtgagaccctgtttcaacagacgctcggccgcttggccatcgagggcgtcagcaagcccatcgtggtgtgcaacgaagaacatcgcttcatcgtcagcgagcaacttgccgctatcggcaacgaggcgcagaccattctgctggagccgttcggccgcaacaccgcaccggccgtggccatcgccgccatgcacctgctcgccgctggccgtgacgagctgcttctggttctgccggccgatcatgtgatcgaagacctgccggtattccacagcgctctcggcgtggctcgcaaggctgcagaacagggcgagatggtgctgttcggcatccctgccgagcggcctgaaaccggttacggctatatcaggaccggcgagcgatccggactgccgggtggcgttctgtcagtcgagcagttcgtcgagaagcccgacctggccaccgccagcgagttcgtggcgcaaggcgactacgtctggaacagcggcatgttcctgttccgctgcagccgctatctggaagagctgcagcgccacgatcaggacatctacgacacctgccagctggcgctcagccgcagcaagagcgacctgcagttcatccgcatcgaccccagctccttcgagtgctgcccggacaactccatcgactacgcggtgatggaaaagaccgagcgcgcctgcgtggtgccgctcgcagcaggctggaacgatgtcggttcctggtccgcgctgtgggacgttcaggacaaggatgaccagggcaacagccgctcgggcgatgtggtgatccacgacagtcaggactgcct

SEQ ID NO: 253516 - DNA, 487 bp, Unknown
  Bacterial polypeptide expressing nucleotide sequence isolated from the Sargasso Sea
ttctgttgtagcagcagttggcgtagatgacttaattataattgtttctcaagaagtagttttagtagctaaaaaaaataaatctcaggatatttcagctatcgttcaaaaattaaagagtgattcaaggtctgaatgggaaatacatcgtgaagtgcatagaccatggggaaaatttgattcaattgatcaaggtgaaagatatcaagttaaaagaataaccgtaaagcccagagcgaaattaagcttacagaaacataaatatagagctgagcattggattgttgtttctggaattgcaaaagttactaaaggagataaaacatttgagttacatgaaaatgagtcaacatatattcctctaggcgagattcacgcattagaaaatcctggagaaactaatttggaattaatagaagttcaatcaggaagctatttaggtgaagatgatattgtgagattagaggatatatacggaagaagctaa

SEQ ID NO: 253517 - DNA, 457 bp, Unknown
  Bacterial polypeptide expressing nucleotide sequence isolated from the Sargasso Sea
atggttgcccacaaggacaaagtgcaggacgtcaagaagctggtcagcaagctcgacgcccaggaccgcagcgaaaccaagaaccactgcgccgtctaccgcccatggggttggtatgactcggtggacatgggcggtcgcttccaggtcaagcgtatctgcgtgaacccgggggccagcctctctctgcagatgcaccaccaccgtgccgagcattggatcgttgtttccggtacagcccaggtcacctgtaatgacaagacttttctgctcaccgagaatcagtcgacctatatcccgatcacgtcggtgcatcgtctggccaaccctgggaagattccactggagatcatcgaagtccagtccggcagctatctgggtgaagacgacatcgagcgcttcgatgacgtttacggccgcgccgaacagagcaacgaagccaaagttgcccgttaat

SEQ ID NO: 253518 - DNA, 793 bp, Unknown
  Bacterial polypeptide expressing nucleotide sequence isolated from the Sargasso Sea
tatgaatgcaccctccttgtctcctgtaattttatgcggaggaactggctcaagactttggccactttctaggtcaagttttcctaaacaatatctatccttatttgatgaaagtaagaattcacttctccaagagactcaatctaggctaaaaaatttaattaatattgattctccaataattatatgtaatgaagatcatagatttattgttgctgaacaaatgagagaaattaatattaaacctaaatcgattcttctagaaccctttggtagaaatacagctccagcgataatatcagcagctttaaaagcttctgaagatgggagcgatcccactttattgattctttcagcagatcataaaattgaagatattgatcaattcttgttagtaattaataaggccagaaaatattgtgaagaaggtaatatagtcacttttggagttattcctacctcaccagagattggttatggatatataaatgcttcagtacctattgaaagttcattgcgagcttatcctattgaaaattttatagaaaaaccaaatttgcaaactgcattggaacttataaaagataagaaaaattactggaatagcggcatttttatggcgaaaactagtactttaataaatgaggctgagaaatattgtcaaggtttaacttctatatgtagggattctttagatccaaatttgttagatcttgattttcaaaggattaaaaaagaaacatttaaaaactgtccaaatatttccattgataaggcgataatggaaaaaacg

SEQ ID NO: 253519 - DNA, 880 bp, Unknown
  Bacterial polypeptide expressing nucleotide sequence isolated from the Sargasso Sea
atgtctagtagtccaattgtacctttaattttatgcggaggaaaaggtactagactttggcctctatcaagaacaagttatccaaaacaatttttatctattgaaaaaggagaaaaattaagcttattacaaaaaacaataaacagaattcagcctttaaagaatcttaaaaagccaatattggtttgcaatgaagaacatagatttattgttgctgaacaaatgcgagaactaaatattgatgatttcataataatacttgaaccctttgggagaaatacagctcctgcaattactattgctgcaataaagtcacttgaacttgaggaggatccaacattattagttttatcatcagaccatgaaataaaaaatattgaaaaatttttaactatcctcaatgaaggttcaaaatacgcagaacaaaataaacttgtaacttttggcattgttccaacatcacctgaaattggttatggatatataaaagcttcaaagcctttttcaactaatatagaaggttttgccattgaaagtttcctagagaaacctgatttaaatactgcaaaaaaattaattaaagacaatagatttacgtggaatagtggtatgtttatgtttaaagcaaaagagataattaaagagataaacaagtttactccagatattttattatcttgtaaaaaagctataagtaatagtgtacttgatcttgattttcaaagattagaaaaagattcatttgaaaaatgtgatgacatatcaattgatatagctgtgatggaaaagacatccaaagggattgtaatccctttggatgttggatggagtgacataggaagttgggaagccagtatgggaaacctcaaaaaaagacacg

SEQ ID NO: 253520 - DNA, 841 bp, Unknown
  Bacterial polypeptide expressing nucleotide sequence isolated from the Sargasso Sea
acgagtgattgcatattggtctgcaacgaggagcatcgttttttagtggcagaacaattacgtgaactggacgtcagcgctgatattctgctagaaccagaaggtcgcaataccgcgccggccatagcgcttgccgcgcacctaactcgcgataaatttaaagacgctttactagtcgtgctaccttccgatcacattattcaggacacatcgaaatttcatactgcactcactaaagcgattactgttgccctagaaggacatttggtgacattcggcgtcgttccaacacgtccggaaacgggctttggatatataaaacttggcaaagacaaagatgacgtttattttgtcgatgacttcatagaaaaacctgatgcaaatcgtgcagctaaattcctaaccgatggcagctacctctggaacagcggtatgtttgttttcaaagcgggcacatacctcgatgagttacaactgcaacggccggctatagctcttgcctgcaaggcagccgcatcaaattggcaacgggatatggacttcattcgcgtaaagcgaaacgagtttgtgagcagtccctccgaatccatcgactacgccgtcatggagcatgccaaaagcgctagggttgtacctctcgatgcgggctggagtgatatcggttcttgggatgctctttggacgcttctagacaaagatacaaaaaacaatgtaatcatgggcgatgccattacaagcgatctgactaactccatcgtccgggccgagagtcgcctagtgtctgtaataggccttgaccgtgttgctgttgttgaaacgtccgatgccattatggtagccg

SEQ ID NO: 253521 - DNA, 676 bp, Unknown
  Bacterial polypeptide expressing nucleotide sequence isolated from the Sargasso Sea
atggaaaagaccgagctgggttcggtcctgccgctggacgccggctggagcgatgtgggcagctggagtgcgctctgggagaccgccgaccgtgacagcaacggcaacgtgctgcagggccgggtgatcaacaagggcagtcgcaactgctatttacgcagcgaacaccgcctggtggttggtctcggcgtggagaacctggtggtggtggaaacggacgacgcggtgctgatcgccgatcgcgccaaggcccaggagatcaaatcggtggtcaagcagctggaggcggatggcagccctgaaggcaaggcccaccgcaagatctatcgcccctggggggcctacaccggcgtcactgaaggcaaccgctggcaggtgaagcgcatctctgtgaaccccggcgccagcctgtccctgcagatgcaccatcaccgggctgaacactgggttgtcgtcaaaggaaccgcgctggttgaaaaggacggagagcagcagctggtgggtgaaaaccagagcacctacatcccgatgggctgtcatcaccggctctccaacccgggccgtatccctgtggagatgatcgaggttcagagcggcgaatacctgggcgaggacgacatcgttcgcttcgaggaccgctacggccgcagcaacctgagcatcagcaacagctgag

SEQ ID NO: 253522 - DNA, 916 bp, Unknown
  Bacterial polypeptide expressing nucleotide sequence isolated from the Sargasso Sea
aagccggaccaagccacagcagagcaattcctggccacaagccgcttcacctggaacagcggcatgttcctattccgcgccagcgccatgctggcggaactggagcggctggctccggaagtggtgagctgctgccgggcagcactggagcaggacacggccgacctggaattccatcggctagagcgggaggccttcgccaagtgccccaacgtggccatcgacgtggccgtgatggaaaaaactgaactgggcagtgtgctgccgcttgatgcgggctggagcgacgttggcagttggagcgcactctgggaaacctcagagcaaaaggattcccaaggcaatgtgctgcagggccacgtgattgccgaaggcagccgcgattgctatttgcgcagcgaacaccgcctggtggtggggctgggggttgaaaacctcgtggtggtggaaaccgacgacgccgtgttgattgcggatcgctccaaggctcaggagatcaagaccgtggtgaagcagctggaggccgccggcagcccggagggcaaggcgcaccgcaagatctaccgcccctggggccattacaccggcgtcaccgaaggaacccgctggcaggtgaaacggatctcggtgaaacccggcgccagcctctcgctgcagatgcaccaccaccgggccgagcactgggtggtggtgaagggcacagccctggtggagcgcgatggcaatgagcagctggtgggggaaaaccaaagcacctacatcccgatgggttgcaaacaccgcctctccaaccccggccggatccccgtggaactgatcgaagtgcaaagcggcgagtacctcggcgaagacgacatcgagcgctttcaggaccgctacgggcgcagcgacctcggccgaagtgatctcagcatca

SEQ ID NO: 253523 - DNA, 838 bp, Unknown
  Bacterial polypeptide expressing nucleotide sequence isolated from the Sargasso Sea
catggcagatacacccctcgttccaatcatcctatccggtggcgctggcacgcggttgtggccaatgtctaggcatttacgcccaaaacaattcctcaacgtccacggtgagggaagtatgttcggccaaacactgaagcgaatttcaaacaatgcatataacccgcctgtcgttgtatgtaacgaagagcaccgttttcttgttgctgaagagctgaggcaatcagggacaagggctgaggacattatattggagcccgttgcccgcaatactgccccagcattaacggttgccgcgctaaggttgatggatgtccatggagacgcgttaattttggttctgccatccgatcaggtggttcacgatgttggtgccttccattccgacgtcgccaaagctcgggccctagctattgaaggatatcttatcgcctttggtgtgacaccaacaaaaccagaaactggatatggttatataaaatgtggccaggccctttgtgagaatagctggcatgttgaaatgttcgttgagaaaccagatcgggagactgcacagaattatatcgaccaaggagattatttttggaatgcaggaattttcctttttaaagcctccacccttattgcggaactggagcggctatctccaaatgtgacaaccgcagcacgtagcgccttggatggcgcaggggcggacttagaatttcttagactggctttggaagccttcgctgaagcaccggcgatctcttttgactatgcagtcatggagaaaactgaccgtgcagcgatggttccattgacttcagcatggaacgatatcggttcgtggtccagt

SEQ ID NO: 253524 - DNA, 646 bp, Unknown
  Bacterial polypeptide expressing nucleotide sequence isolated from the Sargasso Sea
gctggatgcgggctggagcgatgtcggcagctggagtgccctttgggaaacctcagaacaacgagattcccaagggaatgtgctgcagggccacgtgatctccgaaggcagccggaactgttacctgcgcagcgaacaccgcctagtggtggcgctagggatcgagaaccttgtggtggtggaaaccgacgacgccgttttgattgctgatcgttccaaggcccaggagatcaagaccgtggtgaagcagctggaggccgagggcagtccggagggcaaggcccaccgcaagatctatcgcccctggggccactacacgggcgtcaccgaagggacccgttggcaggtgaaacggatctcagtgaaacccggcgccagcctctcgctgcagatgcaccaccaccgtgccgagcactgggttgtggtcaaaggcacggccctggtggagcgcgacggcaccgaacaactggtgggagaaaaccagagcacctacatccccatgggctgcaaacaccgcctgtccaaccccggtcggatcccggtggagctgattgaggtgcaaagcggggagtatctcggtgaagacgacatcgtgcgcttccaggaccgctacggccgtagcgacctcagcatcagtaccagctga

SEQ ID NO: 253525 - DNA, 717 bp, Unknown
  Bacterial polypeptide expressing nucleotide sequence isolated from the Sargasso Sea
aatgactaatcaagaaattattcctattattctttgcggaggttcgggcacaagattgtggcctttatcgagagaaagttatcctaaacaatttttaaatcttgaagaaaacaataataagtctttacttcaaaatacatgtgagagaattttatcaattaaaaatataagtgaccctattttagtttgtaataaagaacatagatttattgctgcagaacaacttagaaatattaatattaatcctaagtcaatattattagaaccctttgggagaggcactgctcctgcagttgccattgctgcacttaaagctaaagaaaatagtgagaatccatttttattagttttatcttctgaccatataatctcaaataaggagaatctaattaaagtactacagctagcaataaattatgcagatgagggcaggctagtaacttttggagtaaaacctgattatccagaaactggatatggttatattgaatcatcgtcaaatttgaataatgatctagggagccagattaaaagattcatagagaaacctaatcttgcaaaagcaaaaaaatatataaaaaataaaaacttcttttggaatagtggaatttttctctttaaagcgaatgatatattaagagaaatcaaaagttttgaaccaaagattttagaaaactgccaaaaagcgctcaatagtagccagttagatttagattt

SEQ ID NO: 253526 - DNA, 351 bp, Unknown
  Bacterial polypeptide expressing nucleotide sequence isolated from the Sargasso Sea
cccctgggggtgcctacaccggcgtcaccgagggcaaccgctggcaggtgaagcgcatttcggtgaaccccggcgccagcctgtcactgcagatgcaccatcaccgggcagagcactgggtggtggtgaaaggcacggccctggtggaacgcgatggcgaccagcaactcgtgggtgaaaaccagagcacttacatccctctgggctgcaaacaccgcctgtccaaccccgggcgcatccccgtggagctgatcgaagtgcagagcggcgaatacctgggcgaagacgacatcgtgcgcttcgaggaccgctacggccgcagcgatcagcgcatccccgtccagtcctgaa

SEQ ID NO: 253527 - DNA, 847 bp, Unknown
  Bacterial polypeptide expressing nucleotide sequence isolated from the Sargasso Sea
aatgttaaaggcaaagattttaccggtaatactttcaggagggacaggatcaaggctttggccttcttcaagagcaagttttccaaagcagtatttatcgattagtgatgataaatctttgacattttttcaacaaactgtcaaaagaatttctgatcatcaaaattttgagccaccaattgttatatgtaatgaagaggatagatttatcgtcgcggagcaactaagagatttaaatataaaatctagtacaattttgcttgaaccaatcggaagaaatacagccccggcaataaccctaagtgctataaaagctctagaaaaaggcgatgatccactacttcttgttttgccggctgatcatttgataagaaatttgccaaaatttcaggatgttttagaatccgctattaaatattgtattgatgacaaattagtaacattcggaattaaacctgataaagcagaaactggttatggatatattgaagcggctaaaatactaaattttgaagaaataaaaggcgagaaaattgtaaagtttattgaaaaaccaaatatggagattgctaagaagttattgcatgataaaaaatattcatggaatagtggaatatttttttttaaagcaagcgtttttatttctgaaataaagaaaaacaaaccagatatttacaagttttgtaaagaatctttattctcaaaattattagattttgatttccaaagaattgatgaaaaaaaattcaagctttgtgaaaatatttcaatagataatgccataatggaaagaacaaataatggaatagttcttccattagatgctggctggtgtgatattggtagt

SEQ ID NO: 253528 - DNA, 742 bp, Unknown
  Bacterial polypeptide expressing nucleotide sequence isolated from the Sargasso Sea
cggtagatccgctgcagaggccggtcgcttggtgaccttcgggatcgttcctaccgctccggaaaccggctacggctacatcgaggcggccgaacccttcagcggcggatccctgcgtgaggtgccgatcgcccgcttcgtggaaaaaccggcccgggccaccgctgagcagttcctggccacgggccgcttcacctggaacagcggcatgttcctgttcagggccagcgccatgctggcggagctggagcgcctggcaccggaggtggtgagctgttgccgtgccgcccttgaacaggacgccgccgatctggactttctgcgactggagcgggaagccttcgccaagtgccccaacgtggccattgatgtggcggtgatggagaagacggagctgggttcggtgctgccgttggatgccggctggagtgacgtgggcagctggagtgcgctctgggaaaccgccgaccgtgacgttgacggcaacgtgctgcaggggcgggtgatcaacaaggacagtcgcaactgctatctgcgcagcgaacatcgcctggtggtgggtcttggcgtggagaacctggtggtggtggaaacggacgatgcagtgctgattgccgatcgctccaaggcccaggagatcaaatcggtggtcaaacaactggaagcggatggcagcccggaaggcaaggcccaccgcaagatctaccgcccctggggtgcctacaccggcgtcacagagggc

SEQ ID NO: 253529 - DNA, 434 bp, Unknown
  Bacterial polypeptide expressing nucleotide sequence isolated from the Sargasso Sea
aatggtggcacataagaacgatgcgcaaagcattaaaacggttgtgaacaaacttaaagctgaacatcgcccagagtttgaattccaccgtgaagtattccgtccatggggaagctacgactctatcgacagcggtgcccgtttccaagtaaaacgcattacggttaagccaggtgaaaaactatcggtgcaaatgcatcaccaccgtgctgagcattggattgtagtatctggcagtgccaacgtaactattgatgaggaaacacagctagttacagaaaacgagtcggtctacattcctattggtgcggttcatgcgttagaaaaccctggaaagatccctctagagcttattgaagttcagtcaggcgcataccttggtgaagatgatattgtgcgtttttctgataggtatgggcgggttgccaaataat

SEQ ID NO: 253530 - DNA, 958 bp, Unknown
  Bacterial polypeptide expressing nucleotide sequence isolated from the Sargasso Sea
gcagaggcgctggatccaggagcgccggtaccgattgcccgctttgttgagaagcccgatcgcgccaccgccgagcagtttttggccagtggtcgcttcacctggaatagcggcatgttcctgtttcgtgccagcgcgatgctcgccgagctcgagcgcctggcccctgaattggtgagctgctgccgctcggccctcgagcacgacacccccgatttgcagttcctgcgcttggaccgtgaagcgtttgcccaatgcccttcagtcgcccttgatgtggcggtgatggagcgcactcccttgggatcggtgttgccgctcgatgccggctggagcgatgtgggcagttggagtgccctctgggaaacagccgatcaagacgaaaacggcaatgttttgcgtggccgagtgatcagtgagggcagccgcaactgttatctgcgcagcgagcaccgcttggtggtaggcctgggcgttgaaaacttggtggtggtggaaaccgatgacgccgttttgattgccgaacgcagccaggctcaaaacgtcaaagccatcgttcaacagctcgaggccgatggcagctcggagggcaaagcccaccggcgcatctaccgcccctggggccactacacctcgatcgttgaaggcagccgctggcaggtgaagcgcatctccgtcaagccaggagccagcttgtcgttgcagatgcaccaccaccgcgctgagcattgggtcgtggtgcgaggcactgccctggtggagaagaacggagttgaggagctcattggcgaaaaccagagcacctacatccccttaggcgcgcaacatcgcctcagcaatcccggcaagatcccggttgaaatgatcgaaatccagagcggcgcctacctcggtgaggacgacatcgtccgcctagaggatgtttacggccgctcgacggccgtacgccgtgcctgag

SEQ ID NO: 253531 - DNA, 270 bp, Unknown
  Bacterial polypeptide expressing nucleotide sequence isolated from the Sargasso Sea
atccaggtcagaaactgtcagtgcaaatgcatcaccacagagctgagcactggatagtagtggccggtacggccctggttagcatagatggtgtcgataccatgctgtctgaaaatcagtctgtgtatattccgcttggagctgtgcatgctttagaaaatccggggaaaatcccgctagaattaattgaagtgcaatccggtacttacttaggggaagacgacatagtccgtttttcagatcgatatggccgggtagaagctaaataat

SEQ ID NO: 253532 - DNA, 484 bp, Unknown
  Bacterial polypeptide expressing nucleotide sequence isolated from the Sargasso Sea
cctaatcgcgtgtgttgggacagaggacctggtggtggtggagaccccagatgcgatccttgtcgcgaagacttcggaggtgcagcgggtaaagaatatcgtcgcgcgcatcaaggccgaaaacggtactgaggcggaataccaccgcaaggtttttcggccttggggttattacgactcgatcgatagtgatcgaggctttcaggtgaagcgaattgtcgtgaaccctggcggtcgcctgtcgctgcaaatgcatcatcatcgcgccgagcattggattgtcgtgagcggtactgcactcgttacgcgcggcgatgaatcgttccttttgtctgagaacgaatccacctatattccacttgggcaaaaacatcggttggaaaatcccggcaaggtgccgcttgcgatgatcgaagtccagtccggtagctatctcggcgaagacgatatcgtgcggtttgacgatacgtacggacggacgtaa

SEQ ID NO: 253533 - DNA, 1528 bp, Unknown
  Bacterial polypeptide expressing nucleotide sequence isolated from the Sargasso Sea
catgaatgctccggccgtggctgccgaaacgcgccattcttcttccaccgcgcccgccgtcggcacgcgtgtcgccgtgcaaccggtgattctcgccggcgggtccggcacgcgcctgtggccgatgtcccgcgaacgttttccgaaacagctgatcggcctgctcggcgaacattcgctgctgcagtcgaccgcgctgcgcctcgacggcctcgcggccgaccatccgctgaacgacgacgtgctgatcgtatgcggcgaggatcaccgcttcaccaccgccgaacagctgcgcctgaccggcaaatcggcgtcgatcatgctcgagccgatcggccgcgacaccgcgcccgcgctgacgctcgccgcgtttcgactggtcgccggcggcaacgacgcggtgatgaccgtgatgccggccgaccatgcggtcgccgacctgccgcgcttccacgcggccgtcgcggccggcgtgcattgcgcgatgcaaggcaagatcgcgacgatgggcatcgtgccgaagcacgcggaaaccggcttcggctacatccgtgtcggcgcgccgctcggcgacgccgccacgggcaaactcgacgtgcgccgcctcgaccgcttcgtcgagaaaccgcatctcgaactcgctcagcagtacgtcgcatcgggcgaatactggtggaacagcggcatcttcatcgttcgcgcgtcggtctggctgaaggcgatccgcgagctcgaaccggcaatctacgcggcctgcgaacaggccgtcgcccagggcaaggccgatggcgatttcttccgcatcgatcgcgaagcgttcgccgcgtcgccgtcgaactcgatcgactacgcggtgatggagccgctcgcgagcctgccgcaactgtgcgagagcgtcgtcgtgccgctcgacgcgggctggtcggacgtcggctcgtgggacgcgatctggcagatctcgccgaaggacgaggccgaaaacgtcggccgcggccacgtgctgttcgaaggcgcggaatcgacgttcgcgcattcggaaagccggctcgtcgcctgcgtgggcacgcagaacctcgtcgtcgtcgaaacgccggacgccgtgctcgtcgcggacaagtcgcgcgtgcaggacgtgaagaaaatcgtcgggcgcatcaaggcgcaacgcggcgcggaagcaaccgatcaccgcaaggtgcatcgcccgtggggccactacgactcggtcgacatgggcgagcgcttccaggtgaaacgcatcgtcgtgaagcccggcgcgcaactgtcgctgcagatgcaccaccatcgcgccgaacactggatcgtcgtctgcggcaccgcgcgcatcacgcgcggcgacgaaacgttcctgctgtccgaaaacgaatcgacgtacatcccgctcggcgtgtcgcaccgcctggagaacccgggcaagatgccgctcgagctgatcgaagtgcagtcgggcgcgtatctcggcgaggacgacatcgtccgcttcgacgatacctacggccggcagtaa

SEQ ID NO: 253534 - DNA, 837 bp, Unknown
  Bacterial polypeptide expressing nucleotide sequence isolated from the Sargasso Sea
tatgattgcaattatacttgctggaggaaccggtacgcgtctctggccatacagtcgcaacatgacacccaaacagtttcttaatctcggatcaagtcatgaatccctttttcaggaaacatctaaacgtcttgaatcgctggtcccgcctgaacggatttatatagttggtggagatgcgcacaaagaccagttgcttaagcaaattttacaaatattccctgatttcccgatcgatcagatgcttttagaacctgttggtagaaacactgcaccagcaattctatggagcataatgagaattcctgaaagcaatcgtaatgattctgtcgtagttttagcgtcagatcatttaatcaaaaatcttcacagcttcacccatgccttgaaacttggagaaagattggcatcttcaggatatattgttacttttggaataaagcctgatcgtgctgaaactggttatggatatattaaatccggagaacctcttgaagtcggtttcaaagttgaagagtttgttgaaaaacctgatcagtcaacagcagatcaatatctggaatcctctgattatacttggaatgccagcattttcatggcaacaactgaaacctggttgcaggagtttcgcaaacatgccccagaactacttgatgtatttgaaaaagaagcttctgcaggagatctttcagataaagaacaaattcggaagatttataattctgtttctgcagattctatcgattacgcgctgcttgaaaaatcagatcgtgtggctgttatacctgttgacatggaatggactgatttaggcagctgggagagtttacataaagt

SEQ ID NO: 253535 - DNA, 505 bp, Unknown
  Bacterial polypeptide expressing nucleotide sequence isolated from the Sargasso Sea
cttcgcacattcggaaggacgcctgattgcctgtgtcggcacccatgatctcgtggtggtcgaaacggcggacgcgattctggtcgcggacaaatcacgcgtgcaggatgtcaagaagattgtcggacggattcgcaccgatggcggcctggaagcggccaaccatcgcaaggtgcatcgcccgtggggcaactacgattccgtcgacaccggcgagcgcttccaggtgaaacgcattgtcgtgaagccgggcgcgcggctctcgctgcaaatgcatcatcaccgggcggaacactggatcgtcgtgcgcggcaccgcgctcgtcacgcgaggtgaagagcgcttcatcgtctccgaaaacgaatccgcctatattccgctgggcgtcacccatcgtctcgagaatccaggcaagatgccgctcgaaatgatcgaggtgcaatcgggttcgtatctcggcgaagacgatatcgtgcgcttcgacgatacgtacggacgtcaatga

SEQ ID NO: 253536 - DNA, 859 bp, Unknown
  Bacterial polypeptide expressing nucleotide sequence isolated from the Sargasso Sea
aatagcggcatgttcgtggttcgttcgtctgtctggctggctgtcatcgagcggttccagccggagatccacgctgcgtgtgtcgaggcgtatcagggcgccaaaaaaacggacgaatgcatcattcccgatgctaccgggttcctgcgttcgccatccgattcgatcgattacgcggtgatggagcacgtcgccaaacccgattcgcccttcagcgcgatcgtggtgccgctcgacgcgggctggtcggatctcggctcgtgggatgcggtctggcaggcgatggaaaaggacgagtgcggcaacgcgtccaacgggcgcgtgctgttcgaaggcgcaaccgccacttatgcgcgttcgcagggagggcgactcgttgcgtgtgtcggcacgaacaacatgatcgtggtcgataccgacgacgcggtgctggtggcggaccggtcgcatgtgcaggacatcaaggggctggtgtcgcgcatcaagcgcgagaaatcaccggaagccgacgcgcacagaaaggtgcgccggccgtggggtttctacgattcgatcgatcatggcgaccgtttccaggtgaagcgcattgtcgtcatgcccggtgcgcgcctgtcgttgcagatgcatcaccaccgcgcggagcactgggttgtcgtgagcggcaccgcgcttgtcacgcgcggcgaggagcagttccttctcggcgaaaacgagtcgacctacattccgctcggcatacgccatcgtctggaaaatcccggctgcgttccgcttcagatcatcgaggttcagtctggaacatatctcggcgaagacgatatcgtcagattcgacgacaagtacgggcggtgcggttgaa

SEQ ID NO: 253537 - DNA, 906 bp, Unknown
  Bacterial polypeptide expressing nucleotide sequence isolated from the Sargasso Sea
aaacagtttttgtcgcttacatccaacagcacgatgcttcaagatacaatcactcgacttacaggaaccaatgccgagcctcctgtatttatatgtaacgatgcgcatcgatttttagttgctgagcagcttcgtaaaaaaaatatagagcatgatggtattttattagagcccgttgggcgaaacactgcaccagcaatagcgcttgcggcattacatgccacaaaaaatgagaatgaccctgttcttcttgtcctcgctgcggatcatttaattaaagaccaaagcgcatttcatagtgccattactaaagcagaagcattagcaaacgaaggaaagcttgtaacttttggtatagttccagaccaggcccacaccggctatggctacatcaaggctggaaatgtactgaatgttggatttgaggtagctgagtttgtcgaaaagccagaacttgaaacagcaaaacagtacgttgagtcaggtgattttttctggaatagcggcatgtttatgtttaaagccagccgttatattgaagaattaggtaagtatcaccctgagatgctagagatttgccgtcgcgcaattgaaactgaagcacctgatttagactttattcgtgttgactctgaaatttttgctacgtgtcctgacgactctattgactatgcagtgatggaaaaaactgacagcgctgcaatggtgccattagatgcagggtggagcgatgtaggcagttggacatcgctttgggaaactgccgataaagatgacaacggcaacgtttgtgtaggcgatacgattttagaaaatactagaaatagttacgtgaacgcagaacagcgattagtatctgtcattggcttagaagacgttattgttgtcgaaaccaaagatgccgtt

SEQ ID NO: 253538 - DNA, 687 bp, Unknown
  Bacterial polypeptide expressing nucleotide sequence isolated from the Sargasso Sea
tatgtcctctaatccaataatcccaataatattatgtggaggttccggtactaggctttggcccttatctagagaaagttttcctaaacaatatttaaaattaagtacttctgaaaataataattatactcttctacaaaatacctacaaaagaataagcaaaataaatgggattaaaagtcctattcttatctgtaatgaggaacataggtttatagccgcagagcagatgcgagaaattaatattaaacctagtaagattttactcgaacctgttgggagaaatactgcaccagcaatagccctagcctcattaatagcttccacaattgaagaagatccactccttcttgtactgtcatcagaccacgagataaaaaataataagaagtttgttgaagtaattaaagagggtattaattatgcaaataataacaagcttgttactttcggagttgtgccaaacaatcctgaaactggctatggatatataaaagctagtaaagaatttgatttaactaagattgaaggaaatgaaattgaagaattcacagaaaagccagattataaaaaagcatgtgaattgattaaagacaaaaggtatacatggaatagtggtatgttcttatttaaagcaaaaaaagttcttaaagatttagaaaaattttcccccgatactatagacaa

SEQ ID NO: 253539 - DNA, 733 bp, Unknown
  Bacterial polypeptide expressing nucleotide sequence isolated from the Sargasso Sea
atggctggtggcaccggcactcgtctttggccgttgtcgagagcgcagtatccaaaacagtttttagctttggatggtgtcgatacaatgctcctagctacggcaaaaaggcttgatactttaggaatcgattcctcaatcattatttgtaacgaagagcatagatttcttgtggccgagcaaatgcgttcgattggggaattaccctctattattttagagcctgagtctaagaataccgctcccgcgattgccttagcggcgtttgaatcgagagtagatgacccccttttgttggtgcttgcagcggaccatgtgattcaagaccaaatggctttcgcaaaatcagtttccgacgctacgccgttggcggagttagggaaactggtaacctttgggataattcccaacggaccaaacactgaatatgggtacattaaacgaggaaaagagcaagaagctggtttccttgtagaaaagttcgaggaaaaaccttcgattgagttggctagggagtacttcgcttcgaacgaatattactggaatagcggtatgtttttatttaaggcaagcaagtaccttgaggaattgaggaagtttcgtccggatatttataaggcttgtgagcttgcgataacaggaagtaatgctgatacagatttttctagaatagatagagaagagtttggacgatgccccaatgagtctatcgattatgctgtgatggaaaaca

SEQ ID NO: 253540 - DNA, 625 bp, Unknown
  Bacterial polypeptide expressing nucleotide sequence isolated from the Sargasso Sea
aatgattaaagctgtcgtaatggctggtggctctggcacgcgcctgtggccattgtctcgagctgctcaccccaagcaattcttgtcacttcatggtgaagagaccatgcttcaggccacattcaagcggcttgaaggtttgaatgttcggtcctcagtaactatctgtaacgaagagcaccgtttttttgtcgcagaacagcttcgtgaaattgacaagctgagctccattatattggagcctgaaggtcgcaatactgcccccgcaatcgcgctcgcggctctttcatcgcaggaggatgaggacccattattacttgttcttgcggcagatcatgttattcaagatcaagccttatttgttaagacaataattgaagcaatccccctagcagagtctggcaagttagttacgtttggtatcattgcccatgaaccaaatacaggttatggctatattaagaaaggagaccctcagagccctggatttaaagtggataaatttagcgaaaaaccctctcttgatattgccaagggatatattaagtcaggagattatttatggaatagcggcatgttcctatttaaagcccagccgatacttggaagagctcaaaaagtatca

SEQ ID NO: 253541 - DNA, 765 bp, Unknown
  Bacterial polypeptide expressing nucleotide sequence isolated from the Sargasso Sea
tggaagaagatgataaagaccctctattgttagttcttgcggcggatcacgtgattcttgatgaggcggcattcactaaaacagtgcttgatgcaatccccttggcggaatctggaaagctcgtcacctttggtatcgtagcccatgagcctaatgcaggctatggttatataaaaaaaggtgcccaacaaggtgttgggttttgtgtagctgaatttgttgaaaaacctagtgctgctgctgcgaaaacatatctcacatcaggagagtacttttggaatagtggtatgttcctttttaaggctagtcgctatctggaagagcttgaaaagtatcgcccagatatccataaggcttgtaatttatcaataaaaaatatctcaaaagatcatgatttcttgaggattaatgaaacagcctttgctgaatgtcctagtgagtcgattgattatgcggttatggaaaagacagacaaagcagtggttgttccgatggatgcaggttggagtgatataggatcatgggcatctctgtgggatattagtaaaaaagactcaagtgggaacgcagcatatggcgaagttattcttcaaaaggttaataattcatatgttagaactgatggtaaattagtagctgcaattggcgtagatgacctagtaattgtctcaaccaacgatgcagtggtagtggctcataaagatagtgttcacaaagtaaaagttattgctgaacaattaaaacgtgaatctagggaggaataat

SEQ ID NO: 253542 - DNA, 808 bp, Unknown
  Bacterial polypeptide expressing nucleotide sequence isolated from the Sargasso Sea
gttgcaatcaacgactcacagcgtggccagcacccctctgatccctgtgatcctctgcggcggcacgggcacgcggctctggcccctatcccgcgccagttaccccaagcagtactggcccctcagcggggaaggtgatgccacgttgatgcagcagacccaacagcggctggacggtctcgacggcctggaggcaccgctgctgatctgcaacgaggaccatcgcttcatcgtggccgagcagatgcgtcagatcgggattgaaccgagcgccatcctgctggaaccgatgggacggaacactgctccggcggtcacggtggcggcactgcaggccacagccgagggccaggacccattgctgctcgtgctggcggcagaccacctgatccgtgatgccaagcagttccgccatgcggtggacgccggcagagccgcggccgaggccggtcggctcgtgaccttcgggatcgtgccgacggcaccggaaaccggctacggctacatcgaggcagccgaacccttctgccacgaccagctgcaggacgtgccgatcgcccgttttgttgaaaagcctgaccgggctaccgctgaacagttcctggccaccggccgattcacctggaacagtggcatgttcctgttccgggccagcgccatgctggcggaactggagcgactggcccccgaggtggtgagctgctgccgcgccgccctggaacaggactcagccgatctggattttctgcgcctggagcgggaagcctttgcgaaatgccccaacgtggcgattgatgtggcggtgatg

SEQ ID NO: 253543 - DNA, 880 bp, Unknown
  Bacterial polypeptide expressing nucleotide sequence isolated from the Sargasso Sea
atgatttctaaagagattattccagtaatactttgcggaggttcgggtagtaggctttggccgttatctaggcaaagttttccaaagcaatttctcaatttaaattttacggatggtaagtctctattgcaaaggacacaaaatagactagaaaatatcaaaaatataaaagaaccaattttaatatgcaatgaagaacatagattcatagtcgctgaacaaatgagggagataaatgttaaaccaacctcaataatattagaaccttttggaaggaatacagcaccggctatcattctggctgcgttaaaatctttggaattttttgataatccccacttattaatattgtcatcagatcaccaaattactaacgagagtgcatttacaagagtcatagaaaaaggtttagattattctgaaaaagatagattagttatttttggtatagttcctacttcaccagaaattggttatggatatataaaagccgccaatgcattagaccaaaatcaaattaaaggatctcttgttgaaagttttatcgaaaaaccagacaaaataaatgctaaattatttatccaagatgatagatttacttggaatagcggtatatttctttttaaagcaaaatctatattaagagaggttgaaagctattctccagagatagttaagaaatgcaattcatccttaaagaagagattatttgatttagatttccagagattagatgaagactcttttcgtgaatgtccaaatctttcaatagatattgccgttatggaaaaaacaaaaaatgcttacgtttttcctttggatgctggttggagcgatattggaagttgggatttcgtttgggatatttcagataaagaca

SEQ ID NO: 253544 - DNA, 625 bp, Unknown
  Bacterial polypeptide expressing nucleotide sequence isolated from the Sargasso Sea
tatggcctccacaccgcttattcctgtgatcctttgcggaggcaccggaacacggctatggcctctatcgcgggcgagttaccccaagcagtactggccgttgagcggagacggcgaggccacattgctgcagcagactcaacagcggctccatggcctggatgccctagcggctcccttgctgatctgcaacgaggatcaccgcttcatcgtggccgaacaaatgcgccagataggcgtggagccaaacgcgatcctgctggaaccgatgggccgcaacaccgcccctgcggtgactgtggccgcactgcaggccacggccaacggcgaggacccactgctgctggtgctggcagcggatcacctgatccgcaatgccgcccaattccgccaggccatcaactccggccgcaagccagccgaagaggggcgcctggtgaccttcggcatcgttccgacggccccggaaaccggctacggctacatcgaagccagcgaacccttctcccttgggggaccggcccatgtgccgatcaagcagttcgtggagaagcccgatcaggccacagcggagcaattcctggccaccggccgcttcacctggaacagcggcatgttcttatcc

SEQ ID NO: 253545 - DNA, 1450 bp, Unknown
  Bacterial polypeptide expressing nucleotide sequence isolated from the Sargasso Sea
gatgttaatccccgtcatcctgtccggtggtgccggtacgcgactttggcccgtctctcgcgaagggcatcccaaaccgttcatgaagctcgccgatggcgagagtctgctgctgaagacctaccgtcgcgctgctgcggtggttggcggcggtgaggatgtgtcgtgcggagaattgctgacggtcaccaaccgcgactactacttcatgagcaaggacgagttcgcgagcgcgtcgctcggcgaacagcggcccggcgtgttcatgctcgagccggccggtcgcaacacggcacccgccgtggcgatggcggcgcatcacgtcgctgaaaaatacgggcgcgacgcactgatgctggtgctggcggccgatcacctggtgcaggaccagaagggtttcgtggccgccgtcgcgagcgcggccgaactggcgaagcagggtcggctggtgacgttcggcatcgtaccgacgagcccggataccggcttcggctacatcgaggccggggaaccggttggggccggccgtgcagcgctgcgcttcgtcgagaagccggatgccgcgaaggcggccgagtacctggcggcgggcaactacctgtggaattcgggcatgttctgtttcaaggccggcgtcattctcgacgagatggcgcgtcatgcgccggacgtcgccgctgccgcggaatcatgctgggcagcggtgcaggaagcgaacaaggcgtcgacgcagatgctcgagattcccgccgaagcattcgagaaaatgcccgacatctcgatcgactatgcggtgatggagcgctcgtcgaacgtggcggtggtgccttcgagcttcggctggagcgacatcggttcgtggggcgcggtgcgtgacctggtcgagccggacgaggacagcaaccgtgctgtcggcgatgcgatcttcgtcgatagtcgcaacatgtacgtgcagacgcaggatcgcgtcgtggcgtcggtcggcgtggctgacctgatgatcatcgatacgcccgacgcattgctggtcgcgcatcccgaccgcgcgcaggatgtgaagcaggtcgtcgcgcgcctgaagaaacgcaatcacgacgcatacaagctgcatcgcacggtgagccgcccgtggggcacctatacggtcctggaagaagggccgcggttcaagatcaagcgtatcgaagtgaagccgggcgggagcctgagcctgcagatgcatcatcatcgcagcgagcactggatcgtcgtgagcgggatggccaaggtcgtcaacggcgatcaggaaatcttcgtccggaccaacgagtccacctatattcctgccgggcacaagcaccgcctcgagaatccgggtgtgctggacctcgtgatgatcgaggtgcagagcggcgagtatctgggagaggacgacatcgttcgtttccaagacgtttacgggcgcgcgtga

SEQ ID NO: 253546 - DNA, 1045 bp, Unknown
  Bacterial polypeptide expressing nucleotide sequence isolated from the Sargasso Sea
tatgatagcagttatactcgcgggtggaaccggtacacgcctctggccatacagtcgcaacatgatccctaaacagttccttaatctgggatcaagtcaggaatcgctttttcaggaaacatctaaacgccttaaatctcttgtcgcacctaatcatatctatatagtaggtgcggatttacacaaagatcatttacgtaagcaaatattacaaatatttcctgattttccgattgatcagcttttattagaaccatttggtagaaacacggctccagcaattctatggagcatactcagaatacctgaaagcaatcgtaatgagcctgttgtagtattagcctcagatcatttaataaaaaatctaaacagcttcaatcatgccttgaaacttggtgaaagattagcatcttcaggatttattgttacttttggaataaagcctgatcgtgcagaaaccggatatggatatataaaatccggggaaccactggatgttggtttcaaagttgaagagtttgttgaaaaacctgatcattcaacagcagagcaatatttggaatcaaatagatatacatggaatgccagtattttcatggcaacaactgaaacctggttggaggagtatcgcgaacatgcccctgaattactcgacgtatttgaaaaagaagcttctttaggaaatctttctgataaagaacaaattcggaagatttataattctgttcccacagattctatcgattatgccttgctagaaaaatcagatcgtgtggctgttatacctgttgatatggaatggactgatttgggcagttgggagagtttacataaagtttctgaaaaagatagagaagggaatctaataaggggaaatgtaatttcacaggacacaaaaaactctttaattttcagtgaaaaaagacttgtagcatgtatcggtgtagaaaacttaatcattgttgaaactgatgacgcattgcttgtgtgcaatatgaataaatctcaggaagtaaagaaattggttgaaacacttaaaagagaa

SEQ ID NO: 253547 - DNA, 519 bp, Unknown
  Bacterial polypeptide expressing nucleotide sequence isolated from the Sargasso Sea
tatgaacactttaatcactcctgttattttagctggtggtattggctctaggttgtggcctttgtcgcgccaagcaatgcctaagcaatttttgccactattgaataatgaaaactcattattgcaaaatacattaaatcgcgtctctggggctgagttttcacagccaattttagtgtgtaatgaacagcaccgatttattgctaaagagcaaagtagtgcagctaaagtgtttgggttgatactagagcctacaggtaaaaatacggctcctgctattgcacttgctgcccattacgcaattcaaagtgggcttaaaggtcctatgttggtgatgcctgctgatcatcatataaaggatttttctccgctaacatcacaaataaacgatgctgtaacactggcagagcaaggaaagttggttactttttcaattacaccttcaatggcccacacagggtttgggtatataaagcaaggcagtaaaatttcaggctcaaactgttttgaagtggccga

SEQ ID NO: 253548 - DNA, 964 bp, Unknown
  Bacterial polypeptide expressing nucleotide sequence isolated from the Sargasso Sea
cgcgtgccgcacttccaagcagtttttgtcgcttacctccgatagcaccatgctgcaagacaccataacccgcttaaatggcacgaaagctcaaagccccattttcatttgtaacgacgcacatcgctttttggttgcagagcagcttcgccagaaagatatccatcacggtggcatattacttgagcctgtaggccgaaatacagcacctgctatcgcattggcggctttgcacgccactattaacggtgaagaccctgtattactcgtactagcagcagaccaccttattcaaaataaccaagcctttcataacgctattgaaacagcagaaaagctggcagaagaaggtaagctagtaaccttcggtatagtgccagaccaaccgcacaccggttatggttatattaaagcgggttgcgaattaggcgatgggttcgaagtagccgagtttgttgagaagccagctcttgagacagctaaagaatatgtagattccggaagttatttttggaatagcggcatgtttatgttcaaggccagccgttacttagaagagctcgccaaatacaaccctgaaatgctagacgtatgcaagcgtgcaattgatacagaaacgcccgatttagactttatccgcgtagaccatgatatttttgcaacctgcccagacgattctatcgactacacagtcatggaaaaaaccgatagcgccgctatggtgccattagatgcaggttggagcgatgtaggcagctggacatctctatgggaaaccgctgaaaaagatgaaaacggcaacgctaccgtaggcgatactattttagaaaataccaaaaacagttacgtgaatgcagaacagcgtttggtttctgtaatagggcttgaagatgtaatagtcgtagaaaccaagacgcagttatgggtgcccacaaagatgatgcgcaaagcattaaaacggtag

SEQ ID NO: 253549 - DNA, 571 bp, Unknown
  Bacterial polypeptide expressing nucleotide sequence isolated from the Sargasso Sea
aatgaaaccagtagtattagctggcggctcaggtagtcgcttatggccaaaatctcgtgcagcgcttccaaagcagtttctgtctcttacatcagacagcaccatgcttcaagacacgatcactcgcttaaaaggcacaccagctcagaatccaatttttatttgtaatgatgctcatcgctttttagttgcagaacagcttcgccaaaaagatatccaacacggcggtattcttctagagcctgttggtcgcaatactgcaccggcaattgcactagcggcgctccacgcaaccataaaaggcgaagatcccgttcttcttgtattagcggcagaccaccttattaaagataatcaagcgtttcactccgctattgcaaaggctgagaaattagcagagcagggtaaactcgtaactttcgggattgttccagatcagccgcatacaggatatggttatatcaaagccggagagcacgcgggcgatggtttcgaagtagcacagtttgtggaaaaacctgcattgggaactgcaaaagaatatgtcgattcaggcagttactattggaat

SEQ ID NO: 253550 - DNA, 742 bp, Unknown
  Bacterial polypeptide expressing nucleotide sequence isolated from the Sargasso Sea
tatgctttttcccattattatggccggtggtactggcacccgtttatggcctttatcccgcagcaattacccaaagcagtttattccgctttgtggtgaacacagcatgttgcaggaaactttgttgcgcttaaagggcttggtgcatcagctgcctatggtgatctgtaatgaagacaatcgctttattactgctgagcaaatcaaacagttggacagcgagccaagcttaaagcatacacaaattttgctggaacccgttgggcgcaatacggcgccagccattgctttagcggctttaacagccgtagcaaaaggcgacgaccctttgcttttagtgttagctgccgaccatgtcatcgaaaatgtttccgcttttcatgccgccgttgctactgctacacgcctggctgagacaggcaaattagccacctttggtattaaagcggaccatccggaaactggttacggttatatacgacgtggcgctattgttgaaggctctgtggctggcgcagatgaaagttatgcagtagcagcttttgttgaaaaacccgatgcagccacagctcaaagttatttagcaagcggcgaatactactggaacagtggtatgtttttgtttaaagcctcgcgttatttgactgaattaaagctacacaggccagatatttatcaggcttgcgaaaaggccgtgagtgaattaactgctgatttggactttatccgtatcacaaagacg

SEQ ID NO: 253551 - DNA, 658 bp, Unknown
  Bacterial polypeptide expressing nucleotide sequence isolated from the Sargasso Sea
atgtttacacctgtaattatggccgggggttcaggtacccgtttatggccgctgtcgcgtggtaattttcccaagcagtttttaccactgacagggcgtcacactatgttgcaacaaacattactgcgcctgagcgggctgcagcatagtacgccattgctgatctgtaatgaagaccatcgttttatagcggcggagcagatccggcagttgggtaatggtaaagcagatattctgctggagccggcaggacgcaatacggcgccggcaatcgcacttgccgcgctgcgagccaagcaacagggccacgctgaagctgtgctgctggtgctggcggcagatcatgtaataaacaatacacctgctttccagcaggcagttgaacaagccttgcctttggcacagggcggacaactggttacctttggcatagtgccgtcaagtgcagaaacaggctatggctatattaaacgtggtgaaaaatcaggtaacgcgtatcgggtagacagttttattgaaaagccggatttgagcactgcagagttttatctgcaaagcggagaatactactggaacagcggtatgtttatgtttcgtgctgatatttacctgcagcagttacagaagttcagaccggaatatttatgccgcctgtgaa

SEQ ID NO: 253552 - DNA, 1516 bp, Unknown
  Bacterial polypeptide expressing nucleotide sequence isolated from the Sargasso Sea
cctgccggtcatcctcgccggcggctccggcacgcgcctctggccgctgtcgcgcgaacagtttccgaagcagttgatcgagctgacctcgaacgaatcgccgttgtccgcgacggcgcgccgcctgaacggcatcgcgaacgcggtgctgggcgacaagctgttgctggtgtgcggcgaacagcatcgcatcatgagcgccgcgcaagtggtcgaccgtgcggcgcccgctcgtatcctgctcgaacccgctgcgcgcaacacggcaccggcgctcacgcttgccgcgctcgacgccagcgtattcgaggacgaccccgtgctcgcggtgatgccggccgatcacgtgatcgccgatgtcggcgcgttccaggatgcgatcgcgcgcgcggcacgttatgcgcaagaaggcgcgatcgtgacgctcggtgtgctgccgcgccgcgcggaaacgggctacggctatatccgggtcggcgagccgcggacgagccgccacggcggacaaggcggttattcgatcggacgcttcgtcgagaaacccgacgcggcgctcgccgagcgctacctgcagtcgggcgactactggtggaacagcggcattttcgtcacacgcgcatcggtctggctcaaggcgattcacgcgctggcgcccgaaatccatgcggcctgcgagtcggcgtggcgcgcgggcgtcgccgacgatccgttcttccggatcgacgccgcggcgttcgacgcctgcccgtccgactcgatcgactatgcggtcatggagcgcctggccgacagcagcgaactcggcatcgaaggcatcgtggtgccgctttcggccggctggtcggacgtcggcacgtgggatgcgatctgggaaatcatgccgaaggacgaccagggcaacgtcgcccgcggcccgaccgtgttcgaggacacgcaggacagcctcgtgcgttcggaagggcgtctcgtcgcgtgcgtcggcatgaaggatgtcgtcgtgatcgaaacgcccgacgcggtgctcgtcgcgaacaggcacgacgtgcagcgcgtgaagaacatcgtcgcgcgcctgaagagcgaccggcgcccgcaggcgagcgaacaccgcaaggtgcagcgtccgtgggggcactacgattcgatcgatctcggcgagcggttccaggtgaagcggatcgtcgtcgaaccgggcaagcggctgtcgctgcagatgcactatcaccgcgccgagcactggatcgtcgtgcacggcaccgcgaaggtgacgcgcggcaacgagacctttctgctcagcgagaacgagtcgacgtatatcgccgtcggtgaagtccatcgcctcgagaatcccggccgcattccgctcgaaatcatcgaagtgcaatcgggcaactatctcggcgaagacgatatcgtgcgcttcgacgaccagtacgggcgcccggtcgtcgacgcgctgccggaaacgcacgcggcgccgcacgtgcaagtggcagagggagacgtcgtgcgatag

SEQ ID NO: 253553 - DNA, 1402 bp, Unknown
  Bacterial polypeptide expressing nucleotide sequence isolated from the Sargasso Sea
atgaagccagtcattcttgcaggtggtaccggaagccgcttatggccaaagtctcgcgccgctttaccaaaacagttcctgtctcttacttctgacaaaacgatgattcaagacactgtactgagactcaatggcatagagtctttgcctccttctattatctgtaacgaagaacatcggtttcttgttgccgagcaaatgcgacaaatcagtgtcgataacagcaacattcttttagagccagttggtcgcaatacggctcctgctattgcactcgctgcatttcaagcttgcgaaaacggggatgatcctgttcttttggtattagccgccgatcacttaataaaagatagcgatacgtttcgtaccaaaattaaagaagcccaggctctagctgaacaaggtaagttagttactttcggtattgtccccactcagcctcatactggttacggctatataaaagccggaaacaaactgaatattggcttcgatgtaagtgaatttgttgaaaagccagatatgcctaccgcaacacaatacgtaagttcaggcgagtatttttggaatagcggcatgtttatgtttaaagccagtgcatttttaaaggcgctggaagtgcacgcacctgacatatattcggtatgtaaaaaggcgattgaaaaaaccgaaaaagatctcgactttgttcgtgtagacaaagacatatttgcttcatgcccaagtgattctatcgactatgcagtaatggaaaaaacatccgaagccgcgatggtaacactagatgctggttggtctgatgtaggcagttggtcgtctctctgggagacgggagagaaggacgcgaatggcaatgtaactactggcgacaccttattagaaggcaccaccaacagctatgtgaacgccgagcacagcttggttgcagttattggtctggaagacgtggttgtagttgaaaccaaagatgctgttatggtggcgaataagaaaaacgcagaacacatcaaaaccgttgtgaaccgtttgaaagctgaaaagcgccctgaatttgagtttcaccgcgaagtttacagaccttggggaagttacgattcaatagacaatggtggacgctttaaagttaagcgtattaccgtgaagccaggtgaaaaactatcagttcaaatgcatcatcatagagctgaacactgggttgtagtatcaggtacagctaatgtgacaataggcgatgaaacgcaaatgctaacggaaaatgagtctgtttatattcctattggggcggttcatgcattagaaaacccaggaaagattccactagaactaattgaagtacaatctggagcttacctaggggaagacgatatcgttcgtttctcagatagatatggggcgttctgat

SEQ ID NO: 253554 - DNA, 709 bp, Unknown
  Bacterial polypeptide expressing nucleotide sequence isolated from the Sargasso Sea
aatgattttacctgtgattatggcgggcggttctggtagcagattatggcctttgtctcgtgatttaatgccaaaacagttcttaacgctggacggtgaactcaccatgttacaagccacagtgatgcgtttacagggcctgaatgcagatgctgcgctggtgatctgtaacgaagaccaccgctttgtcgcagccgaacagctaaggcaaataaagcagttaaataacaatatcattttagagccagcaggtcgtaatacagcacctgctatagcgcttgccgcttttaccgcgataaaaaaaggtcaggatccattgttgctggtgctggctgcggatcatgtgattgctgatgttgatgtctttcaacaggctgttgttgcggcagctgaatttgctaatgccgatcaattagtcacttttggtattgtgcctacagcggcagaaacaggttacggctatatcaaaaggggggcgtgcaaaaagttaaatgatgctgaagcttatcaggtggcgcagtttgttgaaaaacccagccttgaaaaggctttggagtatttaagcagtggtgattattactggaatagtggcatgtttttgtttaaagccagtcgctacctggcagagctgaaacaacacaggcctgatatttataccgcttgtgagcaagctatgctggaggtcgaccctgatttagattttatccgg

SEQ ID NO: 253555 - DNA, 1498 bp, Unknown
  Bacterial polypeptide expressing nucleotide sequence isolated from the Sargasso Sea
catgaattcgagcgaatcctctcttcagaacagtgcattgtcgacgcatggttcagtgccgctgcaggcggtgattctggccggcggatctggcacacgcttgtggccgttgtcgcgggagcactttcccaagcaactgatcggccttcttggcgaagaatcgcttcttcagtcaacggcccgccgccttgatgcgctacaggcgagcaggccagttgctgaagaggtgcttgtggtgtgcggtgaagaccatcgtttcacaacggcggagcagctcagaagcgtgggacggagtggtcggatcattctggaaccggttggccgcaatactgcaccggcgctcaccacagcggcgctcgcgttactggaaggcggcaaggacgtaatcatggttgtgatgccagccgaccacgcgatcgtcgacgtcgtcgcattctccgaagctgttgccacggccgcagactacgctgcggctgggcaggtcgtcacaatgggtatcgtcccctctcgtccggacactggttacggttacatcaaggttggtgaaacgttgggcgaacatggcggacatcgcctcgaacgtttcgtggaaaagcctggcaaggatttagcagaaagctacgtgaagtccggtgaatactggtggaacagcgggatcttcatacttcgcgcgtcggtctggctcaagctgatcgaacacttccgcccgcttatcgcagaggcgtcccggcgtgcttttgtggcttccaaggctgaccacgatttcctgcgcgtgggtaaggcggagtttgttgcgtgtccgtcggagtcaatcgattttgccgttatggagcatcttggcgatgcggcttccccagcccaaggggtggtggttcctttgcgagcaggatggtcggatgtcggatcgtgggatgcgatttgggatttgctgccgaaagacggagccggaaatgtcgcacgcggcagggccatgttcgacggtgcggtcaacacctttgcccattcagaggggcgcctaatcgcgtgtgttgggacagaggacctggtggtggtggagaccccagatgcgatccttgtcgcgaagacttcggaggtgcagcgggtaaagaatatcgtcgcgcgcatcaaggccgaaaacggtactgaggcggaataccaccgcaaggtttttcggccttggggttattacgactcgatcgatagtgatcgaggctttcaggtgaagcgaattgtcgtgaaccctggcggtcgcctgtcgctgcaaatgcatcatcatcgcgccgagcattggattgtcgtgagcggtactgcactcgttacgcgcggcgatgaatcgttccttttgtctgagaacgaatccacctatattccacttgggcaaaaacatcggttggaaaatcccggcaaggtgccgcttgcgatgatcgaagtccagtccggtagctatctcggcgaagacgatatcgtgcggtttgacgatacgtacggacggacgtaa

SEQ ID NO: 253556 - DNA, 1330 bp, Unknown
  Bacterial polypeptide expressing nucleotide sequence isolated from the Sargasso Sea
ttgactttgcatggctctcacacaatgttacagaacactatatctcgtttaagtggtgttgagcatgatgagccaattttaatttgtaacgaagatcatagattcatcgtcgctgagcagttgaatagtcagaaaattgctcatgatggtattattttggagcccgctgggcgcaatacagcccctgccatagcattagctgcttttaaatgtcttttgaacggggaagacccgcttttgctcgttctggctgcagatcatgtaattgaaaacgaagaagcctttcatgcatcaatatcgtcagcatgcgagttagctaataatggaaagctggtcacttttggcatcattccgaccttcgcagaaacaggatatggttatataaagcgtgggcagccagttgtatttggagaaggtttttcggttgataagttcgtcgaaaaaccggatcgcgctactgctgagttatacgtatcgagcggggactactattggaatagtggtatgtttttgtttaaggcgagtaactttttgaacgagctcaagcgttatcgtctagacatttatgaagcttgtgaacgtgctatgactgctgcgtccattgacctggattttatccgggttgacaaggcttcttttctcgaatgtcccgaagattcaatcgattacgctgtaatggaaaaaaccgattgctcagtggttgtaccgcttgatgctggttggagtgacgtcggttcttgggcgtcgctgtgggacataagcaaaaaagatgaaagcggtaattctcatgtcggcgatgttttaagcataaatagtagtaacagctttgtttttgctgaaacaggcttagtcgcgacactagggttgaacgataccatcgtcgttcaaactaaagacgccgtgcttgtggcatccagggaccacgttcaggatgtcaaggccattgtgcaacagttgtctgctgccggcaggactgaacacaaagtccatcgggaagtatacaggccatggggtaagtatgactctatcgataatggctcgcgttatcaggtaaagagaataacggttaaacctggtgaaaaattgtccattcaaatgcaccatcaccgtgctgagcattggatagttgtgtctggcactgcaaacgttactgtagatggtaaggatactttgctgtctgaaaatcaatctgtttacattccattgggcgcaatacacgcactggaaaatccaggaaaaataccactggagttgatagaagttcagtctggctcttatcttggtgaggacgatatagtgcgtttctcagacaggtatggacgcgcctgat

SEQ ID NO: 253557 - DNA, 1426 bp, Unknown
  Bacterial polypeptide expressing nucleotide sequence isolated from the Sargasso Sea
atgattttacctgtgattatggctggcggttctggtagcagattgtggcccttgtcccgtgatttgatgccaaagcagtttttaaaactcgatggtgccctgaccatgttacaagccactgtaatgaggttgcagggactgaatgcggaagctgcgctggtgatttgtaacgaagatcaccgatttgtcgctgccgaacagctgaggcaaataaagcaattaaatcataatattatattggagcctgcagggcgaaacacagcacctgctatagctcttgctgctttgactgcgattaaaaaagggcaggatccattgttgctggtgcttgctgccgatcatgtcattgcagatgttgatgcctttcaacaggctgttgtggcggcgaccgaatttgccaatgcggatcaattagtcacttttggtattgtaccgaccgctgcggaaaccggttatggctatataaaaagggggcagcgcaaagagctgaactctggtgtggcttatcaggtggcacagtttgttgaaaagcctaagcttgaaaccgctttagactatttaagcagtggtgattattactggaacagcggcatgtttttgtttaaagccagccgttatctggccgagttgaaacagcacaggcctgatatttatacggcttgcgagcaggcgatggcagaagtggatccggacctggattttatccgcgtcaatcagcaggcttttttagcttgtccgtctgagtctatcgactacgctgtgatggaaaaaaccgctgctgctgtggttgtgccgctagacgcaaactggagcgatgtcggcagttggtcttccttgtgggatatttctgaaaaaaacactctgggtaatgtacacaaaggcgatgtgttgagttgtgacagcaaggataactatgtgtttgctgaaacagggttagtggccactgttgggctgcagaatatcgtcgtggtgcaaaccaaagacgcagtactggtggccgccaaagacagagtgcaggatgtcaaatccatagtgcagcaactgaaagatctgggtcgtagtgagcataaaattcaccgtgaggtgtacagaccctggggtaaatatgactccattgatcaaggccaacgttatcaggtcaaacatattactgttcatcctggccaaaaactgtcggtgcaaatgcatcaccacagagcagagcactggatagtggtcgctggtacagctttagtcagcatagatggcgtagataccttgctgtcagaaaaccagtctgtatatatcccactgggagctgtgcatgcactggaaaatccgggaaaaatcccgctggagctgattgaagtgcaatccggtacttatttaggagaagacgacatagtccggttttcagaccgctatggcagggtagacgctaaataat

SEQ ID NO: 253558 - DNA, 286 bp, Unknown
  Bacterial polypeptide expressing nucleotide sequence isolated from the Sargasso Sea
tatgagtgagagaaaaggaataattttagcaggtggcttaggatcaaggctttaccccttaactatagaaagttctaagcaattattgcctatatacgataaacccatgatttattatccattatcaattctaatgctggcaggtataaaagagattgcggtagttgttactccaaagcataggagtcaatatgaaaatttactaggcgatggagagcagtggggtatcagcttaaaatcattgaacaaaacaaacctgaaaggattgcacaggcatatactttag

SEQ ID NO: 253559 - DNA, 345 bp, Unknown
  Bacterial polypeptide expressing nucleotide sequence isolated from the Sargasso Sea
tatgaaaggaataattctatctggaggatctggctcaagactgtatcctcttaccttggctacttctaaacagctattatctgtatacgataagccaatgatttattatcctttatgtactttaatgagcgctaacataaaagatatattactgatcacaactaaggaagataaaaaaaattttcaaaagcttttaggaaatggatcacaatggggcatttcaattagatataaaatccaagataaacccaacggtatagcagaagcatttatcataggaaaagattttattggcgaagatcatgtagctttaattttaggtgataatatttttaatggaataga

SEQ ID NO: 253560 - DNA, 247 bp, Unknown
  Bacterial polypeptide expressing nucleotide sequence isolated from the Sargasso Sea
atgaaaggtattatactggcagggggaagtggtaccaggctttatccaattactaaaatagccacaaaacagttactccctatttatgataaaccaatgatctactacccgctttcaacactaatgctttcgggaattagaaaaattttaattatatcgacaccagaagacatatcaaaatatgaatatttattaggtaatggatctacaattggtttagagctatcttataaaattcaaccttctc

SEQ ID NO: 253561 - DNA, 877 bp, Unknown
  Bacterial polypeptide expressing nucleotide sequence isolated from the Sargasso Sea
atgcactcattaacagccccagcaaaaaagtcagaacgtaaaggtattattttagcgggcggatcgggcacacgcctttacccacttaccaaagtagtgagtaagcagttaatgcctgtttacgacaaacctatgattttttatccagtgtctacgttaatgatggcggggataaccgaaattttaattatatcaacccctgcagagctacctcgctttaaagagctattaggcgatggcagcgcatggggcataacctttgaatacaaagagcaaccaaaccccgacggcctagcgcaagcatttttattagctgaagactttttacaaggccaatgtgcggcccttgtattaggggataacctgttttacgggcacgacctatctatatcgttacaaaatgctacaagttgcgagcaaggtgcaaccgtatttggttaccacgtagctaatcctaaatcgtatggggtggttgagtttgaccaaaacggcaaagccatatcaatagaagaaaagcctgttaagccaaaatctaactacgctgtaccgggtttatacttttttgatagccgcgtagttgagtttgcaaaaaatgtaaaaccgtcagagcgtggcgagctagaaattaccgacgtaatagaacagtacctggctaaaaaagaactcagcgtagaaataatgggccgaggcaccgcctggttagacaccggcacactagatgatttactagacgctgcaaactttattcgcgcgatagaaaagcgccaaggtcttaaaattaactgcccagaagaaatagcctaccgcatgggctacataaacgcagagcaacttaaaaaactagctaagccacttaaaaagtcgggttacggtaaat

SEQ ID NO: 253562 - DNA, 131 bp, Unknown
  Bacterial polypeptide expressing nucleotide sequence isolated from the Sargasso Sea
aatgaaaggcattattttagctggaggttttggcacaagattgtacccactcactaaatctgtttctaaacaacttctgccaattaatgacaagccaatgattttttatccattatcaatattaatgttaa

SEQ ID NO: 253563 - DNA, 451 bp, Unknown
  Bacterial polypeptide expressing nucleotide sequence isolated from the Sargasso Sea
atgttggaaagaaaaggaataattttagcaggaggtacaggatccagacttaatccaattactttaggtgtttctaaacaattgctgccagtctatgacaaacccatgatctattatcctctttcaacacttatgctggctggtatcaaagaaatattaatcattacaaatgagcatgatcagcctaattttgaaagattattaggagatggtaagcaactaggaataagcattgaatattctgtacaagaaaagccagagggtttagctcaagcatttatgattggagagtctttcatccaaaaatctccagttgttttaatacttggagataatttatttcatggtcaagatttaattgcaaaattaaaaaattgtaatacaagcgattgtggtgcaaagttgtttgcttatccagtaagggatccacaaaattatggagtggctgaat

SEQ ID NO: 253564 - DNA, 619 bp, Unknown
  Bacterial polypeptide expressing nucleotide sequence isolated from the Sargasso Sea
atgactaaaggtattattttagctggtggaagcgggactcgcctttacccattaacgaaggtcgtgagtaaacaacttatgcccgtctatgacaaaccgatggtttattatccgatcgctactttaatgaatgcaggcatcaaagatatcctagtcataacaacaccagtagaactagaccgcttcaaagaattgctaggtgatggtaaagattggggtataaatattgagtacaagactcaaccatcgccagatggtttagctcaggcatttttgctgggtgaagagtttattggtagtagcaatgttgcattgatcttaggtgataaccttttctatggtcatgaccttgttaagtcactgcaaatagctgcttctagaaagtctggagcaactgtttttggttatcatgtagcaaacccatgttcatatggtgttgttgagtttgatgagagtggtaaagcgatttctatagaagaaaagccagaatcgccaaagtcaaactatgctgttccaggtttatatttctttgataacaaagttgttgggtacgcgaagaatgttgaagcttcacctagaggtgagctagaaataacagatgttatcgaacagtattaaa

SEQ ID NO: 253565 - DNA, 593 bp, Unknown
  Bacterial polypeptide expressing nucleotide sequence isolated from the Sargasso Sea
catgaaaggtattatactagcaggtggaagcggctcaagactttatccagcgacgaaagtagctagtaaacaattactaccaatatatgataaaccgatgatttattatcctctttcaacacttatgctagcaggaatccaggatatattaattatttccactcctgaagatacttcaaaatatgaatcactattaggtaatggggaacaatttggaataaaactttcctataaaatacagccatcacctgatggaatcgctcaagcattttttattggagaaaattttatagaaaatgacaatgtatgtttaattttgggtgacaatgttttttttggaggaaacctaagaaaaaaattgcaaaaaacagtttcagaagttgagataaataataatgctgtagttttcggctattttgttcatgatccagaaagatatggtgttatagaatttgataaacgtggtaaagccatttcaatcgaagagaaacctttaaaacctaaaagtaattatgctgtatcgggattatatttttatccaaatgatgttatttcaatagcaaaaaaacaaaatccttcaaaaagaggtgaac

SEQ ID NO: 253566 - DNA, 583 bp, Unknown
  Bacterial polypeptide expressing nucleotide sequence isolated from the Sargasso Sea
attgggtaaagataatgtgtgtcttgttctaggagataatattttttatggtcagcactttagtgaaaaactagaaaaggcagcatctagagaagaaggagcaactatttttggatgctttactccagaacctcaaaggtttggtgtagtagaatttaataaggaaggaagggcgctaaatatagaagaaaaacctatcgatcctaaatcagattacgctgttactggattatatttttatgataacgaagtaatagaaaaagctaaaataataaagccctctgcaagaggtgagcttgaaatcactgatctaaataacctttacctagaagagtcatcattacaagtagagattcttggcagaggatttgcttggctagatacgggaacttttgattctcttcttgaagcaagtcaattagttcagacaattcaaaaaaatcaaggtttgatgatagcttgtttagaggaaatagctctaaagaaacaatggataggtattgaagaagtaaaaaaacaggctgaaaaactaaataactctgcttatggtagatacctttcagctttaattaagaatttatga

SEQ ID NO: 253567 - DNA, 364 bp, Unknown
  Bacterial polypeptide expressing nucleotide sequence isolated from the Sargasso Sea
atgaaaggaattatactagcaggaggaagtggcacaagattataccctgtcacacgcggcataagtaagcagctcgcccctgtgtatgataaacctatgatttattatccgttatcgatattaatgctcgctggcataaaagatatagcaattattacaacgccacatgatcaagatgcttttaaaagattattaggtgatggttctaaatgggggcttaactttgagtatatagagcaagcatctccagatggcctcgctcaagcatttattttagctgaagattttattaaaggtgacactgtttgtttgatcttaggagataatattttttatgggcatgatttatctaaattattaagta

SEQ ID NO: 253568 - DNA, 250 bp, Unknown
  Bacterial polypeptide expressing nucleotide sequence isolated from the Sargasso Sea
atgaaaggtataattttagctggaggttctggaagtagactattcccaattacaaaagttatatctaagcaacttttacccatttacgacaaacctatgatttattatccactttcaactctcatgagagctcaaattaaggatattttaataatttctaccccgcatgacctgccaaattttaaatcattatttggagatggttctcatattggtttgaatattcaatataaaatacaaccaagtccag

SEQ ID NO: 253569 - DNA, 733 bp, Unknown
  Bacterial polypeptide expressing nucleotide sequence isolated from the Sargasso Sea
ttgatcatttcaaccccagaggatttgccaaaatatagatctttactttcaaatggcaaattaattggaatgaatttttcatataaagagcaagtttatccggatggacttgctcatgcatttattcttggtgaagaatttattggtaatgaaaatgtatgtttaatcttaggtgataatatattttatgggagcaaccttcctcaaacgcttagatctgcggtaaaaagagttcacgattctaacattgctaccgtatttggatattatgtaaatgatccggaaaggtatggcgttgttgagtttgatgatgatgacaacgcaatatccttggaagagaaaccttctaacccaaagagtaattatgctgtttctggtttatatttctacccaaatgacgctgtagatattgctaaaaaccaaaagccctccggtagaaaagaactcgagattactgacacaaatagagtttatttatcacaaaaaaggctcaaggttgagaaattaggtcggggctgtgcttggctcgatactggaacacatgattcactgttagaagcatcccaatttgttcagattttagaaaaacgacaaggggttaaaatttcatgtattgaagaaattgctttcagaatgggttacattgatagagatgctcttttaggtatcggcaaaaaaatgaaaaataatccctatggtcattatttaatcacggttgcagaagagaactagg

SEQ ID NO: 253570 - DNA, 709 bp, Unknown
  Bacterial polypeptide expressing nucleotide sequence isolated from the Sargasso Sea
atgagaaaaggtttaatactagcaggcggtttgggaacaagattatatccttctacaattggaatctcaaaacatttgtttcctatttatgataaacccatgatttattacccactaacttctctaatgttggctggtataagagagatagcggtaataggtgataattataatttaaaacgttacaacaaattactaggagatggtagttcgtttggtgtatctttgacttaccttatacagaaaaaaccacgtggaatatcggaagcactcactattggaaaaaattttcttaatggtaatccgagtgttttaatattaggtgataatatattttatgggtctggatttgtaaaaattttagaaaatgcgtacaaagattcagaattttgtagtatatttttacacaaagtaaaagatccaagtaattttggaattgccgaagttgattctaataataatataatgaatatgagtgaaaaacctagtaattcttcaagtaatttagcgataacaggtttatattttttttgtaaggatgccccaaaattttgcgagagtttaacaaagtcatctcgtaacgaatttgaaataattgaattacttaaaatttaccataataaaaatttgcttaaatataaattacttggaagagggtttttctggtttgatgcgggcatttccagttcattattaaaggccaagtaat

SEQ ID NO: 253571 - DNA, 727 bp, Unknown
  Bacterial polypeptide expressing nucleotide sequence isolated from the Sargasso Sea
gatgaaaggaatcattctagctggtggcaagggcacaaggttacacccaatcaccagcgtttgttccaaacaacttcttccagtgttcgataagccgatgatctactatccgctgtcgtgtttgatgttggctggcataagggaaatcgtaatcatttcaacacctgaagatttatcttcatttcgatctttgttgggtaatggtaattctcttggtttggatctcagctacattgctcagccaagtccagatggactcgctcaggctttcgtactcgcagaggatttcattggtgatgaaagtgtttgcatgattctcggagacaatatttttcatgggcatggtctttcagaactgttggcaactgccgtgggaattgttcaaagcgatgaaaaggcagtaatttttggacattatgtaaatgaccccgagcggtatggggtagtggaattcaacgaaaagcaagaagttgtgagccttgaagaaaaaccgctagtaccgaagtcaaatcatgcgatagtggggctctatttttatccgtctgatgttgttcattttgctaaatcggtagagccgtcgagccgtggtgaattagaaattacagatttgaatagattttacttagaaaatggccgactcaacgttctcacctttggaaggggtttcggctggtttgatgcaggaactcatgagtctcttttggaggcttcaccagtttgtgcgctc

SEQ ID NO: 253572 - DNA, 672 bp, Unknown
  Bacterial polypeptide expressing nucleotide sequence isolated from the Sargasso Sea
catgactagaaaaggaataattcttgccggaggaaagggtaccagactatatcctctaactgtatctgtgactaaatgcattttacctatttatgataaacccatgatttattattctctatcaacgctaatgttagctggtataaatgatatattagtcatctctacaccggaggatgaagtcaatttttcaaatctgatgggagacggcagcaattatggcattagtatttcttatgaagttcaaccaaaaccagagggaatagctcaagcgttaattatcgcagagaaatatttaaataattcacctagcgcactaatcctcgctgacaatattttttatggggacggcctggagaataagttggcacgaagctgtatgatggatcataatacagttttctcatacttagttgatgatccagagagatttggtatttgtgaagtagatgaaaataatatggttacaagtctagtagagaaaccagaaagtcctaaatcaaaccttgctgtaactggtttgtatttttatgactcaaatgctccatatatagctagaaatatccaaccatccgataggggtgaacttgaaataacggatgttaatattgaatatatgaaatcaaaaaagttgtacagcgagattcttgatgataaattttcatggattga

SEQ ID NO: 253573 - DNA, 250 bp, Unknown
  Bacterial polypeptide expressing nucleotide sequence isolated from the Sargasso Sea
atgagaaaaggaataattttagcaggtggttcaggcactcgattgcatccattgacaaaagtcgtgagcaagcaactgatgccagtttacgataagccgatgatatattatcccctggctacgcttatgatgtctggaataagggatattttaattatcacgacaccagaagagcagagtcgtttcattgagcttatcggcgatgggagtgaactgggaattaatgttcaatacgcagttcagccttcac

SEQ ID NO: 253574 - DNA, 544 bp, Unknown
  Bacterial polypeptide expressing nucleotide sequence isolated from the Sargasso Sea
gatgaaaggaattattctagctggaggtaaaggctctaggctttatccattaactaaagtgtcaagtaaacagctgcaagcagtttacgataaaccaatgatttattatcctttgacaacgcttattgcggcagggataagagaaatatgcttaataacaacacgacaagatgagctaatgtttaaaaatttattgaacaatggtagtcagtttggtgtgaagctttcatatattgtgcaagatcaacctttaggtatagctcaagcaataatcctatctgaagaatttttatcaggagaaaattatgtactaattttaggagataatattttttcaggtggtagcgatattcctgatgcaataaataattttaaaaacggagcgatggtattcgcatatcatgttccagatcctgaaagatatgcagttttagagtttgggaaagatttaaaaattgaatctcttgaggaaaagccaaataatcctaagagtaattatgcagttccaggtatatatttatacgataataaatctataaaaatt

SEQ ID NO: 253575 - DNA, 455 bp, Unknown
  Bacterial polypeptide expressing nucleotide sequence isolated from the Sargasso Sea
aatgaaaggtattattctggcaggaggaacaggctcgagactgtatcccataactttagctgtatctaagcatctgatgccaatttatgacaagccaatgatcttctatccattatcagttttaatgctatctggtatccgggatattttgataatttcaacaccggaagatcatcaaagttacataaatttgttgggtgatggaagtaactttggaataaaccttagctttataattcagccaagtgctgatggattagcacaggcttttattttaggtgaggaatttattggtgatgatagtgtctgcctcgctcttggcgataatatattttatggtatgggcttccaaccaaaattaagaaaagtttctgcccgtaaggtaggtgcgacagtattcggatatcaagtcaaaaatccaaaacattttggtgttatttcctttgataataata

SEQ ID NO: 253576 - DNA, 892 bp, Unknown
  Bacterial polypeptide expressing nucleotide sequence isolated from the Sargasso Sea
atgactaaaggaataatactagctggaggaactggtagccgcttatatccgatgaccgtttctgtcagcaagcaattgttgccggtgtatgataaacctttgatctattacccgttgtcgacattaatgcaagctggcattcgccaaattttgatcataacaactccggaggatgcgaatgctttcaaagcattgctaggtaacggtgaaaattggggtttagagatcgactacgcgacgcaacctaggcctgaaggattagcacaagcttttattattggagaggattttattggatcaagcagggtttgtttaatcttaggagacaatattttttacggtactggcatcgaagagacattaaaaaaggctgctaacgaagaaagtggtgcgagcatttttgcatactacgttaatgatcctgaacgctatggtgtggtggttttgaatgataaaaacgaacctgttgacttggaggaaaaacctttaaaaccaaaatcgcacttcgctgtgaccgggatatatatgtacgatagcaacgttatcgaaattgcgaaatctattgagccttccgcacgaggagagctagagataacagacattaacaaagtgtatcttcagcgagaaactctgagtgtggaatttttcaatagaggtacagcatggttagatactggaacaactcattctttacttgatgccgcaaactttattagagttttggaggagaggcaggggttgaaaattgggtgtccagaggaaatagcataccagcagaaatttattatggaagatcaattaaaagaattcgcccaggggataaaaaccagtggatatggcacaatatcttttaagcattctgaaaagctgataagagccaaggttctatgaa

SEQ ID NO: 253577 - DNA, 349 bp, Unknown
  Bacterial polypeptide expressing nucleotide sequence isolated from the Sargasso Sea
cttgttatacttaattatcgaacacaggagaactaacattaatatgaccaaaggaatagtattagcaggaggatcaggttctagactacacccaattacgctaggtacatcaaaacaattgctacctatatatgataagcctatgatttattaccccttgtctgttcttatgttatcaggaatcaatgagatactgataatttgtgctcctgaagacctagattcctataagaggttgctgggaaatggttctgacatagggatatctatagaatataaaactcaactctctccagatgggttggcccaagcttttttgctaggagaagaatttatagaagataaaaat

SEQ ID NO: 253578 - DNA, 456 bp, Unknown
  Bacterial polypeptide expressing nucleotide sequence isolated from the Sargasso Sea
aatgaaaggaataattttagctggaggaagtgggactaggctttatcccttaactattgggcaatctaaacaattacttgctattcatgataaaccaatgatttattatcctctatctgtcttgatgcttgcaggaataaaggatgtattgattatttcaactccgcaagatttaccaaattttaaaagattattgtctgacggatctcagctaggtatgaatttctcatatgaaaagcaaaatcaacctaatggaattgcagaagcttttattattggtgaaaagttcattggtaatgattctgtttgtttgattctaggagataatatgttttatggaagtggttttactaaaattcttaaaaaatcggtttatgatgttgaaaaaaataaaaaagcgaaagttttcggatactacgttaataatccatctagatatggagttgttgaaacgat

SEQ ID NO: 253579 - DNA, 778 bp, Unknown
  Bacterial polypeptide expressing nucleotide sequence isolated from the Sargasso Sea
tgtatccattacctcggttatttctaagcaattgctccctgtttacgataaaccaatgatatactatccattatcaacattaatgctttctggaatccaagatatattgattatttcaacgccagaggatacccctaggtttaatgatctatttggtgatggtagccaaataggtttaaatatatcctatatggttcaaccatctcctgatggactagcacaggcatttatcctaggtgaagactttattggtgatgattcagtgagtttaatcttaggtgataatattttttttggccatggtttatccaatatgctattgaatagtgtccaaactgttgaatcaaaaaatgatgctgttgtatttggatatagtgttaaagacccacaaagatatggagtggttagtttcgatgataatggcaaagtaacagaaatagtagaaaagccagattctcctaaatcaaattatgcagtagttggactctattattatccaaatgatgttgtgaatatagcaaaaaatgtaaaaccttcacaacgaggtgagctagagattacttcagttaatcagactttccttgatttgaatagattatcagtagagttaatgggaagaggatacgcatggcttgataccggaacacaacaggcgatgaataatgcatcgaattttattaaaaccatcgaagaaagacagggcttaaaagttgcatgtattgaagagattgcttattaccaaggatttattactagagacgagctaaataaacttgct

SEQ ID NO: 253580 - DNA, 658 bp, Unknown
  Bacterial polypeptide expressing nucleotide sequence isolated from the Sargasso Sea
tacatataaaattcaacctaaccctgatgggttggcacaagcttttatattaggtgaaaaattcattagcaaagatgatgtatgtctaattttaggagataatgttttttatggcagtcgtctaccagcaaaacttaaaaaagcagttaaagatgtaaaagaaaaaaaaattgctaaaatatttggatattatgttaacgatccagaaagatacggcgttgtgagctttgataataatggaaaagctatttcattagaagaaaaacccaaaaaaccaaaaagtaattatgccgtatctggtctttatttttaccccaatggggttattgatattgctaaaagtcaaaagccatctaagagaggcgaattggaaataactgatacaaatctaatatttcttaaaaataaaaaattagttgttgaaaaaatgggaagaggctatgcatggttggatacaggtactcatgattctatgcttgaagcgtctttatttgtccaaactattgaaaaaagacaaggaatgaaaatttcatgtattgaagaaattgcatttagaatgggttacatttcaaaaaaacaacttctgagcattggaaataaaatgagtaacaatcaatatagtgattacataaaaaagatagcgaatgaatctctataa

SEQ ID NO: 253581 - DNA, 836 bp, Unknown
  Bacterial polypeptide expressing nucleotide sequence isolated from the Sargasso Sea
aggcgggtcgggaactagattgtatccaataacaaagggagtttcgaaacagctcttatgtatttatgataaaccaatgatttattatccaatatccgtattaatgttatctgggattaaagagatcttaattatatcaactccaaatgatctcccaaattttaagaatcttcttggtgatggaaaagaacttggattgagatttgaatatatcgagcaaaaatcacctgacggtttagctcaagcttttataattggagaaaaattcattaaaaatgatgatgtatgtttagttttgggtgacaatattttttatggtagcggtttatcaaaaattttacaaagtacagtaaaaagaacattggaaaagaaaagggcaacaatttttggatattatgttaccgaccctacaaactttggtattgtaaattttgataatagaaaaaatattataaatatcgaggaaaagcctaggcatccaaaaagtaattatgctgttgttggactgtattattacccaaatagcgtaattaaaattgcaaaaaatgtaaaaccttcaaaaagaggagagctagaaattacgtcaattaataacaaatatttggatttgaaaaagcttgatgttaagcttttaggaagaggatttacatggttagatactggtacacacaattccttacttgaagcatcaaactttataaatactattgaaaaacattctggcttaaaggttgcatgtttagaagaaatttcatttaaaatgggttacataaccaaaaaacagttaaaaaaattaattgtccctctaaaaaaaacaggttatgtaaatatctaaa

SEQ ID NO: 253582 - DNA, 685 bp, Unknown
  Bacterial polypeptide expressing nucleotide sequence isolated from the Sargasso Sea
atgaaaggtataatcctttctggtggagtcggttcacgactacacccaatgacaaaagtgattacaaagcaacttctcccaatttatgacaaacccatgatctattaccccatgagtgtgctcatgatgtgccatataaaagaaatcttgctaattacaacacgtgaggaccagccacatttccaaaaacttcttggtgatggatcagagataggcctcaaattttcttatatcattcaagatgctccgaatggtattgctcaagcgtataccttagccgaagaatttctcaaaggcgacgactctatgctcgtacttggtgataaccttttctatggtaggttctcaggatttagagaggcaatcaaaagacaaaaggctagagagaatggcattcatgcccaagtttttgcatacgctgttaatgatccagaaagatatggggtggttgaattcgataaaagcacagggaaagttcaaagcattgaagaaaagccagcaaatccaaaatcaaattatgccattccaggagtatacctccttgatggatctgcccctgaacgtgttaagaacctgaagccatctgctcgaggagaactggaaataacagatttgatccaaacttatctagatgcagatagccttggtgttgaagtgatcaaccggggggattgcgtggcttgat

SEQ ID NO: 253583 - DNA, 904 bp, Unknown
  Bacterial polypeptide expressing nucleotide sequence isolated from the Sargasso Sea
aatgaggggcatagttttagcaggtggatctaataccagattatttccactaactttatcaatttctaagcatctattaccgatctatgataaaccgatgatatattatccgctttctgtattaatgttgtctggaataagagacatacttgtaataactaatcccgaacaacattctcagtattctagtttgttgggtaatggtgaagaatttggaattaatataacttatgcagctcaagaaaaaccagagggaattgcccaggcattccttgtagcagaagatttcataaataatgatccagtaagtttaattcttggagataatattttctttggtcaaagctttggtcagatgctgaaagagccattcttaattaaggaaggtgcatatattttcggatatccagtcagcgatccttccagatttggtgttattgaattagataataatggcaatgttgtttcccttgaggagaagccggatgaaccaaagacaaattttgcagcaacaggcttatatttttatgacaataaagtagttgatatagcaaaggagctaaagccttcggctagaggcgagcttgaaattacagatcttaatttagagtatttaaaacttaatcagttaaaagttcagatactgggtagaggatttgcatggttagatactggaactcatgaagctcttatagaagcggggagttttgtaaaaactcttgaagaaagacaaggaataaagatttcttgtcttgaagaaatagcatataggaaaggttggatagatgaagaagctttgcttaggagcgctaaaagaatgcccaattctccatattcacaatatcttgaatcaataatagacaatcaaacaatgtttccttgggaaaaatcaaaagacaaataa

SEQ ID NO: 253584 - DNA, 812 bp, Unknown
  Bacterial polypeptide expressing nucleotide sequence isolated from the Sargasso Sea
cagcaccctgatgctggcggggatccgtgaggtgttgatcatcaccacagcccatgatcaggaggcctttcagcggttgcttggcgatggcagtcgctggggcatgaccattcaatacgccgtgcagcccagcccggatgggttggcgcaggctttcctcatcggcgctgatttcctggatggggcacccgcatctcttgtgttgggagacaacctgtttcacggtcacgaccttgtgccacagctggtgagcagtgacgggcgagcggaaggtgcaacggtgtttgcctacccagtgagcgacccggagcgttacggcgtcgcggaatttgacgcagatggacgtgtgctgagcattgaagaaaagcccaaactgcccaagagccgttacgccttgaccggactttacttctacgacgcaacggtggtggaacgggcccggcaggtgaagccctcagcccgcggtgagctggagatcactgatctcaaccagatgtatctggatgacggcaagctcaaggtggaattgatgggtcggggcatggcctggctggataccggcacctgtgactccctcaacgatgccggtggctacatccgcacgctggagcaccgccagggcctgaaggtgggctgcccggaagaggtggcctggcgacagggctggatcagcggagagcaacttgactccctggcgcacccgctcaagaaaagcggctacggcacctacttattgcagctgctggaggaaagcatcagcgaccacgcggcgttgcagagcagcctggaggtgccggcctatgcaggttgag

SEQ ID NO: 253585 - DNA, 661 bp, Unknown
  Bacterial polypeptide expressing nucleotide sequence isolated from the Sargasso Sea
gagttcggtatcagtttaaagtatgccgctcaggctgcgccagatggtctagcacaagcttttattattggtgaagagtttatcggcaatgataatgtgtgtttggcactcggagataatatcttttgggggcaaggtttttcaccaatattaaaaaaagccgccgcaagatcaactggtgcatccgtatttggttatcaagtcaaagatcctgagcgttttggcgtagttgagttcgatcacaatcaaaaagccatttcaattgaagaaaaacctttaaaccccaaatctaattttgcagttacaggcctttatttttacgataatcaagttgttaatatcgccaaaaatgtcaaaccatctgtacgtggtgagttagaaatcaccagtattaatcaagcctatcttgatatgggagaattaaatgttgagcaactcggccgaggttttgcgtggttagatacaggaacatacgaaagcttattagaagccgcttcatttgttgaaacgattgaaaaacgccaaggttataaaatcgcctgtttggaagaaatagcatggcgtaataaatggttgactgatgaacagctaatagcagcagctaatcagatggccaaaaatagttatggacaatacttgtttgatttattgggtaaataaa

SEQ ID NO: 253586 - DNA, 304 bp, Unknown
  Bacterial polypeptide expressing nucleotide sequence isolated from the Sargasso Sea
atgaaaggtattgtattagctggtggactaggaacaagattatatccattaacaaaatcagtaagtaagcaactacttccaatttttgacaagccaatgatttactatccgatatcaactctcatgcttgcaggtataaaagaaattttaattatttctacaaagtatgatattgaaaattatgaaatgcttctaggtgatggttctgattttggatgcaattttaaatttgaagttcaagaagaaccaaaaggtttagcagaagcatttattattggagaagagtttattggcaatgataatg

SEQ ID NO: 253587 - DNA, 592 bp, Unknown
  Bacterial polypeptide expressing nucleotide sequence isolated from the Sargasso Sea
aatgagaaaaggaataatactagctggcggatctggcacacgtttgcacccgttaactaaggtggtaagtaagcaacttatgcctgtttacgacaagccgatgattttttatccgttaaccacgttaatgatgtcgggcatccgtgatgtactcattatcactacgcctgaagagcagcagcgatttatcgaccttattggagatggctcggcgctaggaatgaatatacagtacgcagttcagccttcgcccgatggcttggcacaggcatttcttataggcgaagattttattggaaacgatagctgttcactggttcttggagacaacatttattacggccacgacttaaagttgtctttgcagaatgcgtataaacaagagcatggtgcaacagtgtttggttatcatgttaacgaccctgagcgttatggcgtggtagactttgatgatgactggaacgcgctttctattgaagaaaagcctactgttcctaaatcaaactatgcggttaccggtctttattactacgacaaccgcgtagtagatttcgctaaagaagtgaagccttcacaccgtggcgaactagaa

SEQ ID NO: 253588 - DNA, 703 bp, Unknown
  Bacterial polypeptide expressing nucleotide sequence isolated from the Sargasso Sea
catggcaaactcatgtaaaaagatttataacagaaatgcattaagagaacacaaaatgaaaagaaaaggaatcatacttgcgggcggttcaggtacgcggctctatccggcaactcaagtaatttccaaacagttattacctgtatttgacaagccgatgatctattatccattatcaacactcatgttgacagatattcggcaaattctaatcatttccactccacaagatattccacggttcgaaactcttttaggagatggttctcaatgggggctggatcttcattacgcagttcaaaattctccggatggactggcccaggcgcttcttatcggggaatcattcctcaataattccccatctgtgttagttttgggagacaatattttttatggacataatctccctgatttacttaattctgcaaatgaacgtaaggaaggtgcaactatttttgcttaccatgtaattgatcccgaacgctatggtgttgttgaatttgatccgcagaatcgagcagtcaaccttgaagaaaagccaaaatctcccaaatcaaactacgcagtaactggactctatttttatgacaaaaatgcagttgagtatgcaaaacagatcaaaccatcatcacgtggtgagcttgaaattacagatcttaaccgtgagtaccttaacatgaacacctttctgtcgaaataa

SEQ ID NO: 253589 - DNA, 340 bp, Unknown
  Bacterial polypeptide expressing nucleotide sequence isolated from the Sargasso Sea
attgaagggtattattttagcaggtggttctggtactaggctctttccaagtacgctagcaataagcaaacagttattaccagtttacgacaaaccaatgatttattatccactttcaatgctgatgctcgctggcataagagacgttttgatcatttcaaccccagaagatttgccaaaatataaatctttactttctagcggcaaatctattggaatgaattttttatacaaagagcaggtttcacctgatgggcttgcgcaagcattcattcttggtgaagagtttatcggcaatgaaaatgtatgtttagttctaggggataatatattttatggg

SEQ ID NO: 253590 - DNA, 277 bp, Unknown
  Bacterial polypeptide expressing nucleotide sequence isolated from the Sargasso Sea
aatgaaagggattattcttgctggtggaagtggaactagactttatccaattacaataggattaagtaagcaattattgcctatatatgataaacctatggtgtattatcctttatcaactcttatgttagcagggattcgagatatccttataatatcaactccagaagatttgcctaaattcaaggatttattaggtaatggatcatcagttggtctacaattatcatataaggttcagccttctcctgacggattagctcaggcttttatatag

SEQ ID NO: 253591 - DNA, 632 bp, Unknown
  Bacterial polypeptide expressing nucleotide sequence isolated from the Sargasso Sea
aatgaaaggtataatactagcaggtggaagtggaacaaggctctatcctttaacaaaagtgatatcaaagcaattattgcccgtctatgataaaccaatgatttactatcctttatcaactttaatgttatcgggaataaatgagttgttaattatttccacaccgacagatttgccgctttacgagagattattaggacatggaaatgaattgggccttaaaatatcatataaagtgcaacctcgccctgatggcttggctcaggcttttattttaggtgaagattttattggcgaggatgatgtggctttggttttaggtgataacatattctatggtacaggcttttcaggcttattacaatcatctgttgaacttgttgaaaaagaaaaaaaagcagttgtttttggttacgaggttaaagatccagaaagatatggtgttgtagagtttaataataatatggaagtagttagtttagaagagaagccggcaaatcctaaatcaagttatgctgtggtaggattatatttttacccaaatgaggtgattagactagcaaaaaatgtcaagccttcggataggggggaattagaaataacatctgtaaataacgctttccttgaggaaa

SEQ ID NO: 253592 - DNA, 750 bp, Unknown
  Bacterial polypeptide expressing nucleotide sequence isolated from the Sargasso Sea
actcattcctatttacgacaagccaatgatctattatcctttatccatgctaatgcttgccgggataagagaagttttaattatttccactgaagaagataccccaaaatatgagtcattgctctcaaatggaaaatcgattggtatgaaattctcttacaagattcaaccctctccagatgggcttgcgcaagcgtttattttaggtgaagactttattggaagcgataatgtttgcttaattcttggggataacattttttatggtgacagcattcctgaaaagcttcgtgaagcagttaatgatgtatataattcaaataatgctactgtatttggttattatgtgaatgatcctgagcggtatggggtcgttgaatttgataataatggcagcgctgtctctctagaagaaaaacccactgtaccaaagagcaactatgctgtatcaggactgtatttttacccaaatgatgttattgaaattgcaaaaaatcaaaaaccatccgatcgcggggagcttgaaataacagatacaaacaaatcttatcttgatcagggaagattaaaagtggaaaaattagggcgtggatatgcctggcttgacacaggaacccatgattcgctattagaagcttcgcaatttgtacagattttagaaaagcgacagggggtaaaaatttcatgcattgaagaaatcgcctatcggatgggttatattaataaagaaaatttgcttgcacttagcaa

SEQ ID NO: 253593 - DNA, 502 bp, Unknown
  Bacterial polypeptide expressing nucleotide sequence isolated from the Sargasso Sea
catgacaaagcgtaaagggattatcctagcaggaggatctgggacacgactttacccactaacaattggtctcactaaacagctcttgcctgtgtatgacaagccactgatctattatccactcacggttttgatgcttgcaggaatccgagaggtactcataataactacgcctgacgatttatcacaatatcaacgggcccttggtgatggtaatcaatggggtatcaatctgagttatattgagcagcctagtcctgatggattggcacaggcatttattctcgcagaggactttctggatggtgcgccatcagcgctaattctgggagataatatcttttttggtcatggattacccgaagttctctcagcagcagacgccaaacagactggtgcaacggtttttggttatcacgtgaacgatcctgaacgctatggagttgttggctttgacaactatggaagaaacgtcagttgctgcactggcttcggcctgctc

SEQ ID NO: 253594 - DNA, 877 bp, Unknown
  Bacterial polypeptide expressing nucleotide sequence isolated from the Sargasso Sea
atgaaaggtataattctagcaggtggaagtggtacacgactttatccggtgacagaggtgtctagtaaacaattactcccaatttatgataaacctatggtttattatcccttatccactctgatgttggcagggattaaggatatattaattatttctactcctgaagatactcccaaatatgagtcattattaggtaatggagatcaacttggcattaaattaaaatttcaagttcaactttctcctgatggccttgcgcaagcatttataataggggaaaactttattgaaaatgaaaatgtatgtctaattttgggtgacaatgttttttatgggggaaatctaagaattaaattacaaaatactgtttcagatgtaaaatcaaataataatgcagttgtttttggttattttgttaatgaccctgaaagatatggtgttgtagaatttgataataaaggaaatgcaatttctatagaagaaaaaccggataatccaaaaagcaattatgctgtttcaggcttatatttttatccaaatgatgttatttctattgtaaaaaagcaaaaaccatctcctcgaggtgaattagaaattactgatgtaaataaatcctatttaaatcaagatagattaaaagtagaacaaatgggcagaggttatgcttggcttgatactggaactcatgattctttattagaagcatctcaattcgttcaaacattagaaaaacgtcaaggaatgaagatatcttgtatagaagaaatagcttttcgaatgggttatattgataaaaaccaactaaagtctatcggaaataaaataaaaaataatcaatatggtaaatatttgctgaaagttgctgattcttaat

SEQ ID NO: 253595 - DNA, 794 bp, Unknown
  Bacterial polypeptide expressing nucleotide sequence isolated from the Sargasso Sea
catgaagccacgcaagggcattattctggccggcgggtcgggtaccaggctttatccgctgacgatggcgatttcgaagcaattgatgccgatctacgataagccgatgatctattatccgctgtcggtgctgatgctgacgggcattcgcgagatcgcgatcatcaccacgccggacgatcaggatcagttcaagcggcttctgggcgatggcagccagtggggcctgagcctcaccttcataacccagccctcgccggatgggttggctcaggcctatattttggcggaggatttcctcgatggcgcgccatcggcgatgactctcggcgacaacatcttcttcggccacggcctgccggagcttctggccgccgccgatgccaagacgtccggcggcacggtgttcggctatcacgtcgccgatcccgagcgctacggcgtggtcgccttcgacagggaaggcaatgcaagccagatcatcgagaagccggaggtgccaccatcgcattatgccgtgacgggcctttatttcctcgacggtgaagcgccagagcgggcccgcgcggtcaagccatcggcccgaggcgaactcgagatcgtcacgcttctggaaagctatctgcacgagggcaagcttgcggtggagcggatggggcgcggctatgcctggctcgataccggaacgcattcgagcctgctcgatgccggcaacttcgtgcgcacgctttcggtgcgccagggcatgcagtccggctgtccggaagagatcgcctatcgcaatggttggatcg

SEQ ID NO: 253596 - DNA, 862 bp, Unknown
  Bacterial polypeptide expressing nucleotide sequence isolated from the Sargasso Sea
catgaagcgaaaaggaataattcttgcaggagggtctgggacacggttgtatccaattacgcaggtagtctcaaagcaattgcttccagtgtttgacaagccaatgatttattatcctttgtctaccttaatgcttggaaatattcgtgaaatactgattatctcaactccagaagatcttccaaaatttaaagatttgttacaggacggatcaaagtggggattaaaaatagagtatgccgtccagccttctccagatgggctggctcaggcgttaattattgctgaggattttcttaatggcgctccctccgtattaattctgggagataatattttttatggtaacttgttgcatgaaaaacttgcatctgcagatagtcgtaataaaggagcgactatctttgcttatcatgtgaacgatcctgaaagatacggcgtcgctgaatttagtaatggaaaagtggttagtcttgaagaaaagccgagtagcccgaagtcaaattatgctgtgacaggattgtatttttatgatcagaaggcctctgaatatgcaaaaaatataatgccttctgatcgaggggaattagaaattacagagctcaataaagtttatctagaaaaagaacaaatgtcagttgagcttatgggtagagggtatgcttggctagatacagggacacatgaaagtttagtagaggcaaatcagtttgttcagacaattgaacataggcaaggcttaaaaatagcttgtcctgaagaaatagcatttaggaaaaaatggattggagaggagcaagttaaagagattgctcttccaatgataaaaaaatcatatggtcagtatcttatgcagatataa

SEQ ID NO: 253597 - DNA, 130 bp, Unknown
  Bacterial polypeptide expressing nucleotide sequence isolated from the Sargasso Sea
aatgaaaggaattattttagccggtggctctggtacgcgtttatatcctattactaagggggtatctaagcaattattgcctgtatacgataagcccatgatttactatcctatttcagtacttatgctt

SEQ ID NO: 253598 - DNA, 247 bp, Unknown
  Bacterial polypeptide expressing nucleotide sequence isolated from the Sargasso Sea
aatgaagggtataattttagcaggaggaagtggcacgcgactctatcctttaacaaaagttatatcaaagcagttattacctgtttatgataagccgatgatatattatcccttatcaacattaatgttatcgggtataaatgaagtattaattatttcgacacctacagatttacctttatatgagagattattaggaaatggaaatgaattaggactcaaaatatcttataaagtgcaacctagt

SEQ ID NO: 253599 - DNA, 535 bp, Unknown
  Bacterial polypeptide expressing nucleotide sequence isolated from the Sargasso Sea
atgaaaggaattattttagctggtgggtctggaacaaggctgtacccatctacaaaagcaattagtaagcaacttattcctatttacgataagccaatgatctattatcccttgtccatgctaatgcttgctgggataagagaagttttaattatttccactgaagaggatactccaaaatataaatcgttgctcaaaagtggaagatcgatcggcatgagactctcttacaaaattcaaccctcaccagatggacttgctcaggcatttattttaggtgaagattttataggaaacgataatgtttgcttaattcttggggataacattttttatggtgatagcattcctaaaaaacttcgtgaagcagttaccgatgtagatacttcaaataatgccactgtatttggttattatgtgaatgatcctgagcgatatggggtcgttgagtttgataataatggcaatgctgtctcactagaagaaaaacccactgctccaaagagcaactacgctgtatcaggcctttattttt

SEQ ID NO: 253600 - DNA, 315 bp, Unknown
  Bacterial polypeptide expressing nucleotide sequence isolated from the Sargasso Sea
catgaaaggaataatattggctggtggaagcggaacacgcttgtatccaattacctcagttatttctaagcagttactccctatttatgataaaccaatgatatactatccgttatcaacattaatgctttctgggattcaagatatcttgatcatttcaacaccagaggatacccctaggttcaatgatttgtttggtgatggtcgccaaatagggttaaatatatcctatatggttcaaccttctcctgatggtctagcacaggcatttatcctaggtgaagattttattggcgacgattcagttagtttaat

SEQ ID NO: 253601 - DNA, 247 bp, Unknown
  Bacterial polypeptide expressing nucleotide sequence isolated from the Sargasso Sea
catgaaaggaatcatcctcgccggaggctccggcacccgtctgcaccccatcacccttggcgtatccaagcagctcttgccgatctacgacaagccaatggcctactacccgatttcggtgctgatgctcgctggcatccgcgacatcctgttgatttccaccccgcaggacctgcctcagtacaagaacctgctgggcgacggcagccagttcggcgtcaacttcagctatgccgagcagccctca

SEQ ID NO: 253602 - DNA, 807 bp, Unknown
  Bacterial polypeptide expressing nucleotide sequence isolated from the Sargasso Sea
catgagtgtttcgcgcaagggaatcatcctggcggggggcagcggtacccgcctgcaccccatcacgcgggcagtcagcaagcagttgctccctgtctacgacaagcccatggtgtattacccactcaccaccttgatgctggccggcatccgggaggtgctggtgatcaccacgccccatgaccagccgagttttgagcgtttgctgggcgatggcagcgcctggggcatggagatccactacgccgtgcagcccagtcctgatggcttggcgcaggcctttctgatcggcgctgatttcctcgctggtgctccggccgctttggtgcttggggacaaccttttccacggccacgatctggtgctgcagctgcaggccagcaatcagcagcagcagggggccacggtgtttgcctacccggtgagtgatcccgagcgctacggcgttgtggaattcgccgatgacggccgggtgctcagtattgaggaaaagcccaagcagccgaaatcccgctacgccgtcacgggtctctacttctatgacgacaccgttgtggagcgagcgcggcaggtgaagccatcgccgcggggggagttggagatcactgatctcaatgccagctatctcaatgacggtcagctgcaggtggagttgatgggtcgtggcatggcctggctcgacaccggcacctacgactcgttgcaagaggccggggcttacatccgcaccctggagcaccgtcagggcctcaaggtggctttgccccgaggagtggccctggcgttgggctggatcagcagcgatca

SEQ ID NO: 253603 - DNA, 825 bp, Unknown
  Bacterial polypeptide expressing nucleotide sequence isolated from the Sargasso Sea
aatgggagcaaactacaaaggaataattttagcaggtggttcaggtactcgactttacccaattactcttggaacatctaaacaactccttccaatttatgacaaaccaatgattttttaccctttatcagtgcttatgcttgccggtataagagatatcttaattatctctactcccgatgatataaattcttataaaaatttattaggtaatggagaaagatatggagttaactttaattatgagatacaagaaaaacccgagggcttagctcaagcttttttaataggagaagaattcattggtaactcaaaagtatctcttattcttggagataatattttttacggcccaaattttagagaaaagcttttaaaagcaacaagtttagattcgggagcaactgtatttggctataaagttagtaatccaaaagattttggagtcattgattttaattcacaaggtcaagcacttagtattgaagaaaaaccaataatgccaaaatctgattttgcagttacaggtttatatttctatgataattcagtagttgattatgcaaagactatttcaccttcagaaagaggagagctagaaatatcagatataaataatttatatctttcaaaatctatgctgaatgtcgagatgttaggaagaggttttgcatggctagatacaggaacacattcgtcgttattagaggcatcttcttttgttcaaaccatcgaaaaaagacaaagattgaagatagcatgtctagaggagatagcttataagaataagtggatatcctcatctgagctatcagcctctgcaaa

SEQ ID NO: 253604 - DNA, 257 bp, Unknown
  Bacterial polypeptide expressing nucleotide sequence isolated from the Sargasso Sea
gatgcgaaaattaaaaggaataattttagctggaggaactggttcaagactatatccgttaacatatgggacatctaaacaattgcttccagtttatgataaacctatgatatattatccactatcaacattattatatgctggaataaaagatatcttaattatttcaacgccaaaggatttacctagatacagagatttgcttaaaaatggatctcatctaggtataagaattcaatatgcagaacaaccttctc

SEQ ID NO: 253605 - DNA, 520 bp, Unknown
  Bacterial polypeptide expressing nucleotide sequence isolated from the Sargasso Sea
catgaaaggaataatattagctggaggtagtggaacgcgcctatatccaatcacttcagttgtgtctaagcagttactacctatctatgataaaccaatgatctattatcctttgtcaacattaatgctttctggaattcaagatatattgattatttccacgccctatgacactccaagatttaatgaattatttaatgatgggtctcatttaggtttgaatatatcatacatggttcaaccatctcctgacggactggcacaggcattcttacttggagaaaattttattggagacgatccagtaagtctaattttaggtgataatatattttttggtcatggcttatctggcatgcttcaaaatagtgtaaaaactgttcaatcaaaaaatgatgcggttatttttggatatagtgtaaaagatccccagcgatatggtgtagttagttttgatgattctggtaaagttacagatatagtggaaaagccctctccaccaaaatcaaattatgccgta

SEQ ID NO: 253606 - DNA, 877 bp, Unknown
  Bacterial polypeptide expressing nucleotide sequence isolated from the Sargasso Sea
catgaaaggaatcctgcttgctggaggaagtggaacccggctttatcctttgaccctgggagtttccaaacaactgatgccggtttatgacaaaccaatgatttattatcctctttcggttctgatgttggcgggcattagagatatattgattattaccacaccagtacagcagaagaactttaaaaatctgctccacgatggaagtcagttcgggatcaagctcagttatgtggttcaagaaaaacctgaaggcatcgcccaggcatttatacttggagactcctttctccagaataaaccggttgcattggttttgggagataatcttttttttggaaacgatctgatcaaccttatttcacaagcccgtaaacgtcttgaattaacaggaggtggggagatcttttcttacagagtgcgggctcctgaaagatatggggtcgtcgaacaagatgaagatggaacggttatttctattgaagaaaagcctaaaaaaccaaaaagctccaatgcggtggttggattgtatttttatgactcaaaagtggttcaatacacaaaacaattaaaaccttctcagcgaggagagttggaaatcactgatctgaatcaactctatcttgataaaggaatgttgagagtttccaatatgggaagaggttatgcatggcttgatacaggaacccatcaggatttacacgatgctggaagttttgtcagatccattcaggaacgtcagggtcttcaaatcgcctgtcctgaagagattgcttttgaagcaggatggatcgatcaaaaattgcttttaaaacaagcagagaactttaggggaaacctctatggagaatatctttttggtctggtatcacaatga

SEQ ID NO: 253607 - DNA, 883 bp, Unknown
  Bacterial polypeptide expressing nucleotide sequence isolated from the Sargasso Sea
aatgagaaaaggaataatactagctggcggatctggcacacgtttgcacccgttaactaaggtggtaagtaagcaacttatgcctgtttacgacaagccgatgattttttatccgttaaccacgttaatgatgtcgggcatccgtgatgtactcattatcactacgccagaagaacagcagcgatttatcgaccttatcggtgatggctcggcgctaggaatgaatattcagtacgcggttcagccttcgccagatggcttggcacaggcattccttataggcgagcagtttattggtaacgatagttgttcactagttcttggtgataatatttattacggccacgacttaaaactgtctttgcagaatgcatataaacaagagcatggtgcaacggtgtttggttatcacgttaacgaccctgaacgctacggcgtggtagaatttgatgatgactggaacgcactttcaatagaagaaaagccagctgttcctaaatcaaactatgccgtaaccggtctttactactacgacaaccgcgtagtcgattttgctaaagaagttaagccatcaccccgtggtgaacttgaaattacagacttgaacaacttatatcttcaagatggctcacttaaagtagagctaatgggccgaggctctgcttggcttgatacgggcacactagactcactccttgatgcagcaaacttcgtggcggctatcgaaaaacgtcaaggcttgaaagtatgttgcccagaagaagtagcctatagaatggggtatatcaacgctgagcagcttgaaaagcttgcggcaccactaaagaagagtggttatggcgattacctgcttaaagtgattaacgatagagttaagatctag

SEQ ID NO: 253608 - DNA, 880 bp, Unknown
  Bacterial polypeptide expressing nucleotide sequence isolated from the Sargasso Sea
aatgaaaggaattattttagctggtgggtctggaacaaggctgtacccatctacaaaagcaattagtaagcaacttattcctatttacgataaacctatgatttattatcctttatccatgctaatgcttgccgggataagagaggttttaattatttctacgaaagaagatatatcaaaatatgaatcgctgctttcaaacggaaaatcaattggtatgaaattctcttacaagattcaaccttctccagatggacttgcgcaagcatttattttaggtgaagactttattggaaacgataatgtttgcttgattcttggggataacattttttatggcgatagcattcctaaaaaacttcgtgaagcagttaccaatgtagatacttcaaataacgccactgtatttggttattatgtgaatgatcctgagcgatatggtgtagttgagtttgataaaaatggtaatgctgtctccctagaagaaaaacccactgctccaaagagcaactatgctgtatcaggcctttatttttacccaaacgatgttattgaaatcgcaaaaaaacaaaaaccatcggatcgaggtgaacttgaaataacggatacaaataaatcatatttaacccagggaagattaaaagtggaaaaattaggacgtggatacgcctggctcgatacaggaacccatgattcattattagaagcttctcaatttgttcaaatattagagaaacgccaaggggttaaaatttcatgcattgaagaaatcgcatatcgaatgggatttatagataaagatggacttgttaagctcgctgaaaaaatgaaaaataattcttatggagattatttaattagacttgcagaaagtctttga

SEQ ID NO: 253609 - DNA, 1081 bp, Unknown
  Bacterial polypeptide expressing nucleotide sequence isolated from the Sargasso Sea
atgcgatcgacgctcgcaagctcgagcgcgagctcggctggaagccggccgagacgttcgaaacgggtcttgccaagacagttcaatggtatctggacaatcaggcgtggtctgacgaagtcgcttcgggcgagtatcggaagtgggttgagaccaactacgcgcagcgcgcgtaagggcacggcaatggcgcgcaaaggcattattctcgcgggcggatcgggcacgcgcctgtatccgattacgcatgtcgtctccaagcagttgctgccggtctacgacaaaccgatgatctactacccgctgtccacgctgatggtagcggggattcgcgacgtgctgatcatttccacgccgcaggacacgccgcgtttcgaggcgatgctcggcgacggcagccagtggggtatgaacattcagtacgcggttcagccttcgccggacggtctcgcgcaagcgttcatcatcggccgtgattttgttggcaacgatccgtcggcgctgattctcggcgacaacatcttctatgggcacgatctcgcgaagcaactggaacgcgcgaacgataaagatgaaggcgcgaccgtctttgcttatcacgtgcacgatccggagcggtatggcgtcgtcgaattcgacaagcagttccgtgcattgtcgatcgaggagaagccggccaagccgcgctcgaactatgccgttaccggcttgtacttctatgacaagcaggtttgcgatatcgcggcggacattaagccgtcgccgcgcggcgaacttgaaatcaccgacgtcaattcgcgttacctcgcgagcgccgcgctcaatgtcgagattatggggcgtggctatgcgtggctcgatacgggcacgcacgattcgctgatcgaagctgccacgttcattgcgacgctgcaaaagcgccagggtctggtggttgcgtgtccggaggagattgcttaccggcaggcatggatcgacggtgagcaactgcttgcgctggctaagccgctggcgaagaacgcgtacggcaagtatctgcaaaacattcttacggaccaagttgcatggccatccaagtaac

SEQ ID NO: 253610 - DNA, 895 bp, Unknown
  Bacterial polypeptide expressing nucleotide sequence isolated from the Sargasso Sea
gatgacacgcaagggcatcattctggccggcggctcaggcacgcggctctatccgatcacgcacgcggtctcgaagcaattgctgccggtgtacgacaagccgatgatctattacccgctgtcgacgctgatgatcgcgggcatccgggacgtgctgatcatctcgacaccgcaggacaccccgcgcttcgcgtcgatgctcggcgacggcagccagtgggggatgcatatcgagtatgcgacgcagccgtcgccggacgggctcgcgcaagcgttcgtcatcggccgtgacttcgtcggcaacgatccgtcggcgctcatcctcggcgacaacattttctacgggcacgatctcgcgaagcagctcgagcgcgcgaacgagcgcgatgcaggcgcgaccgtgttcgcctatcacgtgcacgaccccgagcgctacggcgtggtggagttcgaccggaacttccgcgcgctgtcgatcgaggagaagccagcgaaaccgcgttcgcagtatgcggtcacggggctgtacttctatgacaaccgcgtgtgcgacatcgcggcagacatcaggccgtccgcacgaggcgaactggaaatcacggacgtcaattcgcggtatctcgcggacggcacgttgaacgtcgagatcatggggcgcggctacgcgtggctcgataccggcacgcacgattccctgatcgaggccgcgacgttcatcgcgacgctgcagaagcgtcaggggctcgtggttgcgtgtcctgaagagatcgcgtatcgccgcaactggatcgacgcggaacaggtgctgaaactggcgcagccgctcgcgaagaatgcctacgggcagtacctccggaaccttctcacccatcaggtcgcatggcaatccacgtaa

SEQ ID NO: 253611 - DNA, 613 bp, Unknown
  Bacterial polypeptide expressing nucleotide sequence isolated from the Sargasso Sea
aatgaaaggaattattttagctggtgggtctggaacaaggctatacccatctacaatagcaattagtaaacaacttattcctatttacgataaacctatgatctattatcctttatccatgctaatgctagccgggataagagaggttttaattatttccacgaaagaagatatatcaaaatatgagtcattgctttcaaatggaaaatcaattggtatgaaattctcttacaagattcaaccttctccagatggccttgctcaggcatttattttaggtgaagattttattggaaacgataatgtttgcttaattcttggggataacattttttatggtgatagcattcctaaaaaacttcgcgaagcagttaccgatgtagatacttcaaataacgccactgtatttggttattatgtgaatgatcctgagcgatatggggtcgttgagtttgataataatggcaatgctgtctcactagaagaaaaacccactgctccaaagagcaactacgctgtatcaggcctttatttttacccaaatgatgttgttgaaatcgcaaaaaaacaaaaaccatcggatcgcggtgaacttgaaataacagatacaaat

SEQ ID NO: 253612 - DNA, 520 bp, Unknown
  Bacterial polypeptide expressing nucleotide sequence isolated from the Sargasso Sea
catgaaaggaataatattggctggcggaagcggaacacgattgtatcccattacctcagttatttctaagcagttactccctatttatgataaaccgatgatatactatccattatcgacattaatgctttctgggattaaagatatattgattatttcaacaccagaggatacccctagattcaatgatttatttggggatggtcaccaaatagggttaaatatatcctatatggttcaaccctctcctgatggactagcacaggcatttatcctaggcgaagactttattggtgaagattcagttagtctaattttaggtgataatattttttttggccacggtttatccaatatgctgctggatagtgtccaaactgttgaatcaaaaaatgatgctgttgtatttggatatagtgttaaagaccctcaaaggtatggagtggtcagtttcgatgattctggaaaaataacagaaatagtgaaaagccagattatcctaaatcaaattatgcagttg

SEQ ID NO: 253613 - DNA, 880 bp, Unknown
  Bacterial polypeptide expressing nucleotide sequence isolated from the Sargasso Sea
atgaaaggaattattttagctggtggatctggaacaaggctgtatccatctacaaaagcaataagtaagcagctcattcctatttacgataagccaatgatctattatcctttatccatgctaatgcttgctgggataagagaagttttaattatttccacagaagaagataccccaaaatatgaatcgttgctctcaaacggaaaatcgattggtatgaaattttcttacaagattcaaccttctccagatgggcttgctcaggcatttattttaggtgaagaatttattggaaacgataatgtttgcttgattcttggggataacattttttatggagatagcattcctaaaaaacttcgcgaagcagttactgatgtagatacttcaaataatgcaactgtatttggttattatgtgaatgatcctgagcgttatggggtcgttgagtttgataataatggcaatgctgtctcactagaagaaaagcccactgctccaaagagcaactacgctgtatcaggtctttatttttacccgaatgatgttattgaaatcgcaaaaaaacaaaaaccatcagatcgtagtgaacttgaaataacggatacaaataaatcgtatttaagccagggaagattaaaagtggaaaaattaggacgtggatacgcctggctcgatacaggaacccatgattcattattagaggcctctcaatttgttcaaatattagagaagcgccaaggggttaaaatttcatgcattgaagaaatcgcatatcgaatgggatttatagataaagatggactcgttaagctcgctgaaaaaatgaaaaataattcttatggagattatttaattagacttgcagaaagtctttgat

SEQ ID NO: 253614 - DNA, 385 bp, Unknown
  Bacterial polypeptide expressing nucleotide sequence isolated from the Sargasso Sea
aatgagtaacagaaaagggataatactagcaggcgggtcgggcactagacttcacccactgactaaagtagtgagtaagcagcttatgcctgtttacgataaacctatgattttttatcctttaaccacgttaatgatggcgggtattaaggatatacttatcatcacaactcccgctgaacagcaaagatttattgagttgattggtgatggcagcgacctagggataaacgttgaatacgccgttcagccatctcctgatggtttggcccaagcgtttatcattggtgaagactttatcggcaacgacagttgtacattggtgcttggtgataatatctattatggacatgatctgaaactgtcttgcaaaacgcctacaagc

SEQ ID NO: 253615 - DNA, 892 bp, Unknown
  Bacterial polypeptide expressing nucleotide sequence isolated from the Sargasso Sea
atgagtgcttcgcggaagggaatcatcctggcggggggcagcggtacccgcctgcaccccatcacgcgggcagtcagcaagcagttgctgcctgtctacgacaagcccatggtgtattacccactcaccaccttgatgctggctggcatccgggaggtgctagtgatcaccacgccccatgaccagccgtgttttgagcgtttgctgggtgatggcagcggctggggcatggagatccaatacgccgttcagcccagtcctgatggcttggcgcaggcctttttgatcggtgctgatttcctcgctggtgctccggccgctttggtgctcggggacaacctctttcacggccacgatctggtgctgcagctgcaggccagcaaccagcagcagcagggggccacggtgtttgcctatccagtcagtgatcctgagcgttacggcgttgtggaattcgctgatgacggccgggtgctcagcattgaggaaaagcccaagcagccgaaatcccgctacgccgtcacgggtctctacttctatgacgacaccgttgtggagcgggcgcggcaggtgaagccatcgccgcggggggagttggagatcactgatctcaatgccagctatctcaatgacggtcagctgcacgtggagttgatgggtcgtggcatggcctggctcgacaccggcacctacgactccttgcaggaggccggggcttacatccgcaccctggagcaccgtcagggcctcaaggtggcttgccctgaagaggtggcctggcgtttgggctggatcagcagcgatcagctcgctgccttggctgggccgctgcgcaaaagcggttacggcaactatttgctgcagctgctggaggtgcccattgcaggttgaa

SEQ ID NO: 253616 - DNA, 554 bp, Unknown
  Bacterial polypeptide expressing nucleotide sequence isolated from the Sargasso Sea
attgaaaggtatagtattagcaggaggttcaggaactaggctgcatccaattacattaggtgtttcaaaacaattgataccaatttatgacaagcctatgatttattatccaatttcagtcctaatgcttgccggtataaaagatatactaatcatctcaactaaagatgatatcggaagttatgagaaactcctcggaaacgggaaatcattaggtgtaaggtttacatacgaggtccaagaatctcccgaaggtttgggccaagcttttataattggagagaactttattggagatgataaagttgctctaattttgggagataatatattttttggacaaggtttttccgatatcttaaaaaagggaaaagataattctggagctacaatattttcatatcaggtatcagatcctgaaagatttggagttgttgagcttgataaaaatagctcaccaatttccatcgaagaaaaaccatgtaatccaaaatcaaatctggcagtcacgggtctttatttttatgataatgatgtcataagaatgcaaaaga

SEQ ID NO: 253617 - DNA, 838 bp, Unknown
  Bacterial polypeptide expressing nucleotide sequence isolated from the Sargasso Sea
atgaagggaatagtactagctggaggtagcggaacaagactttatccaataactaaagttgtctctaaacagttattacctatctatgataaaccaatgatttattatcctatttccacattgatgttagctggaattaaagatatattaattatttctacgcctcaggacactcctagatttaaacaactgatgggaaatggtgaaaaattaggattaaatatttcctacaggatacagtcaacaccagatggtcttgctcaagctttcattataggtgaagaatttattgacgatgatccagtatgtcttattcttggtgataatattttctatggacatggcttatcaaggttactactaaaaggaaaaaaatccataaaagaaaatgatagagctttaattttcggatatagtgttaaagatcctgaacgctatggtgttgtctcatttgacaatttaggtaaagttacacaaatcgtagaaaaaccaaaaatccctgcttcaaattatgcagtggttggtttatatttttatccaaatgatgtcattgatatagcaaaaaatttaaaaccttcagatagaggagaattagaaataacctctgtaaatcaagaatatttggaacaagataggatgaatgttgaaattatgggcagaggctatgcctggctggatacaggaacccaagaagcaatgaataatgcatcgaactttattagatctgtggaagatagacaaagcttcaaaatatcttgtttagaagagattgcttttagaaagggttttatcgatagagagcaattagaaaaactatcagaagattttcctaatgatt

SEQ ID NO: 253618 - DNA, 748 bp, Unknown
  Bacterial polypeptide expressing nucleotide sequence isolated from the Sargasso Sea
catgacgacaaagcgcaaaggcatcattctggctggcggctccggtactcgtttgcaccccgccacgctggccatcagcaagcagctgctgccgatctacgacaagcccatgatctactatccgctgagcacgctgatgctggcgggcatccgggacattctgatcatcagcacgccgcaggacacgccgcgcttcgagcagttgctgggcgatggcagccagtggggtctgaaccttcaatatgaggtgcagcccagcccggatggcctggcccaggccttcctgattggcgagaaattcctcgacggcgctcccagtgctctggtgctgggggacaacatcttctacggtcatgacttccagtcactgctcaaaaaggcgaacactcggaaggaaggcgccacggtgtttgcctaccatgtgcgagattccgagcgctatggtgtggccgagttcgatgccgacggcaaggtgctgtcgcttgaagaaaagcccaagcagcccaagagcaactatgcggtcaccggcctgtacttctatgacgaacaggtcgtggagctggccaagcaggtcaagccttcggcgcgcggcgagctggagatcacggatctcaatgggctgtatatgcagcaagggaagctcaatgtcgagctgatgggccgaggttatgcctggctggataccggcacccatgacagcctgctcgaagcgggggcattcatttgcccacttgcagcagcgccaggg

SEQ ID NO: 253619 - DNA, 583 bp, Unknown
  Bacterial polypeptide expressing nucleotide sequence isolated from the Sargasso Sea
atggctacgcgtaaaggtattattctggccgggggttccggcactcgtctctaccctgtgaccatggcagtgagtaagcagctgctgcccatttatgacaaacccatgatttactatccgctgtcaacgctgatgctggcagggatcaaagatatcctgattatcagcaccccacaggatacgccgcgttttgaacagctgctgggcgatggcagccagtggggattaaacctgcagtataaagtacagccaagcccggatggcctggcacaggcatttatcattggtgaagagtttattggcaatgatagctgtgcgctggtgttaggtgacaacattttctacggccatgacctgccgaaacagctggaagccgcagtaaacaaaggtgacggtgcaaccgtattcgcttatcacgtcaacgatcctgaacgctatggcgtggtggaatttgataaaaacggtaccgcgataagcctggaagagaaaccactggagccaaagagcaactatgcggtgaccgggctctatttctacgataacgacgttgtggaaatggcgaagaacctgaagccttccgcgc

SEQ ID NO: 253620 - DNA, 721 bp, Unknown
  Bacterial polypeptide expressing nucleotide sequence isolated from the Sargasso Sea
ccaattacccgcggcgtttctaaacagttgttacctgtttatgataaacctatgatttattatccgatatccacgctgatgctcgccggcattaaagatatcctgattattaccacgcctgaagacagagacagttttcagcgtctgctgggtgatggttctgattttggcattaaccttagttatgcagtacaggccagccctgatggtttagcacaggcatttttaattggtgaagattttattggcgacagtccggttagtctggtacttggcgataatattttctatggacagtccttttctaagacgctgaaaaatgcagcgtcccgtaccaatggcgctacagtttttggttacaacgtaaaagaccctgaacgttttggcgtcgtagagtttgatgataattttaaggcagtttctattgaagaaaaaccagccaaacctaaatcaaactgggctgttaccggtttgtatttctatgataacaaagtcattgattttgctaaaaaagtaaaaccgtcagaacgtggtgagttagaaattacctccataaaccagatgtatctggaagacaacagtttaacagttgaaatattgggtcgtggttttgcatggctggatacaggtactcatgaaagtttgcatgaagcatcgtcttttgttcaaaccatcgaaaatgtccaggggctgaaagtatcttgtctggaagaaatagcct

SEQ ID NO: 253621 - DNA, 504 bp, Unknown
  Bacterial polypeptide expressing nucleotide sequence isolated from the Sargasso Sea
tatgaaaggaattattctcgctggtggctctggcactcgtctctatcctatcaccaagggcgtatctaagcagcttttaccggtttatgataagccaatgatttattaccctatttcagtgttaatgcttgctggcattaaagatattttgattattactactccagaagatcaatcgtcattccaacgtcttcttggagatggttctgaatttggtataaatctacactacgctattcaaagtagcccagatgggcttgcacaagcattcataattggtgaagagtttattggggatgacagtgtatgtttagcgcttggagataatattttctggggacaaggcttttcaccaatacttaaaaaagcagctttgagacctactggtgctacagtgttcggttaccaagtaaaagatcctgagcgttttggtgttgttgactttgacgatgaaatgaaggctatatcaatcgaagagaaacccactagacctaaatctaactt

SEQ ID NO: 253622 - DNA, 877 bp, Unknown
  Bacterial polypeptide expressing nucleotide sequence isolated from the Sargasso Sea
atgaagggtataatattagcgggtgggagtggtacgagactctatcctttaacaaaggtactctcaaaacagctattaccagtatatgacaagcctatgatttattaccccttatcaactttaatgttatcaggtataaatgaaatattgattatttccacaccaacagatttgccattatatgaaagactattaggtaatggaaatgaattaggtcttgatatatcctacaaaatacaacctagcccagatggtctggctcaggcttttataataggtgaagattttattggtgaggacgatgtggctttagtgttaggtgacaatatattctatggaactggtttttcaggcttattaaagtcatctgtgaaggttgttgataaagaaaaaaaagcagttgtttttggttacgaggtgaaagatccggagaggtatggtgttgtagagtttaataacgataatatggaagtagttagcttagaagagaaaccaacaaatcctaaatccaattatgcagtggtaggattatatttttatccaaatgatgtcatcagagtagcaaaaaatgttaagccttctgatagaggggaattagaaataacatctgtaaacaattcttttcttgaagtaaataaattaaaagttgaactcttggctagaggttttgcgtggctagatacgggcacaattgatgcaataaataatgcttcaaattttataaggactattgaagatcggcaaggtttgaaagtctcatgcttggaagaaatagcttacctaaatggtttcatcgataaaaagagtattgagcatttaatcaaaaaattacctgatgattatgcaaattatttatgtagattaatagataattaat

SEQ ID NO: 253623 - DNA, 577 bp, Unknown
  Bacterial polypeptide expressing nucleotide sequence isolated from the Sargasso Sea
atgaagggaattattctcgcaggcggctctggcactaggttatatccactcaccatttcagtttcaaagcaaatgctgccaatatatgacaagccaatgatctattaccctctcagtatactaatgctagcgggcattcgtgaaatactaataattacaacgcctgaagaccaatcggcttttcggactttgttaggggatggccaaaaatggggattatctctgagctatgcagttcaaccaaaaccagaaggtttggctcaagcgttcataattgggaaaaactttattggtagcgacaactgctgtttaattttaggtgataatattttttatggtcatggcttatctgaaattttgattgagtcttcaaccctaaaggatggcgcaactgtcttcggatattatgttaacgatccagagagatacggtgttgtggcttttgatgaaagcggccttgcaaaaagcatagtcgaaaaaccttcaaaaccagagtcaaactgggcggtgacagggctttatttttacgataatgaagtcattagtatagcagagagcattaaaccgtctgacaggg

SEQ ID NO: 253624 - DNA, 865 bp, Unknown
  Bacterial polypeptide expressing nucleotide sequence isolated from the Sargasso Sea
atgaagggtattatattagcaggtggctctgggacaaggttacatcctataactaaaggtgtatcaaaacagttgctacctatctatgacaagccgatgatttattatccactttctgtgttaatgcttgctggaattaagcaggtgttaattattacaactccagaagacaaagatagtttcatacgtttacttggagatggcagtcagtttggcattgagttgtcttatgccgaacaaccgagtccagatgggttagcgcaggctttcattataggtgctgactttattggtactgataatgtttgcttggcgttaggtgataatattttctttgggcaggcatttggcaagcaattaaagcatgcagttcagaatctttctggtgccactgtcttcggttatcaggttatggatccagaacgctttggcgttgttgagtttgatcaaaattttaaagcgatttcaatagaagagaaacccacatcaccccgctcaaattgggctgtcactggtttatatttttatgaaaattctgtgatcgaaattgcaaaaaatgttaagccatctgagcgtggtgagttagagattactacagttaatcaaaaatatcttgaagatgggctcctgaatgtcgaacagcttggcagggggtttgcgtggttagataccggcactcatgattcgttgcttgaggcatcgcagtttgtgcagactgtagaaaaaagacaaggttttaaaattgcttgtcttgaggaaatcgcgttgtcacaaggctggcttactaaagaacaggtgcaagccattggttcaaagctatctaagacgggttacgggcaatatcttctcactatatcgaaataag

SEQ ID NO: 253625 - DNA, 886 bp, Unknown
  Bacterial polypeptide expressing nucleotide sequence isolated from the Sargasso Sea
catgaagcgcaagggcattattctcgcgggagggtcgggtactcgtctctatccggccacgcaggcagtcagtaagcaactgctgccgatctatgacaagccgatgatctattatccgttgagcacgctgatgctggcggggattcaggatattctgatcatttcgacgccacaggatacaccacgcttcgaacagctgctgggcgacgggtcgcagtgggggattcgcctgcagtacaaagtgcaaccctgtccggacggacttgcacaggcattcctgttgggtgagtccttcatcaacggtgaccattcggctctgattcttggcgataacattttttatggccatgaccttggtggcttgttgaagggggcgaccgacaagacctcaggtgctcaggtcttcgcttatcatgttcaggatccggaacggtatggcgttgtcgagttcgacgcgacgggcaaggcggtcagcatcgaagaaaagccaaaagtccctaagtcgcattacgcggtgactggactctatttctacgatgagcaggtggtcgatcttgcaaaatcgttgaaaccgtctccacgaggcgaactggagatcaccgatctcaacgccctgtatctcaaggatggtttgctgaacgtgcagaccatggggcgcgggtttgcatggctggatactggcacgcacgattcgatgctcgaggcctcgcacttcattgcaacgatggagcatcggcaaggtttgaagatcgcgtgcatcgaagagattgcatatcgattcggttatatcgacgacgagcaacttgaacggctcgcgcaaccactcagcaaaaacggctatggccgttacctgcagaacatcctgaaagaaggaaaagtccggtga

SEQ ID NO: 253626 - DNA, 865 bp, Unknown
  Bacterial polypeptide expressing nucleotide sequence isolated from the Sargasso Sea
atgaaaggaattattttagctggcggttctggtacacggttgtatccactcacccgaggtgtgtcaaaacaactgttgccaatttatgataaaccaatgatttactatcctttatctacgctaatgcttgccggaattcgagatatattggttattaccactcctgaagataacgacagcttcaaacgattattaggtaatgggtcagattttggcattaacttgagttatgccgttcaaccctctcccgatggtttagctcaagcttttatcataggtgaagaatttatcggtgactcacatgtgtgtttggtgcttggtgataatattttttatggtcaatctttttcaaagacacttaaaaatgctgcgaatcgtcaaactggggcaactgttttcggctatcaagtaaaggatcctgagcgttttggggttgtcgaattcgatgctgagatgaaggcggtttctattgaggaaaaaccactccgacctaaatcatcttatgcagtgacaggactctatttttacgacaataaagtggtggaactagcgaaacaggttaagccttcacatcgcggtgaacttgagatcactacgcttaatgaaatgtatctcaaggctggtgagttaaatgtcgagcttcttggtcgaggctttgcttggttagacactggaacacacgagagtctgcatgaagcatcctcttttgtgcaaaccattgagcacgttcagggcttaaaagtggcttgtttagaagaaattgcctaccgcaatggttggttaactagtgaagaactccgaaacatcgcaaaaccaatgctgaaaaatgaatacggacaatatttaattcgcttggtaaggtaac

SEQ ID NO: 253627 - DNA, 861 bp, Unknown
  Bacterial polypeptide expressing nucleotide sequence isolated from the Sargasso Sea
tcattctagccggtggctcaggcacccgtctctatccggtgaccatggcggtgagcaagcagctgctacccatctatgacaagccgatgatctactacccgctcagcaccctgatgctggccggtattcgggatattttgatcatcagcacgccgcaagataccccccgttttgagcaactgctgggtgatggcaaccagtggggcctgaacttgcaatacaaggtgcagccaagtccggatgggttggcacaagcctttattctgggtgaagagttcatcggttcagacccctgtgcgctggtgctgggcgataacatcttctacggtcacgacctgcagaaacagcttgaagcggcggcagccaaagagagtggcgctaccgtctttgcctaccatgtgcatgaccctgagcgttatggggtggtggaatttgataaagagggtaccgcaatctctctggaagagaagccgttggagcccaagagcaactatgcggtgacaggtctttatttctatgacaacagcgtggtggagatcgccaagagcctgaagccatcgccccgtggtgagctggaaatcaccgatgtgaaccgtatctacctggagcaaggcaatctgtcggtggcgatgatgggccgaggttatgcctggctggataccggcacccatgaaagcctgatcgaagcgagcaactttattcagaccatcgagacccgtcaggggttaaaagtagcttgcccggaagagattgcctatcgccagaagtttattactgccgaccaagtccgtgaacttgctgcgccactggcaaaaaatgcgtatggccaatatttgctaagaatggttgtcaaagcctgat

SEQ ID NO: 253628 - DNA, 871 bp, Unknown
  Bacterial polypeptide expressing nucleotide sequence isolated from the Sargasso Sea
gatgaaaggaattattttagctggtggttcaggtacgcgtttatatccattaactcgtggtgtatctaaacaactattaccaatttatgataaacctatgatttactatcctttatccacgcttatgttagctgggattcgggatatattgattattactaccccagaagataacgatagctttaaacgccttttgggtgatggttcagattttgggatccgtttgcaatatgcagtacaacccagtcccgatggtttagcgcaggcttttatcatcggtgaagaatttatcggcgattctaatgtttgcttagtgcttggtgacaatattttttatggtcaatcattttccaagacacttaaaaatattgcaggtcgtccgtcaggcgctactgtttttgggtatcaagtgaaagatcccgaacgttttggtgttgttgaattcgatgctgatatgaaggctatttctattgaagaaaagccaacaaagcctaagtctaattacgcagtcacgggcctttatttttacgataacaaggtggttgaactggcaaaagaggttaaaccgtcacatcgcggcgagcttgagatcaccacccttaatgacatgtacttaaatgcgggtgagttaaatgttgagctactcgggcgtggttttgcatggttagacaccggaacacacgagagcctgcatgaagcatcctcttttgtgcaaactattgagcatgttcaagggttaaaggtagcgtgtttagaagaaatcgcctatcgcaatggctggttaactgttgacgaactcaaagaactcgcgaaacccatgctgaagaatgactatgggctgtatttggcacatttggctgataagaaatga

SEQ ID NO: 253629 - DNA, 592 bp, Unknown
  Bacterial polypeptide expressing nucleotide sequence isolated from the Sargasso Sea
atgaataaagatatagaaaaatatacaatagaccataattcttctattttcaaaggattagaaactatagataaaaataataagaaatgtttagtagttttaaatgaagaaaaaattttaggtacagttaccgatggtgatattagaagaactcttttaaagggttctactattgactcaaacataaaagacgcaatgaataaaaattttctgttcattttagatagtgaagatgaagaaagtaaaaaaaataagatagatcaaattttagaaaaatcttcagacaatatattaccagttataaataaagaaaataaaattgttgatttaattttggattatgaaaatagaaataatcttaataattttgaagctttaatattagctggtggcgaagggaagagacttaacccaataacactcaaaacaccaaaacctcttattcctatagggggagagcccataatttttagaattattaagcagattgtaaactctggaatcaaagatattaatatatctgttcattatcaatatgagaaaattattaacgaggttggagatggttcccaaattttctgcaaaaaataaa

SEQ ID NO: 253630 - DNA, 916 bp, Unknown
  Bacterial polypeptide expressing nucleotide sequence isolated from the Sargasso Sea
tttggaggccgttatcgtcttatcgacgttccaatctcaaattccctcaactcgcgcatcaatcagatcttcgtcatttcccagtactttgcctctgaacttcaccaacatattctttccacataccatctggacatgttcagaaccggtggactcgaactccttacgcctcaagaaaccccaaaggggcggtcttggtttaaaggcacagctgacgcgatccgtcaatcactcgactatattacacaatgctccgctgagtattttatgattttatctggtgatcaactctataatatggatcttttagaaatgctcgcttttgctaaacgcaaagacgctgatctaacgatcgcttctattccagtccatgtgcgggaagcaaaacggatgggactcctgaaaattaattccacatcatcgataaccgaattcgttgaaaagcccactgaaaattcagtccttgcaaactttcagctcgacgaggccttcttaaaaaaatcgggacgcgatcacacccaaaaccagtacctggcttcgatgggaatctatattttcaagcgcacagctctcattaacatcctcaaacaagaaggagatgactttgggaaggacctgatccccaaatttatcgaaaaagccaagtgtagcgcatttatttttgatggttattgggaagacattggaactgttgcgtctttctatcaggcaaacttgatcctaacacaaggagaagggttgaatacttacgaagaggaaaatcggatctattcagctccccagcatattcccagtgctctcatctgtggaactcgaattcgggattccatcatcggccaaggaggggtgatcgaagccgacgaaatcgaacacagcgtgattggagtccgagccatcattaaaaagggaacaaaga

SEQ ID NO: 253631 - DNA, 196 bp, Unknown
  Bacterial polypeptide expressing nucleotide sequence isolated from the Sargasso Sea
atgaaaagaaccgtacattgcgtaatcatgggaggtggtcggggaacgcgcctgtatccgttgaccaaattacggtgcaagccagccgttccgctggcgggcaaatatcgcttggtggacatccccataagcaactgcatcaattccggctacaaccgtatttatctgctcagccaagttcaatacggcgtcttgc

SEQ ID NO: 253632 - DNA, 193 bp, Unknown
  Bacterial polypeptide expressing nucleotide sequence isolated from the Sargasso Sea
gccagaagtgtgggtggggcgctcatgccgcctgcgccgctgctttttcgatcgtgcctgcgtgattcctgagggcatggtgatcggcgaacacgcggaagaggatgcgcgtcggttctaccgttcagaggaaggcatcgtgctggttacgcgtgatatgttgcggaagttggagcataaacaggagcgataa

SEQ ID NO: 253633 - DNA, 276 bp, Unknown
  Bacterial polypeptide expressing nucleotide sequence isolated from the Sargasso Sea
tatgtccggggtattaaccatgattctggccggtggcgaaggtacgcgtttagcacctttaaccggtgtcagggcaaaaccagctgtaccttttggtggaaattatcgcatcatcgattttgtgatgaataactttgttaactcagatttgctgcaaatttttgttatcactcaatttaaatcgcactcactaatgaaacacctaagccgtgcctggcgtgttaccggcttaactaaccgctttatcgaccctataccagcacaaatgcaaaccgg

SEQ ID NO: 253634 - DNA, 1234 bp, Unknown
  Bacterial polypeptide expressing nucleotide sequence isolated from the Sargasso Sea
aatgaatgctcctttggatgacataaccgtagttgaaatagataactggatggcagcaccaagtgcgggagctgtgctagcagatctgggtgcaaaagtaattaaagtagaacctttaacgggcgatcccatgagggacatgagcagacctataaaaggcgagaatttttctgatgagataaaaaactatgattttcaatttgatgtggacaatcgaggtaaaaactctatagccattgcgatcgacactgaagaaggagcagcactcgtccgacagctagtttcaaatgctcaagtctttatgtgtaatcttttgatcgcaagacaagaaaagtacggtctggacccaagcagcttattcaaagagaactcttcgttagtccatgccacattaactggctatggtacttctggtcccgatgctatgcgtccgggttatgatgtaaccgctttttttggcagatctggtttatacgatgctcagcgtgagggcgaagacggcattgttcctatggcccgcccagctcagggagaccacaccacagggctcgccttcgtagcatcgattttagcagctttaagacaagccgaaaaaacccaaacaggtcagatcgttgaaacctctttgtatgaaaccgcagtctggacacaagcatccgactatgcggtcaccgccgttgacaaagcacctgtcaggaaacgtgaccgagagcacatgttggctattagcgccaaccgttttccttgtggagatggaaagtggatagtcttcaatatgatgccggacgcagcttattggccaaaaatatgttctgctataaaccttgagcatctgattgaagacgaacgatttattgattcgagtgctagatacaaattaatgccagagctcattgccctattcgatgaggctctttctcgaaaatctagagacgaatggggcgaaatttttgatcaagcgggtcttatatgggggccagtattatccctggatgaagtgcctcaagacccccacgcactggaactcggtatgtttccagaaatcgagcatccctcaatgggcaattacacgacggttaatattccaatgagattcgccacatcggacgtcagacctagaggaccggctccccaactaggagagcatacagactccgtcctaaaatctttaggcttcgacaaaacacaactagattctttgaaaaaaaatggaattgttctaagctcccagtaa

SEQ ID NO: 253635 - DNA, 640 bp, Unknown
  Bacterial polypeptide expressing nucleotide sequence isolated from the Sargasso Sea
atgttcagcggtatcgttcaaggaacccggaaaatcattgctgttgatgagaactcaggcatccgcaggctgaaaatcgatttgaccggactgaaagaaaatctccagaacggagcaagtgtatcagtcaacggcgtctgtcttaccgttgtagcaatcgagaaggagcatgtgcgttttgatgtgatccgggaaaccttgaatcgttccaatctcgatgtcctcaaaaccggagacccagtcaacatcgaacgatctctaaaacttgaagacgagattggggggcatcaggtttccggacatgtcgataccaccggtaaaatcagtgaaatcctgaagtctgagaacaatcttgacctgaaaatttcctgcgcctcggaatggacccgtttcctcgttccaaagggatggattgccctggatggaatcagccttaccgtggttgatgtaggagaagattggttcacggtttccctgatcccggaaaccttgaaacgcaccatcattggcaataaacacgaaggggacccggttaatctggaatttgaccaaaacaccaaaatcatcgtcaaaactctggattcaatgcttccggaaattgaaaaaagactccggaaatcaatgattcaggatctttgaa

SEQ ID NO: 253636 - DNA, 100 bp, Unknown
  Bacterial polypeptide expressing nucleotide sequence isolated from the Sargasso Sea
aatgttggaaagaaaaggaataattttagcaggaggaagaggttctagacttcaccctataactttaggggtctgtaaacagcttcttccagtttatgac

SEQ ID NO: 253637 - DNA, 1765 bp, Unknown
  Bacterial polypeptide expressing nucleotide sequence isolated from the Sargasso Sea
aatggaagttggtgataatggcattattaaatttgaaagtgctgtaacaacagaagagaaattagagctaaagaatgtgaaagtaactacttgtgcagaaagttcagtttggagcttaggagcagagaatgcaacattcaatgagtcaaacagagatctaactatagagaatgcaaaactaaagatctttaacttgcctgtattttgggtaggagaagtttctttaaatgaaaatgatagttttagtgttcctaatctaggtataactaactcaagcctagatataagctataaattcaaaaatacgacagaaaatagtctttttaaggtagaaccaatttattcagattcttctctaggattatctttaagttatgaatatgacgacgataagaataatttagaatttgatagcttaactatgggagatgatgatagttcatgggcatataatcttgatgcacaaattaactttaatgatttcatatctttggatgtggattattctgattttagtggtaattcattaatacaaaattatggttacaggtatcttgatttaaaaagacgaagtttagatctaaaacaatctcttggcctttctatgatttatgaaaatagaaattttttattttcttcagatagttttaaaaatataggctccttaaggccagtatcacattcaaaagatttctttttatatgaaaggttctacttaatatatggttgggacttagaaataagctcagaatatgcaaaatttaaaagtagcatcccttctagtcttaacatgccctatcaaatatttaatgaagtagatcgaacagtaagaaatataacggtaagtaaatcattctctggtaatcaatttgatcatgagtatgaatttcttggctcaagaagagaatatgatattaatgattcagatgagacgcttaatataaatgacttttcttttagacagtctttttcattgcttgaagataggagtttaaaaattggctatatttggtctaccttttcagatcagcatgaattgcctttattagattcttaccctattaacccatctcctgaatctaatatctcgttaaacccatgggtaggaaaagatcgtgatgcaaatatgagaaaggtatttatatataaaaaaggcatgaataaacactttaaatattcgatagctacaaatttatatgaaaaatataattacgaccttgaaaatatgattttcaaaaagttttttaataagaaacctatatttttctcgctatctacaaataacaaaaattttaatttcttttcgatgggcaattatagctatgaaaagaaaaaatttatgggtttaatgggtggttttagatatatggatgaaaaaacaaaattctctatagcaaaaaataaaatagttccatcaagctaccctttaaaaagccttgataattatgtagttaagtttaaaagggattttaattcttttaccattttctccagggctcaatatgctaaagaagataaaagcttaaatgaaaatatcttaggggttgaatgggcatatgattgtctaaagctgagagtaagttttgaaagagctaaattctttccatttcttgattctgactatactactgtgccatatgcagaacatatatatttgactaatccaaaagtaaaaaataaccttagttttgaatttgaacttattggactatcaaatctcttaactccaatagataatattattgaatatggtttatttaattag

SEQ ID NO: 253638 - DNA, 355 bp, Unknown
  Bacterial polypeptide expressing nucleotide sequence isolated from the Sargasso Sea
atgagtgtgagtaatgtattggctttggtgcttggcggaggtcgtgggacgcggctttatcctctgacacgagaccgttcaaagcctgcggttcctcttgctggtaaatatcgcattatcgacgtacctctatcgaactgtatcaatagtggggtgcaacgaatctatgtaatgacccaatttaattcagtgagcctccataggcatattcgtcgtacatacagatttgacgctttcagtggtggctatgtcgaaatattggctgcacagcaaaccaatgaagctatggcatggtatcaagggacggctgatgctgttcggcagcacatcaagtgcttcaagattctgatataaa

SEQ ID NO: 253639 - DNA, 469 bp, Unknown
  Bacterial polypeptide expressing nucleotide sequence isolated from the Sargasso Sea
aagaggccggctattgagagatgtggaaccatcaggagttattgggaagcgaatatggatttggttggtattgagccacagttcaatctctacaaccagcagtggcccgtcctgacttacaatcctcctttccctcctgcaaagtttgtccatttcagtgatctcaggacgggtcatgcgataaactccatgatctctccaggcgccatcatcagcggtgccatggtggaaaaatcagtcgtgggttacaacacccgtgttcacagtttttcccatgtcaatgaatcggtggtgatgaacaatgtggtcctcggaagaggatgcaagcttcatcgggtgatcatcgacaaacatgtggtgattcaacctggaaccgtcatcggacacgacttcgaagaagtcgccaatcgtttcgaaaccaccgaagacggtatcgtcgttattccaaaaggggctgagattggctgaa

SEQ ID NO: 253640 - DNA, 514 bp, Unknown
  Bacterial polypeptide expressing nucleotide sequence isolated from the Sargasso Sea
gatgagtgtgagtaatgtattggctttggtgcttggcggaggccgtgggacgcggctttaccctctgacacgagatcgttcaaagccagcggttccacttgctggaaagtatcgcatcatcgatgtgccactatcgaactgtattaatagtggggtgcaacgaatttatgtgatgactcaatttaattcagtgagtctgcacaggcatatccgtcgtacatacagattcgacgccttcagtggtgggtatgtcgaaatattggccgcacagcaaaccaatgaagcaatggcgtggtatcaagggacggccgacgcagttcggcagcacatcaagttgcttcaggattctgatattaaacaggtattagtactttctggtgaccaattgtatcggatgaattatgccgatcttttagccacacatgaggcgaataacgcggacgtaacaattgctggaattcctgtcggcgatgacgtttcatcatcatttggaattatgcgatttgattcaaca

SEQ ID NO: 253641 - DNA, 511 bp, Unknown
  Bacterial polypeptide expressing nucleotide sequence isolated from the Sargasso Sea
tatcggtaccatcaaggcatttttcgacgctaacctcgcgtgcaacgaccccgagaaggccaagttcagcttctaccagactggtgcccccatctacacccagtctcgcttcctcccccccagcaagcttctcgatgccgaggtctccaagtgcaccatcggcgacggctgcttcatcaagaagagcaagctcgccaacgcgatgatcggtctccgcaccaacatccaggaggactgcgtcatcgaggacgccatgatcatgggtgctgattactacgaggagacccacgagtgtgaggacctccccggctgcacccccattggcatcggcgccggcaccaccatcaagagggccatcatcgacaagaacgcccgcatcggcatggactgcaagatcatcaacaaggacaacgtgcaggaggcgaaccacgaggacaagggctacatcattaaggatgggattgttgtcatctgcaaggatgccatcatccccaacggcaccgtgatctaa

SEQ ID NO: 253642 - DNA, 809 bp, Unknown
  Bacterial polypeptide expressing nucleotide sequence isolated from the Sargasso Sea
tgatatggagacggcggccggtcaatttggtgtcatggaggttgatgaaagcgggcgcatcattgggttcgaagagaagccagcaaacccgaaaactattcccggtcagaacgacaaggctttggcgagcatggggatatatgtggtctcgcaggattacctcgcggcgcgcttgcgcgaggatgccaacctacaaggctcaagccacgatttcggccgcgatatcattcctaaagggatacagcggggagatcatttccaggctcatgaatttcgtaatccgacggatgaacgcaccccctattggcgcgatgtaggtaccattgatgcctattacgcggccaatatggagcttgtttccgctgatccactcttgaatctctacgatcctaactggtcgacagtgacccaccagccgcagctaccgccagccttatttaagggcgccgatgacatgcgccggattgactcgtcgatggttagtggtggctgtgtgatcgtcaactcggaactccgccgctcccttatattttccagtgtgcgtgtcaatgacggctgcgagttggagggcgtgctggcgctgccaggatgtgagataggggctggttcttggttgcagaacgtaattttggataaccgctgtgaggtgccaccgggcaccataatcggtgcagacccggtggccgatgcgaagagatttgacgtaaccaatggcgggatcgttattgttaaccgccggatgctgggccagggagagagttacatgccgggccagcacttgccgccgcaacccaatgaggcagattaaa

SEQ ID NO: 253643 - DNA, 550 bp, Unknown
  Bacterial polypeptide expressing nucleotide sequence isolated from the Sargasso Sea
tcgctatatccatctggcgatgtgtacgtatatgatttttcctccaataccattcgcggtgagagcgagcgcagtgccggttactggcgtgatgtgggtaccttagattcgtactatcaggctaatatggatctgatcgcagtagagccgccgtttgatttgtataaccgctactggccactacgtggctatacgccgccggtgccgccagctaagtttgttcacgatgaaactaaccgcaccggtcaggctataagttctatggtggcgtcgggctgtattgtcagcggcgccatcgtgtatcagtctattctgggctttaacgtgcatgtgcatagccacagctacattgaaaaatgcgtgctaatgggcaataacgatattggccgtggttgtcgcatccgccgcgccattatcgataaagacgttaaaattgcccctggcaccgtcataggcgaagatccggtattagataaacagcgctttcatgtctctgccagcggtgtggtagtgatcccgaaaggcgccaaaattggttttgatgactaat

SEQ ID NO: 253644 - DNA, 193 bp, Unknown
  Bacterial polypeptide expressing nucleotide sequence isolated from the Sargasso Sea
aatggcagatcaaagttctcgttacatcagtaaccttactcgcgatacttatgcgctcattcttgcgggtggaaaaggttctagattacacgaactcactacttggcgagccaaaccggcactttattttggcggtaaatttagaattatcgacttcccgctatcaaattgcgtgaattctggtattcgacga

SEQ ID NO: 253645 - DNA, 933 bp, Unknown
  Bacterial polypeptide expressing nucleotide sequence isolated from the Sargasso Sea
ttcaggaaccgcggatgctgtttttcagtcactcgacataatagaaagtcatggcccagaatatatcattattttggctggcgatcatatttacaatatggactacggtgaaatgcttgcggagcacgttaataatggggcagatttctcagttgcttgtattgcaatcgaagcatcgaaagcggctcatcaattcggggtcgtgagtgttaacgagaatagtcgcataattgatttcgaagagaagccaaaacacccaaagacaatgtcaggtgaggataataaagccttagtcagcatgggtatttatcttgtttcacaaaaataccttgcctctatgttgcgagatgatgcagattcagaaagatcaaaccatgattttggtaaggatattattcctgagggattgcggcgaggagatcactttcatgcatatgaattccgaaacccaaccaatgaggatcccccatactggagagatgttggaactgtagatagttattacgcggcaaacatggaattgctagaagcagatcctccactaaacttatatgacaaaggttggcctatagccacttatcaaaggcagttaccccctgcatttataaagcctggcaaagacgatagtaaaattgagtcttccattattagtagcgcctgtttaatcgagagttcagaaattaagcgttcgatattattctctgaggtaagggttgaaccaggttgtaaacttagcggggtacttgctctaggtggctgtagaattggtgctaactgccatttgcagaatgtaattctcgataatggttgtgtcgtcccgcctggtgcagttattggatttgataggcaagcagatgctgaaaagtttgatgttacacgggaaggcgttgttcttgtcaatcgacaaatgctggggacaggtatcagatataa

SEQ ID NO: 253646 - DNA, 209 bp, Unknown
  Bacterial polypeptide expressing nucleotide sequence isolated from the Sargasso Sea
aatgaagcgcgtcttggcaataatcctcggaggaggaaaaggttctagactttaccctttaacaaaaatgagggctaaacctgctgttccattggcgggtaagtatcgtttaatagatattcctattagtaattgcattaattcaggtattgaaaaaatgtacgtattgacacagttcaatagtgcatctcttaatcgacatataggaa

SEQ ID NO: 253647 - DNA, 296 bp, Unknown
  Bacterial polypeptide expressing nucleotide sequence isolated from the Sargasso Sea
tatgtataaggggataattttagcaggtgggagaggttcaaggctctttccaataaccatatcaacttcaaagcaactcttacctatatatgataaaccaatgatttactatccattatcagttttaatgactgctggaattaaagatgttttgataattgtaaatccaaatgatttaaaaaattatgagaatcttttaggagatggaagtcaactaggtattagtatttcatataaagttcaaccttctcctgatggtcttgctcaatcatttatattaggagaaacctttatag

SEQ ID NO: 253648 - DNA, 181 bp, Unknown
  Bacterial polypeptide expressing nucleotide sequence isolated from the Sargasso Sea
catggaaactccggcacggctgaacgatctgcaacgcactaccctcgccattgtccttgcaggcgggcgcggcacgcggctcgggccgctcaccaacaagcgcgtcaaaccggcggtgcactttggcggcaagtaccggatcatcgacttcgcgctctccaattgcctgaactccggcatc

SEQ ID NO: 253649 - DNA, 211 bp, Unknown
  Bacterial polypeptide expressing nucleotide sequence isolated from the Sargasso Sea
aaacccttatttagcctctatgggtatttacgtttttagcagaaatactctttcgattcttctaaataaatatcctagttatacggatttggtaaggacatatttccagaagcactgcataggggagatactcttaaaagttatgtattcgatgattattgggaagatattggaaccattggcgcattctttgagtcaaatcttgcattga

SEQ ID NO: 253650 - DNA, 985 bp, Unknown
  Bacterial polypeptide expressing nucleotide sequence isolated from the Sargasso Sea
tgtaagaaaataccaatggtatttcaagaatgggatgttgatgaatatttaatattgtcaggtgatcaactgtacagaatggactacagtttatttgttcaacatcatagagataatggtgctgatttaactgttgcagctttacctgttgatgaagctcaagcagaaggttttggcctaatgagaaccgatgatgtaggaaatattaaagaatttagtgaaaagcctactggagagaagttgaaggctatggcagtagatacttcaaaatttggattaagtgaggagtcagctgccgaaaaaccatatctagcctctatggggatttacgtttttagcagaaatactctcttcgatcttctaaataaatttcctaattatacggattttggtaaggacataattccagaagccctcaatagaggcgatactcttaaaagttatgtatttgatgattattgggaagatattggcacaattggggcattctttgagtcaaaccttgcattgactgagcaaccaaaacctccatttagtttttatgatgagaaatttccaatttatactagacctagatttttacccccttctaaacttgtagatgctcaaattactgattcaattgtttgtgaaggcacaatcttgaagtcatgcagtattttacattgtgttttaggtgtaagaagcaggattgaaagtgactcggttcttgaggatactcttgttatgggagctgatttctttgaatcccctgaagagaggattgaattaagaaaagggggcggaacgcctcttggagtaggtgaagggactactgtaaaaagagcaattcttgataagaatacaagaattggcgataatgtcgtgatcattaataaagatcgagtagaagaagcagataagccagaattaggcttttatatcagaaatggaattgttgtagtagttaaaaatgcaactattgcaaacggaactgttatttaaa

SEQ ID NO: 253651 - DNA, 406 bp, Unknown
  Bacterial polypeptide expressing nucleotide sequence isolated from the Sargasso Sea
tatgattaacaaagaagtactttcaattattcttggtggtggtcaaggttcaagattgtatccactgacaaaaaatcgttcaaaacctgccgttcctatcgctggaaagtatcgattagttgacattcctatttcaaattgtatcaattcagatataaagagaatatttgttttaacccaatttaattcagcttctttaaacaaacacataaagaacacttatagctttagtttttttagcacaggttttgtagacgttttagctgctgaacaaactcccgaaaataaaacgtggtttcaaggaactgctgatgctgttcgccaaagcatgcatcattttttaagccatgattttaagtatgctcttattttatctggtgatcaattataccaaatgggattttga

SEQ ID NO: 253652 - DNA, 979 bp, Unknown
  Bacterial polypeptide expressing nucleotide sequence isolated from the Sargasso Sea
agggctaaacctgctgtgccattggcaggtaagtatcgtttgatagatattccgattagtaattgtataaattcaggcattgaaaaaatgtacgtattgacccagtttaatagtgcatctttaaatagacatattggaagaacctataatttaaatggtcctttcggccaaggatttgtggaggttttagcggcacaacagacccctgatagtccgaagtggtttgaaggtactgctgatgctgtaagaaaataccaatggttatttcaagaatgggatgttgatgaatatttaatattgtcaggtgatcaactgtacagaatggactacagtttatttgttcaacatcatagagataatggtgctgatttaactgttgcagctttgcctgttgatgaagctcaagcagaaggttttggtctaatgagaaccgatgatgtaggaaatataaaagaatttagtgaaaagcccactggagagaagttgaaggctatggcagtagatacttcaaaatttggattaagtaaggagtcagctgccgaaaaaccatatctagcctctatgggaatttacgtttttagcagaaatactcttttcgatcttctaaataaatttcctaattacacggattttggtaaggacataattccagaagccctcaagagaggcgatactcttaaaagttatgtattcgatgattattgggaagatatcggcaccattggggcattctttgagtcaaaccttgcattgactgagcaaccaaaacctccatttagtttttatgatgagaaatttccaatttatactagacctagatttttacccccttctaaacttgtagatgctcaaattactgattcaattgtttgtgaaggtacaattttgaagtcatgcagtattttacattgtgttttaggtgtaagaagcaggattgaaagtgactcggttcttgaggatactcttgttatgggagccg

SEQ ID NO: 253653 - DNA, 523 bp, Unknown
  Bacterial polypeptide expressing nucleotide sequence isolated from the Sargasso Sea
atgaagcgtgtgttggccattatcctcggaggaggaaaaggttctagactttaccctttaacaaaaatgagggctaaacctgctgtgccattggcaggtaagtatcgtttgatagatattccgattagtaattgtataaattcaggcattgaaaaaatgtacgtattgacccagttcaatagtgcatctttaaatagacatataggaagaacctataatttaaatggtcctttcggccaaggatttgtggaggttctagctgcacaacagactcctgatagtccgaagtggtttgaaggtactgctgatgctgtaagaaaataccaatggttatttcaagaatgggatgttgatgaatatttaatattgtcaggtgatcaactgtacagaatggactacagtttatttgttcaacatcatagagataatggtgctgatttgactgttgcagctttgcctgttgatgaagcacaagcagaaggttttggcctaatgagaaccgatgatggaggaaatataaagg

SEQ ID NO: 253654 - DNA, 781 bp, Unknown
  Bacterial polypeptide expressing nucleotide sequence isolated from the Sargasso Sea
atgaagcgtgtgttggctataatcctcggaggaggaaaaggttctaggctttaccctctaacaaaaatgagggctaaacctgctgtaccattggcaggtaagtatcgtttaattgatattccaattagtaattgtataaattcaggcattgaaaaaatgtacgtattgacccagttcaatagtgcatctcttaatagacatattggaagaacctataatttaaatggtccgttcggccaaggatttgttgaagttttagctgcgcaacagactcctgatagtccgaaatggtttgaaggtactgctgatgctgtaagaaaataccaatggttatttcaagaatgggatgttgatgaatatttaatattgtcaggtgatcaactgtacagaatggattacagtttatttgttcaacatcatagagataatggtgctgatttaactgttgcagctttgcctgttgatgaagctcaagcagaaggttttggcctcatgagaacggatgatgtaggaaatataaaagaattcagcgaaaagccaactggagagaagttgaaggcaatggcagtagatacttcaaaatttggtttaagtaaggagtcagctgttaaaaagccttatctagcctcaatgggtatttacgtttttagtagaaatactcttttcgatcttctaaataaatttcctagttatacggattttggtaaggacataattcctgaagctctaaaaaggggggatactcttaaaagttatgtattcgatgattattgggaagata

SEQ ID NO: 253655 - DNA, 613 bp, Unknown
  Bacterial polypeptide expressing nucleotide sequence isolated from the Sargasso Sea
atgaagcgtgtgttggccataatcctcggaggaggaaaaggttctagactttaccctttaacaaaaatgagggctaaacctgctgtgccattagcaggaaagtatcgtttaatagatatcccaattagtaattgtataaattcaggtattgaaaaaatgtacgtattgacccagttcaatagtgcatctctaaatagacatataggaagaacatataatttaaatgggcctttcggccaaggatttgtggaggttttagctgcacaacagactcctgatagtccaaagtggtttgaaggtacagctgatgctgtaagaaaataccaatggttatttcaagaatgggatgttgatgaatatttaatattgtcaggtgatcagctgtatagaatggactacagtttatttgttcaacatcatagagataatggtgctgatttaactgttgcagctttgcctgttgatgaagctcaagcagaaggttttggccttatgagaacagacgatttaggaaatataaaagaattcagtgaaaaacctactggagataagttgaaggcaatggcagtagatacttcaaaatttggattaagtaaagagtcagccgtagaaa

SEQ ID NO: 253656 - DNA, 826 bp, Unknown
  Bacterial polypeptide expressing nucleotide sequence isolated from the Sargasso Sea
ggtggagggttcgttgaggttcttgctgctcagcagacccccgatagccctacttggtttgagggcactgcagatgctgttcgaaaataccaatggctttttcaggagtgggatgttgatgagtatttgattctttccggtgaccagttgtaccggatggattacagccttttcatcgagcatcaccgccgcactggtgctgatctcaccgttgctgccctccctgttgatcccaaacaggcagaggccttcggcctcatgcgtacggatgaaaacggcacgatcaaggagttccgcgaaaagcccaagggtgattcactgctggagatggctgttgacacctctcgctttggcttgagtgcagattctgccaaggagaggccctatctggcctcgatgggcatctatgtctttagtcgtgagaccctgtttgatctgcttgataagcatcccggccacaaggatttcggcaaagagatcattcccgaggccctttcaaggggcgacaaccttcagagctatgtgttcgacgactactgggaagacattgggacgatcggtgctttctatgaagccaaccttgcgttgacacaacagcccacgccccctttcagcttctacgacgaaaaattccccatctacacccgtccccggtatttgccacccagcaaacttgtggacgctcagatcatcaattcgatcgttggagaaggctcgattttgaagtcctgcagcatccaccactgtgttcttggcgtccgcagccggatcgaaagtgacgtcgtgcttcaggacacgctggtgatgggctctgatttcttcgaat

SEQ ID NO: 253657 - DNA, 451 bp, Unknown
  Bacterial polypeptide expressing nucleotide sequence isolated from the Sargasso Sea
tatgcaaaccgccaagcgtttcgttagtcgccttactcgtcaaaccctggccctggtgctggctggcggcaggggctcacgactgcacgacctcacaaaatggcgagccaagcccgccgttcccttcgggggtaagttcaggattatcgatttcccgttgtccaactgcatcaactccggcattggtcaggtaggcgttatcacccagtacaaatcccactcattgatccgtcacattcagcgcggctgggggttcctgcggggggagctggatgaatttgtggaactgttgccggcccagcagcgcattgagacctcctggtacgagggcacagcagacgccgtgctgcagaacctggacatcattcgcagccaccagccggagtacgtgttgattctggcaggtgaccatgtctacaaaatggattacggcaccatgctggctgcccac

SEQ ID NO: 253658 - DNA, 913 bp, Unknown
  Bacterial polypeptide expressing nucleotide sequence isolated from the Sargasso Sea
attgaaaaaatgtacgtattgacccagtttaatagtgcatctctaaatagacatataggaagaacttataatttaaatggtccttttggccaaggatttgtggaggttttagctgcacaacagactcctgatagtccgaagtggtttgaaggcactgctgatgctgtaagaaaataccaatggttatttcaagaatgggatgttgatgaatatttaattttgtcaggtgatcaactgtatagaatggactacagtttatttgttcaacaccatagagatagtggtgctgatttaactgttgcagctttgcctgttgatgaagctcaagcagaaggttttggcttaatgagaaccgatgatgtaggaaatataaaagaatttagtgaaaagcctactggagagaagttgaaggctatggcagtagatacttcaaaatttggattaagtaaggagtcagccgccgaaaaaccatatctagcctctatggggatttacgtttttagcagaaatactctcttcgatcttctaaataaatttcctaattatacggattttggtaaggacataattccagaagcccttaatagaggagatactcttaaaagttatgtattcgatgattattgggaagatataggcacaattggggcattctttgagtcaaaccttgcattgactgagcaaccaaaacccccatttagtttttatgatgagaaatttccaatttatactagacctagatttttacccccttctaaacttgtagatgctcaaattactgattcaattgtttgtgaaggcacaatcttgaagtcatgcagtattttacattgtgttttaggtgtaagaagcaggattgaaagtgactcggttcttgaggatactcttgttatgggagccgattttctttgaa

SEQ ID NO: 253659 - DNA, 836 bp, Unknown
  Bacterial polypeptide expressing nucleotide sequence isolated from the Sargasso Sea
aatgaagcgtgtgttggcaatcatcctcggaggaggaaaaggttctagactttaccccttaacaaaaatgagggcgaaacctgctgttccactggcaggcaagtatcgtttaattgatattccaattagtaattgtattaattcaggtattgaaaaaatgtacgtattgactcagttcaatagtgcatctctaaatagacatataggtagaacctataatttaaatggcccttttggtcaaggatttgtagaggttttagctgctcaacaaacgcctgatagtccaaagtggtttgaaggtactgctgatgctgtaagaaaataccaatggttatttcaagaatgggatgttgatgaatatttaatattgtcaggtgatcaactttatagaatggactacagcttatttgttcaacatcatagagataatggtgcagatttaactgttgcagctttacctgttgatgaagctcaggcagaaggttttggcctcatgagaacagatgatttaggaaatataaaagaattcagtgaaaagcccactggagacaagttgaaggcaatggctgttgatacttcaaaatttggattaactaaggaatcagcagcagaaaaaccctatcttgcctctatgggcatttacgtttttagtagaaatactctttttgatcttctaaataaatttcctagttatacagactttggtaaggacattattcctgaagctcttaaaaggggtgatactctaaaaagttatgtttttgatgattattgggaagatattggaactattggagcattttttgagtcaaatttagcattaacagagcaaccaa

SEQ ID NO: 253660 - DNA, 490 bp, Unknown
  Bacterial polypeptide expressing nucleotide sequence isolated from the Sargasso Sea
atgaagcgggttttggccatcattctgggcggcggtgcgggtacacgcctgtacccgctcacaaaaatgcgcgccaagccagccgtccctctggctggcaaataccgattgattgatattcccattagcaactgcatcaactccgacatcaacaagatgtacgtgatgacgcagttcaacagtgcttcacttaatcgacaccttagtcagaccttcaatctcagcaattccttcggtgggggttttgttgaagtgctcgcggcccaacagactccagatagtccatcctggtttgaaggcactgcagatgccgttcgcaaataccaatggttgttccaggaatgggatgttgatgagtatctgatcctttccggtgaccagctgtaccggatggattacagccttttcatcgagcaccaccgccgcacgggagctgatctcacagttgctgctcttcctgttgatcccaaacaagcagaggccttcggcc

SEQ ID NO: 253661 - DNA, 877 bp, Unknown
  Bacterial polypeptide expressing nucleotide sequence isolated from the Sargasso Sea
atattatctggtgatcagctttataggatggattatagtttatttgttcaacaccatagagataataaagctgatttaacagtggctgctttacctgttgatgaatctcaggctgaaggctttggccttatgagaacagatgatttgggcaatattaaagaatttagtgaaaagccaaccggtgagaaattaaaatcaatggcagttgatacctctaagttcggattaaccaaggaatcggcatcagagaaaccgtatctcgcctctatgggcatttatgttttcagtagaaagacactttttgatctcttaaataagttccctagttatacagattttggtaaagatataatccctgaggcattaagtagaggggatacactaaagagttatgtttttgatgattattgggaagatataggaactataggagcattttttgaatcaaacttagcattaacacaacaaccaaaacctccgtttagtttttatgatgaaaaatttcctatatatactaggcctagatatcttcctccatcaaaacttgtagatgctcaaattactgattcaatagtttgtgaaggaactattttgaaatcttgtagcatcttgcattgtgtcttaggcgtgagaagtagaattgaaagtgattctgttattgaagatactcttgtaatgggatctgatttttttgaatcgctagaagagaggattgaattaagaaaaggtggtggtactcctcttggagtaggagaaggttcaactataaaaagggcaattcttgataagaatgcaagaattggagataatgtggtgatagtaaataaggatagagtagaagaagcagataaaccagatcttggattttatataagaa

SEQ ID NO: 253662 - DNA, 662 bp, Unknown
  Bacterial polypeptide expressing nucleotide sequence isolated from the Sargasso Sea
aatgagcgagcaaaagagcaatccggataacgatccacgttatgtcagtaagctgacaaaagatacattagcgttggtgcttgctggcggtaggggatcgagactctatgagctgactgactggcgagcaaagccggcactttattttggcggtaagtttcgcatcatcgatttccctttgtcgaactgcattaactcgggcattcgccaagttggggtattgacccagtacaaggcgcattcattggttcgccatttggttcgtggttggagtcactttaaaaaggaactaggggagtacgtcgaggtgctgccagcttcgcagcgctactctgatgattggtatcaaggcacggccgatgcaatttatcagaacatggatattatcagggcgagtaaccccaagtatgttgtggttctttcgggcgatcacatctacaagatggattacggacatatgttggtatcgcacgtggagcgtggcgctgacatgactgtttcctgccttgaagtgcccactggggaggctgctggcgcatttggtgttatgcaggttgatgaggaaagtcgcgtgttaggatttgaagaaaagcccgagcaccctgctgaagttccgggtagacctggtttttgtttggcgtcaatgggtaactacgtattca

SEQ ID NO: 253663 - DNA, 889 bp, Unknown
  Bacterial polypeptide expressing nucleotide sequence isolated from the Sargasso Sea
tactatagtttatttgttcaacaccatagagataataaagctgatttaacagttgctgctttacctgttgatgaatctcaggctgaaggttttggccttatgagaacagatgatttgggtaatattaaagaatttagtgaaaagccaaccggtgagaaattaaaatcaatggcggttgatacctctaagttcggattaactaatgaatcagcacaagagaaaccgtatcttgcctcgatggggatttatgttttcagtagaaagacacttttcgatctcttaaataagttccctagttatacagattttggtaaagatataatccctgaggcattaagtagaggggatacattaaagagttatgtttttgatgattactgggaagatataggaactataggagcatttttcgaatcaaacttagcactaacacaacaaccaaaacctccgtttagtttttatgatgaaaaatttcctatatataccaggcctagatatcttcctccatcaaaacttgtagatgctcaaattactgattcaatagtttgtgagggaactattttgaaatcctgtagcatcttgcattgtgttttaggtgtgagaagtagaattgaaagcgattctgttattgaagatactcttgtaatgggatctgatttttttgaatcgctagaagagaggattgaattaagaaaaggtggtggtactcctcttggagtaggggaaggttcaactataaaaagggcaattcttgataagaatgcaagaattggagataacgtggtgatagtaaataaggatagagtagaagaagcagacaaaccagacctaggattttatataagaaatggaattgttgttgtagttaaaaatgcaactattgctaacg

SEQ ID NO: 253664 - DNA, 451 bp, Unknown
  Bacterial polypeptide expressing nucleotide sequence isolated from the Sargasso Sea
gatgaagcgggttctcgggatcattctcggaggtggcgcaggaacgcgcctctatcccctgaccaaaatgcgtgctaagccggctgtccccctggccggtaaataccgtctgatcgatatccctgtcagcaactgcatcaacagcgggatcaacaagatctacgtgctgacgcagttcaacagcgcttctctcaaccgtcacatttcccagaccttcaacctgtcttcaggttttgatcaagggttcgttgaggttctcgctgctcagcagactccagagagtcctagttggtttgaaggcacggccgatgctgtgcggaaatacgaatggttattccaggaatgggacattgatgaagtcctgatcctgtccggagaccagctctaccggatggattacggcctgttcgtggccgaacaccgaagcagcggagctgacctgacggttgca

SEQ ID NO: 253665 - DNA, 769 bp, Unknown
  Bacterial polypeptide expressing nucleotide sequence isolated from the Sargasso Sea
atgacagtgtcatgtatgtctgtgccactacaagaagcagcgggtgcgtttggtgtaatgtcagtcgatgaaaactaccgtattaacgggtttgaagaaaagcccgctaaccctactccactgcctaacgatccaactcgttgtctagcgtctatgggcaactatgtgtttgatactgaatttcttttcgagcaattacgtgttgatgccgaaaacatgggctcgcagcgcgactttggtaaagacattatcccatcaatcatcgctgatcaccctgtatatgcctatccatttgagaaaagcggcggagataacgcctattggcgcgatgttggtactatcgattcattttgggaagccaatatggaaatggttgctcctgtacctcagttgaacctatacgatagaaaatggcccatatggacataccaagaacaacttccaccagcaaaatttgtttgggaagaccacgacagacgtggtgaagcgattaactcagtggtttctggaggctgtattatttcaggctctacgcttcgctcgtctatttgtttttccaatgtacgcgtacattcctacggacttattgaagacgctgttattcttcccgatgtagaaattaaacgccattgtaagttgaaaaaggtgattatcgaccgtgggtgtgtcattcctgaaggtaccacaattggttacgatcacgagcaagacaaagcccgtggattccgcgtgtcagaaaaaggcgtggtgctggttacgcgagaaatgt

SEQ ID NO: 253666 - DNA, 706 bp, Unknown
  Bacterial polypeptide expressing nucleotide sequence isolated from the Sargasso Sea
atgaagcgcgttctgtcaataattcttggtggaggagcgggtacccgtctttacccactcaccaaaatgagggccaagccagctgtacctctggctggtaagtatcgcctgattgatatccccatcagcaactgcatcaattcaaacatcaccaagatgtatgtgttgactcagttcaacagtgcatctctgaaccgccatctttcccagacttacgacctcagtgctggtttcggccagggttttgttgaggtactagcggcccagcagacccctgagagcccatcatggtttgaaggcacagctgacgctgtacgtaaataccagtggctattccaggaatgggatgttgatgaatacctgattctttccggtgatcagctgtatcgaatggattacagcttgtttgttgaacatcaccgtaaatctggtgctgatctcactgttgctgcgctccccgtcgacccgaagcaggctgaatcctttggcttgatgcgcactgatgagaacggtgcaattcaggaattccgagagaagccaaagggtgattctcttaaggagatggctgttaatacagcccgatttggcctgtctccggagtcggcgcaggagaagccctatctcgcctcaatgggcatctatgtattcagtcgcaaggctctctttggtctccttaatgattatccgacttataaggacttcggta

SEQ ID NO: 253667 - DNA, 871 bp, Unknown
  Bacterial polypeptide expressing nucleotide sequence isolated from the Sargasso Sea
catcattctcggcggcggtgcggggacgcgtttgtacccgttgacgaagaagcgggccaagcccgcggtgccgttgggggccaactatcgtttgatcgatattccggtgtcgaattgcatcaattcggacatcaacaaggtgtattgcttgacgcagtttaacagcgcgtcgttgaatagacacttgtctcaggcgtacaacaccaacatcggtacgtacacgcgcacgggtttcgtggaggtgctcgcggcggaacagagcccggtgaacaaggcgtggttccaagggaccgccgacgccgtgcgtcagtacttgtggttgtttggtgaaagcgaatgcgatgaatacttgattctttctggcgatcacctctatcgcatggattaccgaccgtttatccaggcgcaccgcgatgccatggctgacatcacggtcgcggcgttgccgacggatgagaagcgagcgagctctttcgggttgatgaagattaactcggaggctgtcatcaccgaattctccgaaaagccgaaaggggaggcgcttcatgcgatgaaggtggatacgacgattttgggtttggacgcgcaacgcgccgcggagatgccgtacatcgcctcgatgggcatctacgtcttcaccgccaaggcgatgcaccaattgttacgcaaggatttcccggaagcgaacgatttcggtggtgaaatcattcccctggcggctgccaccggcatgaaggtggtcgcgtacttgtacgacggctactgggaggatatcggtactgtcgacgcgtttttccacgccaacttgtcgtgcaacgatccgaacccgcagttcagcttctacgatcgcaaagcgcccatttacacgcaa

SEQ ID NO: 253668 - DNA, 765 bp, Unknown
  Bacterial polypeptide expressing nucleotide sequence isolated from the Sargasso Sea
acaagatgtacgtgatgacgcagttcaatagtgcgtctctcaatcgtcacctcagccagacgttcaacctgagcgcatccttcggtcaaggcttcgttgaggtgctggctgcccagcagacgcctgatagcccatcctggtttgaaggcactgccgacgccgtacggaagtaccagtggctgttccaggaatgggatgtcgatgaatacctgatcctgtccggtgaccagctgtaccggatggactacagcctgttcgttgaacatcaccgcagcaccggtgctgacctcaccgttgcagcccttcctgtggatcccaaccaggccgaggcgttcggcttgatgcgcacggatgatgacggaaacatcaaggagttccgcgaaaagcccaagggtgattctctgcttgagatggcggtcgacaccagccgatttgggctcagtgcggattcggccaaggagcgtccctatttggcgtcgatgggtatttatgtcttcagcagagacaccctgtttgacctgctcgattccaatcctggttacaaggacttcggcaaggaagtcattcctgaggccctcaagcgtggtgacaagctgaagagctatgtctttgatgattattgggaagatatcggaacgatcggggcgttctacgaggccaatctggcgcttacccaacaacccacaccccctttcagtttctacgacgagaagttcccgatctacactcgtccccgctatctacccccgagcaagctcagttgat

SEQ ID NO: 253669 - DNA, 635 bp, Unknown
  Bacterial polypeptide expressing nucleotide sequence isolated from the Sargasso Sea
aatgaagcgtgtgttggccataatcctcggaggaggaaaaggttccagactttaccctctaacaaaaatgagggctaaacctgctgtgccattggcaggtaagtatcgtttgatagatattccgattagtaattgtataaattcaggcattgaaaaaatgtacgtattgacccagttcaatagtgcatctctaaatagacatataggaagaacctataatttaaatggtcctttcggtcaaggatttgtggaggtgttagccgcgcaacagactcctgatagtccgaagtggtttgaaggtactgctgatgctgtaagaaaataccaatggttatttcaagaatgggatgttgatgaatatttaatattgtcaggtgatcaactgtacagaatggactacagtttatttgttcaacatcatagagataatggcgctgatttaactgttgcagctttacctgttgatgaagctcaagcagaaggttttggccttatgagaaccgatgatttaggtaatataaaagaattcagtgaaaaacctactggagagaagctgaaggcaatggcagtagatacttcaaaatttggattaagtaaggagtcagctgccgagaaaccatatctagcctctatgg

SEQ ID NO: 253670 - DNA, 802 bp, Unknown
  Bacterial polypeptide expressing nucleotide sequence isolated from the Sargasso Sea
aatgaagcgggttctggccataattctcggcggaggtgccgggactcgtctctacccgttgaccaagatgcgcgcaaaaccagccgttcctttggccggtaagtatcgactgattgatatccccatcagcaattgcatcaactcgaacatcaataagatgtacgtgatgacgcagttcaacagtgcgtccctgaaccgccatctcagccagactttcaacctaagcgcgtcgttcggccagggatttgttgaggtgctggctgcgcagcagacgccggacagtccatcctggtttgaaggcactgctgacgcggttcggaagtatcagtggttgttccaggaatgggatgttgatgaatacctgatcctctccggtgaccagctctacaggatggactacagcctgttcgttgagcatcaccgcagcagcggtgctgatctcaccgttgcggccctgcctgtggatcccaagcaggcggaagctttcggtttgatgcgcacggatgacgacggaaatatcaaggaatttcgcgaaaaacccaagggcgattctttgcttgaaatgagtgttgataccagccgttttgggcttagagctgactcggccaaggatcgtccgtacctggcctcgatggggatttatgtgttcagcagagacaccctcttcgatctgcttgattccaatcctggctataaagatttcggtaaagaagtcatccctgaggccctcaagcgtggggacaagctcaagagctatgtttttgatgattattgggaggatatcggaacgatcggtgcgttc

SEQ ID NO: 253671 - DNA, 927 bp, Unknown
  Bacterial polypeptide expressing nucleotide sequence isolated from the Sargasso Sea
catatggaaatcaaccggtgctcgattgttagtcgccttacaaataatacaatggctttagttttgctgggcggtcgcggtcagcgtttgggcgttttgacagattggagaacaaagcctgctgttcctttcggcggtaaatttcgaataatagactttacactctcaaactgtatgcattcaggtataaacaaaatctgtgtattaactcagtataaatcccactctttaataagacatctgataaaaggatggacaaaaatcaataatgatagtggggattttttagatatagttcccgctcaacaatggacagataatgaaacttggttccaaggaactgcggatgctgtttttcagtcactcgacataatagaaagtcatggcccacaatatgttattattttggctggcgatcatatttacaatatggactacggcgaaatgcttgccgagcacgttaataatggggcagatttctcagttgcttgtattgcaatcgaagcagcaaaagcagctaatcaattcggagtcatgagtgttaacgagaatggtcgcataattgatttcgaagagaagccaaaagatccaaagacaatatcacgtgaggaaaataaagccttagtcagcatgggtatttatgttgtttcacaaaaataccttgcctctatgttgcgggatgatgcagtttcagaaagatcaaaccatgattttggtaaggatattattcctgagggattgcggcgaggagatcattttcatgcatatgaattccgaaacccaaccaatgatgatcctccatactggagagatgttggaactgtagatagttattacgcagcaaacatggagttgctagaagcagagccacctttaaacttgtacgacaaaggctggcctatagccacttatcaaaggcagctaccc

SEQ ID NO: 253672 - DNA, 726 bp, Unknown
  Bacterial polypeptide expressing nucleotide sequence isolated from the Sargasso Sea
catgaagcgggttctggccatcattctcggcggcggtgccgggactcgtctttacccgttgaccaagatgcgcgccaagccggccgtccccttggccggtaaatatcgactgattgatatccccatcagcaactgcatcaattcgaacatcaacaagatgtacgtgatgacgcagttcaacagtgcgtctctcaatcgtcacctcagccagacgttcaacctgagcgcatcgttcggtcagggattcgttgaggtgctggctgcccagcagacgcctgacagtccatcctggtttgaaggcactgccgatgcagtacggaagtaccagtggctgttccaggaatgggatgtagatgaatacctgatcttgtccggtgaccagctgtaccggatggattacagcctgtttgttgaacatcaccgcagcactggtgctgacctcactgttgcagcccttccagtggatcccaaccaggccgaggcgttcggcttgatgcgcacggatgatgacggaaacatcaaggagttccgcgaaaaacccaagggtgattctctgcttgagatggcggtcgacaccagccgatttgggctcagtgcggattcggccaaggagcgtccctacctggcgtcgatggggatttatgtcttcagcagagacaccctgtttgacctgcttgattccaaccctggctacaaggacttcggcaaggaagtcattcctgaggc

SEQ ID NO: 253673 - DNA, 891 bp, Unknown
  Bacterial polypeptide expressing nucleotide sequence isolated from the Sargasso Sea
actagcaatactatggctctagtcctggccggtggccgtggtgagcgtttgggtgttttgactgattggcgaacaaaaccagctgtccccttcggcggcaagtatagaattatcgacttcaccctatcaaactgtatgcactccggtattaataaagtctgtgtcttaacgcagtataaatctcattctttgataagacatttgattgaaggctggacgaaaataaatagtcaaagaggggattttctcgatattgttcctgctcagcagtggacagggcaagatacgtggtttcaaggaacggctgacgccgttttccaatcccttgatataattgaaagccacagcccagattatcttataattcttgccggcgaccatatctataacatggactacggcgaaatgcttgccgagcatgtcaatatgggagccgatttttctgtcgcttgtatggcagttgatattgaaaaagcagctaaccaatttggcgttatgacaattaatgacaacggacgtataattaattttgaagaaaagcccagttcacctgcgccgcttcccggaaaaagcaaaaaggccttagcgagtatgggtatctacgtggtatcgcatcgatatcttgcggagagattgcgtgaggatgcagcgctctcagaatctacacatgattttggtcgtgatataattccagagggattgcgtcgtggtgattattttcatgcacatacatttcaaaaccccacaaatgacgcccccccgtattggcgagatgtaggcacgattgatacatattacgcggccaatatggagctactagagcggcaaccggcactagaccttcataattctaagtggccaacagtaacatatcaaaggcagttacctccc

SEQ ID NO: 253674 - DNA, 712 bp, Unknown
  Bacterial polypeptide expressing nucleotide sequence isolated from the Sargasso Sea
atgaagcgtgtgttggccataatcctcggaggaggaaaaggttctagactttaccctctaacaaaaatgagggctaaacctgctgtgccattggcaggtaagtatcgtttgatagatattccgattagtaattgtataaattcaggcattgaaaaaatgtacgtattgacccagttcaatagtgcatctctaaatagacatataggaagaacctataatttaaatggcccttttggccaaggatttgtggaggttttagctgcacaacagactcctgatagtccgaagtggtttgaaggtactgctgatgctgtaagaaaataccagtggttatttcaggaatgggatgttgatgaatatttaatattgtcaggtgatcaactttacagaatggactacagtttatttgttcaacatcatagagataatggtgctgatttaactgttgcagctttgcctgttgatgaagctcaagcagaaggttttggcctaatgagaaccgacgatgtagggaatataaaagaatttagtgaaaagcctactggagagaagttgaaggcaatggcagtagatacttcaaaatttggattaagtaaagagtcagcggccgaaaaaccatatctagcctctatgggtatttacgtttttagcaggaataatcttttcgatcttctaaataaatttcctaattatacagattttgtaaggacat

SEQ ID NO: 253675 - DNA, 486 bp, Unknown
  Bacterial polypeptide expressing nucleotide sequence isolated from the Sargasso Sea
gatgaagcgggttctcgggatcattctcggaggtggcgcaggaacgcgcctctatcccctcaccaaaatgcgtgccaagccggctgtccccctggccggtaaataccgtctgatcgatatccctgtcagcaactgcatcaacagcgggatcaacaagatctacgtactgacccagttcaacagcgcttctctcaaccgtcacatttcccagaccttcaacctttcctcaggttttgatcaagggttcgttgaggttctcgctgctcagcagactccagagagtcctagctggtttgaaggcacggccgatgctgtgcggaaatacgaatggttattccaggaatgggacattgatgaagtcctgatcctgtccggagaccagctttaccggatggattacggcctgttcgtggccgaacaccgcagcagcggagctgacctgacggtttcagccctgcctgtagatgaggagcaggctcagagctt

SEQ ID NO: 253676 - DNA, 706 bp, Unknown
  Bacterial polypeptide expressing nucleotide sequence isolated from the Sargasso Sea
aatgaagcgtgtgttggccataatcctcggaggaggaaaaggttctagactttaccctctaacaaaaatgagggctaaacctgctgtgccattggcaggtaagtatcgtttgatagatattccgattagtaattgtataaattcaggtattgaaaaaatgtacgtattgacccagttcaatagtgcatctctaaatagacatataggaagaacctataatttaaatggcccttttggccaaggatttgtggaggttttagctgcacaacagactcctgatagtccgaagtggtttgaaggtactgctgatgctgtaagaaaataccaatggttatttcaggaatgggatgttgatgaatatttaatattgtcaggtgatcaactgtacagaatggactacagtttatttgttcaacatcatagagataatggtgctgatttaactgttgcagctttgcctgttgatgaagctcaagcagaaggttttggcctaatgagaaccgatgatttaggaaatataaaagaatttagtgaaaagcctactggagagaagttgaaggctatggcagtagatacttcaaaatttggattaagtaaggagtcagctgccgaaaaaccatatctagcctctatggggatttacgtttttagcagaaatactctcttcgatcttctaaataaatttcctaattatacggattttggt

SEQ ID NO: 253677 - DNA, 412 bp, Unknown
  Bacterial polypeptide expressing nucleotide sequence isolated from the Sargasso Sea
atgaagcgtgtgttggccataatcctcggaggaggaaaaggttctagactttaccctctaactaaaatgagggctaaacctgctgtgccattggcaggtaagtatcgtttgatagatattccgattagtaattgtataaattcaggcatcgaaaaaatgtacgtattgacccagttcaatagtgcatctctaaatagacatataggaagaacctataatttaaatggccctttcggccaaggatttgtggaagttttagcggcacaacaaactcctgatagtccgaagtggtttgaaggtactgccgatgctgtaagaaaataccaatggttatttcaagaatgggatgttgatgaatatttaatattgtcaggcgatcaactgtacagaatggattacagtttatttgttc

SEQ ID NO: 253678 - DNA, 903 bp, Unknown
  Bacterial polypeptide expressing nucleotide sequence isolated from the Sargasso Sea
tccgattagcaactgcatcaactccgacatcaacaagatgtacgtgatgacgcagttcaacagtgcgtcactgaaccgccatctcagtcagacctacaacctcagcaattccttcggtggcggatttgttgaggtgcttgcagctcagcaaacccctgacagtcccacttggtttgaaggcactgcagacgctgttcgcaaataccagtggttgttccaggaatgggacgttgatgaatacctgatcctttccggcgaccagctctaccggatggattacagcctcttcatcgagcaccaccgccgctctggtgctgatctcactgttgctgcccttcccgttgatcccaagcaggcagaggctttcggtctgatgcggaccgatgaaaacggctcgatcaaggagttccgcgagaagcccaagggtgattcgctgctggagatggctgtcgacacctctcgcttcggcctcagtgctgattcagccaaggaaaggccctatctggcctcgatgggcatttacgtcttcagccgccagaccctctttgatctgctcgacaagcatccagggcacaaggatttcggcaaggagatcattcccgaggctctcgcgcggggcgacaagcttcagagctatgtgttcgacgactactgggaagacatcggcaccatcggtgcgttctatgaatccaacctcgcgctgacccaacaacccacgccccccttcagcttctacgacgagaagttccccatctacacccgtcctcgctacctgccccccagcaagctggttgacgcccagatcaccaattcgattgttggcgaaggatcgatcctgaagtcctgcagcatccaccactgtgttctcggggtgcgcagtcgaattgaaagtgactgcgtgct

SEQ ID NO: 253679 - DNA, 894 bp, Unknown
  Bacterial polypeptide expressing nucleotide sequence isolated from the Sargasso Sea
aatgaagcgtgtgttggccataatcctcggaggaggaaaaggttctagactttaccctctaacaaaaatgagggctaaacctgctgtaccattggcaggtaagtatcgtttgatagatattccgattagtaattgtataaattcaggcattgaaaaaatgtacgtattgacccagttcaatagtgcatctctgaatagacatataggaagaacttataatttaaatgggccttttggtcaaggatttgtggaggttttagctgcacaacagactcctgacagtccgaagtggtttgaaggtactgctgatgctgtaagaaaataccaatggttatttcaagaatgggatgttgatgaatatttaatattgtcaggtgatcaactgtacagaatggactacagtttatttgttcaacaccatagagatagtggtgctgatttaactgttgcagctttgcctgttgatgaagctcaagcagaaggttttggcctaatgagaaccgatgatataggaaatataaaagaatttagtgaaaagcctactggagagaagttgaaggctatggcagtagatacttcaaaatttggattaagtaaggagtcagccgctgaaaaaccatatctagcctctatggggatttacgtttttagtagaaatactctcttcgatcttctaaataaatttcctaattataccgattttggtaaggacataattccagaagcgctcaatagaggcgatactcttaaaagttatgtattcgatgattactgggaagatataggcacaattggggcattctttgagtcaaaccttgcattgactgagcatcaaaacctccatttagtttttatgatgagaaattttcaatttatactagacctagattttta

SEQ ID NO: 253680 - DNA, 757 bp, Unknown
  Bacterial polypeptide expressing nucleotide sequence isolated from the Sargasso Sea
atgagcggagtcttggcaatgatcctcgcaggcggggaaggaaaacgtctgcgacccctgacttcggtccgcaccaaacctgctgttccgtttggggggaattaccggatcatcgattttgctctgagtaattttatcaattccggttttctcaagatttttgtccttacccaatttaaatctcattcgctgatgcagcatctccgggaaggctggaggttgtccggactccgggggcacttcatcgatccgataccggcgcaaatgcggatgggaaaacgttggtatgaaggcaccgcggatgcgatttaccagaacatgaacctcatcaaagataccgatccggagcatgtctgtatttttggaggtgaccacatttatcggatggacatcagccagatgctccgttttcataaaaaaagagatgccaatctgaccgtggccgcgattccggtcccggtctcagaggccaggcatttcggtatcatcgaagtcgatgaaaactggtgtatgaccggttttgtggaaaagccccaaagcagtcctaggactatgccaggtcaaccggatatggtgctggcctcgatgggcaattatattttcaatcgtcatccgttggaggatatgctccaacaggattcccaggatggacaatcagtccatgattttggaagggatgtgattccgaaaatgtatcctgggagggaaggtttatgtctacgatttcagtcaaaaccatatacccgatgcccaaccg

SEQ ID NO: 253681 - DNA, 966 bp, Unknown
  Bacterial polypeptide expressing nucleotide sequence isolated from the Sargasso Sea
gatgataagatcgaacaaagcaaggtttgtgagccgattaaccagcaacacgatggcgctagtcttagcgggggggcgaggcgagcgcctgggtgttttgacagattggcggacaaaaccggcggtacctttcggcggcaagtttagaataatcgactttactctctcaaattgcatgcactctggtatcaataaagtttgtgttttgacgcagtacaaatctcattctttgatacggcatttgatagaagggtggacaaaaataaacagtcagagaggagattttctcgacattgttcccgctcaacagtggaccggaacggatacttggtatcaaggaaccgcggacgctgtattccaatctctcgatattattgaaagccacgccccagattacgttataatcctagcgggtgaccatatttataatatggattacggtgaaatgcttgccgagcatgtcaatatgagggcggacttctcggtcgcttgtatggaagtggatatcgaaaaagcagcaggccaattcggcgtcatgaccatcagtgaaagtggacgtataattgattttgtagagaaacccagttcacctgcgccacttccagggaagaagaataaaaccttagcaagtatgggtatttacgtggtatctcgtcggtaccttgcggaaagattgcgggaggatgcagggcactcaggatcttctcacgattttggtcgtgatataattccagaaggattgcggcgtggtgattattttcatgcgcacatatttcaaaacccgacaaatgtcgaccctccgtattggcgggatgtaggtacaattgatacttactatgaagctaatatggaacttttggagcgccaacctccactagacctttatgatcgagagtggccaacggtcacatatcagaggcagttacctccatcattatttaggggatggcgaaagggggctgtatt

SEQ ID NO: 253682 - DNA, 1264 bp, Unknown
  Bacterial polypeptide expressing nucleotide sequence isolated from the Sargasso Sea
tatgtctaatgtacgttatatcagtaatttaactcgtgaaacctatgcattgattctggctggtggccgaggctcgcgtttacatgaactcaccgactggcgtgctaaacccgcgctgtatttcggtggtaagtttaggatcatcgattttccgctgtcgaattgcattaactcggggatccgccgcgttggggtggtgacccaatataagtcgcactcgttaattcgccacgtgatgcgtggttggggccactttaaaaaggaattaggtgagtcggtagaaattctgcccgcctcacaacgttactctgagaattggtatcaaggcacggctgatgcggtattccaaaatatcgacatcatccgccatgagctgcccaagtacgtgatggtgctctcgggtgaccatgtgtatcgcatggattatgctggcttactggccgcccatgccgaatctggcgccgatatgacagtctcctgccttgaggtgcccgtggccgaagcggcgggcgcatttggggtgatggaagtcgatgacgagatgcgcatcctaggatttgaagaaaaacctaaataccctaaacattccccaggcaatccagagaagtgcctcgcctcgatgggcaactatgtgtttaacactgagtttttgttcgaacagttgaagaaagacgcgcaaaacgccaattccgatcgggattttggcaaagacattattccctcgatcatcgaaaaacataaagtgtttgcctatccctttaagagcgccttcccaaatgagcaagcctattggcgcgatgtgggcaccttggattccttctggcaggccaatatggaattgttatcgcccacgcccgccttaaacctctacgatgccaaatggccgatttggacctatcaggagcaattacctcccgccaagtttgtgttcgacgatgacgatagacgcggcatggcggtggattcgattatttccggcggctgtattatctcgggcgcgaccgtgcgtcgcagcgtattgtttaacgaggtgcgggtttgttcttactcagtggttgaggattcagtcgtgctgcccgatgtggtggtgctgcgccactgcaagattaaaaacgccatcatcgacaggggctgcatcattcccgaaggcactgtgatcggctataaccacgaccatgacagggcaaaaggctttagggtgtccgagaaaggcattaccttagtcacccgcgatatgttagggctgccggtgggctacgagtaa

SEQ ID NO: 253683 - DNA, 734 bp, Unknown
  Bacterial polypeptide expressing nucleotide sequence isolated from the Sargasso Sea
aaagccagctatgccaagctcagtgccaggcaagccgggtacatgtttagcatccatgggtaactacatatttaatactgagttcttatttgagcaactaaagaaagatgctgaaaatgaagggtcaggacgtgattttgggcatgacataatacccgctattattgaagagcataacgtttttgcattcccattcagagaccctcaacaagaaggtcagccatattggcgcgatgtaggaacactcgactcattttgggaggctaacatggagcttgttatgcctgagcctcaacttgacttatacgacccagcgtggccaatttggacataccaagagcaattacccccagctaaatttatatttgatgatgacgacaggcgaggaatggcccttgattctacagtttcgggagggtgtattatttcgggttcggcagtaagaaaatcattgttgttttctaacgtgcatgtgcgctcgttttgtgaaattgaacaatcggttattttaccgggcgctattattaaccgcggatgtaaaattaaacgtgcaataatagacagaagctgtgaaatacctgcagggcttgaaataggttttgaccgtaaaacagatgaagaaaatggttttagggtatcaaaaaaaggcattgtacttgttacacgcgacatgcttagtgaacttgctaaaaagttagagcgtcaaacacaagaaaataagaaactagcttaat

SEQ ID NO: 253684 - DNA, 1297 bp, Unknown
  Bacterial polypeptide expressing nucleotide sequence isolated from the Sargasso Sea
aatgaagcgtgtgttggccataatcctcggaggaggaaaaggttctagactttaccctttaacaaaaatgagggctaaacctgcggtgccgttagcaggtaagtatcgtttaatagatatcccaattagtaattgtataaattcaggcatcgaaaaaatgtacgtattgacccagttcaatagtgcatctctaaatagacatataggaagaacctataatttaaatgggcctttcggtcagggatttgtagaggttttagccgcgcaacagactcccgatagccctaagtggtttgaaggtactgctgatgctgtaagaaaataccaatggttatttcaggaatgggacgttgatgaatatttaattttatcaggcgatcaactgtacagaatggactacagtttatttgttcaacatcatagagataatggtgctgacttaaccgttgcagctttacctgttgatgaagctcaagcagagggttttggcctcatgagaacagacgatcttggaaatattaaagaattcagtgaaaagccaactggagagaagttgaaggcaatggcagtagatacttcaaaatttggattaagtaaagagtcagctgccgaaaaaccttatctagcctctatgggtatttacgtttttagtagaaatacccttttcgatcttttaaataaatttcctaattatacggattttggtaaggacataattcctgaagcacttgataggggcgatactcttaaaagttatgtattcgatgattattgggaagatatcggaaccattggggcattctttgagtcaaaccttgcattgactgagcaaccaaaacctccatttagtttttatgatgagaaatttccaatttatactagacctagatttttacccccttctaaacttgtagatgctcaaattactgattcaattgtttgtgaaggtacaattttgaagtcatgtagtattttacattgtgttttaggtgtaagaagtaggattgaaagtgattcggttcttgaggatactcttgtaatgggagccgatttctttgaatcgcctgaagagaggattgcattaagaaaagggggcggaacacctcttggagtaggtgaaggaactactgtaaaaagagcaattcttgataagaatacaagaattggtgataatgtcgtgattattaataaagatcgagtagaagaagcagataagccagaattaggcttctatatcagaaatggaattgttgtagtagttaaaaatgcaactattgcaaacggaactgtaatttaa

SEQ ID NO: 253685 - DNA, 1297 bp, Unknown
  Bacterial polypeptide expressing nucleotide sequence isolated from the Sargasso Sea
aatgaagcgtgtgttggcaatcatcctcggaggaggaaaaggttctaggctttatcccttaacaaaaatgagggctaaacctgcggttcctttagcaggtaaatatcgtttgattgatatcccaattagtaattgtattaattctgggattaataaaatgtacgttttaactcagtttaatagtgcttctcttaacagacatattggtagaacctacaatttgagtgctccttttgggcaaggatttgtggaggtactagctgctcagcaaactcctgatagtccaaagtggtttgaaggtactgctgatgcagtaagaaaatatcaatggttgtttcaagagtgggatgtggacgaatatttaatattgtctggtgatcagctctatagaatggactatagtttattcgttcaacaccatagagataataaagctgatttaacagtagctgcgttacctgttgatgaatctcaggctgaaggttttgggcttatgagaacagatgatttgggtaatattaaagaatttagtgaaaagccaactggtgagaaattaaaatcaatggcggttgatacctctaagttcggattaaccaaggaatcggcatcagagaaaccgtatcttgcctcgatgggcatttatgttttcagtagaaagacgcttttcgatctcttaaataagttccctagttatacggattttggtaaagatataatccctgaggcattaagtagaggggatacactaaagagttatgtttttgatgattactgggaagatatagggactataggagcattttttgaatcaaacctagcattaacacaacaaccaaaacctccgtttagtttttatgatgaaaaatttcctatatatactaggcctagatatcttccaccatcaaaacttgtagatgctcaaattactgattcaatagtttgtgaaggaactattttgaaatcttgtagcatcttgcattgtgttttaggtgtgagaagtagaattgaaagcgattctgttattgaagatactcttgtaatgggatctgatttttttgaatcgctagaagagaggattgaattaagaaaaggtggtggtactcctcttggagtaggggaaggttcaactataaaaagggcaattcttgataagaatgcaagaattggggataacgtggtgatagtaaataaggatagagtagaagaagcagataaaccaaaccttggattttatataagaaatggaatcgttgttgtagttaaaaatgcaactattgctaacggaacaattatttaa

SEQ ID NO: 253686 - DNA, 1216 bp, Unknown
  Bacterial polypeptide expressing nucleotide sequence isolated from the Sargasso Sea
tgctgtgccttggcaggtaagtatcgtttgatagatattcctattagtaattgtataaattcaggcatcgaaaaaatgtacgtattgacccagttcaatagtgcatctctaaatagacatataggaagaacctataatttaaatggccctttcggccaaggatttgtggaagttttagctgcgcaacagactcctgatagtcctaagtggttcgaaggtactgccgatgctgtaagaaaataccaatggttatttcaagaatgggatgttgatgaatatttaatattgtcaggcgatcaactgtacagaatggattacagtttatttgttcaacatcatagagataatggtgctgatttaactgttgcagctttacctgttgatgaagctcaagcagagggttttggcctcatgagaactgacgatcttgggaatataaaagaatttagtgaaaagccaactggagagaagttgaaggcaatggcagtagatacttcaaaatttggattaagtaaagagtcagctgccgaaaaaccttatctagcctctatgggtatttacgtttttagtagaaatacccttttcgatcttttaaataaatttcctaattatacggattttggtaaggacataattccagaagcacttgataggggagatactcttaaaagttatgtatttgatgattattgggaagatatcggaaccattggggcattctttgagtccaaccttgccttgactgagcaaccaaaacctccatttagtttttatgatgaaaaatttccaatttatacaagaccaagatttctccccccttctaaacttgtagatgctcaaattactgattcaatagtctgtgaaggtacaatcttgaagtcatgcagtattttacattgtgttttaggggtaagaagcaggattgaaagtgattcggttcttgaggatactcttgttatgggggcagatttctttgaatcgcctgaagagaggattgaattaagaaaaggaggcggaacacctcttggagtaggtgaaggaactactgtaaaaagagcaattctcgataagaatacaaggattggggataatgttgtgataattaataaagatcgagtagaagaagcagataagccagaattaggcttctacataagaaatggaattgttgtagttgttaaaaatgcaactattgcaaacggaactgttatttaaa

SEQ ID NO: 253687 - DNA, 1264 bp, Unknown
  Bacterial polypeptide expressing nucleotide sequence isolated from the Sargasso Sea
atgtctaatgtacgttatatcagtaatttaactcgtgaaacctatgcattgattctggctggtggccgaggctcgcgcttacatgaactcaccgactggcgcgctaaacccgcgctgtatttcggtggtaagtttaggatcatcgattttccgctgtcgaattgcatcaactcggggatccgccgcgttggggtggtgacccaatataagtcgcactcgttaattcgccacgtgatgcgcggttggggccactttaaaaaggaattaggtgagtcggtggagatccttcccgcctcacaacgttactctgagaattggtatcaaggcacggccgatgcggtattccaaaatatcgacatcatccgccatgagctgccaaagtacgtaatggtgctctcaggtgaccatgtgtatcgcatggattacgctggcttactggccgcccatgccgaatccggcgccgatatgacagtctcctgcctcgaagtgcccgtggccgaagcggcgggcgcatttggggtgatggaagtcgatgacgagatgcgtatcctaggatttgaagaaaaacccaagcatcctaaacattcccctagcaatcccgagaagtgcctcgcctcgatgggcaactatgtgtttaacactgagtttttgttcgaacagttgaagaaagatgcgcaaaacgccaattccgatcgcgattttggcaaagacattattccctcgatcatcgaaaaacataaagtgtttgcctatccctttaagagcgccttccccaacgagcaagcctactggcgcgatgtgggcaccttggattccttctggcaggccaatatggaattgttatcgccaacgcctgccttaaacctctacgatgccaaatggccgatttggacctatcaggagcaattgccccccgccaagtttgtgttcgacgatgacgatagacgcggcatggcggtggattcgattatttccggcggctgtattatctcgggtgcgaccgtgcgccgcagcgtattgtttaacgaggtgcgggtctgttcctactccgtggttgaggattcagtagtgctgcccgatgtggtggtgctgcgccactgtaagattaaaaacgccatcatcgacaggggctgcatcatccccgaaggcacagtgattggttataaccacgaccatgacagggcaaaaggctttagggtgtccgagaaaggcatcaccttagtcacccgcgatatgttagggctgcccgtgggctatgagtaag

SEQ ID NO: 253688 - DNA, 871 bp, Unknown
  Bacterial polypeptide expressing nucleotide sequence isolated from the Sargasso Sea
gctggcgggcgaccatatctacaagatggactacacgcgcatgctcgcggatcacgcggaaagcggcgcggattgcacggtcggctgcatcgaggtgccgcgcatggacgccgtggccttcggcgtgatgcatgtggatgaaaaccggcgcgtaaccggcttcgtcgagaaacccgccgatccgccctccattccgggccgtcccgacgtggcgctggcgagcatgggcatctacgtattcagcgcagattatctgtacacgttgctcgaagaaaacatctcgagcgtcgataccgatcacgacttcggcaaagacatcctgccgcgggtcgtcacgcaaggcacggcgattgcgcatccgttcagcatgtcctgcgtgtcgtcggatccgagcgtggagccctactggcgcgacgtcggcacgatcgacgcctactgggcagccaacctcgacctcgcctccaccattccgacgctcgacctgtacgaccgcaactggccgatctggacgtaccaggagcaactgccgcccgccaagttcgtccgcgacatgaaaggcctgcaaggcaccggcaacaacctgatcgtatgcggcggctgcgtaatttcgggttcgcagatttcgcgctcggtgctgtcgtcgaatgtgaaagtgagttcgttctgtaacatcaatgaggcagtcttattgccgcaggtcaccgtcggcgcgagctgccggttgcaaaaagtggtgatagaccgcggctgcaccattccggacggcaccatcatcggcgaagacccggtagccgacgccgaacgcttttatcgcaccgacgacggcgtggtgctggtgacgcccgaggcgctgcagaagaagggaaagtga

SEQ ID NO: 253689 - DNA, 1042 bp, Unknown
  Bacterial polypeptide expressing nucleotide sequence isolated from the Sargasso Sea
aatgaagcatttaagccgcgcctggcgagtgacaggcttaaccaacagatttattgatcccatccctgcacagatgcaaacaggtaaacactggtatttgggcacggcagatgcggtctatcagaatatccatctgatccatggcctggaccctgaagaagtctgtgttttcggcggtgaccatatttacaaaatggatgtgcggcaaatgctgaacttccatcgccagaaccacgcactcttgactgttgcagctattcctgtccatgtgtctcaggctcatgagtttggtgttattgaggtcgacagcacgggcaaaatggtcggttttgaagaaaaacctaaatcgaacccaaaaactattccgggccggcccgattatgtgctggcgtctatgggtaattatatttttgatgctaaaaccttagttgaggtgctgaacgaagatgcagcgcaaatagactcgaaacacgattttggccataacattattccgaaaatgtacccgcaaggcagtgtttatgtatatgacttctcaacaaacgtgatccgtggtgagcaggaagattccaaaggctactggcgtgatgtaggaactttggattcatattatgaagctaatatggatttaatttctgtgcagccgcctttggatttatacaataaatactggccactgcgcagttatacgcctcctatgcctccggctaaatttgtgcatgatgaagccaacagaacgggccaggcaataagttccatggtggcctcaggctgtattgtcagtggtgctatcgtgtatcagtctattttgggttataacaccgtagtgcacagccatgcttatattgaaaaaagtgtcttgatgggcaataacgatataggtcggggttgtcgtattcgccgtgctatcatcgataaagatgtgaaaatagcaccgaacaccattattggtgaggatccggtgctcgaccgtcagcgtttccatgtatcggctgatggtgttgtggtgatcccaaaaggggcaatggtgggatttgactga

SEQ ID NO: 253690 - DNA, 1231 bp, Unknown
  Bacterial polypeptide expressing nucleotide sequence isolated from the Sargasso Sea
gctgaacgagaccatggccttggttctcgcaggagggcggggcagtcgcctcaaacagttgacggacaacagggcgaaaccggcagtgcatttcggcggcaagttccgcatcatcgacttcgtactctccaactgcatcaactccggcattcgccgggtcggggtagtgacccaatacaaatcccacagcctgctgcgccacctgcagtccggctggtcttttctgcgttaccagatgaacgagttcatcgacctgctgcccgcccagcaacgggtggacgaggtcaactggtatcgcggcaccgccgatgcggtctaccagaatctggacatcattcgcgatcacggccccaaatatgtggtagtgctggcaggggatcacatctacaagatggattacgccgccatgctgctcgatcacgtcaacatgggggccagggtcacagtggcctgcatcgaggtgccgcgggatgaggcgagcgccttcggggtaatggcggtggatggggatcgcaagatcaacgccttcgtcgagaaacccgccaacccgcccgccatgccgggcaagcccgacaccgcgctggcctccatgggggtctacatcttcgaggccgactacctctaccagttgctggaagaggatctcgccaacccggcctcccaccacgatttcggcatggacgtgatcccgcgggtggtgcaagagggcaccgcctatgcccacccgttcagcatgtcctgcgtcggctgctgcccgcaaaagcgcccctactggcgcgacgtgggcacggtggattcgttctgggaagccaacatggatctcgcctccgtcaccccggagctcgacatctacgatcaggactggcccatctggaccagccagaacatgaccccgcccgccaagttcgtgcaggacagaaacggccagcacggcatgaccatcaactccatgtttgccggcggcaccatcgtcagcggctccttcatcgtgagctcggtgctgtttaccaatgtgcgggtcgactccttctgcaccttggatcaggcggtgatcttccccggggtcgagataggcccgggctgccggctgcgccgggtggtgatcgacaagggctgcaagctgccggaagggctggtggtgggggaaaacgcctgcgaggatgcccgccgcttctaccgctccgagcagggcatagtgctggtcaccaaggagatgctggccagattgtga

SEQ ID NO: 253691 - DNA, 717 bp, Unknown
  Bacterial polypeptide expressing nucleotide sequence isolated from the Sargasso Sea
gatttggactcagtgcggattcggccaaggagcgtccctactgggcgtcgatggggatttatgtcttcagcagagacactctgttcgacctgctcgattccaatcctggttacaaggacttcggcaaggaagtcattcctgaggccctcaagcgtggcgacaagctgaagagctatgtctttgacgattattgggaagatatcggaacgatcggagcgttctacgaggccaacctggcgctcacccagcaacccacaccccccttcagcttctacgacgagaagttcccgatctacactcgtccccgctatttacccccgagcaaactggttgatgctcagatcaccaattcgatcgttggcgaaggctcaattttgaagtcatgcagcattcatcactgcgttctgggtgttcgcagtcgcattgaaacagatgtggtgctgcaagacacgttggtgatgggcgctgacttctttgaatccagtgatgagcgtgcagtgcttcgcgagcgtggtgggattccggtcggggtgggtcaaggtacgaccgtgaaacgcgccatcctcgataaaaacgcccgcatcggatccaacgtcaccattgtcaacaaggatcacgtcgaggaagctgatcgctccgatcagggtttttacatccgcaatggcattgttgttgttgtcaaaaacgccaccatccaggacggcactgtgatctgac

SEQ ID NO: 253692 - DNA, 1204 bp, Unknown
  Bacterial polypeptide expressing nucleotide sequence isolated from the Sargasso Sea
agggggcgagggaccaggctggcacctttgactggagtcagagctaaacctgcggtgccttttggtggcaattacaggattattgactttgtactgaataacttcgtcaattcagatttgttgcagatctttgtgatcactcagtttaaatcacattcactgatgaaacacttaagccgggcctggcgggtgacgggcttaaccaacagattcattgaccctattcctgctcagatgcaaacgggtaaacattggtatctgggtacagcggacgctgtttatcagaatatccatctgatccatggtctggatccggaagaggtgtgtgtgttcgggggagatcacatctataaaatggatgtacggcaaatgctgaactaccatcgtcagaacaatgctctgctgacggtggccgctatcccggtgcatgtgtctcaggctcatgagtttggtgtgatagaagtcgatagcacaggcaaaatgataggttttgaagagaaacctaaatcgaatgctaaaactatccctggtcggccagactacgtattggcgtcgatgggcaattatatttttgatgctaaaaccttagttgaggtgctgaacgaagatgcagcacaaattgattcaaagcatgattttggtcataacattattccgaagatgtacccgcaaggcaccgtctatgtctatgacttctctactaacgtgatccgtggtgagcaggcagaatctaaagggtactggagagatgtagggactttagattcttattatgaagccaatatggatttaatttcggttcagccgccactggatttatacaacaaatactggccactacgcagttacacgccaccaatgccacctgccaagtttgtccatgatgaggccaacagaacagggcaggcgataagttccatggtggcttctggctgtattgtcagcggcgctatcgtgtatcaatctattttgggttataacaccgtagtgcacagccatgcttatattgaaaaaagtgtgttgatgggcaataacgatattggtcggggttgtcgtattcgccgtgctatcatcgataaagatgtgaaaattgcaccgaataccattatcggcgaagatccggtgctggatcgtcagcgtttccatgtatcggctgacggtgttgtagtgatccccaaaggggcaatggtaggatttgactgat

SEQ ID NO: 253693 - DNA, 1276 bp, Unknown
  Bacterial polypeptide expressing nucleotide sequence isolated from the Sargasso Sea
atgaaatcaaccggcgctagatttgtaagtcgccttacaaataatacaatggctttagttttggctggtggtcgtggtcaacgtttgggcgttttaacagactggagaacaaagcctgctgttcctttcggcggtaaatttcgaataatagattttacactctcaaactgtatgcattcaggtataaacaaaatctgtgtattaactcagtataaatcccactctttaataagacatctgataaagggatggacaaaaattaataatgatagtggggattttttagatatagttcccgcccaacaatggacagataatgaaacttggtttcaaggaactgcggatgctgtttttcagtcactcgacataatagagagtcatggcccagaatatgtcattattttggctggtgatcatatttacaatatggactacggcgaaatgcttgccgagcacgttaataatggggcagatttctcagttgcttgcattgcaatcgaggcagcaaaagcggctaatcaatttggagttatgagtgttaacgagaatggtcgcataattgatttcaaagagaagccaaaagatccaaagacaatatcaggtgaggataataaagccttagtcagcatgggtatttatgttgtttcacaaaaataccttgcctctatgttgcgagatgatgcagtttcggaaagatcaaaccacgattttggtaaagacattattcctgagggattgcggagaggagatcattttcatgcatatgaattccgaaacccaaccggtgatgatcccccatactggagagatgttggaactgtagatagttattacgcagcaaacatggagttgctcgaagcagagcctcctttaaacttgtacgacaaaggttggcctatagccacttatcaaaggcagttaccccctgcatttataaagcctggcaaaaaagatagtaaaattgatgcctctattattagtagcgcctgtttaatcgagaattcagaaattaggcgctcgataattttttctgaggtacgcgttgaatcggggtgtaaacttagcggggtacttgctctaggtggctgtagagttggtgctaactgccatttgcagaatgtaattctcgataatggttgtattgtcccgcccggttcagttattggatttgatctacaagcagatgctgaaaaatttaatgttacaagggaaggcattgttcttatcaatcgacaaatgcttggacaaggtatcagctataaccctgagttttagc

SEQ ID NO: 253694 - DNA, 391 bp, Unknown
  Bacterial polypeptide expressing nucleotide sequence isolated from the Sargasso Sea
atggcagatcaaagttctcgttacatcagtaaccttactcgcgatacgtatgcgctaattctcgcgggtggtaaaggttctagactacacgagctcacaaattggcgagccaaaccggcactttatttcggcggtaaatttagaataattgattttccgctttcaaattgtgttaattcaggcattcgacgaataggcgtggttactcaatataagtcacattcactcattcgtcatctcgtcagaggttggggtcattttaaaaaagaactcggcgaatctgttgaaatcctccccgcttctcagcgtttttctgacagctggtacgaagggacggctgacgcggttttccaaaacattgatatcattcgtgatgagctaccaaaatagt

SEQ ID NO: 253695 - DNA, 1002 bp, Unknown
  Bacterial polypeptide expressing nucleotide sequence isolated from the Sargasso Sea
aatgaagcgtgttttggccatcatcctcggaggaggaaaaggttctagactttaccctctaacaaaaatgagggcaaaacctgctgtcccgttggcaggtaagtatcgtttaatagatatcccaataagtaattgtataaattcaggtattgaaaaaatgtacgtattgactcagttcaatagtgcatctttgaatagacatatcggaagaacttataatctaaatggaccttttggccagggatttgtggaggttttagctgcacaacagactcctgatagtccaaagtggtttgaaggtactgctgatgctgtaagaaaataccaatggttatttcaagaatgggatgttgatgagtatttgatattgtctggtgatcaactttataggatggattacagtttgtttgttaaacatcatagagataatggagctgatttaactgtcgcagctttacctgttgatgaggctcaggcagaaggattcggcctcatgagaacagatgatttaggaaatataaaagaattcagcgaaaagcccactggtgagaagttgaaggcaatggctgtagacacctcaaaatttggattaactaaggaatcagccgcagaaaaaccttatctagcctctatgggtatttacgtttttagtagaaatactctttttgatcttctaaataaattccctagttatacggattttggaaaggacataataccagaggcacttaatagaggcgatactcttaaaagttatgtattcgatgattattgggaagatataggaactattggtgcattctttgagtcaaatttggctttaactgaacaaccaaaacctccatttagtttttatgatgaaaaatttccaatttatacaaggcctagatttctcccaccttccaaacttgtagatgctcaaattactaattcaatagtttgtgaaggtacaatcttgaagtcgtgcagtattttgcattgtgttttaggtgtaagaagcca

SEQ ID NO: 253696 - DNA, 1264 bp, Unknown
  Bacterial polypeptide expressing nucleotide sequence isolated from the Sargasso Sea
atgtctaatgtacgttatatcagtaatttaactcgtgaaacctatgcattgattctggctggtggccgaggctcgcgtttacatgaactcaccgactggcgcgctaaacccgcgctgtatttcgggggcaagtttaggatcatcgattttccgctgtcgaattgcatcaactcggggatccgccgcgttggggtggtgacccaatataagtcgcactcgttaattcgccacgtgatgcgcggttggggccactttaaaaaggaattaggtgagtcggtggaaattctgcctgcctcacaacgttactctgagaattggtatcaaggcacggccgacgcggtattccaaaatatcgacatcattcgccatgagctgccaaagtacgtgatggtgctctcgggtgaccatgtgtatcgcatggattacgctggcttactggccgcccatgccgaatccggcgccgatatgacagtctcctgcctcgaggtgcccgtggccgaagcggcgggcgcgtttggggtgatggaagtcgatgacgagatgcgcatcctaggatttgaagaaaaacctaaacaccctaaacattccccaggcaatcctgagaagtgcctcgcctcgatgggcaactatgtgtttaacactgagtttttgttcgaacagttgaagaaagacgcgcaaaatgccaattccgatcgggattttggcaaagacattattccctcgatcatcgaaaaacataaagtgtttgcctatccctttaagagcgccttccccaacgagcaagcctactggcgcgatgtgggcaccttggattccttctggcaggccaatatggaattgctatcgcccacgcccgccttaaacctctacgatgccaaatggccgatttggacctatcaggagcaattacctcctgctaagtttgtgttcgacgatgacgatagacgcggcatggcggtggattcgattatatctggcggctgtattatctcaggggcaaccgtgcgccgcagtgtattgtttaacgaggtgcgggtttgttcctactcagtggttgaggattcagtcgtgctgcccgatgtggtggtgctgcgccattgtaagattaaaaacgccatcatcgacaggggctgcatcatccccgaaggcacagtgatcggttataaccacgaccatgacagggcaaaaggctttagggtgtccgagaaaggcatcaccttagtcacccgcgatatgttagggctgccggtaggctatgagtaag

SEQ ID NO: 253697 - DNA, 810 bp, Unknown
  Bacterial polypeptide expressing nucleotide sequence isolated from the Sargasso Sea
gatgaaacgggttctcgcaatcattctcggtggcggggcgggtacgcggctgtacccactcaccaagatgcgggccaaaccagcggtgcccttggctggcaaataccgcctcatagatattccggtcagcaactgcatcaacagcgggatcaacaagatctatgtgctgacgcagttcaacagcgcatcactcaatcgccatatcgcccagaccttcaacctctcgtctggctttgaccagggatttgtcgaagtactggctgctcagcagacacccgatagccccagctggtttgaaggcacagccgatgcagtgcgcaaatacgaatggctgcttcaggagtgggatatcgatgaagtgctgatcctctccggcgaccagctctaccggatggactacgcccatttcgtcgcccaacaccggggtagtggtgctgatctcaccgtcgcggccctgccggtggatcgcgagcaggcccagagctttggcctgatgcataccgataccgagggatcaatcaccaagttccgggaaaaaccaaaaggtgaagcccttgatgagatggccgttgataccgagcgcatgggcctcagcgctgaggaagccaagcgacgtcccttcctggcctcgatgggcatctacgtgttcaagcgcgatgtcctgttccggttattggctgagaacccaggggccaccgacttcggcaaggaaatcattcccaaagcactcagcgatggcttcaaccttcgctcctacctctttgatgattactgggaagacatcggaaccatccgtgctttctatgaagc

SEQ ID NO: 253698 - DNA, 994 bp, Unknown
  Bacterial polypeptide expressing nucleotide sequence isolated from the Sargasso Sea
ggcatcacggatcgcttcatcgacccgatcccggcccagatgcggatgggcaaacgctggtatgacggcaccgccgacgccatctaccagaacctgcgcttcatcgagatctccgaccccgagcacgtctgcatcttcggttccgaccacatctacaagatggacgtgagccagatggtgaccttccacaagcagaaggccgccgccctgaccgtcgccgccctgcgcatgcccatcgaggaggcgagcgccttcggggtgatcgaggtggatcaggagggccggatgatcggcttcgaagagaagcccaagcgacccaagcacatccccggcgatcccacccaggcgctggtctccatgggcaactacatcttcgagaccgaggcgctctatcgcgaactcaaacgtgatgccgccgaggagaactccagccacgatttcggcaaggacatcatccccagcctgttcccgcgcgcccccgtctatgtctatgactacagcaccaatgtcattccgggcgagaaacccaacgtctactggcgcgatgtggggacgctggactcctactggcaggcacacatggacctggtggccgacgatgcccccttctctctctacaaccgcaagtggccgctgcatacccactacccgccgctgccgcccgccaccttcgtcgacaccgacgactgcaaggtgaagatcgccaactcgctgatctccggcggctgcttcattcagggcagccagatccagcgctccatcctgggttttcgctgcaacgtggggccttgcagccacatcagcgagtcggtcctgctcggggacgtgaagatcggcgagggctgctccattcgccgtgccatcatcgacaagaacgttgaaattgcgcccggcaccgtgatcggtgaaaatctggaccatgacagagaacgatttaccgtgtccgaaggcggtatcgtcgtggtacctaagggagcaagagttggctattaac

SEQ ID NO: 253699 - DNA, 969 bp, Unknown
  Bacterial polypeptide expressing nucleotide sequence isolated from the Sargasso Sea
gttggtatgaaggaaccgcagacgcggtcttccaaaacatagatatcattcgtgatgagcttccaaaatatgtcatgatcctttcgggcgaccacatataccgtatggactacggtgatatgttggccaagcacaaagaatctggtgcaaaaatgacggtttcatgtatgtcagtgcccttggaagaagccgcgggtgcgtttggcgttatgtcggttgatgaaaactatcgtattaacggatttgaagagaagccagctaacccgactccacttcctaatgacccaacgcgctgcttagcatctatgggcaattacgtgtttgatacagagtttttattcgagcaattacgtgttgatgctgaaaatatgggctcgcagcgagacttcggtaaagacatcattccatcaatcatcgccgaccaccctgtatacgcctatccttttgagaaaagtggcggagacaacgcctattggcgcgacgtaggtactatcgattcattttgggaagccaatatggaaatggttgctcctgtacctcaattgaacctctacgatagaaaatggcctatatggacataccaagagcaactgccaccagcaaagtttgtttgggaagaccacgacagacgtggtgaagcgattaactccgtagtttctgggggctgtataatttcaggctctacacttcgttcatctatttgcttttccaacgtacgcgtacattcctatggccttattgaagacgccgttattcttcctgatgtagaaattaaacgccattgcaagctgaaaaaggtgattatcgatcgaggttgtgtcattcctgaaggcactacaattggttacgatcacgagcaagacaaggcacgtggattccgcgtatctgaaaaaggcgtggtactggtgacgcgagaaatgttaggtcagcccgtgggtggactaagcaagcctagaaagcacgactaac

SEQ ID NO: 253700 - DNA, 859 bp, Unknown
  Bacterial polypeptide expressing nucleotide sequence isolated from the Sargasso Sea
ggatcacatctacaagatggattacgccgccatgctgctcgatcacgtgcgcctcggcgccaaggtgacggtggcctgcatcgaggtgccacgggcggaggcctccgccttcggggtgatggacatcgacgagcagcgcaagatccgcgccttcgtggagaagccggccaatccgcccgccatgccgggcaacgagaacgtctccctggcctccatgggcatctatatcttcgaggcggagtacctctatcagctgttggaagaggacatccacaaccaggagtccaaacacgatttcggcatggacgtgatcccgcgcatcgtgggggagggcaaggcgtttgcccacccgttcaccatgtcctgcgtgggggccaaggaggggcagaaaccctactggcgcgacgtgggtaccctggattcgttctgggaggccaacatggatctcgcctccgtggtgcccgagctcgacatctatgacgagaactggcccatctggaccagccagaccatgacgccgccggccaagttcgtgcaggacagaaacggccagcacggcatgaccatcaactccatgttcgcggggggctcgatcgtcagcggctccttcgtgctcaactccgtgctgttcacccatgtgcgggtgcactccttctgcaccctggatcaggccatcattttccccggcgtcgagattggctcgggttgccggttgcggcgggtggtggtggacaagggctgcaagctgcccgacgggctggtggtgggggagaacgccgacgaggacagccgccgcttctatcgctccgagcagggtatcgtgctggtaaccaaggagatgctggccaagctggggtga

SEQ ID NO: 253701 - DNA, 100 bp, Unknown
  Bacterial polypeptide expressing nucleotide sequence isolated from the Sargasso Sea
atgaaaaataatgcaatttatcctggtacatttgatccaataacttttggccacatagatgttattaaaaaaggattaaaaattgctgatactataataa

SEQ ID NO: 253702 - DNA, 226 bp, Unknown
  Bacterial polypeptide expressing nucleotide sequence isolated from the Sargasso Sea
atgagaacagcaatttacccaggaactttcgatcctataactcttggtcatatagatgttataaaaaaatctctaaagattgttgacagggtagttatagccactacagacaatattaataaagattattttttttctatagatgaaagaatgtcaataattaaaaaatctttatttaatgatttaaagcttaataaaaagaaaattttagtagtatcttttgata

SEQ ID NO: 253703 - DNA, 285 bp, Unknown
  Bacterial polypeptide expressing nucleotide sequence isolated from the Sargasso Sea
aatgaacaaagtcgcaatttatccaggaacctttgatccaataacatatggtcatattgatgttattaaaaaagcaataaaactatttgataaaatagttatcggtgtatcaaatgtaagtagtaaagattacttatttacttctgatgaaagaattaatattgttaataaagcgttgttcaatgacttaaaactaaatagaaaaaaaattttagttgtttcttttaattcattgactacagatttatgtaaaaaatataaatcaaatataatcttaagaaggtt

SEQ ID NO: 253704 - DNA, 275 bp, Unknown
  Bacterial polypeptide expressing nucleotide sequence isolated from the Sargasso Sea
aatgaaaaaagcgatttaccctggaacttttgatccaattacatttggacatattgatcttattaaaaaatctttaaatatttttgatcaagttattgttgctgtttcagatggaaaaacaaaaaactatctttttgatgcaaaggaaagagaagacttaataaaaaaagctctatttaacgacttgaaatttagtaaaaaaaaaataatcgtgacttcattcaaaaccctgactactgatttttgtaaaaaaatgaaatcaaatgtcattataa

SEQ ID NO: 253705 - DNA, 166 bp, Unknown
  Bacterial polypeptide expressing nucleotide sequence isolated from the Sargasso Sea
atgaaaaatattgcaatatatcctggaacatttgatccaatcacttatggacacattgatgtaattaaaaaaggaattaatttatttgataaattaattgtagcagtttctgaaggtggtgaaaaaaatcatctgttttcaacagatgatagaattaatctgtcaa

SEQ ID NO: 253706 - DNA, 256 bp, Unknown
  Bacterial polypeptide expressing nucleotide sequence isolated from the Sargasso Sea
atgaaaacaggaatttacccaggaacatttgacccaattactttaggacatatagatgtaatcaaaaaatctttaaaacttgttgatagagttgttgtagcaacaacagataatattaataaagaatattatttttctatagaagacagaatatcaataattaagaactctctatttaaagatttaaaactaaataaaaaaaaaataatagttacatcatttgagtcattgactaaagatatgtgtaaaaaatata

SEQ ID NO: 253707 - DNA, 242 bp, Unknown
  Bacterial polypeptide expressing nucleotide sequence isolated from the Sargasso Sea
aatggacaaaataggaatttatccgggaacatttgatccattaacatttggacatattgatgtaataaaacgttcactaaaaataattgataaactaataattggtatagcagataacgataataaaactcctttattatcaattgaagaaagaaaattaattattgataatgatataaaagattactttaatcaaaataataaaattattattaaaaatattgatggcttacttactgatt

SEQ ID NO: 253708 - DNA, 681 bp, Unknown
  Bacterial polypeptide expressing nucleotide sequence isolated from the Sargasso Sea
tttgaccagtgcaatagctctatcgatcgacatgctcctacctgccttcgccgatttacgttcttcttttggtatggagcccacctcaaacctgccggggctaacgatcacttgcattttcgtgggcatggctatcgggatgcccatatatggccccatggcagatacttacggacgtatacctgtcttaagagctggcatcgccctattcgcgttaggggcactcggatccacgctggctccaaacctcgcctttctcctagcttccagagtgctttggggaatcgggtgcgcagctccccgcactattagccaagcgatgatccgagacaaatttgaaggcgatgacatggctcgagtcatggcaatcgttcaaaccattttttttgccggacccgtactcgctccggtgatcggaaacctactggtgcaagcaggaggatcttggcgcctcacgatgcttttcggtttggttatagccattgtgatttggttgtggtccttcagaatcaccgagtcactagacagcgccaatcaacgcgatctcagtttctctgcaacaaaacagggactcaaagtcgtcttcgagaaccgagtaacgattggctatgcgataacccttctgttctcaggcggagctttctacagcttcctgagtagttccgaactaatcatcagcga

SEQ ID NO: 253709 - DNA, 922 bp, Unknown
  Bacterial polypeptide expressing nucleotide sequence isolated from the Sargasso Sea
gatctccgttaagagagagaatcttcttggaaaagggcaaagtttgagtttaagtacccagctagcagcatcgaagaccgcctttagtttgtcatttactgagccatattttcgtggacgggatgtggctgctggttttgacctgtttcacatagaacgcgataggcaggatgttagtagttatgatttaaagaatacgggagcaggtgtgcgtacatctttttctttgagtgaggaggttagacaaagttggcagtatggttataaagtaacggatataacaaaggtagctgcaaacgcttccagcctaattaaagctcaagaggggactcggcaaatttcagaattagggcacgttattgttcatgataccagagatagtaagctaagtcctacgatagggaacaaagtgtcaatgagtaacgatttggcaggtttgggaggcgacgtatcttattttagaaatgacctttctggaacgaattattatactccttttaaagactggcttattgcttctcaccttaggttgggacatatactcggtatttcggaggatgttcaaatcccagagagatttttcttgggtggttcgaccctaaggggctttgccgagggtggggttggtccgagagacaaaacaacgttagatgccctagggggggagttcatctataatggatatgttgagacatctatgccaattggacttccggccgattttgctattagaggtaggttattttctgattttggtggggtaactggagtatctcctagtaatgctaatgttgttgatgacaataccccaagggtttctattgggatgggcttaggctgggtgtctccatttggtcctattagcctagattttgctcatcctgtaaaaaaagaagatctggatcaggaagaaaaatttcgt

SEQ ID NO: 253710 - DNA, 283 bp, Unknown
  Bacterial polypeptide expressing nucleotide sequence isolated from the Sargasso Sea
atgaaaaaaacagcaatataccctgggacttttgatccaattacttacggtcatattgatgtaatccaaaaatccttaaaaatttttgataaaattattgttgctatatcaaattataatcaaaaaaataatttattttctattgatgagagaatcgatattgtaaacaaagcacttttttcagatcttagattaaataaaaataaaataaaagtaatttcatttgactctcttactactgatttgtataaaaaatataaatctaatataatattaagaggtt

SEQ ID NO: 253711 - DNA, 160 bp, Unknown
  Bacterial polypeptide expressing nucleotide sequence isolated from the Sargasso Sea
aatgaataaagttgcgatttatccaggaacttttgatccaataacatttggacacatagatgttatcaaaaagggattaaaaatatttgataaaatcatagttgctgtatcaaatgtggataataaagactacctttttgatacattggagagaattgaa

SEQ ID NO: 253712 - DNA, 235 bp, Unknown
  Bacterial polypeptide expressing nucleotide sequence isolated from the Sargasso Sea
atgattggaaaaataggtttatatccaggcacttttgatcctattacatatggacatatagatgttatccgaagagctttaaaaattgttagcaaactaataatagctgtttcgaatgactacacaaaagattatatgttttcttctgacgagagagttgaaataataaaaaactcactttttaatgatttaaaaatcaataaaaaatcaattaaagttttatcatttaacacac

SEQ ID NO: 253713 - DNA, 100 bp, Unknown
  Bacterial polypeptide expressing nucleotide sequence isolated from the Sargasso Sea
atgaataaagttgcaatttacccaggaacgttcgatccaattacttttggccatattgatgtaataaaaaaaggtttaagattatttaataaaatagtcg

SEQ ID NO: 253714 - DNA, 211 bp, Unknown
  Bacterial polypeptide expressing nucleotide sequence isolated from the Sargasso Sea
atgcgcactgcaatttatccaggcacttttgacccgattacatatggtcatatagatgtaatcaaaaagtcacttaaaatttttgatagagttgtaattgctgcagcagaaaatataaataaagattacttgttttctgttgatgagcgaattgatataataaaaaattctttaattaaagatcttaaaatgaacaagaaaaaaattccaa

SEQ ID NO: 253715 - DNA, 248 bp, Unknown
  Bacterial polypeptide expressing nucleotide sequence isolated from the Sargasso Sea
aatgaaaaaaactgctatatacccaggtacatttgatcctattacgtatggacacatagacgtaatacataaatctttaaaaatagttgataaagttattgttggaatatctaatggtagccaaaaaaattatttattttcaatagatgaaagaattgaaattgttaataaagctcttttttcagacctaagatttaataaaaataaaataaaagtagtttcctttaactcattaactacagaattat

SEQ ID NO: 253716 - DNA, 256 bp, Unknown
  Bacterial polypeptide expressing nucleotide sequence isolated from the Sargasso Sea
tggcttgagagctatggggcaaagagatcctttagtagaatatcagaaagaaggctacgatctttttgaagaattaatttacaatgtaaaattatctgtagtaagacttttacttaattttgaatcttcaagtattgttaaagaagaagctttaaaggaaaaaagaactgaaaaaccaagtaaaaatgaaaagattggaagaaatgatccatgtcattgtgggtctggattaaaatacaaaaagtgtcatgggtaa

SEQ ID NO: 253717 - DNA, 418 bp, Unknown
  Bacterial polypeptide expressing nucleotide sequence isolated from the Sargasso Sea
caaagaggaagtgatttatttggggaggttctcattgcagtattagaaaacccctcaaaaaaggcaactttctcctgcgagagaagaatcgagcagattgaaaatgctactaaagatatcccaggttgcaggacaatagcttttaaaggattaactgttgattgtgctcgtgaaaacaatgctgatcttattttaagaggcttaagagcaatgagtgattttgaatatgaactacaagttgctcatacaaacagatctttaaataatcagtacgaaacaatatttctcgcgacagaaacgcaccatagctttttaagtagttccgtagttaaagaagtcgcaagatttggcggtgagattcgccatatggttcctgaatttattgctaaggatcttatgaaactaaatactaattaag

SEQ ID NO: 253718 - DNA, 208 bp, Unknown
  Bacterial polypeptide expressing nucleotide sequence isolated from the Sargasso Sea
agtgattttgagtatgaacttcaaatagcacatactaataaatctctaaatagtaaaatagaaaccatttttctttctacgaatacaaactttagctttttaagtagttcattggttaaagaggttgctaaatttggcggagaaataaatcatatggttcctgaagctgtggaacatgatttaaaagattattttaaaaataattaaa

SEQ ID NO: 253719 - DNA, 160 bp, Unknown
  Bacterial polypeptide expressing nucleotide sequence isolated from the Sargasso Sea
tatgagaactgcaatttaccctgggactttcgatccgataactttaggacatatagacgtaattaataaatcattaaaaatagttgacagattaataatagctatcacggacaatgttaataaagaatattttttctctcttgagaaagagtttctatag

SEQ ID NO: 253720 - DNA, 490 bp, Unknown
  Bacterial polypeptide expressing nucleotide sequence isolated from the Sargasso Sea
aatgaagcataaaacagttatatatccaggaacattcgatccaattcacatgggccatattgatattattgaacgagcatctcgaatttttgatgaagtgattattgccattgctgtaaatattgataaaaaccccctttttagtgttgaagaaaggatagagttagctatcgatgcaacatcgcatatagataatatcaaagcatattcaacagatggcttaattgctaattttgccaaagaacataatgcttgtggattaattagaggcttaaggcatgtttctgattttgagtttgagtttcaaatggccacaatgaataatcatcttaacccgttggtttcaacattgctcatggttacatctgataagtatgtccatttaaattcatctatggtaaaaaatgtttcaaaattaaatggcgatattgaaaaatatgtaccaggtaatgtattaaaggctttgaagcaaaaattcagtcataattaa

SEQ ID NO: 253721 - DNA, 213 bp, Unknown
  Bacterial polypeptide expressing nucleotide sequence isolated from the Sargasso Sea
aatgaaaaaaatagcaatttatcctggaacttttgatccaataacatatggacatatagatgttataaaaaaatctttaaaacttgttgataaaatatttgtagcaatttctgaaagtaatgaaaaaaaatgtcttttttcggtcgaagaaagaatttcaatggtgaaagcatctttgtttaatgatctgaattttaaaaaaagtaaaatcaa

SEQ ID NO: 253722 - DNA, 175 bp, Unknown
  Bacterial polypeptide expressing nucleotide sequence isolated from the Sargasso Sea
aatgaaacgaattatatatccaggtacatttgatccaattcacaatggacatttagatatagcaaaaagagctgctgaattatttgatgaattggtattagttgtggctgtaaataaagaaaaaaatccgcttttcgataatgatgagagaattcatctaattgaggaatgcatc

SEQ ID NO: 253723 - DNA, 154 bp, Unknown
  Bacterial polypeptide expressing nucleotide sequence isolated from the Sargasso Sea
gatgaaaaaatcagcaatttatcctggtacatttgatcctataacatttggtcatattgatgtaataaaaaaaggattaaaaatttttgataaaataatagttgctgtttctgagtcaaactctaaaaagtgtttatttgattcatatgaaaga

SEQ ID NO: 253724 - DNA, 227 bp, Unknown
  Bacterial polypeptide expressing nucleotide sequence isolated from the Sargasso Sea
aatgagtaaagttgcaatctatcccggaacatttgatccaattacgtttggccatattgatgttattaaaaaaggtttaaaactttttgataagattgttgtagcagtatctaacgttgaaaataaagattatttattcgactctgatgaacgaattgaaattgtaaaaaaagctttattttatgatttgaaactcaataaaaaaaaagttgtcgtaatttctttta

SEQ ID NO: 253725 - DNA, 454 bp, Unknown
  Bacterial polypeptide expressing nucleotide sequence isolated from the Sargasso Sea
atgaaaaaagcagtctttcctggttcatttgatcctattaccataggacacttagacattgttaagagaggaacaaagatttttgatgagattattattgcaattggtgataacacggataaaaaatatatgttctcaaaagaaaaaagagtagagtttgttgagagaacgttcagtgcttatgataagatcaaggttgattcatatcaggggctaacagttgatttttgtaaaaaaaataatattgaatttatgataagaggcctaaggaatcctgcagattttgaatttgagaaaagtattgctctaacaaatagggaaataacagggattgaaactatattttttctaacatcacctgaaaactcattcataagcagtagcattgtgcgtgaccttattataaacagaggtgactataaattatttattcccaagggcatcattctttaat

SEQ ID NO: 253726 - DNA, 292 bp, Unknown
  Bacterial polypeptide expressing nucleotide sequence isolated from the Sargasso Sea
atgagccggcgcatcgttatctatcccggcaccttcgatcctctgacatttggccatatggacatcatccagcgggccgccaggcttggtgacgagttgatcgtcgcggtggcttcgagtgccgggaaggggccgctgctcagtgtcgaggaacgcaccgaactggtggcgacggagacaaaacggatctttgacgacggtacggtcacgacgcccatccgggtcttgcagttctccaacctgttgaccgactttgcccgcgaacagaaggcctcgatcattttcgagggct

SEQ ID NO: 253727 - DNA, 487 bp, Unknown
  Bacterial polypeptide expressing nucleotide sequence isolated from the Sargasso Sea
tatgcaaaaaaaaagggttgctatttatcctggaacttttgatccggtgacctttggtcatattgacataatgcgccgcgccctaaaaatttttgaccatataataatcgcggtcgctttgaatcccaaaaaggaccctctcttctccctagaaaaacgtgttacttttataaaagaagcgacaaaaaacctgaaaaatttagaagtcttaccctttgataatttacttataaatttggctcatagtaaaaaagcatctgttgtcattaaaggtctaagagctataagtgattttgaatttgaattacaaatgggattaatgaaccgtacgctagatgaaaaaatagaaactttgtttatgattcccagtcaagaattttctttcttaagttcgaatcttgtaaaagagactgcacgccatgacggcgatgtttcaaagcttgttccaaaaattgtttttaaagaattgaagaaaaaatttaaatga

SEQ ID NO: 253728 - DNA, 220 bp, Unknown
  Bacterial polypeptide expressing nucleotide sequence isolated from the Sargasso Sea
tatgagaaagatcatttaccctggaacttttgaccctattcataatggtcatatagatattgctagccgagcttctaagcttttcgatgaactagaatttgtcgttgctatcaactctgataaaaagcctctattctctattgaaacaagattagaattaataaaacgatcaattgagcatattccaaacattaaagtcagtcagttcaagggactagta

SEQ ID NO: 253729 - DNA, 195 bp, Unknown
  Bacterial polypeptide expressing nucleotide sequence isolated from the Sargasso Sea
aatgagtaaaattgcaatatatcctggaacttttgatccaattacatatggtcatatagatgttattaaaaaggcactaaaactttttgataaaatagtagttggtgtttcagatgtgagtaataaaaattatttattttcatcagaggaaagaatagaaattgtaaataaagctttattcaaagatttaaaatt

SEQ ID NO: 253730 - DNA, 282 bp, Unknown
  Bacterial polypeptide expressing nucleotide sequence isolated from the Sargasso Sea
aatgaaaaaaattggaatatatcctggaacttttgatccaataacatttggtcatattgatgtggtgaaaagatccttaaaaattgttgataaagttatagtagctgtatcaaatgatgatactaaaaattatttgtttagcgctgatgaaagagtagaattaattaaaaaatcactttttaaagatttaagttacaaaaaaaatttaataaaagtaattaattttaaaacattaaccacatctgtttgtagaaaatataaagcttcagcaatatttagagg

SEQ ID NO: 253731 - DNA, 145 bp, Unknown
  Bacterial polypeptide expressing nucleotide sequence isolated from the Sargasso Sea
aatgagaagagctctgtttcccggttcatttgatccaataacaaatggtcatgaagatattattatcaggagcttaaatctttttgatgaaattgtaataggagttggaattaacagtgaaaaaaaatacatgtttttcctctga

SEQ ID NO: 253732 - DNA, 226 bp, Unknown
  Bacterial polypeptide expressing nucleotide sequence isolated from the Sargasso Sea
aatgagcaaaataggtatatatcctggaacatttgatccaataacatacggacatatcgatgtgattaagagatcactcaaaatagtcaacaagttaataatagctgtatcaaatgattatttgaaggattatttattttcttctgaagaaagagtccaaataataaaagattcgctttttaaggatttaaagattaatagcaaaaatattaaagttacttctttt

SEQ ID NO: 253733 - DNA, 202 bp, Unknown
  Bacterial polypeptide expressing nucleotide sequence isolated from the Sargasso Sea
tatgaaaaaaattggagtatatcctggtacttttgatccaatgactaatggccatttaaatataattaaaagatcattaaagattgtagatcaactcataataggagttgcagataatttaaacaaaaccccattattgagttctgacgaaagaaaaaatatcattctttcagatttaagtagtgaaaaattagataataaa

SEQ ID NO: 253734 - DNA, 202 bp, Unknown
  Bacterial polypeptide expressing nucleotide sequence isolated from the Sargasso Sea
gatgaaaaaaattatatatccagggacttttgatccaattcactatggacacatagatatagcaaaaagagcatctaagttgtttgatgaagtgcatatctgcgtatctgacaatgttcaaaaagacccaatgtttagccatgatgagcgcgttgaaatgattgaagagtgcttcaatgatattgacaatatacatgtgcac

SEQ ID NO: 253735 - DNA, 303 bp, Unknown
  Bacterial polypeptide expressing nucleotide sequence isolated from the Sargasso Sea
tcaacaaaaaaaagattataattatttctttcacatcattgaccacagatttatgtaaaaaattcaagtctaatattattttgagaggtttgagggcagcatctgattttgaatatgaatttcaattagctggcatgaatagaaaattgaataaaaatatagaaactttatttttaatgtctgatgtagaaaaccaaataatctcctctagattggtgaaagaaatagttaaactaaaagggaatattaaaaagtttacgacaaaaagcacaattaaatttatcaaaaagaaatatgaataag

SEQ ID NO: 253736 - DNA, 232 bp, Unknown
  Bacterial polypeptide expressing nucleotide sequence isolated from the Sargasso Sea
aatgaaaaaagtggctatttaccctggtacttttgatccaataacttttggacacatagatgtaataaaaaaaggattaagaatatttgataaaattgtagtagctgtatctaatgtagataataaagattatttatttgattccgatgaaagaattgagattgtaaaaaaagcattattttcagatttaaagttgaataaaaaaaaaaatataattatttcttttacatca

SEQ ID NO: 253737 - DNA, 105 bp, Unknown
  Bacterial polypeptide expressing nucleotide sequence isolated from the Sargasso Sea
aatgaaaactattttatatccaggaacttttgatccaattacctttggacatattgatttaattaaaaaagccctaaaaattggagacaaattaatagtggcaat

SEQ ID NO: 253738 - DNA, 487 bp, Unknown
  Bacterial polypeptide expressing nucleotide sequence isolated from the Sargasso Sea
atggctaatatctttttcccagggacctttgaccctattactaaaggtcacgaagaccttattcttaggtgcgtcggactcttttcgcacctaaccgtggctttaacgactaacccagataaaactccactattatccattgaagatcgtatagagttactccaacagtcctgtaaaggaatcaatgtcactatagaggtttttgatgggttattggttgattatgtctcttccgttaaaaacccactcattgttagaggggttcgatccattaatgactacatctatgagcacgacagagctatgatgaaccaatctctatcgaataacttagaaaccattttcctcccatctaagcctgaatttagctccctatcctccacccttgttagagaaattgcgaggcttagcggagacttatcttcgtttgtttcacctcatgttcaagaaaaattaaaacattatggctctcaaaataaccgatgaa

SEQ ID NO: 253739 - DNA, 142 bp, Unknown
  Bacterial polypeptide expressing nucleotide sequence isolated from the Sargasso Sea
tatggctaaagctttataccctggaacctttgacccaatcacacttggtcatattgatattattgaaagagcacttcatctctttgatgaggtgacaattgcaatagctacaagcgcttcaaaaaagcccatattcactctt

SEQ ID NO: 253740 - DNA, 214 bp, Unknown
  Bacterial polypeptide expressing nucleotide sequence isolated from the Sargasso Sea
aatgaataaagtcgcaatatatccaggcacatttgatccaataacatacggacatattgatgtaattcaaaaagcactaaaattgtttgatagaatagttgtgggtgtttcaaatgttaataataaaaattatttatttaactcagaagaaagaatagatattgtaaacaaagcattatttaaagatcttaaattgagtaagaaaaaaatgtag

SEQ ID NO: 253741 - DNA, 259 bp, Unknown
  Bacterial polypeptide expressing nucleotide sequence isolated from the Sargasso Sea
atgaaaaaagcaatttaccctggaacttttgatccaattacatttggacatatagatcttattaaaaaatctttaaacatttttgataaagtaattgttgctgtgtccgatggaaatacaaaaaattatcttttcagcgctcaggagagagagaacttaattaaaaaagctctttttagtgacttaaaatttagtaaaaaaaaaatagatgtcacatcgtttaaaactttaactactgatttttgcagaaagatgaaat

SEQ ID NO: 253742 - DNA, 146 bp, Unknown
  Bacterial polypeptide expressing nucleotide sequence isolated from the Sargasso Sea
aatgaaaaatatagcaatttatccagggacatttgatccaatcacttttggacatatagatgtaattaagaaaggagtaaatttattcgataaactaattgtggcagtctcagaaggtggaaaaaaaaatcatttattttcaactg

SEQ ID NO: 253743 - DNA, 187 bp, Unknown
  Bacterial polypeptide expressing nucleotide sequence isolated from the Sargasso Sea
atgaataaaattggaatatatcctggtacttttgatcctatgactgcaggtcatatggacataattaaaagatcattaagaatagtagatagtttagtaatagctgtcgctaataatattaacaaagattcattatttagtgttcaagaaagaattaatattattaaaagtgaatatcagttctgaa

SEQ ID NO: 253744 - DNA, 145 bp, Unknown
  Bacterial polypeptide expressing nucleotide sequence isolated from the Sargasso Sea
tatgagagaaaaaattgcagtatatccaggaacttttgatccatttacttttggtcatcttgatgttgtaaaaagatcttccaagcttttcgacaaaattattgtttctgtagctgataataataataaaaagtgctctttttaa

SEQ ID NO: 253745 - DNA, 967 bp, Unknown
  Bacterial polypeptide expressing nucleotide sequence isolated from the Sargasso Sea
aatgagttctaatttcaaaaacctctacacctctaacaatcctcccttacaagcaaccttaattagaggatcaaatattgagtcaatacataaaattcatgccgttattactgataaaaaaggtagagttttaatgtgcgcaggaaatcctgaatataaaagtttcataaggtcagcactaaaaccttttcaagcaatacctttcgttagtagtggagctgcatcaaaaataaataatgaatcacaatcaattgctttggcatgcgggtcacatagtggatcaaaacttcattcaagggaagcattcaaaattttatgggaatatgacattgacatcaataatcttaaatgtccgaaaactaagacaagtccactagaacataattgttcgggtaaacatgctgcttttttagctacatgcaaaaaaatgaattggccattagatagttacttaaagggggatcatccacttcaaatagaaatatttagaatagtttctgaattacttgaaatcccttcatctgaaataaatgcagaacgtgatgattgtggtgctccaactctttatttaaaactattagaaatgtcgaggttatattcatttttgagcagttccgataatgctgaattagaacaaatcagtagatctatgatattaaatccaacaatgataagtgataacaataaatttgacacagaaataattaaagcttctcatgggaacgttataagtaaaggtggagccgagggaatacagtgtctttgtaaagtaaatgaggggataggtttagctttaaaggtagaagacggttcaaaaagagcaaagcatgctgttagtcttcacttactaaaacagttagaatggatatctgacttaagaattcaagacatcgaagaaaaggtatttaattttcctgatggagtgcgacttgaagttaaaggtaaagtaaaattccaagaatcctaa

SEQ ID NO: 253746 - DNA, 466 bp, Unknown
  Bacterial polypeptide expressing nucleotide sequence isolated from the Sargasso Sea
atgaagatattaataccaggctcatttgacccaccaactaatggtcatattgatgttatcacaaggtgccttaaagtatttgatgaagtattagttggtgtaattgttaacccttctaaggaatcgttattttcaactgaaacaagaactgaaatgcttaatgaggtatttaatgagaacaaaaatgttactgttaaaagcttcgaaggtttgcttgtagattttgctaaagaaaataaagttgatgctattgtgaaaggcttaagagctatgacagattttgattatgaacttcaaatggctcaaatgaactttaacttagctgattttgaaacaatatttatacctacctcaccagagtatggctatgtttctagctcattagtaaaagaaatacattcatacggtggagacgtaaatgaattagtaccaaagaatgtatcaaaaaggttaaaagatgtttgaa

SEQ ID NO: 253747 - DNA, 1444 bp, Unknown
  Bacterial polypeptide expressing nucleotide sequence isolated from the Sargasso Sea
atggtacgcgccattgaaagtgagcgaattcaaagtgctattaccgataccgccgtcgacgccatcctgactgttgatgacaaaggcatcataaaaaccgctaaccccgctgttgagcgcatctatggctatactcagcaagaaataatcggtatgcacgcagctgaggtagtaactcctgaaagacgtcatttatacggtgatgacttcttcagtcaacgagtagtaccaactgagcaaattattggtacaggaagagaagtagaagtacttcgcaaagatggtgagcgcataccagtgcgccttggtgtcggctacacaaaaattgatgggaaacccgtttttgtctctttcgcttctgatttacgcaaacgcaaggaaatggaagatgcactgcgtgagagcgaagctaagtttagaagccttatctctaacattcctggtatggcttatcgctgtttaaatatgccagggtggcccatggtatttattagtgatgctgtaatagaagtaaccggatacccgcctgaagattttaccttgcccaacccgaagcgctctttcaccgatctttaccatcctgatgatgttgaacgcctttcgtctattagtcctgaggtgggcgaattctcatatgaatatagaattgtcgcgaaatctggcgaggtgaagtgggttatcgagcatggagtgcaggttaaggacgatgatggcatggtgctctatgtagacggctttatatctgacataacacatcggaaagtgatggaaaatgaattaaaagcggcaaaggaaaaagcagagcaagctgccgctgcgcgtaccgcatttcttgctaatatgagtcatgaaatccgtacgcctatgaatgcaatcataggctttagcgacctcatgttaggagaagccttacgcgaagagcaaaaatctcacttaaccacgataaaccgttccgcacgttcattgctgcatcttcttaacgacatacttgatagcgcgaagttagataaaggtaagcttgatttagattatcgcgatttccttattcgcgaagagttggatttggttatttcaacattttggttagaagccaaacgcaaaaaagttggacttgtacttaatgtcgatgattcggtagctaacggatacagaggtgtaccggagcgaatgcgacaggtacttaataatcttataggcaacgccgttaaattcactcacgagggtgaagtgactatcaatgtcaaaagtgatgaaaagtttgtgtattttgacgtgacagataccggcattggtatgacgcaagagcaagtagaaagagtattcgatccgttctctccagcagatgcatcgatgagtcgaaagtacggcggcacggggctgggtacaactatttcccagcagttagttgaactgatgggcggcaatatatgtgcaactagtgaaa

SEQ ID NO: 253748 - DNA, 338 bp, Unknown
  Bacterial polypeptide expressing nucleotide sequence isolated from the Sargasso Sea
aatgcgaattgttatttatcctggaacatttgaccctattcatagaggccatattgatattgctgaaagagcttcaaaactttttgaccaaattattttttcagttgcagtcaattcagaaaaaaacccccttttttcggcagaagaaagaattgagctaatattagaatccacgaaacatatatctaatgttaaagcttattctacagatggtttgatcgcagattttgctagacagcataatgcagttgcattaatacgaggattgagacacgtttctgattttgagtttgagtttcaaatggcaactatgaataatcatttaaataacaatgttt

SEQ ID NO: 253749 - DNA, 1459 bp, Unknown
  Bacterial polypeptide expressing nucleotide sequence isolated from the Sargasso Sea
tatgggaacaggggctgagttactggatagcgaatttatccaagggttttcggcctctctcctcgatgactacctcaacgctaaaaactatgtgcaggatgtgcccactcagtcactgctgcatatccgcagttttacccacaggctgaccgaactgctcggtcaggataaagccgtctccttcactagtccgaacctctatgaccgtatcgagctgttaaaccaaaagcggctgatcgatgtgaagacgacacgagccttacatcgtctgcgtggcgatggtaaccgtggtgcccaccctgaaaaataccatttaacccaagagcagttgctcgccttggcccaaaaggccatcaaggatgtgttggccttaattgagcacttgtatcctaaggtgctcgggcgcgcggctcccgcttatcgttaccaagccagtgacgccgttaccattaaagatctctgttaccgcgcggtgatggaagacgaccctaacgcgcagtatcttgtggggatctcttttaaaaccaaagcattaatgcttaaagagcaagagcttgccttggctgaccaatcctatggtaatgaagatgaaaatggcccagcggtgaaggaagtggcgcaaaaagccagtgatacctttgccaaagccgcctattggtttgcccttgcggcgccaaaacacgccgatgccctctatgaacatggggttgggcttatccatggctatcaaggacaggccgatgccattcagggggaagctgcgattgccaaggctgctgaggcgggtgtagtcaatgcaatggcgttactcgggtatttttatctggtgggcagcgaatcatttaagccagatttagtgcaggcgaagcactatttacaactggcggccgagggtgaacagaccgaagccatggcgaatttaggagtgctctattatcaggcgaaagatctgacccaagcctatcattttattaataaagcggcgcaagcgggttatccccatgcccagtaccatttggccttaatgctcgccaatggcgatggttgtaagcgtgatcctatcataagtgagtattggatggccgaagcggccgagcaaggtcagctggatgccatgcttacccgcgcgcagcacatgctaaacgatgaaagtggtttgggtggcgatgtgagtcaggcggagcgttatctacgtgaagtgattaaatacggtcacagcgtgccagccatgattgaactgagcatggcactcgcggacggtattttagggcgtatcgatgtggtgggctctgcggcactactcaatctcgcgcgtcgtcatgctaatgccaaagaagccgagatcatcgagcccctatggcaatcactcgcattgcaagttgatactgtgctggagatgacccaagatcccggcgagattcaaacccttaagcgcgcaaaaaccttactcaatacttag

SEQ ID NO: 253750 - DNA, 217 bp, Unknown
  Bacterial polypeptide expressing nucleotide sequence isolated from the Sargasso Sea
aatgaaaaaaattgctatttatccaggtacattcgatcctataacatacggacatattgatgttatacaaaaagcattaaaaatatttgataatatagttgttgctatatctgatagtaaacaaaaaaatcaacttttttctattgatgaaagaattgatatagttaatcgtgcattattctttgatctaaaattaaaaagaagcaaaataaaaata

SEQ ID NO: 253751 - DNA, 133 bp, Unknown
  Bacterial polypeptide expressing nucleotide sequence isolated from the Sargasso Sea
atgaaaaggataatatatccaggaacatttgacccaattcattatgggcacatcgatatcgcaagaagagcatcaaaattgtttgatgaggtatatatgtgcgtatcagataatcaacataaaaatccacttt

SEQ ID NO: 253752 - DNA, 118 bp, Unknown
  Bacterial polypeptide expressing nucleotide sequence isolated from the Sargasso Sea
aatgagtaaaattgccatttatccaggaacttttgatccaattacttatggtcatattgatgttattaaaaaagcactaaaactttttgataaaatagtagttggtgtttcagattaa

SEQ ID NO: 253753 - DNA, 493 bp, Unknown
  Bacterial polypeptide expressing nucleotide sequence isolated from the Sargasso Sea
tatgagtatagctatttatcctggcacttttgatccaattacatacggtcatatagacgttataaaaaaatcattaaagatttttgacaaattaataattgctgtcgcagaaaacatcaataaagattatttattttctgtagaagagagagttgatattataaaccaatcactttttaaagatttaagacttaataagaaaaaaattaaaattatttcttttaatactttaacaattaatttatgtaaaaaatacaaagcaagtgtaattgttcgaggattgcgtgctgcttctgattttgaatatgaatatcaattggctggaatgaacaaaaagttaaatgagaatatagaaacaatttttttgatgtctgatgttgaaaatcagattatttcttcaagatttgtaaaagaaatagctaaattaaatggcaaaattagcaaatttttgactaaaacagttgaaaaaaaacttaaaaataaactagaatga

SEQ ID NO: 253754 - DNA, 481 bp, Unknown
  Bacterial polypeptide expressing nucleotide sequence isolated from the Sargasso Sea
atgagtagaactggcatatatcctggaagctttgatcccattcataaagggcacattgatattatcaatagggctacaaaacttgttgataaattatatatcgcagttgctgacagcccgcataaatcacctttatttgatttagatgaaagaaaagaaatgatagaaaatgagttttcatcaaatgataaaattgaagtaattgcatttgataatttattgattgatttagctaattcgctagatgcaaagatactcataagaggtcttcgtgttgtttctgattttgaatatgagtttcagatgttgggtatgaatagacaattagataataatattgaaacagtattcttgatggcagacgctcaacggcaatcaatttcctctaattttgtaaaagaaattgcacgtttgggaggaaatatcagtaattttacaaataagtttgttgagcaaaaattaaaagataaattcaaataaa

SEQ ID NO: 253755 - DNA, 289 bp, Unknown
  Bacterial polypeptide expressing nucleotide sequence isolated from the Sargasso Sea
aatgaatgaccatcaaactataactggaatttatccaggtacttttgatcctgtcacttttggacatttagatattgttcaacgagcatgtaacatcatggataagctaattataagtgtcgcagaaaatattcataaaaaaccattttttacagttgacgaaagagttaatatgattcacaaatcgttgaatttaatagatacaaataaatgtttgattgaagttgttggttttgataatttgttagtcgatcatgcaaaaaattttgatgcaaaggtaattataaga

SEQ ID NO: 253756 - DNA, 200 bp, Unknown
  Bacterial polypeptide expressing nucleotide sequence isolated from the Sargasso Sea
catgagaaaaatcatttaccctggaacttttgaccctatacataatggtcatatagatattgctagccgagcttctaagcttttcgatgaactagaatttgtcgttgccatcaactctgataaaaagcccctattctctattgaaacaagattagaattaataaaacgctccattgagcatataccaaacattaaagtca

SEQ ID NO: 253757 - DNA, 475 bp, Unknown
  Bacterial polypeptide expressing nucleotide sequence isolated from the Sargasso Sea
aatgaaaatagcaatttttccaggaacgtttaatcctcttacttatggtcatatcaatatagcacaacgtgcaagcagtctgtttgatgaggtaattattgcgattgcaaaaaaggagaatgaagaattattattaaccacaaaagaaagactttctatttcggaagatatattttctgaagaaaaaaatattacaccaattgtttttagcggattagtaacagatttggctcgtgaaaaatcatcatattttatcattcgaggagtacgtacaataatagattttgattatgagtctgtaatggcggatatgaataaaaagttataccctgaaattgaaacagtcttcctaatgccagatgaaaagttcaaaaatatttcatcaagccttgtacgggagatagcgatgctaggaggggatattagttcttttgttccgccaagcgtaaaattagcgctagaaagaaagttataa

SEQ ID NO: 253758 - DNA, 107 bp, Unknown
  Bacterial polypeptide expressing nucleotide sequence isolated from the Sargasso Sea
aatgaaaaatatcgcaatttaccctggaacttttgacccaattacatatggtcatattgatgtaattagaaaatctttaaaatttattgataaattaattgttggta

SEQ ID NO: 253759 - DNA, 177 bp, Unknown
  Bacterial polypeptide expressing nucleotide sequence isolated from the Sargasso Sea
gatgaaaatagcaatatatcctggaacttttgatccaataacgtacggtcatattgatgtaatcaggaaatctctaaacattttcgataaaataattgtcgctactacagataactcaaataaaaattaccatttctcgattgaagatagaattagtattataaataactctttatt

SEQ ID NO: 253760 - DNA, 484 bp, Unknown
  Bacterial polypeptide expressing nucleotide sequence isolated from the Sargasso Sea
gatgactaatgctatatttccagggacttttgatcctgttactaaagggcacttagatattgttgaaagaggggcagcaatattcgattatgtaactgtgggtgtttatgaagactcagataaaaatactctatttaatatcgaagaaagaattgaaatgttcaaatcttcatccgggcacctttcaaatgtatcagtcaattcttataaaggattaacagttgattttgcaaaaaaaaataactctaaagtaattataagaggattgagaatcggtaatgattttgaatacgaaagaggtatggctttaattaatagagaaattaataatgacattgaaactgtatgcttaatctcagctatgccaaatcaatttataagttcttcaagagtaaaggaaattgcaatgcttggaggagattacaaaaattttattccagaaaaaatatacgaattttcaaaaacaaaattaatggaggcataa

SEQ ID NO: 253761 - DNA, 214 bp, Unknown
  Bacterial polypeptide expressing nucleotide sequence isolated from the Sargasso Sea
tatgtcaaaagctatttatccaggaacctttgatcccttaactttaggccatatagatattgtcgaaagagctcttcatatttttgatgaagttacaatagcaatcgcagtcagtgagaagagagttcctcttttttctctagaagaaagaatagatcagattgaaaagatttttgataatgataaaaggattcaagccataggcttttccgga

SEQ ID NO: 253762 - DNA, 481 bp, Unknown
  Bacterial polypeptide expressing nucleotide sequence isolated from the Sargasso Sea
atgaacagaaccggcatataccctggaagttttgaccctattcacaagggtcatatagatatcattaatagagctacaaagctcgtggataagctttatattgcagttgcggatagcccacataaaaaacctttattcaatttagacgaaagaaaagaaatgattgatgaggagttttcaagcaatagtattattgaagtaattgcatttgataatcttttaattgatcttgctaattcattaaatgctgaaattcttatcagaggtttaagagtagtttcagatttcgaatatgaatttcaaatgctaggcatgaatagacaacttgactcaaagattgaaacagtttttttaatggctgatgcacagcgacaatccatttcgtcaaactttgtaaaagaaattgcccgcttaggtggggatattagcaattttactaataagtttgtagagagcaaacttaaagataaatataagtaag

SEQ ID NO: 253763 - DNA, 490 bp, Unknown
  Bacterial polypeptide expressing nucleotide sequence isolated from the Sargasso Sea
aatgaagcataaaacagttatatatccaggaacatttgaccccattcacatgggccatattgatatcattgaacgagcttcgagaattttcgatgaagtgattattgccatcgcagtaaatattgataaaaatcctctttttagtgttgatgaaaggatagaattggttattaacgcaactgaacatgtagataatattaaggcattttcaacagatggtttaattgctgactttgccaaagaatacaatgcttgtggattaattagaggcttaagacatgtttctgattttgagtttgagtttcaaatggcgacaatgaataatcaccttaatccatcggtatcaacattactcatggttacatctgataaatatgtccatttaaattcatctatggtcaaaaatgtatcaaagttaaatggtgatattggtaaatatgtcccagataatgtattaaatgctttgaaacaaaaattcagtcataattag

SEQ ID NO: 253764 - DNA, 348 bp, Unknown
  Bacterial polypeptide expressing nucleotide sequence isolated from the Sargasso Sea
aatggctattgcaatttatcctggttcatttgacccaattcaccttgggcatgtgcgaatagtagagaacgcagcaaccatttttgatcaagtgatagttgtcgcaatgcaaaacagagaaaaaaaaggatttttgtctattgaaaagcgccaagaattactaaaaacctctttcgggcatctaaataacgtagttacagactcctcgacaggccttgtcgttgatgtagccaaagcattgaatgctgaggtaattatcaaaggccttcggtcttcagcagattttgaaattgaaatgcagatggcccaaaccaacaaaaaaatttctgccatcaatacagtcttcat

SEQ ID NO: 253765 - DNA, 1477 bp, Unknown
  Bacterial polypeptide expressing nucleotide sequence isolated from the Sargasso Sea
atggggactgaggctgagttactggatagtgaatttatccaagggttttcggcctcgcttcttgatgattacctcaatgctaaaaactatgtgcaggatgtgccaacgcagtcattactgcatattcgcagttttacccataggctgactgacttgctagggcagagtaaagcggtgtcctttgctagccccaatctctatgatcgtattgagctgttaaatcaaaaacggctgatcgatgtgaagaccaccagagcgttgcatcgcctgcgcgctgatggtaaccgtggcgctcaccctgaaaaatatcatcttacccaagagcagttactcgccttagcccaaaaagccattaaagatgtactcgctttagtcgagcatctgtatccgaaggtggttggctgcgaggcgcctgcataccgctttcaagccagcgatgcgataacggttaaagatctctgttaccgcgcggtgatggaggatgatcccaatgcgcagtatcttgtggggatctcttttaaaaccaaagcattaatgcttaaggagcaggagcttgccctcgtcgatcagtactatggtactgaagacgatagcccagtagtaaaagctgtcgcacaaaaagccagtgatacttttgctaaggctgcctactggtttgcccttgcagcccaaacccatatgcaagccctctatgagcatggagtgagtttaatccatggctatcagggagaggccgatgccattaaaggcgaggctgcgatagctactgcggctgaggctggcgtggtcaatgcgatggcgctgcttggctatttctacctagtgggcagtgagtcatttaagccggatttagcccaagcgaaacactttttacagctggcggccgaaggtgagcaaaccgaagccatggcgaatttaggtgtgctttactatcaaaccaaggatttaccgcaagcctatcattttataagtaaagcggcgcaggcgggttatccccatgcccaatatcatttggccttaatgctcgccaatggtgatggttgtcagcgagatcctatcgcgagtgagtattggatggccgaagcggcagagcaaggtcagctcgatgccatgcttacccgtgcgcaacatatgctaaatgatgaaagtggcttgggtggcgatgtgagtcaggctgagcgctatctgcgtgaggtcattaaatatgctcacagtgtgcctgccatgattgagctgagtatggcattggccgacggcattttggggcgcattgatgtggtgggttctgcggcgctgctaaatctagcgcgccgtcatgctaatagcaaagaggctgagatcatcgagcctctttggcaatcgcttattttacaaatcgatactgtaatgaagatcactcaagatcccggtgaaattcatacccttaatcgtgcaaaagacctactaagcgctgaggactactcttcctctttttgat

SEQ ID NO: 253766 - DNA, 358 bp, Unknown
  Bacterial polypeptide expressing nucleotide sequence isolated from the Sargasso Sea
atggtcactgcgttatatccaggaacttttgaccctatcacagtggggcatttggatatcgccgagcgagcggcagctttgtttgaaaaattaataataggcgtatataaacttcctgataagaatttgctattttctactgatgaacgagttgctttatttgaagaagctgttaaagatatacccaacgtagaagtaagagtgtttgatggactggttgtcaggttcgcaaaggatataggagcctctgtgatagtcagaggtttacgaagcggtaccgattttgagtatgaatttgatatgacattcatgaaccggcgattggaacctgatgtagacgtagtttgtttgatgacat

SEQ ID NO: 253767 - DNA, 173 bp, Unknown
  Bacterial polypeptide expressing nucleotide sequence isolated from the Sargasso Sea
gatgaataaaattggaatatatcctggtacatttgatcctatgacttatggacatatggatatagttaaaagatctctaaaaatagtagataatttagttattgctgtggctaataatattaataaagactcattattcgatattaatgaaagaattaatattataaaaactg

SEQ ID NO: 253768 - DNA, 325 bp, Unknown
  Bacterial polypeptide expressing nucleotide sequence isolated from the Sargasso Sea
tatctcagatatttttaaagataattctaagattgaggccataggctattcaaaacagctaacagttgatttggctagagataataatgctactgcaattatcagaggtttgagagctgttgcagatttcgaatatgaatttcaattggcaacaatgaatagaagcttggctccagacattgaaagtatattttttactccaaaggataccctaatatatgtttcatctagcttggtgaaagaaattgctacttttggcggtgatgtttcaaggtttgttccagaaaatgtcaaagtcgccttagaaaataaaattgctggctaa

SEQ ID NO: 253769 - DNA, 502 bp, Unknown
  Bacterial polypeptide expressing nucleotide sequence isolated from the Sargasso Sea
aatgcgcataggtctttatccaggtacgtttgatcctattactttgggtcatattgacattataagaagagcgtctctgctagtggaccgacttgtgattggtgtggcaataaatagcgataagttacctttatttgatttggaagatagagtttcaatgttggaagaggaatgcaattatttatctgggcaaactggaacggaaattgtagttcatccatttgaaaatctattaattgattgcgctcatgatgtaggggcccaagttattgtacgtggtctgagagcagtcgctgattttgaatacgaatttcaaatggttggcatgaacagatctttggataactctatagagaccgtattcctaatggctgaagcgaagcatcaggctattgcttcaaaactagtaaaagaaatagccaggttaaatggtgatatatctaaatttgttacgccgcatgttgccaaaaggctacttaataaattagaagtatcgaattaa

SEQ ID NO: 253770 - DNA, 253 bp, Unknown
  Bacterial polypeptide expressing nucleotide sequence isolated from the Sargasso Sea
aatgatcgcactttacccaggaacatttgatccaattacaaacggacacttcgaaatcattagaagagcttcaacaattttccaggttttggtagtcggcgttgctatcagcgacgaaaaaaaacctttatttgaacatgaaaagaggcttgccatggttaatgaagttttgaatgcttttagcaatattgaagtacagccttatgatggattaaccattgattttgcaaaaaaattgatgcaagagtcatag

SEQ ID NO: 253771 - DNA, 493 bp, Unknown
  Bacterial polypeptide expressing nucleotide sequence isolated from the Sargasso Sea
atgagggcgctctacccgggcagttttgatccactgaccaatggccacatggatctgatcgaacgggctgctgctctgttcggtcaggtcacggtggcggttctgtcgaatcccaacaagaagcccgccttcagtgttgatcagcgcatcgagcagatccggaacgcgacccgtcacctgaacggcatcgatgtggtcagttttgacggattgacggtccactgcgcggcaacccatcaggccgatctcatcctgcgcggtcttcgcgcaatgagcgacttcgaatacgagttgcagatcgcccacaccaaccggtctctggccgcagatctggaaacggtgtttctggcgacatcaacccgtcacagcttcctcagcagctccgtggtcaaggaggtcgcccgcttcggcggcccagttgatcacatggtccccaaggaggtggcgaaggacctgaacaggctctttaattcggctttcccaccccggtgac

SEQ ID NO: 253772 - DNA, 316 bp, Unknown
  Bacterial polypeptide expressing nucleotide sequence isolated from the Sargasso Sea
taaagatttgaatttttcaaaaaaaaatatcagagttattagatttaattctttaacaactgagttgtgtaaaaaacataaatccaatcttatattgagaggattaagagcggtttctgattttgagtacgaatttcaattggcaggtatgaatagaaagctaaatgataaagtagaaactatattcctaatgtcagatgtagaaaatcaaataatatcttctagatttgttaaggaaatagcgtatcacaagggtgatcttagaaaatttacaacaaaaagtactataaaatcattaaaaggaaaatatgcttag

SEQ ID NO: 253773 - DNA, 478 bp, Unknown
  Bacterial polypeptide expressing nucleotide sequence isolated from the Sargasso Sea
aatgatcgcgctttatccaggaacctttgatccaatcacgaatggccactttgaaataatcagaagagcctcaacggtctttcaagttttgatcgtaggcgttgcggttagtgaagataaggcccccctctttgatcatgacaaaagactgacaatggtaagcgaggttttgaatggttttagcaacattgaggttcaaccttatgacgggttgacaattgattttgcaaaacaaattgaagcgagagtgatagttagagggctcaggtctcctgccgatggtcaatacgaatttgaattggcaagcatgaataaaaagcttgctgacgatatcgaaacagttttcctcagtagcggcgaccaaaatgctttcatatcatcgtcattgatcagacaaattgcacaagaaggaggagatgtttcagattttgttcacccagttgtgcatcaagcattaagcgaaacctacaaaaaataa

SEQ ID NO: 253774 - DNA, 478 bp, Unknown
  Bacterial polypeptide expressing nucleotide sequence isolated from the Sargasso Sea
atgtatccgggcacatttgacccaatgacacttggccataaagagcttgcatctcgtgctgcaaaaatatttgattctgtagtggtcgccatagctgcaaatccagaaaaaaaccctatgttttcattacacgagcgtgtttcaatggcagaagacgtattgtctgatatatcaaatatcgaagttgccgaatattctggattaactgtggattttgccatcgaaaatggtataggtgtcattgttagaggactaagagcagcttcggattttgaatatgaattgcaattggctaatatgaatcgataccttgctaacaaaatagagactgctttcctcactccaaccgaatatgcttttgtaacatcaagcttagtaagagaaattgccacgatgggtggaaatgtaagtagttttgtgtcacctgcagttgaaaaagcattggtcaatcattttaaaaaaaataatcctagttaaa

SEQ ID NO: 253775 - DNA, 487 bp, Unknown
  Bacterial polypeptide expressing nucleotide sequence isolated from the Sargasso Sea
atgactaaagcaatattcccaggaacttttgatcctataacaaaagggcatttagatattgtagaaagaggtgctgagatttttgagcatgtttatgtagctgtttatgaatctgctgaaaaggaaaccttattcgataaaaatgaaagagtagaaatgtttaagttatctactcaacatttaaaaaatatatctataacttcttataagggcttgactgttgattttgcagtaagtgtaaaagcaaaagcaataattagaggcctaagaataggtcaggattttgaatacgaaagaggaatggcattagttaatagagaaataaacaatggtattgaaacagtttgtttaatatccgcaatgccaaatcaatttattagctcatcaagggttaaagaaatagctggactcggaggagaatttaattcattcattcctgaaaaaatttatcaacaagcaaaaaataaactaaaaggagaaaaataat

SEQ ID NO: 253776 - DNA, 487 bp, Unknown
  Bacterial polypeptide expressing nucleotide sequence isolated from the Sargasso Sea
atgaaaaccaaagcgatttatcccggtacttttgaccctttaactaatggtcacagtgacttagtccagagggcttctcgtttatttgatcaggtgatagtggctgttgcttctaacccaagcaagcaacctctgtttacgctggcagaacgtgtgcagttggctgaacaatgttttgcagatattcctaacgtgacagtggtgggtttttcaggcttgctggccgattttgccaagaataatcaggctcaggtgctgttacgtggcgtgcgggctgtagccgattttgaatacgagtttcagcttgccagtatgaatcgacaactgaacccggatttagacagcttgtttatgacaccttcagaaaaaaatacttttatctcttccactttagtgaaagaagttgcccgccatggtggcgatgtcagccgttttgtggcttctcatgttgaacaggcattgaagcgcaagtttgctgcggtttagc

SEQ ID NO: 253777 - DNA, 505 bp, Unknown
  Bacterial polypeptide expressing nucleotide sequence isolated from the Sargasso Sea
atgactaaaaagatagctttatatcctggcacatttgatcctttcacatacggtcatttagatattatcaaaagagcaattaaaattgttgacacagtttatgttggtattgcgcataataagaataaaaaaactttatttaacattaaagagagagaagaaattattataaaaactctaaaattattgccaaaacagtcaagaaagaaaattaaaactgtaaattttagtggattaactataaatttttgtaagaaaattaattcaaatattttaataagaggtttaagagtagttgctgatttcgaatatgaatttcaattagccggtatgaataataatttaaataaaaatgttcaaactatttttcttatggctgacatacaaaatcaagcaatatcttcaaatatggtgaaagaaattgcttacttgggtggggatgtagctaaatttgtacccaaacctgtattattacttttaaaaaaaaaatttaaaaaaatatgaa

SEQ ID NO: 253778 - DNA, 478 bp, Unknown
  Bacterial polypeptide expressing nucleotide sequence isolated from the Sargasso Sea
aatgatcgcactttacccaggaacatttgatccaattacaaacggacacttcgaaatcattagaagagcttcaacaattttccaggttttggtagtcggcgttgctatcagcgacgaaaaaaaacctttgtttaaacatgaaaagaggcttgccatggttaatgaagtcttgaatgcttttagcaatattgaagtacagccttatgatggattaaccattgattttgcaaaaaagattgatgcaagagtcatagtaagagggcttagatctcctgctgatggccaatatgaatttgagctagccagcatgaacaaaaagcttgctgatgacatcgagactgtttttcttagcagcggggaccaaaatgcttttatatcatcttccttaattagacaaatcgcacaagagggaggcgatatttcagattttgttcatccagtggttcaccaaaatctttccgaagcatacaaaaaataa

SEQ ID NO: 253779 - DNA, 397 bp, Unknown
  Bacterial polypeptide expressing nucleotide sequence isolated from the Sargasso Sea
gttgcggtttctgatggtgaaaataaagattatttatttgaagttcacgaaagaattgacattgttaaaaaagctctcttttatgatttaaaattaagtcaaaaaaaaatttcagttatatcgttttcttcattaacaactgacctatgcaaaaaatataagtcaaatatcattttaagaggattaagagcagtttcagattttgaatatgaatttcaattagctgggatgaatagaaaacttaacaatgatattgagactttatttctaatgtctgatgtagaaaatcaaattatttcttcgcgatttgtcaaagaaattgttaaattaggtggaaatataaaaaaatttactacaaaaagcacaataaaatctttaaaaaaaaaatatgactaaa

SEQ ID NO: 253780 - DNA, 271 bp, Unknown
  Bacterial polypeptide expressing nucleotide sequence isolated from the Sargasso Sea
ttagtcgatcatgcgagaaaatcaaaagctaaagtaattattagaggattaagagctgttgctgattttgattatgaatttcagatggctggaatgaattcaaaacttgcaccagaaatcgaaacaatttttttaatggcttcagaaaatcttcagttaacttcagctcgttttgtaaaggaaattgcaaattataaaggaaatattgaaagatttgttcccaaaaatgttatcaaaatgtttgatttaaaagaaaaggagattaaatgaa

SEQ ID NO: 253781 - DNA, 307 bp, Unknown
  Bacterial polypeptide expressing nucleotide sequence isolated from the Sargasso Sea
tagattaaatagaaaaaaaataaaagtagtttcttttggttcattaactactgatttatgcaaaaagtataaatcaaacattattttaagaggattaagagcagtgtctgattttgaatatgaatttcaattagctggcatgaatagaaaattgaaccaaaaaatagaaacaatatttttaatgtctgatgtggaaaatcaaattatttcctcaagattagtaaaagatattgttaaattaaaaggtgatataaaaaaatttactacaaaaagcacaattaaatccttaaaagataaatatgaataa

SEQ ID NO: 253782 - DNA, 145 bp, Unknown
  Bacterial polypeptide expressing nucleotide sequence isolated from the Sargasso Sea
aatgaaaatcgcaatttatccaggctcatttgatccgattacatttgggcacatcgatattgtagaaagagcttcaactttgtttgataaagtgattttaggtgttgctgaaagtcaatcaaaaaaatcctcttttttactgttt

SEQ ID NO: 253783 - DNA, 352 bp, Unknown
  Bacterial polypeptide expressing nucleotide sequence isolated from the Sargasso Sea
aatgaaaaaaactgctatttacccaggtacgtttgaccctatcacttatggtcatatagatgtaatacaaaaatcattaaaaattgtcgataagttaattgttgctatatctgatagcaaccaaaaaaattacctttttacaatagatgaaagaattgaaatagttaataaagcacttttttcagatttgaaattcattaaaaataaaattaaagttatttcatttaattccttaactactgatttatgtaaaaaatataaatcaaatattatattaagaggtttaagggcggcatcggattttgaatatgaatttcaattagcgggaatgaatagaaaacttaacaataat

SEQ ID NO: 253784 - DNA, 356 bp, Unknown
  Bacterial polypeptide expressing nucleotide sequence isolated from the Sargasso Sea
tatgaaaatcaaagcaatatatcccggtacattcgaccctataacagctggccatgaggatcttgtcaaaagagcatccaatatctttgaatcagtaatagttgctgttgcatctaacactcaaaaaaatactttgttttcatatgatgagagatatgacatgtgcagaaaagttctatcaaaatataaaaatgtagatgtaattaagctggataaattaactgtagagcacgctaaggagcttgaagcaaaagtaatgctcagaggtttgagagcagtatctgatttcgagtacgaggtccagttatcaaatttaaacagagcaatgaacccaggtatagagagcatatttctga

SEQ ID NO: 253785 - DNA, 296 bp, Unknown
  Bacterial polypeptide expressing nucleotide sequence isolated from the Sargasso Sea
aatgaaaaatattgctatttatccgggtacttttgatccaattacttatggacatatagatgtaattaaaaagggtttaaaatttctagacataataataattgcaatttctaatgataaccaaaaaaattacttatttgatgtttatgaaagatcgcagattgttaataaggcacttttttctgatatgaaatttaaatctaacaggataaaaatagtaaattttaacagccttaccactgacttgtgcaaaaaatataaatctaaaattatattaagaggtttaagagcagttt

SEQ ID NO: 253786 - DNA, 481 bp, Unknown
  Bacterial polypeptide expressing nucleotide sequence isolated from the Sargasso Sea
atgagaaagatcatttaccctgggacatttgaccctatccataatggtcatatagatatagcgaatcgagtttcaatgctctttgatgaattggagttcgttgtggctgtaaactctgaaaagaagccacttttttctattgaaaccagattagacttgatcaaagaatccgtaaaacatataaaaaatgtcaaagtcagtcaattccaaggattggtagtagatcacgcggataagacaggttctatagctattatacgtggacttaggcatgtgagtgacttcgaatttgaatttcaaatggcaatgatgaattttcatctaaatcctaatattacatcattattcatgatgcccgatgaaaaatttattcatttgaactctactgttgtaaaagatgtttctaaaaatggaggagatatttcagagtttgttccagcatgtgtaaaagaggcattatttactaaattttcaaattaat

SEQ ID NO: 253787 - DNA, 346 bp, Unknown
  Bacterial polypeptide expressing nucleotide sequence isolated from the Sargasso Sea
agatataaaattgtttctaaagccttatatggggatttaaaattttcaaaaaaaaaaatacaagtaataaaatttaattctttaacaacatcgctttgtaagaaatataaatccaatttaatacttagaggattgagagctgtatcggattttgaatatgaattccagttggctggaatgaatagaaaattaaacaataaaattgagacagtttttcttatgtctgatgtagaaaatcagattatttcatcacgttttgtgaaggaaatagctttacataaaggagatctaagaaaatttaccacaaagagcactataaaatcattaaggaatatatatgcttaaa

SEQ ID NO: 253788 - DNA, 169 bp, Unknown
  Bacterial polypeptide expressing nucleotide sequence isolated from the Sargasso Sea
acaaataaatctcttaataatgatattgaaactatatttttatcgacaaatacaaattatagttttctcagtagttctttagtaaaagaagttgcaaaatttggtggtaaaattaatcacatggtacccccctctgttgagagggatttaaaagaatattttaaataat

SEQ ID NO: 253789 - DNA, 478 bp, Unknown
  Bacterial polypeptide expressing nucleotide sequence isolated from the Sargasso Sea
aatgatcgcactttacccaggaacatttgatccaattacaaatggacacttcgaaatcattagaagagcttcaacaattttccaggttttggtagtcggcgttgctatcagcgacgaaaaaaaacctttgtttgaacatgaaaaaaggcttgccatggttaatgaagtcttgaatgcttttagcaatattgaagtacagccttatgatggattaaccattgattttgcaaaaaagattgatgcaagagtcatagtaagagggcttagatctcctgctgatggccaatatgaatttgaactagccagcatgaacaaaaagcttgctgatgatattgagactgtttttctcagcagtggggaccagaatgcctttttatcatcttccttaattagacaaatcgcacaagagggaggcgatatatcagattttgttcatccagtggttcaccaaaatctttccgaaatctacaaaaaataa

SEQ ID NO: 253790 - DNA, 295 bp, Unknown
  Bacterial polypeptide expressing nucleotide sequence isolated from the Sargasso Sea
catgaaaaaagtaatataccccgggacatttgacccaattcataatggacatattaatatagcaacaagagcatcaaaattattcgacgaattagagttcgttgttgctgttaatgcagaaaaaacaccgcttttttctgttgaaaaacggttggagctaatacaagattcagtaaaacacctggataatgtaaaagtatctgagtttaaaggcctcgtagtcgaccatgctgataacacaggagcacatgccattattcgaggacttagacatgttagtgactttgaatttgag

SEQ ID NO: 253791 - DNA, 374 bp, Unknown
  Bacterial polypeptide expressing nucleotide sequence isolated from the Sargasso Sea
aatgaaaaaaacagccatttatccaggaacttttgatccaattacatatggtcatattgatgtaatacaaaaatcattaaaaattgtagataaaataatagttggaatatctgatagtaaccaaaaaaaatatttattttcaatagatgaaagaatggaaatagtaagaaaagctcttttttttgatttaaaatttaacaaaaataaaataaaagtaatttcattcaactcattaactactgatctttgtaaaaaatataaatctaatattattctaagaggtttaagagccgcatcagactttgaatatgaatttcaacttgcaggaatgaatagaaaacttaataacaatatagaaactatttttttaatgt

SEQ ID NO: 253792 - DNA, 328 bp, Unknown
  Bacterial polypeptide expressing nucleotide sequence isolated from the Sargasso Sea
aatgatcgcactctacccaggaacatttgatccaattacaaacggacactttgaaatcattagaagagcttcaacaattttccaggttttggtagtgggcgttgctataagcgacgaaaaaaaacctttgtttgaacatgaaaaaaggcttgccatggttaatgaagtcttgaatgcttttagcaatattgaagtacagccttatgatggattaaccattgattttgcaaaacagattgacgcaagagtcatagtaagagggcttagatctcctgctgatggccaatatgaatttgagctagccagcatgaacaaaaagcttgctgat

SEQ ID NO: 253793 - DNA, 413 bp, Unknown
  Bacterial polypeptide expressing nucleotide sequence isolated from the Sargasso Sea
gttcgataaggtagttgtaggtgtttctgatgaaagtaataaaaattatctattcagttctgaagaaagaatagaaatagtcaataaagctttatttaaagatttaaaattaaatagaaaaaaaattaaagtagtatcatttggttctttaactaccgatttatgtaaaaaatataaatcaaacattattctaagaggattaagagctgtatctgattttgaatatgaatttcaattagctggtatgaatagaaaattgaaccaaaacatagaaacaatttttttaatgtctgatgtagaaaatcaaatcatctcttcaagatttgttaaagaaattgttaaattaaaaggtgatataaaaaaatttactacaaaaagcacaattaaatcattaaaagataaatatgaataaa

SEQ ID NO: 253794 - DNA, 442 bp, Unknown
  Bacterial polypeptide expressing nucleotide sequence isolated from the Sargasso Sea
tatggatatcattaaaagggctctaaagatttttgatgaggtagtaattgcggtagttaaaaatagctccaaaaagcttttgttctccttagatgaaagaaaggcaattatcgatgaggtttacaagacagaaaaaaatataatctgcatttccctagactcaaaactttctgttgagcttgcaaatgaaataaatgcgttggcaattattaggggattaagagcaatgtcagattttgaatatgaattccaaattgcaagtatcaaccgttcccaaaacaaaaagatcgagagtgttttctttgctgctcaagataaattaacatttgtttcatcttcaatggttaaagaaatagcacagtataaaggcaagatatcaaaatttgttgatccaattgttgagaaaatactggaggaaaaaattaagtcttctggcacttag

SEQ ID NO: 253795 - DNA, 493 bp, Unknown
  Bacterial polypeptide expressing nucleotide sequence isolated from the Sargasso Sea
gatgagggcgctttacccgggaagttttgatcctttgaccaatggccacatggatctgattgagcgcgcccttgccctgttcgggcaggtcacggtggccgtgctgtcgaatcccaacaaaaaacctgccttcagcgtcgatcagcgcatcggtcagattcaatccgcgacccgtcacctgaaaggcattgacgtggtcagctttgacggcttgaccgtccactgcgccgtcacccatcaagccgatctcatcctgcgtggactacgagcgatgagcgacttcgaatacgagctacagatcgcccacaccaatcgatcactggccgaagatttggagacggtcttcctggcgacatcgacccgtcacagcttcctcagcagctctgtggtgaaagaggtggcccgtttcggcggccctgtggatcacatggtccccaaggaggtagccaaggacctgaacaggctctttaattcggctttcccaccccggtga

SEQ ID NO: 253796 - DNA, 315 bp, Unknown
  Bacterial polypeptide expressing nucleotide sequence isolated from the Sargasso Sea
aatgaaaaaaaatgctatataccctggaacatttgatccaatcacatatggtcatattgatgtaattcaaaaatctttaaaaattatcgacaaaattatcgttgctatttctgatggtaatcagaaaaattatttattttctatagatgaaagaattgaaatagtgaataaagctcttttttcagatttaaaatttaataaaaataaaataaaagtaatttcattcaattctctaacaacagatttatgcaaaaaatataagtcaaaaattattttaagaggtttaagagcagcatctgattttgaatatgagtt

SEQ ID NO: 253797 - DNA, 409 bp, Unknown
  Bacterial polypeptide expressing nucleotide sequence isolated from the Sargasso Sea
tgatacggttatagttgccatttctgaatttagtaacaaaaattatttgttcgattcgtcagagagattagagattgtaaagaaagctttattcaaggatttaaaattaagtaataaaaaagttaaagtaattacttttaattcattgactacttctttgtgtagaaaaatgaattctaaaattatattaaggggcttaagagctgtttcagattttgaatatgagtaccaattagcagggatgaacaaaaaattaaacaataaaattgaaactatatttttgatgtctgatattgagaatcaaataatatcctctaattttgtaaaagaaattattgagcttggtggtgatattagaaaatttacgacaccaagtactattaaagctctaaaaaataaatatgcgtaa

SEQ ID NO: 253798 - DNA, 166 bp, Unknown
  Bacterial polypeptide expressing nucleotide sequence isolated from the Sargasso Sea
atgaataaaaaaatagttatatatccaggaacttttgatccaatgcacatgggtcatttagatattatcgaaagagcatcacgtatctttgacgaggtgataatagcaattgcggtgaatataaataaaaatcctcttttcagcattcaagaaagaataaatttag

SEQ ID NO: 253799 - DNA, 100 bp, Unknown
  Bacterial polypeptide expressing nucleotide sequence isolated from the Sargasso Sea
catgaaaattctttatccaggtacatttgatcctttaacaaatgggcatcttgatttaatagaaagggctgaaaaaatatttggcaatctagtagttgct

SEQ ID NO: 253800 - DNA, 505 bp, Unknown
  Bacterial polypeptide expressing nucleotide sequence isolated from the Sargasso Sea
aatgaaacaatcgattaaatcagcagtctatcctgggacttttgacccatttactttaggtcatttagatgttgttatcagagcttcaagaatatttgataaagtcattatcgctgttgctgaaaatgatagtaaaaacccattattttctgtaaatgaacgtactgatattatacagcaagtaatcaaagaaaaaaaaggtgatattaagttagattctataaaggtcaaaagtttttttggcctcttagttgactttgttgaaaaagaaaatgcatctgcagttttgagaggtttaagggcattgtcagattttgactatgagtttcaaatggctggagtaaatgctcgtttatcagataagtttgaaacagtgtttttaatggcctcagaaaatcaacaatttgtagcctctagattggtcaaggaaatccattcattaggaggagatgtatcatcttttgttcctcatttggttttaaaagagttagaaagtaagaaataa

SEQ ID NO: 253801 - DNA, 220 bp, Unknown
  Bacterial polypeptide expressing nucleotide sequence isolated from the Sargasso Sea
tagaggcctgcgagcagtttcagactttgaatatgaatttcagttagcgggaatgaatagacagctaaataatagaattgaaactgtatttttgatgtcagatccagataaacaggttatttcatctagatttgttaaagaaatagctaaattgaaaggaaaaatagatgattttgttacaaaaagtactaaaagatcaataaaagaaaaatatgattaa

SEQ ID NO: 253802 - DNA, 247 bp, Unknown
  Bacterial polypeptide expressing nucleotide sequence isolated from the Sargasso Sea
agataacgatgcaaatattttaatcagaggtttaagggtagtggcagactttgaatacgaatttcaattagccaacatgaacagggcaatgagccctgatattgagagcgtattcctaactcccaaagaagaatactcttatatctcatcaagtttagtaaaagaaattgctacgatgggcggagatgtaacaaggtttgtcgatccagtgaccttagatgctcttaatcagaagattaaaaattag

SEQ ID NO: 253803 - DNA, 417 bp, Unknown
  Bacterial polypeptide expressing nucleotide sequence isolated from the Sargasso Sea
gcctaaatgttgttgatgagttgataattgcagtatcaaacaataaatctaaagaacatttaatatcagttgatgatagattagaattgataaatcaatctatccaatcattaccaaaagaggatttaaataaaattaaagtcgaaaaatttgataatttgcttgttcactatgtcaaatcaaaaaatgcttctttaatcataagaggtttaagagctgtatcagattttgagtatgagtttttaatgacaggaatgaatagaactatagacaaagagatagaaacgatattcttaatgtcttcagaaaaatatcattttatttcatcaagatttataaaagaaattcataaattaggcggggatatttctaaaagtgttcctaaaccagttcttgatttcttatcaaaaatttgaa

SEQ ID NO: 253804 - DNA, 295 bp, Unknown
  Bacterial polypeptide expressing nucleotide sequence isolated from the Sargasso Sea
atgtcaaaaattggagtatacccaggaacttttgaccccatgacaaatggacatctaaatataattgaaagagctctaagggtagtagacaagttaataattggaatagcagataacctaaataaaaaaccccttcttagtattgatgaaagaaaaagtataattgaaaatgatatattgtatttgcagcaaaataataaaaaaatagaaatttatacagttaatggacttttaactgagtttgcaaaaaagtgtaatgcagattgtattattagaggattgagagcggtctcag

SEQ ID NO: 253805 - DNA, 250 bp, Unknown
  Bacterial polypeptide expressing nucleotide sequence isolated from the Sargasso Sea
tcgagaacaaaatgcccaggtggtcctgaggggtttgagggctgtgtcggactttgagtatgagtttcagttggccgccatgaatcggcgtctggacccaaaaattgagacgatgttcttaacaccttccgagcatttcactttcctgtcggcttctatggttaaggaaatcgctactcatggcggcgatgtgtcgcagtttctgcaccccgaagtcaatgacaggctcatccagcgcttgcgcggctga

SEQ ID NO: 253806 - DNA, 433 bp, Unknown
  Bacterial polypeptide expressing nucleotide sequence isolated from the Sargasso Sea
aattaaaaaagctttaaaattagcagataaaattattgtaggtatttctaatggaaatcaaaaaaattttttatttccaatagatgaaagatataaaattgtatcaaaagctttatataatgatctcaagttcccaaaaaacaaaattcaagttgtgaaatttaattctttaacgactgaattatgtaaaaaatataaatcaaaccttatattaagaggtttaagggcagtgtctgattttgaatatgaatttcagcttgctggaatgaatagaaaattgaataataaagttgaaacagtttttcttatgtcagatgttgaaaatcaaatcatttcgtctcgttttgttaaagaaatagctatccataaaggtgatttaagaaaatttacaactaaaagcacaataaaatccttgaagaaaatctatgcttaa

SEQ ID NO: 253807 - DNA, 160 bp, Unknown
  Bacterial polypeptide expressing nucleotide sequence isolated from the Sargasso Sea
atgacaaaaaaaataggtatatatccagggactttcgatcctttaacatttggacatttagatattatcaaaagatctttacttatagtagataaactaattattggtgtagctaataatttaaataaagtttcaatgttatctattgtcgatagaaaaa

SEQ ID NO: 253808 - DNA, 90 bp, Unknown
  Bacterial polypeptide expressing nucleotide sequence isolated from the Sargasso Sea
gttgacccataccgtggtgtacccggggaccttcgaccccatcaccaatggccatattgatctggtagagcgcgccgcgaagcttttcga

SEQ ID NO: 253809 - DNA, 260 bp, Unknown
  Bacterial polypeptide expressing nucleotide sequence isolated from the Sargasso Sea
tacttctttatgtaacaaacataaatcgaacattattttacgtggtttgagagctgtttctgatttcgaatatgagtttcaattagctggaatgaacagaaaacttaataaaaacattgaaacagtatttgtaatgtctgatgtggctaatcaaattatttcttcgagatttgttaaagaaattgctgaattaaatggagatataaaaaaatttactacaaaaagtacaataaaagcattaaaaaataaattaatatgaa

SEQ ID NO: 253810 - DNA, 487 bp, Unknown
  Bacterial polypeptide expressing nucleotide sequence isolated from the Sargasso Sea
tatgaaaaagataatatatcctggaacatttgacccaattcattatgggcacatcgatattgcaagaagagcatcaaaattgtttgatgaggtatatatgtgcgtatcagataatcaatataaaaatcccctttttactcatgaagaaagagtggagatgattgaagaatgtacaagcgatcttaaaaatgtttcagcattctccaatccaaataatttggtagtaaagtttgcacaagacaaaggagccattgctataattagaggtttgagacatgtaagtgactttgagttggagtttcaaatggcaaatgtaaatcatggattaaattctgaagtttcaacaatattaatggtttcaaatgaaaaatttcttcacttaaattccagcattattagagagttggcagaatacaatacagatttatcaaaatttgtgccaaaaaatgtagaaaaaaggcttatggaaaagcttaaaggaatgtaa

SEQ ID NO: 253811 - DNA, 277 bp, Unknown
  Bacterial polypeptide expressing nucleotide sequence isolated from the Sargasso Sea
tatgcgcatcggcctttatcctggcacattcgatccgataaccaacggacatattgacattatttcccgcgcggcggctttggtcgaccgtttggtcattggcgttgcgatcaaccgcgacaaaggcccgcttttcagccttgaagagcgcgtgacaatgatccagccggtgattgcggaaattgccgaacggaccggcaccgaaatcgtcgcccatccttttgaaaacctattgatccattgcgcccatgatgtgggtgcgaatgtgattgtgcgc

SEQ ID NO: 253812 - DNA, 481 bp, Unknown
  Bacterial polypeptide expressing nucleotide sequence isolated from the Sargasso Sea
catgaaaaaaataatataccctgggacatttgacccaattcataatggacacattgacatcgctacacgagcatcaaaattattcaatgaattagagttcgttgttgcaatcaatgcagaaaagacaccactcttttctatagaaaaacgattggagctaatacaagattcagtaaaacacctggataatgtaaaagtatctgagttcaaaggtcttgtagttgaccatgctgttagcactggagcaaatgccattattcgaggacttagacatgttagtgattttgaatttgagtttcaaatggctatgatgaattttcatttaaataatagcatcacatcattgtttatgatgcccgatgaaaaatttatccatctaaactctaccgtagtgaaagatgtatcaaaaaatggaggtgatgtttctgcgtttgttccaccaagtgtggaaaaggcattatttaataaatttttttcctaa

SEQ ID NO: 253813 - DNA, 217 bp, Unknown
  Bacterial polypeptide expressing nucleotide sequence isolated from the Sargasso Sea
atgaaagtagctatatatccaggctcatttgatccaataacctttgggcatatggatattattgatagagcttgcggcctttttgataagatcataattgctattgcaaaaaatgaagctaaaaatccattatttaacttagaagacagaataaaacttgcaaaagaaatttataaagataattcacaagtagaagtggtgggattcccaagacaat

SEQ ID NO: 253814 - DNA, 334 bp, Unknown
  Bacterial polypeptide expressing nucleotide sequence isolated from the Sargasso Sea
atgacagtaaaaattgcagtatatccaggaacttttgatccatttacttttggtcatcttgatgttgtaaaaagatcttccaagctttttgacaaaattattgtttctgtagctgagaataataataaaagtgctctttttaatttggatgaaagaattaaaattatatcagatgtgatttcgaatgaaaaagacttagataaaattgaaattagaggatttaaaggtttactagttgatcatgtgattgatgtaggagctgtagctgtcctaaggggattaagagcgctttctgattttgaatatgagtttcaaatggcaggtatcaacacgc

SEQ ID NO: 253815 - DNA, 417 bp, Unknown
  Bacterial polypeptide expressing nucleotide sequence isolated from the Sargasso Sea
aaatcgtagataaaatcattgttggtatatctgacggtaatgagaaaaattttttatttccaatagatgaaagattaaaaattgtttcaaaagcattatatgtagacctaaaacttccaaaaaataaagtcaaggtgattaaatttaattcactaacaacaaaactatgtaaaaaatataagtcaaacttaattcttagaggtttgagagctgtttctgattttgaatatgagtttcaactagctggaatgaatagaaaattaaataataaagtagaaacagtgtttcttatgtctgatgttgaaaatcagattatttcatcgagatttgttaaagaaattgctttacacaaaggtgatctaagaaaatttacaactaaaagcactatcaagtcattgaaagaagtttatgcttaaa

SEQ ID NO: 253816 - DNA, 337 bp, Unknown
  Bacterial polypeptide expressing nucleotide sequence isolated from the Sargasso Sea
attgtatcaagagctttatataatgatctaaagttttcaaaaaataaaattcatgttattagatttaattctttaacgaccgaattatgtaaaaaatataaatcaaacctcatattaagaggtttaagggcagtgtctgattttgaatatgaatttcagcttgctggaatgaatagaaaattgaataataaagttgaaacagtttttcttatgtcagatgttgaaaatcaaatcatttcctctcgttttgttaaagaaatagctatgcataatggtgatttaagaaaatttacaactaaaagcacaataaaatctttgaaaaaaatctatgcttaaa

SEQ ID NO: 253817 - DNA, 445 bp, Unknown
  Bacterial polypeptide expressing nucleotide sequence isolated from the Sargasso Sea
tttaatccaattaccaacggccacactgatctagtggagagggcagctggtttatttgataagatcatagttgcggttggtactaatacccagaagggtaaagggctacaggccactagaagagtggccttagcgactgaagttctcaaggaaattgacaatgttgaagtcgtatcttttgatggtttgttaacggattttgttcgggcacaaggcgccaatattattcttcgaggcttacgaacagttgccgattttgaatatgaatttcaactagtaggaatgaatcgggcattaaaccccgaaatagagacagtttttcttgcccccgcggagcacctatcttacatttcatcaactcttgtcagagagattgcattttttggaggtgatatttctaaattcgttcatccagtggtagcagacgctatcttaaaaacctaat

SEQ ID NO: 253818 - DNA, 409 bp, Unknown
  Bacterial polypeptide expressing nucleotide sequence isolated from the Sargasso Sea
tttgataagttaatagttgctgtttctgaggggggagaaaaaaaccatttattttctacagatgaacgtattaatttagttaaaaattctctacataaagatatgaggatatcatccaaaaaaatacaaattatcaaattttcttctttaacaacaactttgtgtcaaaagtataaatcaaatattattctaagaggtttgcgagcagtatccgatttcgaatacgaatttcaacttgcaggcatgaatagaatgttaaatgcaaaaatagaaacaatatttttaatgtctgatgttgataatcaagtaatatcttctagattggtcaaagaaattgcaaatttaaaaggtgatttaaaaaaatttataactaaaagtgttattaaagaaataaagaaaaaagtatgaa

SEQ ID NO: 253819 - DNA, 350 bp, Unknown
  Bacterial polypeptide expressing nucleotide sequence isolated from the Sargasso Sea
agaggagagagtggatattgttaaaaaggcaatttataaggatttaaaaatctctaaaaaaaatgttcaagtaatgtcattcaacacattaacaacttcgctatgtaaaaaattaaatgctaaaattatatttagaggtctcagagcagtttctgattttgaatatgaatttcagttggctggaatgaatagacaactaaacaataaggtagaaactgtatttttaatgtcagatgtagaaaaacaagttatatcttcaaagtttgttaaagaaattgcctctttgggaggaaatatagataattttgtaacaaaaagtacaaatcgagcaattaaaatgaaaatatgat

SEQ ID NO: 253820 - DNA, 496 bp, Unknown
  Bacterial polypeptide expressing nucleotide sequence isolated from the Sargasso Sea
atgaagagcacggctatttatccaggaacatttgatcccattacttatggtcatatagacgtaattaagaaatctttaaaaatatttgacagggttatagtggctgcagcagaaaatattaataaagattatctattctctgttgatgaaagagttgaaaacataaaggactctttgtttaaagatttaaaattaaatagaaacaagatatttgtaattccttttaatacattaacaattaatctttgtaaaaaatacaaagcaagtgtaataataagaggtctaagggttgtatctgattttgaatacgagttccaattagctggcatgaacaaaaaattagatgaaaaaattgaaactatattcatgatgtcagatgttgaaaatcaaatcatttcttcaaaatttgttaaagaaattgcaaaattagatggtaaaattgataagtttttgacaaaatctatagttaagagaataaaaaataaactagaatgaa

SEQ ID NO: 253821 - DNA, 520 bp, Unknown
  Bacterial polypeptide expressing nucleotide sequence isolated from the Sargasso Sea
aatgagtcaaaaagtaattatttaccctggaacattcgatccgctgacatacggccatatcgatattattgaacgaggtgcaaatctgggtgatcagcttattgtggccgtttctttgaatagtggtaagcaaccactttttacaatggaggaacggaccgccctggtcatgaccgaagttgagcaaatcaatgttaaacaaaaagctaccccgcccgttctcgttaagagtttttctggattactgaccgattttgcgaccgagcagaaagccacggcaattctccgaggacttagagcggttgctgattttgaatatgaatttcagatggcaagcattaacaagagacttcacggtgaattagaaactatatttcttatggcggcagaacagcaacattttgtggcctcgcgtttcgtgaaggaaattgctcttttcaatggcgatgtctctagctttgtgcccacaaatgtagccaatgcacttcaaaggaagatgcaaggacgctcagccctttga

SEQ ID NO: 253822 - DNA, 220 bp, Unknown
  Bacterial polypeptide expressing nucleotide sequence isolated from the Sargasso Sea
cattagaggtttaagagccgtttctgactttgaatatgagtttcaattagctggcatgaacaaaaaacttaactctaatatagaaactatgtttcttatgtcagatgtggaaaaccaaataatttcttcaaagtttgttaaagaaataacaaaattaaacggtaatattaataagtttgttactaaatcaacagttaaaatgcttaagaaaaaattttaa

SEQ ID NO: 253823 - DNA, 322 bp, Unknown
  Bacterial polypeptide expressing nucleotide sequence isolated from the Sargasso Sea
tttatatgctgacttaaaactcccaaaaaataaaatccaagtgattaaatttaattctttaacaactgaattatgtaaaaaatataaatcaaatctaattctcagaggactgagagctgtgtcagattttgaatatgagttccaattagctggaatgaatagaaaattaaataataaagttgaaactatttttcttatgtctgatgttgaaaatcagattatctcatcaagatttgttaaagaaatagctttacacaagggtgatttaagaaagtttacaactaaaagtacaattaaatcactgaaagaggcttatgcttaa

SEQ ID NO: 253824 - DNA, 258 bp, Unknown
  Bacterial polypeptide expressing nucleotide sequence isolated from the Sargasso Sea
ttgcaaaaaaatttaatgcagattgtattatagaaggattaagagctgtctcagattttgaatatgattttcaaatgacaggtatgactatcaaattaaacccagaaatagagactatatttttaatgtctgcagataataattcttttatttcttcaaatttagttaaagaagttcataagcttggcggagatgtatcaaaatttgtttctgagaacacgattaaaattttaaataataaaaacacctcatcatagc

SEQ ID NO: 253825 - DNA, 196 bp, Unknown
  Bacterial polypeptide expressing nucleotide sequence isolated from the Sargasso Sea
atgatcgcactttacccaggaacatttgatccaattacaaacggacacttcgaaatcattagaagagcttcaacaattttccaggttttggtagtcggtgttgctatcagcgacgaaaaaaaacctttgtttgaacatgaaaaaaggcttgccatggttaatgaagtcttgaatgcttttagcaatattgaagtaa

SEQ ID NO: 253826 - DNA, 364 bp, Unknown
  Bacterial polypeptide expressing nucleotide sequence isolated from the Sargasso Sea
cttatttaattcaaatgaaagaatagatattgtcaataaagctttattcaaagatctaaaattaaatagaaaaaaaatattggttgtttctttcagttctcttacaactgatttatgtaaaaagtataaatctaatgtcattttaaggggcttaagagctgtatctgattttgaatatgagttccaattagctggaatgaatagaaaattaaataataatatagaaacaattttcttaatgtcagatgtggaaaatcaaattatatcttcaaaatttgttaaagaaattgttaaattaaatggtgatataaaaaaatttactaccaaaagcacaattaaatctttaaaagaaaaatatgaataa

SEQ ID NO: 253827 - DNA, 496 bp, Unknown
  Bacterial polypeptide expressing nucleotide sequence isolated from the Sargasso Sea
gatgaataaagttgctatttacccaggtacattcgatccaattacttttggccatattgacgttatcaagaagggtttaaaattatttaataaaatagtagtggctgtatctgatgttgataataaagattatctttttgattctgatgaaagaattgaaattgttaaaaaagctttattttcagatcttaaacttaataaaaaaaagatattaataatttctttttcatcattaactacagatttatgtaaaaaatataaatcaaatataattttaagaggattaagagctgcttctgattttgaatatgaattccaattagctggtatgaacagaaaattaaatagcaatattgaaaccgtttttttaatgtctgatgtagaaaatcaaattatatcctcaaagtttgtaaaagaaattgtaaaattaaaaggaaatataaaaaaatttacaacaaaaaatactattaaattactaaaaaaaaaatatgaataa

SEQ ID NO: 253828 - DNA, 109 bp, Unknown
  Bacterial polypeptide expressing nucleotide sequence isolated from the Sargasso Sea
atgaccgtggccaaccgccgcattgccgtctaccccggcacgttcgacccgatcaccaacggtcatatcgaccttgtgagccgggccgcgccgctgttcgaaaaggtcg

SEQ ID NO: 253829 - DNA, 301 bp, Unknown
  Bacterial polypeptide expressing nucleotide sequence isolated from the Sargasso Sea
ccaaaaaataaaatcaaggtgattaaatttaattcactaacaacaaaactatgtaaaaaatataagtcaaacttaattcttagaggtttgagggctgtttctgattttgaatatgagtttcaactagctggaatgaatagaaaattaaataataaagtagaaacagtgtttcttatgtctgatgttgaaaatcagattatttcatcgagatttgttaaagaaattgctttacacaaaggtgatttaaaaaaatttacaactaaaagcactatcaagtcactgaaagaagtttatgcttaaa

SEQ ID NO: 253830 - DNA, 289 bp, Unknown
  Bacterial polypeptide expressing nucleotide sequence isolated from the Sargasso Sea
atgaagaccgctgtttaccctggaacttttgatccaattacatatggtcatatagacgtcattaagaaatctcttaaaatatttgatcgaattgttgttgcaactacagataatacagataaaaattattttttttctatagaagaaagacttaacattataaatcattcattgtttaaggatttaaaacttagtaaaaataaaattaaagtaatttctttcgataatttgactattgaattatgtaaaaaatatagtgcctctgcgattataaggggtttaagagccg

SEQ ID NO: 253831 - DNA, 103 bp, Unknown
  Bacterial polypeptide expressing nucleotide sequence isolated from the Sargasso Sea
aatgaaagtcgctatatatccaggttcatttgatccaattacattcggacatattgatatcgtagaaagggccgcatcgttatttgatcaagttgtgataggg

SEQ ID NO: 253832 - DNA, 271 bp, Unknown
  Bacterial polypeptide expressing nucleotide sequence isolated from the Sargasso Sea
taaatctcttactacagatttatgtaaaaaaaataattctaaagttatacttaggggtttaagagcagtatcagattttgaatatgaatttcaattagcaggcatgaatcgtaaattaaataatagtattgaaacaatttttttgatgtcagatgttgaaaatcaaattatttcttcaaaatttgttaaagaaataatttcactaggtggtaatgtaaataaatttacaacaaaaagtacaattaaagcacttaaaaaaaaatatgcttaa

SEQ ID NO: 253833 - DNA, 364 bp, Unknown
  Bacterial polypeptide expressing nucleotide sequence isolated from the Sargasso Sea
ttcgaaaaacaccgtgttttctacagaggagcgagttcaattgagctcggaaattttagccccgtgggacaatgtagaggttaaatctttttccggactaatggtcgattttgcaaaagaaaacggcgcgacggtggttctcaggggattgagagcggtgacagattttgaatatgaatttcagcttgcgggcatgaaccggaaacttatgccagagacagacaccgtgtttttaccaacgtcagagaagtatacttatatctcctcatccctggttcgagaaatagcaagtttagggggagatatttcggactttgtgcaccccaaaataaaagaagttttgaccgctaggttgggcaaatga

SEQ ID NO: 253834 - DNA, 238 bp, Unknown
  Bacterial polypeptide expressing nucleotide sequence isolated from the Sargasso Sea
gctgttgcaattattagaggtctaagggcagtagctgatttgaaatatgaattcaaattagcaaccatgaatagaactcttgcacctgatattgagagtattttttttacccctaaggatactttaatttatgtttcatctagcctggtaaaggagatagcagcctttggtggagatatttcaagatttgttccgccaaatgtagaaaccgccttaattaataagatcggtaactaaa

SEQ ID NO: 253835 - DNA, 496 bp, Unknown
  Bacterial polypeptide expressing nucleotide sequence isolated from the Sargasso Sea
atgaaaaaaactgcaatttaccctggaacgtttgacccaataacttttggacatattgatgtaatacaaaaatctttaaaaattgtagaaaaaattattgttgccatttctgatagtaataataaaaattatctattcagtgttgaagaacgaattgaaattgtaaataaagcacttttctcagatctaaagtttaatagaaataaaatatctatagtttcttttaattctttaactacagacctttgtaaaaaatataaatctaatataattttaaggggtctaagagctgcttcagactttgaatatgaatttcaattagctggaatgaatagaaaacttgataataatattgaaactatttttttaatgtcagatgttaaaaatcaaataatttcatctaggttaataaaagaaattattgaactaaaaggcgatataaaaaaatttacaacaaaaagtacaattaattcattaaaaaaaaagtatgaataaa

SEQ ID NO: 253836 - DNA, 412 bp, Unknown
  Bacterial polypeptide expressing nucleotide sequence isolated from the Sargasso Sea
gtaagcaaacttatagtagcagtatctaatgattacactaaagattatttattttcttctgatgaaagagtaactattattaaaaattcgctttttaaagaccttaaattaaacaaaaatcgtataaaagttttatcattcaatactcttacaacatctctttgtctaaaatataatgcaactataatttttagaggattaagagctgtttctgattttgaatatgagtttcaattagcaggaatgaatcggcagttaaataaaaaaattgaaactgtttttttaatgtctgatcctgacagacaagttatttcctcaaaatttgttaaggaaatagctaaattaaatggaaaaattgatgattttgttactaaaagtactaaaaaatcattaaaagaaaaatatgaataga

SEQ ID NO: 253837 - DNA, 287 bp, Unknown
  Bacterial polypeptide expressing nucleotide sequence isolated from the Sargasso Sea
tacagtagtatcttttagttcattgactactgatttatgtaaaagatataagtcaaatatcattcttagaggattaagagctgtatctgattttgagtacgaattccaattagctggaatgaacagaaaattaaatcaaaatatagaaactatttttttaatgtcagatgttgaaaatcaaataatctcatccagatttgtaaaagagattgtaaaattaaatggtgatattaaaaaatttactaccaaaagtactatcaaatctttaaaagaaaaatatgaataga

SEQ ID NO: 253838 - DNA, 184 bp, Unknown
  Bacterial polypeptide expressing nucleotide sequence isolated from the Sargasso Sea
atgaaagttgcaatataccctggatcttttgatccaatcacttatggtcatatggacatcatagatagggcaagtggattatttgataaaatagtaatagcaatagcgaaaagcgaatctaaaaatcctttgtttagtttagaagataggattaagttagttaagaatattttctctagataat

SEQ ID NO: 253839 - DNA, 475 bp, Unknown
  Bacterial polypeptide expressing nucleotide sequence isolated from the Sargasso Sea
atgagggcgctctacccgggaagttttgatcctttgaccaatggccacatggatctgattgagcgggccgttgccctgttcgggcaggtcacggtggccgtgctgtcgaatcccaacaaaaaacctgccttcagcgtcgatcagcgcatcggtcagattcaatccgcgacctgtcacctgaacagcattgacgtggtcagctttgacggcttgaccgtccactgcgccgtcacccatcaagccgatctcatcctgcgtggactgcgagcgatgagcgacttcgaatacgagctacagatcgcccacaccaatcgatcactggccgaagatttggagacggtcttcctggcgacatcgacccgtcacagcttcctcagcagctctgtggtgaaagaggtggcccgtttcggcggccctgtggatcacatggtccccaaggaggtagccaaggacctgaacaggctctttaattcgg

SEQ ID NO: 253840 - DNA, 346 bp, Unknown
  Bacterial polypeptide expressing nucleotide sequence isolated from the Sargasso Sea
aggcttaaaattgtatcaaaagctttatttaacgatttaaaattaccaaaaaagaaaatccaagttattaaatttaattctttaacaaccgaattatgtaaaaaatataaatcaaatcttatattaagaggtttaagagcagtgtctgattttgaatatgagtttcagcttgcgggaatgaatagaaaattgaatagtaatgttgaaacagtttttcttatgtcagatgttgaaaaccaaattatttcctctcgttttgtaaaggaaatagctaaccataaaggtgatttaagaaaatttacaactaaaagtacaataaaatctttgaaaaaaatctatgcttaaa

SEQ ID NO: 253841 - DNA, 364 bp, Unknown
  Bacterial polypeptide expressing nucleotide sequence isolated from the Sargasso Sea
aatgatcgcactttacccaggaacatttgatccaattacaaacggacacttcgaaatcattagaagagcttcaacaattttccagattttggtagtcggcgttgctatcagcgacgaaaaaaaacctttgtttaaacatgaaaaaaggcttgccatggttaatgaagtcttgaatgcttttagcaatattgaagtacagccttatgatggattaaccattgattttgcaaaaaagattgatgcaagagtcatagtaagagggcttagatctcctgctgatggccaatatgaatttgagctagccagcatgaacaaaaagcttgctgatgacatcgagactgtttttcttagcagcggggaccaa

SEQ ID NO: 253842 - DNA, 457 bp, Unknown
  Bacterial polypeptide expressing nucleotide sequence isolated from the Sargasso Sea
tatgaataagattatttatcccggtactttcgatcctatacataatggacatataaatatagctaaaagagcaataacaatttttgatgaactagagtttgtagttgcgatcaacgttgataaaaatccactgtttacaatcgaagaaagattggatttaattgatgagtccacgaaatatatagaaaatatctcagttagtaatttttcaggtttggttgttgatcatgcagcgaatgttggtgctacatcaattattagaggtttaagacatgttagtgattttgagtttgaatttcaaatggcaatgatgaattttcaccttaataaaaatatcacatccatttttatgatgcctgatgaaaaatatatacatttaaactcatcagttgtcaaagatgtttctaaaaatgggggggatgattctgctttcgttccatcgtgcgttcaggaggca

SEQ ID NO: 253843 - DNA, 496 bp, Unknown
  Bacterial polypeptide expressing nucleotide sequence isolated from the Sargasso Sea
aatgaaaaaaactgccatttatccgggaacatttgatccaataacatttggtcatattgatcttatacaaaagtcactaaaaattgttgataaaattatagtggcaatatctgacagtaatcaaaaagaatatttatttacttcggaagaaagaattcaaattgttaataaagcattattttctgatttaagatttgataaaaaaaaaattaaagtaatctcgtttaattctttaacaacagatttatgcaaaaaatataattctaatataatattaagaggattaagagcagcatctgattttgaacatgaattccagttagctgggatgaatagaaaacttaacaataagatcgaaacaatttttttaatgtcagactttaaaaatcaagttatttcttcaagacttataaaggaaataatagaacttaaaggtgatattagaaagtttacaactaaaagcacaataatttcgttaaaaaagaaatatgaataa

SEQ ID NO: 253844 - DNA, 418 bp, Unknown
  Bacterial polypeptide expressing nucleotide sequence isolated from the Sargasso Sea
gataggttggttgtgggagtagcttcaaatattgataaaaaacctcttttttccgtcgaggaacgggttgagatgataagggtccaggttgaaaaatttaatgagaatttgaatacaaacatcgtaattcatcagtttgagaacttattaattgattgtgcaaaagatgttggagcggcagtaatttttagagggttaagggctgtttcagattttgaatatgagtttcagatggtgggtatgaatcgggcgttgaatgataaaatcgagacagtgttcttgatggccgacgtaagtcaccaggcaattgcttcaaaattagtaaaggagatttcacgattaggtggaaacattgatagatttgtgccagaagaagtagcttctattatgcacaaaatatataagttgaagaaataaa

SEQ ID NO: 253845 - DNA, 478 bp, Unknown
  Bacterial polypeptide expressing nucleotide sequence isolated from the Sargasso Sea
aatgatcgcactttacccaggaacatttgatccaattacaaacggacacttcgaaatcatcagaagagcctcaacaattttccaggttttggtagtcggcgttgctgtcagcgacgaaaaaaaacctttatttgaacatgaaaaaaggcttgccatggttaatgaagttttgaatgcttttagcaatattgaagtacagccttatgatggattaaccattgattttgcaaaaaaaattgatgcaagagtcatagtaagaggacttagatctcctgctgatggacaatatgaatttgagctagccagcatgaacaaaaagcttgctgatgacatcgagactgtttttcttagtagcggcgaccagaatgcgtttttatcatcctccttgattaggcaaattgcacaagagggaggcgatatctcagattttgttcatccagtggttcaccaaaacctttccgaagcatacaaaaaataa

SEQ ID NO: 253846 - DNA, 482 bp, Unknown
  Bacterial polypeptide expressing nucleotide sequence isolated from the Sargasso Sea
catgtcagacaaattagctgtatatccaggaacttttgatccatttacttttgggcatcttgacattgtaagacgatcctcaaagctttttgacagaattataatatcagttgctgaaaataacagtaaaagtgcactttttaatttggatgaaaggattgaaatcgtttcaaatgttatttcaaacgaaaaagacttagataaaattgaaattaaaggtttttcagggttgctcgttgatcatgttgttgatatgggtgctgttgcggtacttagaggattaagagcgctttctgactttgaatatgaatttcaaatggctggaattaatgctcgtctatcaaatgagtttgaaacaatttttttaatggcatctgaaaatcagcaatttgtggcttcaagattcgttaaggagatccactctttaggtggggacgtatcttcttttgttcctaaaattgtaatggaacatttagaaaaaa

SEQ ID NO: 253847 - DNA, 481 bp, Unknown
  Bacterial polypeptide expressing nucleotide sequence isolated from the Sargasso Sea
atgaaaaaaatattatatccgggcacttttgatccgattcataatggtcatattgacattgctaagcgagcagcaaaattatttgatgaacttgaatttgttgttgcaattaattcagataaaaaaactcttttttctaaagaaaaaagagttgaactgatcgaagtagcagtacaagatattaaaaatatcaatgttagtttttttaatggtcttgttgttgattatgcttccaggcaaggttgttcggctataattcgtggtttacgacatgtaagtgatttcgaatttgaatttcaaatggcaatgatgaattttcatctaaataaaaatattacatccttatttatgatgcccgatgaaaaatatattcatctaaactcttcagttgttaaagatgtttcaaaaaatggaggcgatgtttctgctttcgttccatcgtgcgttcaggaggcattatttactaaattttctaaataaa

SEQ ID NO: 253848 - DNA, 499 bp, Unknown
  Bacterial polypeptide expressing nucleotide sequence isolated from the Sargasso Sea
atgaaaaaaattgctatctatccaggcacatttgatcctgttacttttggacatattgatgtaattaaaaaatcattaaaactttttgataatttaatagttgctatttctgatggaaatcaaaagaattatctttttaatttggaagaaagaacaacaataatgaacaatgctttatttaaagatcttaaattaaataaaaaaaaaataaaggttataacatttaattatttaactacagatctttgtaaaaaatttaaatcaaatgttattttaagaggactaagagccgcatctgattttgaatatgagttccaacttgctggaatgaatagaacattaaacaaaaatatagagacaatttttttaatgtctgatgttaaaaaccaaataatatcctcaaagttaataaaagaaattattgaattaaaaggtaacataaataaatttacaacaaaaagtacaattgcagctttaaaaaaaaaatatgatacataaa

SEQ ID NO: 253849 - DNA, 324 bp, Unknown
  Bacterial polypeptide expressing nucleotide sequence isolated from the Sargasso Sea
aaacagcagaaatgaaagatgtagctgataaaatagtagtgcaaggctttgataacttattggtggattttgctaaagataatgatgccaaagtaattattagaggattacgtgccgtttcggattttgattacgaatttcagatgtctagtatgaatgcaaaattagcgcctgaagtagaaacagtatgtttgatggcttctgatcgtcatcaatttattgcgtctcgtttggtgaaagagattgcaaaattaaatggtgatgtacaacaatttgtttcaccccgcgttagtggattgttggaggcaatatttgcaaaataaa

SEQ ID NO: 253850 - DNA, 397 bp, Unknown
  Bacterial polypeptide expressing nucleotide sequence isolated from the Sargasso Sea
tatgaaaaagataatatatcctggaacatttgacccaattcattatgggcacatcgatattgccagaagagcatcaaaattgtttgatgaggtatatatgtgcgtatctgataatcaatataaaaatcccctttttactcatgaagaaagagtggagatgattgaagaatgtacaagcgatcttaaaaatgtttcagcattctccaatccaaataatttggtagtaaagtttgcacaagataaaggagccattgccataattaggggtttgagacacgtaagtgactttgagttggagtttcaaatggcaaatgtaaatcatggattaaattctgaagtttcaacaatattaatggtttcaaatgaaaaatttcttcacttaaattccagcattatc

SEQ ID NO: 253851 - DNA, 288 bp, Unknown
  Bacterial polypeptide expressing nucleotide sequence isolated from the Sargasso Sea
gatggaggttcttgtgcggatagcggtatacccggggacgtttgatcccataacgaatggacatattgatattatacgtcgagccagtaaagttgttgacaagcttattgttgccgctgcggagaacatcggtaaaagtccaatgttcagcctggacgagcgtagagatatggtgaaccaagaaattggaatcataaaggcagataatgaagctcgaggttatcacagtgaaattgaggtcacatcgtttaactcgctattgatgcactttgttgatgaacacgacgc

SEQ ID NO: 253852 - DNA, 136 bp, Unknown
  Bacterial polypeptide expressing nucleotide sequence isolated from the Sargasso Sea
atgagagtagctatttacccaggctcatttgatccaattacttatggacatatggatattattgatagggccagcggcctgtttgataaaattattattgctgtagcaaaaagtgaggcaaaaaaaccacttttta

SEQ ID NO: 253853 - DNA, 183 bp, Unknown
  Bacterial polypeptide expressing nucleotide sequence isolated from the Sargasso Sea
tatgaaagtagcaatttacccaggttcgtttgatccaataacatttggacatatggatatcatagatagggcatcaggtttatttgataaaattatcattgcaattgctaaaagcgaaacaaaaaatccattattttcattagaagataggataaaacttgctaatactatctataaagataa

SEQ ID NO: 253854 - DNA, 415 bp, Unknown
  Bacterial polypeptide expressing nucleotide sequence isolated from the Sargasso Sea
aaactctttgaaaaaattatagtaggagtttccgatggtgaaaataaagaatatttatttgaagctcacgaaagagttcaaataattaaaaaagccttattttcagatttaaaacttaataagaaaaaaattgaagttataacttttacatcattaacaactgatttatgtaaaaaatatagatcaagcatcattttaagaggtttgagagcagtgtcagattttgagtatgaatttcaattagctgggatgaatagaaaactaaataataatatagaaacattttttttgatgtcagatgttgaaaatcaaattatttcttctaagtttgtaaaagaaatagttaaacttggtggagatataaaaaaatttacaactaaaagtacaattaaatctttaaaacaaaaattatgaa

SEQ ID NO: 253855 - DNA, 152 bp, Unknown
  Bacterial polypeptide expressing nucleotide sequence isolated from the Sargasso Sea
tatgaaagtcgcaatttatcctggatcgtttgatccaataacatatgggcacatggatatcattgatagagcatgtggtctttttgataaaatagttatagctattgctaaaaatgaagcaaaaaacccactttttagtcttgaagatagaa

SEQ ID NO: 253856 - DNA, 487 bp, Unknown
  Bacterial polypeptide expressing nucleotide sequence isolated from the Sargasso Sea
aatgaaaactaaagcaatttatcccggtacttttgatccattaaccaatggtcacagcgacttagtacaacgggctgcacgtttatttgatcaggtgatagtagcggtcgcatccaatcccagtaaacaacctttgtttagtctggctgagcgggtgcaactggcagaacagtgttttaccgatcttccgaatgtgaccgtagttggattttcaggcttgctggctgattttgccaaacagaaccaggctcaggtgttattgcgtggtgtacgggccgtggctgattttgaatatgagttccaactggccagcatgaaccgtcagttaaatccggatctagacagtttgtttatgaccccttcagaaaaaaatacctttatctcttccactttagtgaaagaagttgcccgccatggcggtgatatcagccgttttgtcgcttctcatgtggaacttgcgttaaaacagaaattcactgcggtttag

SEQ ID NO: 253857 - DNA, 502 bp, Unknown
  Bacterial polypeptide expressing nucleotide sequence isolated from the Sargasso Sea
aatgcgcataggtctttatccgggtacttttgatcctattactttgggtcatattgatattataagaagagcgtctttgctggtggaccggcttgtgattggtgtggcaataaatagcgataagtcacctctatttgatttgaaagatagagtttcaatgttggaggaggaatgcaattatttatccaaacaagccggaacggaatttgtagtacatccatttgaaaatctattaattgattgcgcccatgatgtaggggcccaacttattgtacgtggcctgagagcagtcgctgattttgaatacgagtttcaaatggttggcatgaataggtctttggataactctatagagaccgtattcctaatggctgaagcgaagcatcaggctattgcttcaaaattagtaaaagaaatagccaggttaaatggtgatatatctaaatttgttacgccgcatgttgccaaaaggctacttaataaattaaaagtatcgaattaa

SEQ ID NO: 253858 - DNA, 454 bp, Unknown
  Bacterial polypeptide expressing nucleotide sequence isolated from the Sargasso Sea
atgaaaaaagcagtctttcctggctcatttgatcctattactataggacacttagacattgttaaaagaggaatgaagatttttgataagattattattgcaattggtgataacacagataaaaaatatatgttcacaaaagaaaaaagagtagagtttgttgagagaacatttagttcttatgataagatcaagattgagtcatatcagggtctaacagtagatttttgtaaaaaaaataatgttgaatttattataagaggtttaaggaatcctgcagattttgaatttgagaaaagtattgcccttactaatagggaaatgacagggattgaaactatattttttctaacatcacccgaaaactcgtttataagcagtagcattgtgcgtgaccttatcagaaacaaaggtgactataaattattcattcccaagggcatcattctttaat

SEQ ID NO: 253859 - DNA, 444 bp, Unknown
  Bacterial polypeptide expressing nucleotide sequence isolated from the Sargasso Sea
catgagggcgctctatcccggcagcttcgatccgctcacgaacggtcacatggatctgatcgaacgggcgtctgcgctgttcggcgaggtgatcgtggctgtgctgtcgaaccccagcaagaaaccgctgttcaccgtcgaggagcggatcgctcagatccaggtctcaacggcgcacctggagcgcattgaagtgatcagcttcgacgggctgaccgtgcattgcgcggagacccatcgtgccgatctgatcctgcggggactgcgggcgatgagtgatttcgaatacgagcttcagatcgcccacacgaaccgttcgctggcggaggatctggagaccgttttcctcgccacatcagcccgacacagctttctgagcagctctgtggtcaaggaggtggcccgtttcggtgggccggtggagcaccatggtcccttgcgagg

SEQ ID NO: 253860 - DNA, 496 bp, Unknown
  Bacterial polypeptide expressing nucleotide sequence isolated from the Sargasso Sea
atgaaaaataacgcaatataccccggaacttttgatccaattacttatggtcatattgatgtaatacaaaaatctttaaaaatttttgataaagttatagttgctgtgtcagatagtaaccaaaagaattatctcttttctattgatgaaagaattgaaatagtaaacaaagcgttattttcagatcttaattttagtaaaaataaaataaaagttatttcatttaattcactcacaacagatttgtgtataaaaaataaatctaaaattatattaagaggcttaagagctgcctcagatttcgaatacgaatttcaattagctggaatgaacagaaaacttaacagcaatattgaaacaatttttttaatgtctgatgttaaaaatcaaattatttcatcaagattgatcaaagaaattgctgagctaaaaggtgatattaaaaaatttacaactaaaagtacaattaattcattaaaaaaaaaatatgaataaa

SEQ ID NO: 253861 - DNA, 469 bp, Unknown
  Bacterial polypeptide expressing nucleotide sequence isolated from the Sargasso Sea
atgtatccaggttcatttgatccaatgacaaaaggtcatatggatattgtgaaaaaagctctcactatttttgatgaagtcgttattgcggtgttagaaaacagtgctaaaactatgttatttacacctgatgaaagaaaaaaaatgattgaagaaatttatataaatgatgaaagggtaaggtgcatatcattaggctcaaaattaactatcaaccttgctgaagaaatatcagctcaagcaataatcagaggtcttcgagctatgtcagattttgagtacgaatttcagatcgcaaatattaatagatctcaaaatgaaaaaatagaaagtatcttttttactgctactgataaatttacttatgtttcatcttcaatggtaaaggaaattgcgctttataaaggtaaggtcgacgaatttgttgacccagttgtaaaaaaagaattggaaaaaaaatttaactaac

SEQ ID NO: 253862 - DNA, 484 bp, Unknown
  Bacterial polypeptide expressing nucleotide sequence isolated from the Sargasso Sea
atgaagattgctgtctatccaggttctttcgatcctttcactctaggtcataaagatattttattaagaagctcaaagatatttgataaagtaatagttgctattggcgaaaaccacggtaaacaaaaccttttttctgttgaagaaagaattaatgatatatcaaatgaaatcaatgatataggtattaaagataatgtaatagttaaatcttttagtggtttaattgttgattttgcacggtcaaatgatgcaaatatattgataaaaggtgtcagaggtccagtggattatgattatgagctccagatggctggaatgaattctactatgaaccctgatattgagaccatttttcttatatctaggcctgaatttagctatatttcatcgtcattagttaaacaaatagcctttatgaaaggcgactattcaagctttgttagtccaatagttgagaaatctatcaaaagtaagatataaa

SEQ ID NO: 253863 - DNA, 481 bp, Unknown
  Bacterial polypeptide expressing nucleotide sequence isolated from the Sargasso Sea
aatgaaacgaattatatacccaggtacatttgatcctattcacaatggccatctagatattgcaaaaaaagctgctgggttatttgacgaattggttttagttgtcgcagtcaataaagaaaaaaatccgcttttcaacaatgatgaaagaattcatttaattgaagagtgtgttacaaatttaaataatgtaagagtaagttcatttgatggtctggttgttgattgtgcaaaaatagaaaagtcagcggcgatcatcaggggtcttaggcatgtaagcgattttgagtttgagtttcaaatggcaatgatgaactataatctgaacccaataattacatccgtgtttatgatgccagatgaaaaatatattcatcttaattctacaataatcaaagatgtggccagactcggcggagatatatcagattatgttccagataatgttaaaattgcattatatgagaaatacaaagactaa

SEQ ID NO: 253864 - DNA, 211 bp, Unknown
  Bacterial polypeptide expressing nucleotide sequence isolated from the Sargasso Sea
atgaaagtagcaatctaccctggttcatttgatccaattactgttggacatatggatattgttgaaagagcaactgtgctttttgataaggtcattatcagtgttgctgaaacagatatgaaaaatccactcttttcttctgaagaaagattagacttagtgagctcgatctatgctgataatgaaaagattgaggttgttgcatttaaaa

SEQ ID NO: 253865 - DNA, 493 bp, Unknown
  Bacterial polypeptide expressing nucleotide sequence isolated from the Sargasso Sea
atgagggcgctctacccgggaagttttgatcctttgaccaatggccacatggatctgatcgagcgggcagtcgccctgttcgggcaggtcacggttgccgtgctgtcgaatcccaacaaaaaacccgccttcagcgtcgatcagcgcatcggtcagattcaatgcgcgacccgtcacctgaacggcattgacgtggtcagctttgacggcttgaccgtccattgcgccgtcacccatcaagccgatctcatcctgcgtggactgcgagcgatgagcgacttcgaatacgagctacagattgcccacaccaatcgatcactggccgaagatttggagacggtcttcctcgcgacatcgacccgtcacagcttcctcagcagctctgtcgtgaaagaggtggcccgtttcggcggccctgtggatcacatggtccccaaggaggtggccaaggacctgaacaggctctttaattcgactttcccaccccggtgac

SEQ ID NO: 253866 - DNA, 508 bp, Unknown
  Bacterial polypeptide expressing nucleotide sequence isolated from the Sargasso Sea
aatgaaacgaatagctctatatccaggttcatttgatccattaacaaatggtcatttagatattatgagaaggtcattaagtatttgtgatagtcttattgtaggaattgcgattaacaagcaaaaaaagcctttttttactgtagaagagagaataaccctaattaaagatgccattaatgaaaataaaactttaaataaagaaaataaatctaatatctcagttaaatcttttgatagtcttttaattaatttttcaaaagaaaataacgtttcaatgattataagaggtctaagggtagtttcagacttcgattatgaatttcaaatggcaggtatgaattcacgtttgagtgctgatatacaaactgtttttttgatggcctcagaaaataatcaatttattgcatctagatttgttaaagaagtcgctagtctaaatggtgatatttcttcttttgttccaaaaaatgtttttagagcaattaaacaaagatttaattattaa

SEQ ID NO: 253867 - DNA, 478 bp, Unknown
  Bacterial polypeptide expressing nucleotide sequence isolated from the Sargasso Sea
aatgatcgcgctttatccaggaacctttgatccaatcacgaatggccactttgaaatcatcagaagagcctcaacgatctttcaagttttgatcgtaggcgttgcggttagtgaagaaaagacccctctgtttgatcatgacaaaagactgacaatggtaaacgaggttttgaatggttttagcaacattgaggttcaaccttatgacgggttgacaattgattttgctaaacaaattgaagcgagagtgatagttagaggcctcaggtctcctgccgatggtcaatacgaatttgaattggcaagcatgaataaaaagcttgctgacgatatcgaaacagttttcctcagtagcggcgaccaaaatgctttcatatcatcgtcattgatcagacaaattgcacaagaaggaggagacgtttcagattttgttcacccagttgtgcatcaagcattaagcgaagcctacaaaaaataa

SEQ ID NO: 253868 - DNA, 484 bp, Unknown
  Bacterial polypeptide expressing nucleotide sequence isolated from the Sargasso Sea
atgaagatagctgtttatccaggttccttcgatccatttaccttaggtcataaagatatattattaagaagttcaaggatttttgataaagttatagttgccattggcgagaaccacggtaaacaaaatctttttactattgaagaaagaattaaagatatatcaaatgaaatcaatgatataggaattaaagataatgtattagttgaatcttttagtggtttaatagttgattttgcaagatctaaaaatgctaatattttaattaagggtgtaaggggtccggtagattatgactatgaattgcagatggcaggaatgaattcaacaatgaatcctgatatcgagactatttttcttatatcaagacctgaatttagctacatttcttcatctttagttaagcaaattgccttaatgaaaggtgattattcaagttttgttagtccaatcattgaaaaatctattaaaagtaaaatataaa

SEQ ID NO: 253869 - DNA, 457 bp, Unknown
  Bacterial polypeptide expressing nucleotide sequence isolated from the Sargasso Sea
atgaaaaaagtcatttatccaggaacatttgacccaattacttttggacatatagatttaattaaaaaagcattaaatatttttgataatcttataattgcgatttcagacggtaataataaggaatatttattttcagctgaagagagagaatatttagtgaaaaaatctctttttagtgatcttaaatttaaaaagaagcaaataaaagtagtaacatttaatactttaacgactgatttttgtaaaaaaatgaaatctaatgttatacttaggggtctcagagcaacttcggattttgaatatgagtttcaactttctggaatgaataaaaaattaaatgataaaattgaaactgtgtttttaatgtatgaccctcagaatcaaattatttcatctaaattagtaaaagagattgccgatttaaaaggaaatgtgaaaaaattactacaaaaag

SEQ ID NO: 253870 - DNA, 496 bp, Unknown
  Bacterial polypeptide expressing nucleotide sequence isolated from the Sargasso Sea
aatgaagaatattgctatatatccaggtacatttgatcctataacatttggacatatagatgttattaaaaaagctttaaaagtaatagatgttgttatcgttgcaatttctgaagtaaataataaaaattatttatttgaaacacatgaaagaatggaaataattaaaaaagctttattcttagatcttaaatttaataaaaaaagagtaaaagttatatcatttaaatcgttaactactaaattgtgtaaaaaatataaatcagaaattattttaagaggtttaagagctgcatctgactttgaatacgaatttcaacttgctggtatgaatagaaaattaaacagtaatatagaaacaatttttttaatgtctaatgtggaaaatcaaattatttcatcaaaatttgtaaaagaaataatttctttaggtggtgatattaaaaaatttactacaaaaagtacaattaaatacttaaaaaaaaaatatgattaa

SEQ ID NO: 253871 - DNA, 484 bp, Unknown
  Bacterial polypeptide expressing nucleotide sequence isolated from the Sargasso Sea
atgaagatagcggtttatccaggttctttcgatccatttaccttaggtcataaagatatattattaagaagttcaagaatttttgataaagttatagttgccattggagagaaccacggtaaacaaaatcttttttctattgaagaaagaattaaagatatatcaaatgaaatcaatgatataggaattaaagataatgttttagttgaatcttttagtggcttaatagttgattttgcaagatctaaagatgccaatatcttaattaagggtgtaaggggtcctgtagattatgattatgaattacagatggcaggaatgaattcaacaatgaatcctgacatcgagactatttttcttatatcaagacctgaatttagttacatttcttcatctttagttaaacaaattgccttaatgaaaggtgattactcaagttttgttagtccgatcattgaaaaatctatcaaaagtaaaatataaa

SEQ ID NO: 253872 - DNA, 178 bp, Unknown
  Bacterial polypeptide expressing nucleotide sequence isolated from the Sargasso Sea
tatgcacactagagcactttaccctggtactttcgacccgatcactaacggtcatgccgaccttattgaacgcgcatctcagttattttctcatgtgattgtagcgattgcttctaacccaagtaaaaagccactgtttacgttagaagagcgcgtagaaatgataaaaaaagtcact

SEQ ID NO: 253873 - DNA, 487 bp, Unknown
  Bacterial polypeptide expressing nucleotide sequence isolated from the Sargasso Sea
tatgaaaaggataatatatccaggaacatttgaccccattcattatgggcatatcgatattgcaagacgagcatcaagattatttgatgaggtatatatttgcgtttctgataatcagcacaaaaatccacttttttctcacgaagaaagagttgaaatgatcgaagaatgtactagcgatttagataatgtatcagcatactcaaatcctaataatctcgttgtaaaatttgctcaggaaaaagaagcaatagctatcattagaggattaagacatgtcagtgattttgaacttgaatttcaaatggcaaatgttaatcacggaattaatcctgaagtttcaacaattttaatggtttcaaatgaaaaatttcttcacttaaattccagcattattagagagcttgcagaatacaatactgatttatcaaaatttgtaccaaagagcgttgaaaaaaaaataattgagaagttaaaaggaaagtaa

SEQ ID NO: 253874 - DNA, 493 bp, Unknown
  Bacterial polypeptide expressing nucleotide sequence isolated from the Sargasso Sea
gatgcgggcgctttaccccggcagtttcgaccctctcaccaatggtcatatggacctgatcgagcgggcggtgagcctgtttggcgaggtggtggttgcggtgctcagcaatccgagcaaacggcctgcgttcagcgtcgacgaacggatcgaacagatccgcacggcgacgcgccatctctccggcgtggaggtgatcagtttcgatggcctcacagtgaactgtgccgtcacccatcgcgccgacctgatcctgaggggcctgcgagcgatgagtgacttcgaatacgaactgcagatcgcccataccaaccgctcgctggccgacgatctggagacggtgttcatggccaccacagcacgccacagctttctcagcagctccgtggtgaaggaagtggcccgcttcggcggatcgatcgaccacatggttccgccagaggtggcgaaggacctcaacaggctctttaattcggctttccccgccagctga

SEQ ID NO: 253875 - DNA, 383 bp, Unknown
  Bacterial polypeptide expressing nucleotide sequence isolated from the Sargasso Sea
aatgactgatagaattggcttatatccaggctcttttgatcctattacgaatggccatatagatataataaaaagatcattgagagtagtagataaattagttattggaatcgcagttaatgtgggaaaaacaggattatttagcttaaaagagagagagaaattagtattatctgatataaaaaacttaggattagagggttttgtagaagttcgttcttttgaaggcttattggtaaattatgcaaagaaaattaatgccaaaattatagttagaggtttgcgagcagttactgattttgaatatgagtttcaaatgacagggatgaattctagattagattcaagtattgaaactgtttttttaatggcaagtgaaaatc

SEQ ID NO: 253876 - DNA, 478 bp, Unknown
  Bacterial polypeptide expressing nucleotide sequence isolated from the Sargasso Sea
aatgatcgcgctttatccaggaacctttgatccaatcacgaatggccactttgaaataatcagaagagcctcaacggtctttcaagttttgatcgtaggcgttgcggttagtgaagataaggcccctctctttgatcatgacaaaagactgacaatggtaaacgaggttttgaatggttttagcaacattgaggttcaaccttatgacgggttgacaattgattttgcaaaacaaattgaagcgagagtgatagttagagggctcaggtctcctgccgatggtcaatacgaatttgaattggcaagcatgaataaaaagcttgctgaagatatcgaaacagttttcctcagtagcggcgaccaaaatgctttcatatcatcgtcattgatcagacaaattgcacaagaaggaggagatgtttcaggttttgttcacccagttgtgcatcaagcattaagtaatgcctacaaaaaataa

SEQ ID NO: 253877 - DNA, 481 bp, Unknown
  Bacterial polypeptide expressing nucleotide sequence isolated from the Sargasso Sea
atgagaaagatcatttatcctggaacttttgatcctattcataatggtcatatagatattgctagccgagcttctaagcttttcgatgaactagagtttgttgttgctatcaactctgataaaaagcccctattctctattgaaacaagattagaattaataaaacgttccattgagcatataccaaacattaaagtcagtcagttcaaggggctagtagtcgaccatgcacaaaatacaggctctatagcaattattcgcggcttaagacatgtaagtgattttgaatttgaatttcaaatggcaatgatgaattttcatttaaatcccaaggttacatccttatttatgatgcctgatgaaaaatttattcatttgaattccacggttgtgaaagatgtttccaaaaatgggggagatgtatcagaatttgtaccttcatgtgtaaaagaagcattatttgctaaatattcaaattaat

SEQ ID NO: 253878 - DNA, 481 bp, Unknown
  Bacterial polypeptide expressing nucleotide sequence isolated from the Sargasso Sea
atgaaacgaattatatacccaggtacatttgatcctattcacaatggccatctagatattgcaaaaagagctgctgggttatttgacgaattggttttagttgtcgcagtcaataaagaaaaaaatccgcttttcaacaataatgagagaattcatttaattgaagagtgtgttacaaatttaaataatgtaagagtaagttcatttgatggtctggttgttgattgtgctaaaacagaaaaggcagttgcaatcatcaggggcctcagacatgtaagtgattttgaatttgaatttcaaatggcaatgatgaattacaacctaaatccaatgattgcatctatgtttatgatgccagatgaaaaatatattcatcttaattctacaataattaaagatgtggccagacttggtggagatatatcagattatgttccagataatgttaaaattgcattatataagaaatacaaagactaaa

SEQ ID NO: 253879 - DNA, 317 bp, Unknown
  Bacterial polypeptide expressing nucleotide sequence isolated from the Sargasso Sea
aatggttaaaagtatatatccagggacatttgatccagtaaccaaggggcattttgatatcgtgcaaagagcctctttgctctttgaaaaagtaactgtttgtgtttactcaggctctctaaaaaatgttatttttgatattgatgaaagagtaagtatgtttcaagaagcagtatctgatcttaataatgtagatgttataccttttaatacgctcacagttgatctggctaaagaattaaattcttcagcaattattagaggactgagaattggtgcagattttgagtatgaaagagaaatggctttgacaaaca

SEQ ID NO: 253880 - DNA, 478 bp, Unknown
  Bacterial polypeptide expressing nucleotide sequence isolated from the Sargasso Sea
aatgatcgcgctttatccaggaacctttgatccaatcacgaatggccactttgaaatcatcagaagagcctcaactatctttcaagttttgatcgtaggcgttgcggttagtgatgaaaagaaccctctgtttgatcatgaaaaaagactagcaatggtaaacgaggttttgaatggttttagcaacattgaggttcaaccttataatggattgacaattgattttgctaaacaaattgaagcaagagtgatagttagagggctcaggtctcctgccgatggtcaatacgaatttgaattggcaagtatgaataaaaagcttgctgacgatatcgaaacagttttcctgagtagtggtgaccaaaatgctttcatatcatcgtcattgatcagacaaattgcacaagaaggaggagatgtttcggattttgttcacccagctgtgcatcaatcattaagcgaagcatacaaaaagtaa

SEQ ID NO: 253881 - DNA, 447 bp, Unknown
  Bacterial polypeptide expressing nucleotide sequence isolated from the Sargasso Sea
aatgatcgcgatttatccaggaacctttgatccaatcacgaatggccactttgaaatcatcagaagagcctcaacgatctttcaagttttgatcgtaggcgttgcggttagtgaagaaaagacccctctgtttgatcatgacaaaagactgacaatggtaaacgaggttttgaatggttttagcaacattgaggttcaaccttatgacgggttgacaattgattttgctaaacaaattgaagcgagagtgatagttagaggcctcaggtctcctgccgatggtcaatacgaatttgaattggcaagcatgaataaaaagcttgctgacgatatcgaaacagttttcctcagtagcggcgaccaaaatgctttcatatcatcgtcattgatcagacaaattgcacaagaaggaggagatgtttcagattttgttcacccagttgtgca

SEQ ID NO: 253882 - DNA, 468 bp, Unknown
  Bacterial polypeptide expressing nucleotide sequence isolated from the Sargasso Sea
ttttgatccaattactttgtggccatatagatgtcattaaaaaatcacttaagatagtagataaagtaattgtaggtatttcagatggaaatcagaaaaacttcctattttcattagatgaaagaatagaaattgttaaaagagctctttataaagatttgaaatttaaaaagaataaggttgatgttataaaatttaatactttgacaacagacctttgtaaaaaatataaatcaaatataatcttaagaggcttaagagcagtttctgattttgagtacgaattccaattagctggaatgaatagaaaacttaataatcaagttgagacaatttttttaatgtcagatgttgaaaatcaaataatatcatctaggtttgttaaagaaatcgctcaacataatggtgatttgaaaaaatttacgaccaaaagtacaattaaatcattgaaagaggtttatgaataaa

SEQ ID NO: 253883 - DNA, 487 bp, Unknown
  Bacterial polypeptide expressing nucleotide sequence isolated from the Sargasso Sea
atgaaaaggataatatatccaggaacatttgacccgattcattatggtcacatcgacatagctaaaagagcatcaaagttgttcgatgaagtatacatgtgcgtgtctgacaatcaacataaaaatcctctcttttcacatgatgaaagagttgaaatgattgaagaatgtacaagcgatcttgagaatgtatctgcattttcaaatccaaataatttggtcgtaaagtttgcacaagataaaggagccgttgctataattcgaggtttgaggcatgtaagtgactttgagctagagtttcaaatggcaaatgttaatcatggaataaatcctgaagtttctacaatattaatggtttcaaatgaaaaatttctacatttaaattccagtattattagagagttagctgaatacaacacagatttatcaaaatttgttccaaaaaatgttgaagaaagactaatgaaaaagctaaaaggtttataat

SEQ ID NO: 253884 - DNA, 172 bp, Unknown
  Bacterial polypeptide expressing nucleotide sequence isolated from the Sargasso Sea
tatgaagaatattatatacccaggaacttttgacccaataacaaatggtcatttagatattacagaaagagcatcttctctttttgatgaagtgatgattgtaatcgcgaacaacccgcgaaagaattctttatttactattgatgaaaggattgatttaattgatcaatct

SEQ ID NO: 253885 - DNA, 490 bp, Unknown
  Bacterial polypeptide expressing nucleotide sequence isolated from the Sargasso Sea
atgagaacagctatttatccaggaacctttgatcctataacgctaggtcacatagatgtaataaaaaaatcattaaaaatcgttgacagaattatagttgcgacaacagacaatataaataaaaactattattttgacatcaatgaaagattagaaattattaaaaattcattatttaaagatttaaaactgaataaaaaaaagattgttgtaattccttttgatacacttaccattaaattatgtaaaaagtacaatgcttcaataattataagaggtctcagagcagtttcagactttgaatatgaatttcaactagctggtatgaacaagaagcttaataacaatatagagactatctttttaatgtctgatttagaaaatcaaattatttcatcaaagtttgttaaagaaatagctaaattagatggtgatataaaaaaatttttaacaaaatcagcaacaaaggccttaaaagataaattttgaa

SEQ ID NO: 253886 - DNA, 400 bp, Unknown
  Bacterial polypeptide expressing nucleotide sequence isolated from the Sargasso Sea
atgtctaaagttgcgatttatcctggaacatttgacccaatcacgtttggacatatagatgtaataaagaaatcattaaaactatttgaaaaaattatagtagctgtttcagatggagaaaacaaagattatctttttcagatagaagaaagaattgaaattataaaaaaagctttatttaatgatttaaaacttaatcgaaataaaattgaagttatttcatttacatcattaactactgatttatgtaaaaaatataagtcaaatatcattcttagaggattgcgagcagtatctgattttgaatacgaatttcaattagctggaatgaatagaaaattaaataataaaattgagactctttttttaatgtcagatgtagaaaatcagataatttcat

SEQ ID NO: 253887 - DNA, 484 bp, Unknown
  Bacterial polypeptide expressing nucleotide sequence isolated from the Sargasso Sea
atgaaagtagctatatatccaggctcatttgatccaataacctttgggcatatggatattattgatagagcttgcggcctttttgataagatcataattgctattgcaaaaaatgaagctaaaaacccattatttaacttagaagacagaataaaacttgctaaagaaatttataaagataattcacaagtagaagtggtgggattcccaagacaattgaccgttgatcttgctaaagagcaaaatgcatgtgcaatcataagaggattaagggctgtttctgactttgagtatgaatttcagctagctactatgaatagatcactagctccagatatagaaagtatattcctcacacctaaagaaagtttaatttatgtttcttcaagtttgataaaagagatatgtgacttaaaaggggatatttcaaaatttgtgcatcctggtgttgaaaaagctttaaaagctaaattaacttcttaat

SEQ ID NO: 253888 - DNA, 496 bp, Unknown
  Bacterial polypeptide expressing nucleotide sequence isolated from the Sargasso Sea
atgataagaacaggcatatatcccggtacctttgacccaataactttcggacatatcgatgtaattaaaaaatcattaaaaattgttgacaaacttattgtagctatttctgactcatcagaaaaagattacttattttcaacagatgaaagaattgaaattttaaaaaaatcactatttaaagatttaaaattaaaaaaaaataaaatcaaaatagtatcttttcaaacacttactgttaaactgtgtaaaaagttcaatgcatcgattataatacggggattaagagctgtatcagattttgagtatgaatttcaacttgcaggaatgaataaaaaacttgataataagattgaaactatttttttgatgtcaaatatagaaaatgaaattatttcatcaaaatttgtaaaagaaattggttatttgagaggagacctaaagaaatttgtatctaactctgtaataaaagcaatcaaagataaacttgaatgaa

SEQ ID NO: 253889 - DNA, 268 bp, Unknown
  Bacterial polypeptide expressing nucleotide sequence isolated from the Sargasso Sea
atgagaaattcagcaattgcagtttatccgggaacttttgacccagtaaccaacggtcatttggatattattgctcgtgcagcaagattggtcgatcgactaattatcgcagtagcagtcaatatcggcaaatctccattatttaatgtagacgagcgggttgacatggttgagatggaaattagggctatgggagacggctctatcgaccggattaaagccgtcccgtttgatactctgttgatggagtttgctactcaacagaatg

SEQ ID NO: 253890 - DNA, 292 bp, Unknown
  Bacterial polypeptide expressing nucleotide sequence isolated from the Sargasso Sea
aaaaattattgtagttgagctatcaggattgcttacatcttttgcaaaagatcaaaatgccacatgtattataagaggtttaagagcagtatctgattttgaatatgaatttcaaatgacaggtatgaattatcaacttaatcctgacattgagaccattttccttatgacatcagaaaaaaactcctttatctcatctaattttgttaaggaagttcataagcttggtggagatgtttcaaattttgttacaaaaaatacattagacgagcttaataaaaaaaactcttag

SEQ ID NO: 253891 - DNA, 484 bp, Unknown
  Bacterial polypeptide expressing nucleotide sequence isolated from the Sargasso Sea
atgaaagtagcaatctatcctggctcatttgatccaattacggttggccatatggatatagttgaaagagcaactttgctttttgataaggttattatcagtgttgctgatacagatatgaaaaatccacttttttcttctgaagaaagattagacctagtgagttcgatttatgccgataatgaaaagatagaagttgtggcatttaaaaagaaacttacagttgatctagcaagagaaaataatgcatgtgccatcattagaggtttgagagcagtatctgattttgagcacgagtttcagctggccacaatgaatagatcgcttgcaccagacatagaaagcattttcttaactcctaaggacacactaatttatgtatcatcaagtcttgttaaagagattgctagcctaggtggagatatttcaaagtttgttcatgaaaatgttgaaatggctctaaaagcgaaacttaatcattagt

SEQ ID NO: 253892 - DNA, 484 bp, Unknown
  Bacterial polypeptide expressing nucleotide sequence isolated from the Sargasso Sea
atgaaaacagccatatatcctggatcttttgatccaattacttttgggcatattgatattgttgaaagagcggcagctttatttgataaggttatcttaggtgtggctgaaagccaatccaaaaaccctctatttagtgttgatgaaagaatagacttgattgctgagatttttaaagataaccctaaaatagaagttttaggttattcaaaaaaattaacagttgatttagcaagggaaaatgatgcaattgcaataattagagggttaagagcggttgccgattttgaatatgaatttcaattagcgactatgaatagaagtcttgcgccggatattgagagtattttctttacccccaaggatacattaatttatgtttcttccagccttgtaaaagaaattgctacttttggtggcgatgtttctcgttttgtttcaccaaacgttagagctgctttacaaaaaaagattgctggctaaa

SEQ ID NO: 253893 - DNA, 355 bp, Unknown
  Bacterial polypeptide expressing nucleotide sequence isolated from the Sargasso Sea
atgaggattggcctttatccaggaacattcgatcccgtgacatacgggcacctagacattatttctagagcagctagattggtggacaggctggttatcggagtagcttttaatcaggaaaagaacccactttttacactagatgaaagggtttctttaattgatgagcaaataaaagaaataatgcaacgttgtagagttgagattgttacccatcctttccaaaatttactaatagactgtgctagagatgttagtgcatctttaatatttcgtgggttgcgggctgtatcagattttgagtacgagttccaaatggttggtatgaatcgggttcttgatagcaatattgaga

SEQ ID NO: 253894 - DNA, 502 bp, Unknown
  Bacterial polypeptide expressing nucleotide sequence isolated from the Sargasso Sea
ttgaaaatgattaataaaattggaatatatccgggcacttttgaccctatgactgcaggtcatatggacataattaaaagatcactaagaatagtagataaattagtaatagctgtcgctaataatattaataaagattcattgtttagtgttcaagaaagaactaatattatcaaaagtgatatcagttctgtaaatgaattaaattcaaaaattaatgttactgaattatcaggattacttacaacttttgctaaagatcaaaatgccacatgtataatacgtggtttaagagcagtttctgattttgagtatgaatttcaaatgacaggcatgaactaccaacttaaccccgatattgagacaatatttcttatgacttctgaaaaaaattcattcatttcatctaattttgttaaagaagtccacaaactcggtggtgatgtttcaaattttgtttctaaaaatactttagagcaacttaataaaaaaaactcttagt

SEQ ID NO: 253895 - DNA, 502 bp, Unknown
  Bacterial polypeptide expressing nucleotide sequence isolated from the Sargasso Sea
atgcgcgctctttaccccggcagcttcgatccagtgacctttggccacttggatctgattcaacgcgcttcacagctctttgatgaggtgatcgttgctgtgctgcgcaatcccaacaagcaaccaagtttcagcttggaagaacggcttgagcagctcagcaacgtgaccaaccacttgccacaggtacaggtgaccagctttgaggggctaaccgtgcactttgcactggagcaaaacgctcgggtgattctgcgcggccttagggcgctgagtgattttgaatttgagctccagttagctcatacaaacgccagcctctccgatcaagtcgacacattgtttatggccacagctgtgccccacagctttctgagcagcagcgtcgtcaaggaagtcgcccgatttggtggagacgttcaacacctggtaccccaaacagtggcgagtgatctccgcaggttgtttaatcagcgggttgatgtcggcggtgatcgatgag

SEQ ID NO: 253896 - DNA, 343 bp, Unknown
  Bacterial polypeptide expressing nucleotide sequence isolated from the Sargasso Sea
agcctggaagaaaggattaaccatgttgatgagatttttaaaggcaatgatagagtcaaagctataggattcaccggcttagtagtcgatttagctaaagaagaaaattctaatattcttatcagaggtttaagagctgtttctgattttgaatatgaatttcagttagccaatatgaatagagcaatgtctcctgacttagaaagcgtttttttaacccctaaagccaagttttcttttttatcttcaactctagttcgtgaaattgcttcgatggggggagagatttcatcttttgtagatccggtcatagaaaaggctctaaaagaacgttttaaataat

SEQ ID NO: 253897 - DNA, 412 bp, Unknown
  Bacterial polypeptide expressing nucleotide sequence isolated from the Sargasso Sea
atgtcaaaaattggaatatatccaggaacctttgatccaatgacaaatggacatctaaatataattcaaagatcgctaaaggtagtagataagttaataattggagtagcagataacttaaataaaaaaccacttcttagtattgatgaaagaaaaaatataattgcaaatgatatttactctttgcaggaaaataataaaaaaatagaaattcatacagttaatggacttttaactgagtttgcaaaaaagtgtaatgcagattgcattattagaggattaagagcggtctcagattttgaatatgagtttcaaatgacaggaatgaactaccaattaagtcctgaaattgagactatatttttaatgtcagcagataataattcttttatttcttcaaaatttagttaaa

SEQ ID NO: 253898 - DNA, 322 bp, Unknown
  Bacterial polypeptide expressing nucleotide sequence isolated from the Sargasso Sea
aatgagtaaaattgcaatttatcccggaacatttgatccaattactttcggacatatagatgtaataaaaaaatcattaaaattatttgataaaatagtagtaggtgtctcagatgaaagtaagaaaaattatttatttagttctgatgaaagaatagaaatagtaaataaagctttatttaaggatctaaagttaaataggaaaaaaataaaagtagtatcatttggctctttaaccactgatttatgtaaaaaatacaaatcaaacattattttaagaggattgagagctgtatctgattttgaatatgaatttcaatta

SEQ ID NO: 253899 - DNA, 496 bp, Unknown
  Bacterial polypeptide expressing nucleotide sequence isolated from the Sargasso Sea
atgtcgaaaaccgcaatttatccaggcacatttgatccaataacttttggacacatagatgttataaaaaaatctttaaagatcgttgataaattgattgttgcaacaactgacaatatagaaaaagactatttattttctttagatgaaagaattgaaatattaaataaatctttgtttaatgatttacgattaagtaaaaataaaattaaaatcatatcatttgatgatttgactgtaaaaatttgtaaaaagtacaaagcatcaattataataagaggtttaagagctgtatcagattttgaatatgagtttcaactagctggaatgaataaaaaactggataaaagtgttgaaactatttttctaatgtctgatattgaaaatgaaataatttcttcaaagtttataaaagaaattggaaaattgaaaggtgatttaaaaaaatttgctacaaaatctgttataaaggctattaaatctaaattctcgtgaa

SEQ ID NO: 253900 - DNA, 496 bp, Unknown
  Bacterial polypeptide expressing nucleotide sequence isolated from the Sargasso Sea
atgaaaaatatagctatctatccaggaacatttgatccaataacaaatggacatatagatgttatcaaaaaagcacttaatttagcagataaaatcattgttggtatatctgatggtaatgaaaaaaatttcttatttccaatagatgaaagattaaaaattgtttcaaaagcattatatggagacttgaaattttcaaaaaataaaattcaggtgataaaatttaactccctaacaactgaattatgtaaaaaatataaatcaaatctaattcttagaggtttaagggcagtttcagattttgaatatgagtttcagttggcaggaatgaatagaaaattaaataataaagtagaaacagtgtttcttatgtccgatgtcgaaaatcaaattatttcgtcgagatttgttaaagaaatagctcaacacaagggtgatttaaagaaatttacaactaaaagtactattaaagcactgaaagaagtttatgcttaaa

SEQ ID NO: 253901 - DNA, 496 bp, Unknown
  Bacterial polypeptide expressing nucleotide sequence isolated from the Sargasso Sea
aatgaaaagaaacgtactatatccaggaacttttgatcctattacttatggacatattgacttaattaaaaaagctttaaaaattgttgatactgttattgtagcaatatccgaaaacagtaataaaaattatctttttaattctaatgaaagattagaaattgttgaaaaagctttatacaaagatttaaaatttaattcaaaaaaagtaaaagtaattacatttaattctttgactacacaattgtgtaaaaaaatgaaatcaaaaataattttaagagggttaagagcagtttctgattttgaatatgaatatcaattagcagggatgaacaaaaatttagataataatattgaaacaatgtttttaatgtctgatatcgaaaatcaaataatatcatcaaattttgttaaagaaattatagaacttggaggtaatataaaaaaatttactacaccaagtactattaaagctctcaaaaataaatatgtataa

SEQ ID NO: 253902 - DNA, 428 bp, Unknown
  Bacterial polypeptide expressing nucleotide sequence isolated from the Sargasso Sea
gatgaaaaatagtgcaatctatccaggaacatttgatcctatcacttttggacatattgatgtcataaaaaagtcgttaaagttcatagataaattaattgtagctatatctaatggtagagagaaaaaatatctatttagcaaagatgaaagaattaaacttgtaaaaacagcactgtttaatgatttaaaacttccaaaaaataaaattgaagttattgagtttgaaagcttaacaactgatctttgtaaaaaatataaatcaaatattatattgagaggattaagagcggtttcagattttgagtatgagtatcaattagctggaatgaatagaaaattatataataaagttgagacaattttccttatgtctgatattgaaaatcaaataatatcatctaaatttgttaaagaaatagctgaac

SEQ ID NO: 253903 - DNA, 421 bp, Unknown
  Bacterial polypeptide expressing nucleotide sequence isolated from the Sargasso Sea
atgcgcgccctctacccgggcagctttgatcccgtcaccctcggtcacctcgatctgatccatcgggccagtggccttttcgatgacgtcatcgtcgcggttctgcgtaatccgaacaaacaacccagcttcagcctcgagcaacgacttgagcaactgtcctgcgcgacccgtcatctaccccaggtgcgcgtggccagctttgaagggctcactgtccacttcgccctgcaggagcaggcccgtgtgatcttgcggggtttgcgggcccttagcgatttcgagtttgaactgcagctcgcccacaccaatgccagcctttcggccgaggtggacaccttgttcatggcaacggccgttcatcacagttttctgagcagcagcgttgttaaggaggtcgcgcgcttggcggcgatgtgca

SEQ ID NO: 253904 - DNA, 490 bp, Unknown
  Bacterial polypeptide expressing nucleotide sequence isolated from the Sargasso Sea
tatgagaattgctatatatccaggcacattcgaccctattacttatggacatatagatgttattaaaaaatcactaaatatttttgataaattaatagtagcaactacagataatattaataaaaattatcacttttctattgatgacaggttaagtataattaataattctttatttaaagatttaaaactaaataaaaataaaattaaggtaataccttttgatacacttacaattaatttgtgcaaaaagtataaagcagagactattattagaggtttgagagctgtatcagattttgaatatgaatttcaattagcaggaatgaataaaaaattgaattcaaatattgaaacaatttttttgatgtctgatattgaaaatcaaattatttcatctaaatttgtaaaagaaatagcaaatttagggggtaatatagatagattcgtaactaaatcgactgtaaaagttttaaaaaataatttttaa

SEQ ID NO: 253905 - DNA, 493 bp, Unknown
  Bacterial polypeptide expressing nucleotide sequence isolated from the Sargasso Sea
aatgtcaaagactgctatttatccgggaacttttgatccaattacctttggtcatattgatgttattaaaaaatctttaaaaattgttgataaattaatagttgctacaacagataacattgaaaaagattatctattcacaattgatgaaagaatggagatgttaaaaaaatcactatttaaagatttgcgtttgaataaaaacaaaataaaagttgtttcatttgatgatttaactgtaaaaatttgtaaaaaatataaagcatcaattatcattagagggttaagagcagtttctgattttgaatatgaatttcaattggcaggaatgaataaaaaactcgataaaaatatagaaactatttttttaatgtctgatattgaaaatgaaataatttcttcaaaatttataaaagaaataggaaaacttaagggggatttaaaaaaattcgctacaaaatctgttattaaagcaattaaatctaaattttag

SEQ ID NO: 253906 - DNA, 294 bp, Unknown
  Bacterial polypeptide expressing nucleotide sequence isolated from the Sargasso Sea
catgaacaccgtactctatcccggcaccttcgaccccatcaccaaaggccacaccgatctggttgagcgcgccgcgcggctgtttgaccgcgtggtagtggctgttgccgccagcccgaagaagaacccggccttctcgctagagcaacgcgtcgacatggccaagacggtgctgagtcatctgcccaacgtcgaagtggtgggcttttcgtccctgctggcgcacttcgtcaaggaagtggacgccaacgtgctgctgcgcggcctgcgcgcggtctccgactttgagtacga

SEQ ID NO: 253907 - DNA, 361 bp, Unknown
  Bacterial polypeptide expressing nucleotide sequence isolated from the Sargasso Sea
tatgaaaatactttacccaggtacatttgatcctttaacaaatggacatctagatataatacaaagagctgaaaaattatttggaaatgtagttgttgctgttctagaaaatactagtaaaaaaccaacctttgatcttaataaaagaatagtacaaataaaaaatgctgtatctcatctatcaaatatcagtgttatttcctatgagggtctcacagtcgattgtgcaaaagaagttaacgcaaatttaatattaagagggctaagagctatgagtgattttgaatatgaacttcaaatagcacatacaaataaatctcttaatactgaaatagaaacaatttttctttctactaataca

SEQ ID NO: 253908 - DNA, 487 bp, Unknown
  Bacterial polypeptide expressing nucleotide sequence isolated from the Sargasso Sea
atgaaaagaaatgctttatacccaggcacattcgatccgattacttatggccatattgatttaattaaaaaagcgttaaatattgttgatatagttattgtggcaatttctgaaaacagtaataaaaattatttatttgactcaaacgaaagattagaaatagttaaaaaagctttattcaaagatttaaaatttagtagtaaaaaagttaaagttataacttttaattctttaacaacttcattatgtaaaaaagtaaattccaaaattatattaagaggcttaagagctgtgtctgacttcgaatatgaatatcaattagcaggtatgaataaaaaattaaataataatattgaaactatgttcttaatgtctgatattgaaaatcaaattatatcttcaaatttcgttaaagaaataatagaacttggtggcaacattcaaaaatttacaacgaaaagtactattaaagcattgaaggataaat

SEQ ID NO: 253909 - DNA, 490 bp, Unknown
  Bacterial polypeptide expressing nucleotide sequence isolated from the Sargasso Sea
atgaaaacagcaatttatcctggaacttttgatcctataacatatggccatatagatgtaattaaaaaatcattaaaaatttttgatagattaattgttgcaacaactgacaatataaataaaaattattattttcctatagaagaaagactttctataataaaaaattctttatttaaagatttaagatttaataaaaaaaaaattattgtaattcctttcgatacgctgactataaacttatgtaaaaaatataaagcaacagttataataagaggtttgagggctgtttcagattttgaatatgaatttcaattagctggtatgaataaaaaattgaatgcaaatatagaaacaatttttttaatgtcagatgttgaaaatcaaattatttcatctaattttgttaaggaaattgcaaaattgaatggtaatattaataaatttgttactaaatcgacagtaaaaatgcttaaaaacaaattttaat

SEQ ID NO: 253910 - DNA, 484 bp, Unknown
  Bacterial polypeptide expressing nucleotide sequence isolated from the Sargasso Sea
atgaaagttgctatttatccaggttcattcgatccaatttcatttggtcatatggatattattgatagagcttgtggtctttttgataaaattataattgcaatcgcaaaaagcgagacaaaaaatcccttattttctcttgaagatagaattaagttagctgaaaccatctataaagagaacgatcaagtaaatgtcataggttttcccagacaactaaccgtagaagttgcaaaagaaaataatgcttgtgcaattattagaggcttgagagcagtatcggattttgaatatgaattccaacttgcaactatgaatagatctttagctccagatattgaaagtatatttttaactcctaaggaaagtcttatttacgtttcttcaagcctgattaaggaaatttgtgatctgaaaggtgacatttctaaatttgttcatccaactgttgaacaagctctaaaagcaaaactagattcctaat

SEQ ID NO: 253911 - DNA, 373 bp, Unknown
  Bacterial polypeptide expressing nucleotide sequence isolated from the Sargasso Sea
tatgacagatttgaaatcacataagagaattggattgtatccaggtacttttgaccctattactaatggacatttagatattatttctagggcatcaaagttagttgataagttaataattggtattgctgctaacgcaggaaaatcgcctcttttttcatcggatgagagagtcgaaatggtaatagaagaaataaatgatttaaataaaacaaccaaaattaaatgtgaaattgaagttaattcttttagtaatcttttaactcattacgctaatgatgttgatgcaataatgataattagaggtttacgagcagtttctgattttgactatgaatttcaaatggttggaatgaatgctcgtcttaatcct

SEQ ID NO: 253912 - DNA, 496 bp, Unknown
  Bacterial polypeptide expressing nucleotide sequence isolated from the Sargasso Sea
aatgagtaaaattgctatatatcctggaacttttgatccaattacttatggtcatatagatgtaattaaaaaagcactaaaactatttgataaaatagtagttggtgtttcaaatgttagtaataaaaattacttattttcatcacaagaacgaattgaaattgtcaataaagccttatttaaagatttaaaattaaacaaaaaaaaaattgttgtagtatcatttggatcattaacaacagatttgtgcaaaaaatataaatcaaatattattttacgaggtttaagagcagtatcagattttgaatatgaatttcaacttgcaggaatgaacaggaagttaaatcaaaatattgaaacaatttttttaatgtctgatgtagaaaatcaaattatttcatctagatttgttaaagaaattgtaaaattaaatggaaatattaaaaaatttactaccaaaagtacaataaaatctttaaaagaaaaatatgaatag

SEQ ID NO: 253913 - DNA, 235 bp, Unknown
  Bacterial polypeptide expressing nucleotide sequence isolated from the Sargasso Sea
ttgagaaaagcactttatcctggtacttttgacccaataacaaatggtcatttagatattattgagcgagcttctaaaattgttgatcacttaattgttggcgttgtggaaaaatcgactaaaaaaacaatatttaacgcagatgaacgtagtaattatgttattcaagctacaaaagcattaagtaatgtcagcgttaaaagatactcgggactaacagtggatatagcaaaaa

SEQ ID NO: 253914 - DNA, 423 bp, Unknown
  Bacterial polypeptide expressing nucleotide sequence isolated from the Sargasso Sea
gatcattgagaatagtagataatttagtaatagctgtcgctaataatattaacaaagatgcattatttagtgttcaagaaagaattaatattatcaaaaatgatattaattctgtagaagaattaaattcaaaaattaacgttattgaattatcaggattacttacaacttttgctaaagatcaaaatgccacatgtataatacgtggtttaagagcagtatctgattttgagtatgaatttcaaatgacaggtatgaactatcaacttaatcccgatatcgagacaatatttcttatgacttctgaaaaaaactcattcatttcatctaattttgttaaagaagtccacaaacttggtggagatgtttcaaattttgtttctaaaaatactttagaacaacttaataaaaaaaactcttagt

SEQ ID NO: 253915 - DNA, 496 bp, Unknown
  Bacterial polypeptide expressing nucleotide sequence isolated from the Sargasso Sea
aatgagtaaaattgctatatatcctggaacttttgatccaattacttatggtcatatagatgtaattaaaaaagcacttaagctatttgataaaattgtagttggtgtctcagatgttagtaataaaaattacttattttcatcagaagaaagaatagaaattgtcaataaagctttatttaaggatttaaaattaaataaaaaaaaaattattgttgtatcctttggttcactaacaactgatttatgtaaaaaatataaatcaaatataatattgcgtggcttaagagctgtatctgattttgaatatgaatttcaacttgctggaatgaatagaaagcttaaccaaaatattgaaacaatttttttaatgtcagatgtagaaaatcaaattatttcatctagatttgttaaagaaattgtaaaattaaatggaaatattaaaaaatttactaccaaaagcacaataaaatctttaaaagaaaaatatgaatag

SEQ ID NO: 253916 - DNA, 496 bp, Unknown
  Bacterial polypeptide expressing nucleotide sequence isolated from the Sargasso Sea
aatgagcaaaatagctatatatcctggcacatttgatccaattacatttggtcacatagatgtaataaaaaaagctttaaaattatttgataagattgttgttggtgtttcagatgttagcagtaaaaattatctatttagctcaaaggagaggatagaaatagtcaataaagctttatttaaagatttaaaacttaataaaaaaaaaattatagtagtgtcttttagttcattaactactgatttgtgtaaaagatataaatcaaatattattcttaggggactaagagctgtatctgattttgagtacgaattccaattagctggaatgaacagaaaattaaatcagaatatagaaactatttttttaatgtcagatgttgaaaaccaaattatctcatccagatttgttaaagagattgttaaattaaatggtgatattaaaaaatttactaccaaaagtactattaaatctttaaaagaaaaatatgaatag

SEQ ID NO: 253917 - DNA, 493 bp, Unknown
  Bacterial polypeptide expressing nucleotide sequence isolated from the Sargasso Sea
atgcccaagacagcaatatatcccggaacctttgaccctataacttttggccatatagacataatcaaaaaatctctgaaaattgttgataaattaattattgcaaccacagacaattcagaaaaagaatattttttttctttagaggagagattagaaattttagaaagatcactttttaaagatctaagattaaataaaaaaaaaatcaagatagtttcttttaataacttaacggttaatttatgtagaaaacacaaagcctttattattgtaagaggacttagagctgtttcagattttgaatatgagtttcagttagcaggtatgaacaaaaaattagacaaaagtatagaaaccatttttctaatgtctgacattgaaaatgaaatcatttcatcaaaatttattaaagaaataggaaaacttaaaggcagtttaaaaaaatttgttacaaaatcagtaattaaagccataaatgcaaaaatttaat

SEQ ID NO: 253918 - DNA, 493 bp, Unknown
  Bacterial polypeptide expressing nucleotide sequence isolated from the Sargasso Sea
tatgagaacagcaatttatcccggcacttttgaccctataacatacggacacattgatgtaataaaaaaatccctaaaggtagttgacagagttatagttgcaaccacagataacattagcaaagattattttttttcgatagaagaaagaatttcaataataaaaaattctttattcaaagatttaaaattaaataaaaaaaaaatattgataattccatttgaaactttaacaattaatctttgtaaaaagtataaggcttctataattataagaggacttagagcagtttctgattttgaatatgaatttcaattagcaggaatgaataagaagctaaacaataaaattgaaacaatatttttgatgtctaatattgaaaatcaaataatctcttcaaaatttgttaaagaaatagctaaattaaatggaaatataaataaatttttaacaaaatccgccattaaagcattaaaagaaaaacttagatga

SEQ ID NO: 253919 - DNA, 496 bp, Unknown
  Bacterial polypeptide expressing nucleotide sequence isolated from the Sargasso Sea
aatgagtaaaattgcaatttatcctggaacatttgatccaattacttttggtcatatagatgtgataaaaaaatcattaaaactatttgatagagtagttgtaggtgtttctgatgaaagtaataaaaattatttattcacctctgatgaaagaatagaaatagtgaataaagctttatttaaagatctaaagttaaatagaaaaaaaataaaagtagtttcttttggctctttaactactgacttatgtaaaaaatataaatcaaacattattttaagaggattaagagctgtatctgattttgaatatgaatttcaattagctggtatgaatagaaaattgaaccaaaatattgaaacaatttttttaatgtctgatgtagaaaaccaaataatctcatcaagatttgtaaaggagatagtcaaattaaaaggtgatataaaaaaatttactacaaaaagtacaattaaatctttaaaagagaaatatgaataa

SEQ ID NO: 253920 - DNA, 481 bp, Unknown
  Bacterial polypeptide expressing nucleotide sequence isolated from the Sargasso Sea
atggcaaaggctttatacccaggtacttttgatcctataactctagggcacatagatatcattgaaagagcacttcatctttttgatgaagtaactatagctattgccacaagcgcttcaaaaaaacctatttttactcttgaagagagaattgagcatgtagaaaaaatatttgaaggaaagaagaatgttaaggccattggctttactggactagttgtagatctagctaaagaacaagaatctaatattttgataagagggttaagagcagtttctgatttcgagtatgagtttcaattagcaaatatgaatagggcaatgtcccctgatttagaaagcatattcttgactccaaaagctaaattctctttcttgtcttctacactagttcgagaaatagcttctatgggtggtgaaatagattcatttgttgaccctgtagtgaaagcagccttgcaagaaagattcaaaacctagt

SEQ ID NO: 253921 - DNA, 496 bp, Unknown
  Bacterial polypeptide expressing nucleotide sequence isolated from the Sargasso Sea
aatgaaaaatatagctatatatcctggaacatttgatcctataacgaatggtcatattgatgttattaaaaaagctttaaaattggcagataaaatcattgttggtatatctgatggaaatgaaaaaaattttttatttccaatagatgaaagattaaaaattgtttcaaaagctttatatggagacttaaaattcccaaaaaaaaaaatccaagtgattaaattcaattctttaacaactgaattatgtaaaaaatacaaatcaaatctaatacttagaggcttgagagctgtgtcagattttgaatatgagttccaactagcaggaatgaatagaaaattaaataacagagttgaaactgtttttcttatgtctgacgttgaaaatcagattatttcttcaagatttgtaaaagaaattgctctacataagggtgatcttaggaaatttacaacaaaaagtaccatcaagtcactgagggaaatttatgcttaa

SEQ ID NO: 253922 - DNA, 496 bp, Unknown
  Bacterial polypeptide expressing nucleotide sequence isolated from the Sargasso Sea
aatgagtaaaattgcaatttatcctggaacatttgatccaattacttttggacatatagatgtaataaaaaaatcattaaaattgtttgataaaataatagtgggtgtttcagatgaaagtaacaaaaattatttatttagttctgatgaaagaatagaaatagtaaatagagctttatttaaagatctaaagtttaataaaaaaaaaattaaagtaatttcttttggttctttaaccaccgatttatgtaaaaaatacaaatcaaacattattttaagaggattaagagctgtatcagatttcgaatatgaatttcaattagctggtatgaatagaaaattgaaccaaaatatagaaacaatttttttaatgtctgatgtagaaaatcaaatcatctcatcaagacttgttaaagaaattgttaaattaaacggtaatattaaaaaatttactacaaaaagcacaattaaatcattaaaagataaatatgaataa

SEQ ID NO: 253923 - DNA, 262 bp, Unknown
  Bacterial polypeptide expressing nucleotide sequence isolated from the Sargasso Sea
cttgaaaagaatagcactatatccaggaacttttgacccagtaacaaatggtcatttagatattatttatagagcaagttcgttatgtgatattcttataattggtgttgcagaaaatattggaaaaagtccttttttcaaaatttcacagagaaagtctctgatccaagaagctattaaagaaaatttaaaaagttcaaaaagaaaattaggccaaattaaagttgaaagttttgataatctgctaattgattttcgctag

SEQ ID NO: 253924 - DNA, 319 bp, Unknown
  Bacterial polypeptide expressing nucleotide sequence isolated from the Sargasso Sea
aatgaataaagtagcaatctatccaggtacatttgatccaataacatttggacatatagatgtaattaaaaaaggtttgaatttatttgataaattagttgttgccatttcaaatggagaaaataaagattacctttttagttcagaggaaagaattgaaatagttaaaaaagctttattttttgatcttaaattaaataaaaaaaaaattgaaattgtttcgttttcatcgcttacgacagatttgtgtaaaaaatataaatcgaatataattttaagaggtttaagagctgtttcagattttgaatatgaatttcaa

SEQ ID NO: 253925 - DNA, 496 bp, Unknown
  Bacterial polypeptide expressing nucleotide sequence isolated from the Sargasso Sea
atgaaaagaaatattttataccctggtacctttgatcctattacctatggtcatattgatttaattaaaaaagctttaaatattgttgatactgtaattgtagcaatatcagaaaatagcaacaagaactatttatttgatgctggtgaaagattagaaatagtaaaaaaagctttattcaaagatttaaagttaagtaataaaaaaataaaagttataacatttaattccttaacgacatctctatgtaaaaaaatgaattctaaaattatattaagaggtttaagggctgtttccgattttgaatatgaatatcaattagcaggaatgaataaaaaattaaatagtaatattgaaacaatgtttttaatgtcagatattgaaaatcaaataatatcttcaaattttgttaaagaaataattgaactcaacggtgatattaaaaaatttacaacccctagtacagtaaaagctttaaaaaataaatatgcgtaaa

SEQ ID NO: 253926 - DNA, 478 bp, Unknown
  Bacterial polypeptide expressing nucleotide sequence isolated from the Sargasso Sea
atggcaaaagctctatatcccggtacctttgatcctataacacttggacatatagacattattgaaagagcactacatttatttgatgaggtgactattgcaattgctacaagcgaatcaaaaaaaccagttttttcactcgaggaaagaataagtcatgtagaccaaatatttaaaggaaatgatcgagttaaagccatagggtttactggattggttgtagatttagctaaagaagagcaatcaaatattcttattagaggtttacgggcggtttctgacttcgagtacgaatttcaattagcaaatatgaatagggctatgtcacctgacttagaaagtgtttttttaacacctaaagcaaagttttctttcttgtcttctactttagttcgtgaaattgcttccatgggaggagaaatttcttcatttgttgatccggttatagaagaagctcttaaaaaacgatttaagtaat

SEQ ID NO: 253927 - DNA, 353 bp, Unknown
  Bacterial polypeptide expressing nucleotide sequence isolated from the Sargasso Sea
tatgaaagtagcaatctaccctggttcattcgacccaattacggttggacacatggatattgttgaaagagcaactgttctctttgataaggttatcatcagcgttgccgagacagatatgaaaaatccacttttttcttctgaagaaagattagacttagtgagctcaatctatgctgataatgaaaagattgaggttgttgcatttaaaaagaaacttacagttgatctcgcaagggaaaataatgcatgtgccatcattagaggtttgagagcagtatctgattttgagcatgagtttcaactagctacaatgaatagggcacttgctccagacatagaaagcatttttt

SEQ ID NO: 253928 - DNA, 484 bp, Unknown
  Bacterial polypeptide expressing nucleotide sequence isolated from the Sargasso Sea
atgaaagtagcaatataccctggttcttttgatcctattacttttggtcatatggatatcattgatagggcatctggtctttttgataaaattgtaattgcaattgcaaaaagcaaaaccaaaaatccacttttttcattagaagacagaatcaagttagcaaagaatatatatcaagataaccagaaggttgatgtgatgggatttccaaggcaattaactgttgacgttgcaaaagaacaaaatgcttgtgcgataataagaggccttagagctgtttcagattttgaatatgaatttcaattagcaacaatgaatagatctttagctccagatatagaaagtatctttttaacaccaaaggagagtttgatctatgtatcatcgagtttgattaaagagatatgtgatttaaagggagatatatcaaaatttgtacatcccactgtagagaaagctttgaaagctaaattaggctcctaag

SEQ ID NO: 253929 - DNA, 493 bp, Unknown
  Bacterial polypeptide expressing nucleotide sequence isolated from the Sargasso Sea
tatgaaaattgcagtttatccaggtacatttgacccaatcacttatgggcatattgatgtaataaaaaaatctttaaaaatttttgataaactaattgtagctactactgacaataccgataaagattactttttttcaattgatgaacgtattgagattatcaattactcattatttaaagatttgagacttgataaaaaaaaaataaaagttatttcttttgcaaatcttaccattgatttatgtaagaaatataatgctactacaataatcagaggcttaagagctgtttctgatttcgagtatgaatttcaattagctggtatgaataaaaaattaaattcaaaaattgaaacaatgtttttaatgtctgatatagaaaatcaaataatttcatctaaatttgtaaaagaaattgcacactttgggggagaaatagataagtttgttactaaaaatacagtcaaaatgttaaaaaataaatactcatga

SEQ ID NO: 253930 - DNA, 484 bp, Unknown
  Bacterial polypeptide expressing nucleotide sequence isolated from the Sargasso Sea
gatgaatcgagtgttataccccggcaccttcgaccccatcaccaagggccacggtgatctggtcgaacgcgccgcgcgcctgttcgatcacgttatcatcgccgtcgccgccagccccaagaagaaccctctgttttccctggagcaacgcgtcgagctggcccgcgaagtgaccaagcacctgcccaacgtcgaagtggtgggtttctcgtcgttgctggcgcacttcgtcaaggagcagaacgccaatgtcttcctgcgcggcctgcgcgcggtttccgacttcgaatacgaattccagctggccaacatgaaccgccagttggcgccggacgtggaaagcctgttcctcaccccgtcggaaaagtattccttcatttcctcgaccctggtgcgcgaaatcgccgccctgggtggtgacatcaccaagttcgttcaccctgccgttgccgacgcgctgaacgagcgttttcgcaaaagctga

SEQ ID NO: 253931 - DNA, 496 bp, Unknown
  Bacterial polypeptide expressing nucleotide sequence isolated from the Sargasso Sea
aatgaaaaatatagctatatatccagggacatttgatccaataacaaacggccatattgatgttattaaaaaagctctaaaattgacagataaaatcattgttggcatatctgatggtaatgaaaagaattttttatttccaatagatgagagattaaaaattgttacaaaagctttgtatggagatctaaaactttccaaaaataaaattcaagtcataaaatttaactctttaacaaccgaactatgtaaaaaatataaatcaaatctaattcttagaggcttgagagctgtgtcagattttgaatatgagttccaactagctggaatgaatagaaaattaaataataaagttgaaacaatttttcttatgtcagacgttgaaaatcaaataatttcatcaagatttgttaaagaaattgctttacacaaaggtgacttaaggaaatttacaactaaaagtactattaagtcactgaaagaagtttatgcttaa

SEQ ID NO: 253932 - DNA, 481 bp, Unknown
  Bacterial polypeptide expressing nucleotide sequence isolated from the Sargasso Sea
aatgtcattaatagccgtatatcctggaactttcgatcccatcactaatggacatactgaccttgtcaatagaggtataaagatatttgataaaatcataattgctgtagcagagaatcccacaaaaaataccttatttactatatcggaacgtatgaactttatagaaaaaatttttgaagggaatatgaagattgaaatatttcctttgaatagattattagttgaatttgctaaagatcatggagcaactgtaatattaagaggattgcgagctgtatctgattttgaatatgaagttcagcttgctagcatgaatagatccatggagccggatattgaaagcgttttcatgagtcctgctgaaaaatatggtttcttatcatcgagcataataaaagacatagcaaaacatgatggcgatttaagcaattttgtggataaagaagttttaaagtcactaaagaaaaaattacgataa

SEQ ID NO: 253933 - DNA, 412 bp, Unknown
  Bacterial polypeptide expressing nucleotide sequence isolated from the Sargasso Sea
aatgaaaaatgtagcaatttatccaggaacatttgaccctataacttatggacatgttgatgtaattaaaaaagctttaaaatttgttgataatgtaattgttggaatttctgatggcaatcataaaaaattcctttttcccatagaagatagagttaaaattgtttcaaaagctttatttatagatttaaaattatcaaaaaagaatattaaagtaataacttttaattcattaactacagaattgtgcaaacaatataaatctaatcttatattaagaggtcttagagctgtttcagattttgaatatgaatttcaattagcaggaatgaatagaaaattaaatcataaagtcgaaactatatttcttatgtcggatattgaaaatcaaattatatcatcaagatttgtt

SEQ ID NO: 253934 - DNA, 328 bp, Unknown
  Bacterial polypeptide expressing nucleotide sequence isolated from the Sargasso Sea
aaatcgttatttaaagatttaaaactaagtaaaaaaaaaatttcagttatttcttttgatactttaaccatagatctttgtaaaaaattaaaagccaaagtaataatacgtggattaagagcagtatcagattttgaatatgaatttcagttagcgggtatgaataaaaaactaagtgaggaaattgagaccatttttttaatgtctgatattgaaaatcagattatctcttcaaaatttgttaaagaaatttggaaatttaatggaaaaattgataattttttgacaaaatctgctacaaaaatattaaaatcaaaattaaaatgaa

SEQ ID NO: 253935 - DNA, 415 bp, Unknown
  Bacterial polypeptide expressing nucleotide sequence isolated from the Sargasso Sea
atgaaaaaagttgccatttatccaggtacattcgatccaataacttttggtcatattgatgtaattaaaaaaggtttaaaattatttgataaaattgttgtagcggtatcaaatgttgataataagaattatctttttagctctattgaaagaatggaaattgttaaaaaagctttatttttagatttaaaattagataaaaaaaaaattttaataatttcatttacatctttgacaactgatttatgtaaaaaatataaatctaatataatattaagaggtctaagggctgtatcagattttgaatatgaattccaattagccggtatgaatagaaaattaaataataatattgaaactctttttttgatgtcagatgttgaaaatcaaattatttccatcaaaaatttgttaa

SEQ ID NO: 253936 - DNA, 316 bp, Unknown
  Bacterial polypeptide expressing nucleotide sequence isolated from the Sargasso Sea
atgaaaattgctgtatatccaggtacatttgatccaattacatacggtcacattgatgttattaaaaaatcgttaaaaatatttgataaattaattgttgctacgactgataatactgataagaattattttttttcattagatgagaggttagatataataaataattctttgtttaaagatttgaaattaaataaaaagcgaataagagtaatttcatttgataatttgacaatagaactatgtagaaaatataacgcctctgcaatcataaaagggcttagagcagtttcagactttgaatacgagtttcaat

SEQ ID NO: 253937 - DNA, 469 bp, Unknown
  Bacterial polypeptide expressing nucleotide sequence isolated from the Sargasso Sea
aatgaaaaatatagcaatttatcctggcacatttgatcctataacttttggtcatatcgatgtaataaaaaaagctctaaaatttgctgataaggtaatagttggaatttctgatggaaatcaaaaaaattttttattttcaattgacgaaagagttaaaatagtaaaaaaagcaatttttaatgatctaaaattcagaaagaataaagttgaaattataacgtttgactcattaacaacagacctttgtaaaaaatataaatcaaatattatattaagaggcttgagagcggtatcagattttgaatatgagtttcaattagctgggatgaatagaaaacttaatagtagtatagaaacaatttttcttatgtctgaccttgaaaatcagattatatcctcaagatttgttaaagaaatagctcaacacaaaggtgacttaaaaaaatttacaactaaaagtacaatt

SEQ ID NO: 253938 - DNA, 490 bp, Unknown
  Bacterial polypeptide expressing nucleotide sequence isolated from the Sargasso Sea
atgaaaactgcaatttatccaggcacttttgatcctataacgtttggacatatcgatgttattaaaaaatcattaaatatatttgatagagttatagttgctactactgataatattaataagaattaccacttttctattgaagaaagaataaatataattaacaattctctattcaaagatcttaaaattaataaaaaaaaagttaaaattattagctttgattatttaaccatcgatctttgcaaaaaatataacgcaaatacaattatcagaggtctaagggccgtttcagattttgaatacgaatttcaattagcaggaatgaataaaaaactaaactcaaatatagagacaatgtttttaatgtctgatgttgaaaatcaaattatctcctcaaagtttgtaaaggaaatagctaatttaggtggaaatattaatagatttgtcactcgatcaacagttaaaaagttaaaaaataaatcttaat

SEQ ID NO: 253939 - DNA, 484 bp, Unknown
  Bacterial polypeptide expressing nucleotide sequence isolated from the Sargasso Sea
atgaatcgagtgttataccccggcaccttcgaccccatcaccaagggccacggtgatctggtcgaacgcgccgcgcgcctgttcgatcacgttatcatcgccgtcgccgccagccccaagaagaaccctctgttttccctggagcaacgcgtcgaactggcccgcgaggtgaccaagcacctgcccaacgtcgaagtggtgggtttttcgtcgctgctggcgcacttcgtcaaggagcagaacgccaatgtcttcctgcgcggcctgcgcgcggtgtccgacttcgaatatgaattccagctggccaacatgaaccgccaactggcgccggacgtggaaagcctgttcctcaccccgtcggaaaaatattccttcatctcctcgaccctggtgcgcgagatcgcagccttgggcggcgatatcaccaagttcgtccaccccgccgtggccgacgcactgaacgagcgatttcgtaaaagctgag

SEQ ID NO: 253940 - DNA, 469 bp, Unknown
  Bacterial polypeptide expressing nucleotide sequence isolated from the Sargasso Sea
tatgaaagtcgcaatttatcctggatcgtttgatccaataacatatgggcacatggatatcattgatagggcatgtggtctttttgataaaataattatagctattgctaaaaatgaagcaaaaaatccactttttagtcttgaagatagaatcaagttagctaattcaatttataaaaataattctcaggtagaaattgttggatttccaagacaacttacagtagatattgcaaaagaacaaaatgcttgtgcaatcataagaggtcttagagctgtttctgattttgaatatgagtttcaacttgcaactatgaatagatcacttgcaccagatattgagagtatttttttaaccccaaaagaaagccttatatatgtttcttcgagtttgataaaagagatatgtgatttaaaaggagacataagcaaatttgttcacccttctgtagaaaaagctctaaaagct

SEQ ID NO: 253941 - DNA, 400 bp, Unknown
  Bacterial polypeptide expressing nucleotide sequence isolated from the Sargasso Sea
atgaaaacagcaatttaccctggaacatttgatccaatgacttatggtcatatcgatgtaatcaaaaaatcgcttaagatattcgatagagttattatcgctacaacagataacacagataaaaattattttttttcaattgatgaaagagttgatataattaatcactcactttttaaagatctaagatttaatagaaataaaattaaagttatttcatttgataatttaacaattgatctatgtaaaaaatataaagcttcagtaattataagaggcttgagagctgtttctgactttgagtatgaatttcaattagctggcatgaataaaaaattaaattcaaatattgaaactatgtttttgatgtcagacgtcgaaaatcaaattattcttctaa

SEQ ID NO: 253942 - DNA, 454 bp, Unknown
  Bacterial polypeptide expressing nucleotide sequence isolated from the Sargasso Sea
tatgaaagtagcaatctaccctggttcatttgatccaattacagttggacatatggacattgttgaaagagcaactgtgctttttgataaggtaattattagcgttgctgagacagatatgaagaatccactcttttcttcagaagaaagattagacttagtgagttcaatctatgccgataatgaaaagattgaggttgttgcatttaaaaagaaacttacagttgatcttgcaagagaaaataatgcatgcgccataatcagaggtttgagagcagtctctgactttgagcatgaatttcaactagcgacaatgaatagggcgcttgctccagacatagaaagtattttcttaacacctaaagatacactcatttatgtatcatcaagtctagtcaaagaaattgctagcttaggaggagatatttcaaattttgttcatgaaaatgtagaa

SEQ ID NO: 253943 - DNA, 493 bp, Unknown
  Bacterial polypeptide expressing nucleotide sequence isolated from the Sargasso Sea
aatgccaaaagtagcaatttatccaggaacgttcgatccaattacttttggacatatagatataataaaaaaatcactcaaaattgttgataagctaattatagcaactacagacaatagtgaaaaagactacttattttctgttgaagaacgaattgatatattaaaaaaatctttgttttatgatctaaaactaaataaaaaaaaaataacaattactagttttgataatttaacagttaaactttgtaaaaagtataatgcatcaataattgttagaggattaagagcagtttctgattttgaatatgaatttcaactagctggaatgaataaaagattagacaaaaatattgagacactttttttgatgtctgatattgaaaatgaggttatttcatcaaaatttataaaagaaattgctcggcttgagggtaaacttgatagatttgttacaaaatctgtaatcaaatcgataaaagaaaaattttaa

SEQ ID NO: 253944 - DNA, 493 bp, Unknown
  Bacterial polypeptide expressing nucleotide sequence isolated from the Sargasso Sea
atgaaaaatgtagcaatttacccaggaacatttgatccaataacatttggacatatagatgtaattaaaaaaggaattaaattatttgataaattgattgtagcagtatctgaaggtggtgacaaaaatcatttattttcaactgaagaacgcattaatttagttaaaaactcaatatacaaagatacaaaaatatcatcaaaaaaaattcaagtaattaaattttcttcattaacaacaacactatgtaaaaaatataattctaatattatattaagaggcttaagagctgtatctgattttgagtatgagtttcaactagctggaatgaacagaaaacttaacgaaaatattgagacaatttttttaatgtctgatgttgataatcaggttatatcttcaagattagttaaagaaattgcaacttttaagggtaatcttaaaaaatttattactaaaagtgttattaatgaaatcaaaaaaaaaatatgaa

SEQ ID NO: 253945 - DNA, 370 bp, Unknown
  Bacterial polypeptide expressing nucleotide sequence isolated from the Sargasso Sea
aatgaagagtacagcaatttatccaggaacatttgacccaatcacctatggtcacatagatgttattaaaaaatcacttaagattttcgatagagttgtagtagcagctgcagagaatataaataaggattaccttttttcaatagatgaaagagttgaaattataagagattcattatttaaagatttaaagcttaataaaaataaaatcttagtcatttcatttaatactttaacaattaatctttgtaaaaaatataaagcaagtgttataataagaggattaagagctgtatcagattttgaatatgagttccagttagctggcatgaacaaaaaacttaacgaaaaaatagaaactatttttatg

SEQ ID NO: 253946 - DNA, 433 bp, Unknown
  Bacterial polypeptide expressing nucleotide sequence isolated from the Sargasso Sea
ataattaatagatcattaagaatagtagataatttagtaatagcagttgctgataatattaataaagattcattgtttagtgttcaagaaagaattaacatcatcaaaagtgatgttagtaatctaaataaatttaattcaaaaattaatgttatggaattatcaggattgcttacaacatttgctaaagatcaaaatgccacatgtataatacgtggtttaagagcagtatcagattttgagtacgaatttcaaatgacaggtatgaactaccaacttaatcctgatattgagacaatatttcttatgacttctgaaaaaaactcatttatttcatcaaattttgttaaagaagtccacaaactaggtggagatgtttcaaaatttgtttctaaaaacactttagaacaacttaataaaaaaaactcttagt

SEQ ID NO: 253947 - DNA, 496 bp, Unknown
  Bacterial polypeptide expressing nucleotide sequence isolated from the Sargasso Sea
aatgccgaaagttgttatttatcctggtacatttgatccaataacatttggacacattgatgtgattaaaaagtcattaaaactttttgataaagttattgttgcagtttctgatagtgaaaataaaaattatctttttgatcctttagaaagaatagaaattgttcgaaaagctctgttctctgaccttaaattaaatagaaaaaaaataattgttatatcattttcatctttgacaactgatttatgtaagaaatataaatctaatattatactaagagggctaagagctgtttcggattttgagtatgagtttcaattagcaggtatgaatcgaaaattaaataataaaatagagacaatttttttgatgtcagatgttgaaaatcaaataatttcctcaaaatttgtaaaagaaatagttaaactcaagggtaatgtcaaaaagtttactacaaaaagtactattaaatctttaaaaagaaaatatgaatag

SEQ ID NO: 253948 - DNA, 358 bp, Unknown
  Bacterial polypeptide expressing nucleotide sequence isolated from the Sargasso Sea
aatgaaaaaaattgcagtctatccaggtacttttgacccaattacatatggtcatattgatgtaatcaaaaaaggtttaaaatttcttgataaaataattgtagctatatcagatggtgaaagcaaaaattatttatttaatatagatgaacgtgaacaaattgttaataaggcattatttaaagatcttaagttaaatagtaaacagattaaaattattaaatttaattcattaacaacttctttatgtaaaaaatataaatctaatataattttacgaggattaagagcagtttcagactttgaatatgaatttcaactagcaggaatgaatcgtaaattgaataaaaatatgaaa

SEQ ID NO: 253949 - DNA, 436 bp, Unknown
  Bacterial polypeptide expressing nucleotide sequence isolated from the Sargasso Sea
atgtcaaaagctatttatccaggaacctttgatcccctaacattaggccatatagatatagtggaaagagcacttcatatttttgatgaagtaacaatagcaatcgcagtaagtgaaaagaaggtaccacttttttcgctcgaagaaagaatagatcaaatagagaagatttttgataatgataagagaattaaagccataggattttctggtcttatagtagatttagctaaacaagaaggatcgaacgtcttagtaagagggttaagagctgtatcagactttgaatatgaattccaaatggccagtatgaatagagccatgtcgcctgacttagatagtatatttttaactcccaaagcaaaatactctttcttgtcttcctctcttgtaagagaaattgcatctatggggggtgaagtttctgagtttgttg

SEQ ID NO: 253950 - DNA, 490 bp, Unknown
  Bacterial polypeptide expressing nucleotide sequence isolated from the Sargasso Sea
atgaaaattgctgtttatccaggtacatttgatccaattacttatggacatatcgatgtaattaaaaaatctttaaaaatttttgataaattgattattggtactacagaaaatactgataaaaattattttttctcaattgaagaaagaatagatataattaacaactcattattcaaagatctaaaatttgataaaaaaaaaataaaagtcatttcttttgataatttaacaatagatttatgtagaaaatataatgcaacagcaattataaggggtttaagagcagtttcagattttgaatatgaatttcaattagctggaatgaataaaaaattgaataataagattgaaacaatgtttttaatgtctgatgttgaaaatcaaataatttcatctaaatttgtaaaagaaatagctagcttaggtgggaatattgagagatttgtttccaaatatgttgtaaaaatgttgaaaagtaaatactaat

SEQ ID NO: 253951 - DNA, 496 bp, Unknown
  Bacterial polypeptide expressing nucleotide sequence isolated from the Sargasso Sea
atgaataaagttgcaatttatccaggtacctttgatccaataacatatggtcatattgacgttattaaaaagggattaaaactatttgataaaattgtagtggctgtttcaaatgtagataataaaaattatctttttgattcagatgaaagaattcaaattgtaaaaaaagctttatttttagatttaaaacttaataaaaaaaagattacgattatttcatttaattcattaacaactgatttatgtaagaaatacaaatcaacaattattttgcgtggattaagagctgtatcagattttgaatatgaatttcaattagctggtatgaatagaaaactaaataagaatattgaaactttatttttgatgtctgacatagaaaatcagataatttcttcaaaatttgttaaggaaattattaaacttaatggtgatatcaaaaaatttgctactaaaagtacaataaaattattaaaaaaaaaatatgagtaaa

SEQ ID NO: 253952 - DNA, 502 bp, Unknown
  Bacterial polypeptide expressing nucleotide sequence isolated from the Sargasso Sea
attgtgtaactttaactatgtgaaaattggaatatatccaggatcatttgatccttttacgaatgggcataatgatattctatcgaggtcattaaaaatctttgataaggtcataattgctgtagtgaagaactcagcaaagaattatttattttccttagaagatcgaattcaaatggtaaatcaattgttcaaagaccaaggaaatataagctgtgtaggtcttgattcaaaactgacagtcaatcttgcatcagaattaaatgcacaagcaataataagaggccttagagctgtatcagattttgagtatgaatttcaaattgccagcatcaacagatcacaaaatcctgaaatagagagtgtgtttttcacgcccgatgaaaaactaacttttatttcttccagcatggtcaaagaacttgcaagttatggcggtgatatttcaaaatttgttcatgctgatattaataatgcactgataaaaaaatttaaaaactaa

SEQ ID NO: 253953 - DNA, 496 bp, Unknown
  Bacterial polypeptide expressing nucleotide sequence isolated from the Sargasso Sea
tatgagtacagctatataccctggaacttttgatccaattacttacggtcacatcgacgtaataaataaatctctaaagatatttgataaattaataattgcagcagcagaaaatacaaataaagattatcttttttcagtagatgaaagagtagaaattattaaagattcactttttaaagatttaaaattaaataaaaatagaattgtaataattccttttaatacgttaactataaacttgtgcaataaatataaagcaaaagttatagtaagaggtttaagagcagtttctgattttgaatatgagtttcaattagctggaatgaacaaaaaactcaatgaacaaattgaaacgatatttttaatgtcagatgttgaaaatcaaattatatcttctaaatttgtcaaggaaatagcaaaattagatggtaaaataaataagtttttaacaagatcagtagaaaaaaaattaaaaattaaattaaatgaataa

SEQ ID NO: 253954 - DNA, 385 bp, Unknown
  Bacterial polypeptide expressing nucleotide sequence isolated from the Sargasso Sea
atgagaaagattgcaatttaccctggaacatttgatcctataacttatggtcacattgatgttatcagaaaatctctcagtttagttgacaatcttataattggtgtttcaaactcttcaaataaaaagtatctatttaatgcagacgaaagaattgaaattataaaaaatgctttatttaaagatttgagatttaataaaaaaaaattaaaagtcattacttttaataatcttacaacttccctctgcaagaaatataattcaagactaatacttagaggattaagagcagtatcagattttgaatacgaatttcaattagctggtatgaatagaaagttaaataaaaatattgaaactgtatttgttatgtctgatgtagaaa

SEQ ID NO: 253955 - DNA, 409 bp, Unknown
  Bacterial polypeptide expressing nucleotide sequence isolated from the Sargasso Sea
gattataggtgtggcagtaaacgatggtaagggacctctttttactcttgatgaacgcgtaaagatgattgagagggaaatagcgcaatcaactgagataggtgattgtaatttagaggtaaaatcattcgaaggtttgttaacagaatttgccacatcctctggagcctctctaattatccgagggctcagagctgtctcagatttcgagtatgaatttcagatgacaggtatgaatacaaaattggaacctaacatagaaactgtttttctaatggcctctgaaggtgagcaatttatttcttcgcgtctagttaaggaaattaattcattgggtggtgatattagtcatttcgtaagtgaaaatgtgagaacaaaattaattggtaaggtttcagcagataattag

SEQ ID NO: 253956 - DNA, 349 bp, Unknown
  Bacterial polypeptide expressing nucleotide sequence isolated from the Sargasso Sea
aatgaaaaatatagcaatttatcctggaacgtttgatcctattacttttggtcatatcgatgttattaaaaaggcacttaagtttgttgataaagtggtagttggaatatcagatgggaatcaaaaaaactttttattctcaattgatgaaagagtcaaaatagttgaaaaagcaatttataatgatttaaaatttaagagaaataaagtcaatatcataacttttagttctttaacaactgatctttgtaagaaatataagtcaaatattatattaagaggtttaagggcagtgtcagattttgaatatgaatttcaattagcagggatgaatagaaaactaaatagt

SEQ ID NO: 253957 - DNA, 502 bp, Unknown
  Bacterial polypeptide expressing nucleotide sequence isolated from the Sargasso Sea
aatgaaaaaaattgctatatatcctggaacatttgatccaattacatttggacatattgatgtaattaaaaaatcattgaaattagtcgataagttaattgtcggtgtctctaacggtaaaacaaaaaattatttatttagttcaaatgaaagaattcaaattgttaagaaagctttatttaacgatttaaattacaataaaaaaaaaattaaagttattaactttaataatctcacaacatctctttgcaaaaagtataaatcaaacttaatattaagaggcttaagggcagtttctgattttgaatatgagtttcaacttgctggaatgaatagaaaattaaataataatattgaaactatatttttaatgtcagatgttgaaaatcaaatcatatcttcaagatttgttaaagaaatcgctgaacttcgaggagatctaaaaaaatttacaactaaaagcactattaaatctcttaataaaaaatataataatgtttaa

SEQ ID NO: 253958 - DNA, 412 bp, Unknown
  Bacterial polypeptide expressing nucleotide sequence isolated from the Sargasso Sea
atgaagaaaattatcggtttatatccaggatcttttgaccctattacaaatggccacctcgatatcatatttagagcttcaaagattgtagatacattgattattggagtagccataaatgagaaaaagaaacatttatttgatatgacagaaagaacaaacctaattaatgagcagttttcaattaataaaacaaaattatcaaatactaaagttatagcttttgatggtcttttaatgaactttgctcaaaagttgaatgccaatattattattagaggactaagggcagtatcagattttgactatgaatttcaaatgacaggtatgaatgcaagactaaattctgaaattgaaacagtttttttaatggctagtgaaaagcaccaatttatatcctccagattttaaa

SEQ ID NO: 253959 - DNA, 249 bp, Unknown
  Bacterial polypeptide expressing nucleotide sequence isolated from the Sargasso Sea
tatgtaaaaaatataaagcatctgctataataagaggattaagagctgtatctgactttgagtacgaatttcaattagctggtatgaataaaaaattaaattcaaaaattgagactatgtttttgatgtcagatgttgaaaatcaaattatttcctcaaaatttgtgaaggaaattgtaaatcttggtggtgatataaatagatttgtaaccaaatacactgctaaaatgttaagaaataaatattaat

SEQ ID NO: 253960 - DNA, 337 bp, Unknown
  Bacterial polypeptide expressing nucleotide sequence isolated from the Sargasso Sea
tatgagcgacgaaaccatagccgtttatccgggcaccttcgacccagtcacgaatggacacatggatatcatcgcccgcgctgcgcgtctggtcgatcgactggtgattgcggttgctgtgaacattggtaagggccccctgttcagtctggacgagcgggtggacatggtggaggcagaaatctctgctatgggcaactgctttgccgagcgcatcaccgctgtgcctctaaattcgctgcttatggagttcgccgccaagcagaatgccaacatgatcattcgaggcttgcgcgcggtatcggatttcgaatacgaattcaaatgggcggcatga

SEQ ID NO: 253961 - DNA, 496 bp, Unknown
  Bacterial polypeptide expressing nucleotide sequence isolated from the Sargasso Sea
atgaaaaaaaatcttctttatcctggcacatttgatccaataacctatggtcatatagatttaattaaaaaagctttaaaaatagttgatactgttattgttgcaatatctgagaatagcaataaaaaatatttgttcgaggcctctgaaagactagaaattgttaaaaacgctttatttaaagatttaaattttagtaaaaaaagagttaagattataacctttaattctttaactacatctttatgcaaaaaattgaaatcgaacattatattaagaggtctacgtgctgtatctgattttgaatatgaatatcaacttgcaggaatgaataagaaattaaattctaatatagaaacaatatttttaatgtctgatatcgaaaatcaaataatatcttcgaactttgtaaaagagataattgaacttaagggtgatattaaaaagtttacaactaaaagtactattaaagcattaaaaaataaatatgagtaaa

SEQ ID NO: 253962 - DNA, 481 bp, Unknown
  Bacterial polypeptide expressing nucleotide sequence isolated from the Sargasso Sea
tatggctaaagctttataccctggaacctttgacccaatcacacttggtcatattgatattattgaaagagcacttcatctctttgatgaggtgacaattgcaatagctacaagcgcttcaaaaaagcccatattcactcttgaggaaaggatcgagcatgtcgaaaaaatcttcaaaggcaatgatagagtaaaggcaatcggctttaccggcttagttgtagatttagcaaaagagcaaaattcaaatattttgataagaggccttagggctgtctcagactttgagtatgaatttcagttagcaaatatgaacagggctatgtcacctgacttagaaagtattttcctaacaccaaaggctaagttttcttttttatcctcaactcttgttagagagattgcatccatgggaggcaaaattgattcttttgttgaccctatagtgaaggaagccctagagaataggtttaaaacctag

SEQ ID NO: 253963 - DNA, 457 bp, Unknown
  Bacterial polypeptide expressing nucleotide sequence isolated from the Sargasso Sea
tctgtttctagaatacaagaattcgaaaataatgaataaaattggaatatatcctggtacttttgatcctatgactgcaggtcatatggacataattaaaagatcattaagaatagtagataatttagtaatagctgtcgctaataatattaacaaagattcattatttagtgttcaagaaagaattaatattatcaaaagtgatatcacttctgtaaatgagctaaactcaaaaattaatgttactgaattatcaggattacttacaacttttgctaaagatcaaaatgccacatgtataatacgtggtttaagagcagtatctgattttgagtatgaattccaaatgacaggcatgaactaccaaacttaccctgatatcgagacaatatttcttatgacttcagaaaaaaactcattcatttcatctaatttttgtaaagaagtccacaactag

SEQ ID NO: 253964 - DNA, 496 bp, Unknown
  Bacterial polypeptide expressing nucleotide sequence isolated from the Sargasso Sea
aatgaaaaatatagctatataccctggaacatttgatcctataacgaatggtcatattgatgttattaaaaaatctttaaaatttgcagataaaatcattgttggtatatcagatggcaatgaaaagaattttttatttccaatagatgagagattaaaaattgtttctaaagctttatatgtagatttaaaactttcaaaaaataaaattcaagtgataaaatttaactctctgacaactgaattatgtaaaaaatataagtcaaacctaatccttagaggtttaagggctgtttctgattttgaatatgagtttcaattagctggaatgaatagaaaattaaataataaagtagaaacagtttttcttatgtctgatgttgaaaatcagattatttcatcgcgatttgttaaagaaatagctttacacaaaggagatttaaggaaatttacaactaaaagcactattaagtcactgaaagatgtttatgcttaa

SEQ ID NO: 253965 - DNA, 487 bp, Unknown
  Bacterial polypeptide expressing nucleotide sequence isolated from the Sargasso Sea
atgacaaccgcactttatccggggactttcgatccagtgaccatggggcatttggacgtcttgtcgagagcttcaaaactttttgatcgcgtgatcgttgcggtatcgggggggaactcctccaaaaacacgactttcgacgtggagagtagagtggaaatggtaagggaaaacttggtatccttctcgaacgccaccgtggaatcttttgaaggattgctggtcgattatgccaagagtaagcaagcaaccgttttggttcgcgggctaagagccgtttccgatttcgaatacgaatttcaaatggctcaaatgaataggcatttggattccgaactggagacgatttttcttatgcccaacgaaaagtacttctacacaagctcacaactgatcaagcaagttcatttgttcggtgataaggaaacggatttggtgcccgaaaacgtcttgcgcgctctgcgaagtctttctcagggaagctgaa

SEQ ID NO: 253966 - DNA, 496 bp, Unknown
  Bacterial polypeptide expressing nucleotide sequence isolated from the Sargasso Sea
atgccaaaagttgccatttatccaggtacattcgatccgattacatttggacatatagatgttataaataaatcgttaaaactttttgataaaattgtagttgcagtctctgatagtgaaaataagaattatctatttagcccttacgagagaattgaaattgtaaaaaaagcacttttttctgacctaaaattgaataaaaaaaaaattactgtagtctctttttccacattaacaacagatttatgtaaaaaatataaatctaatattatattaagaggtttgagggcagtttcagattttgaatacgaatttcaattagcaggaatgaacagaaaacttaataataagatcgaaacaattttcttaatgtcagatgttgaaaatcaaataatttcttcaaaattcgtaaaggaaattgtaaaactaaaaggtgatattaaaaaatttacaactaaaagcacaattaaatctttaaaagaaaaatatgaataga

SEQ ID NO: 253967 - DNA, 475 bp, Unknown
  Bacterial polypeptide expressing nucleotide sequence isolated from the Sargasso Sea
catgaaaattctttatccaggtacatttgatcctttaacaaatgggcatcttgatttaatagaaagggctgaaaaaatatttggcaatctagtagtcgctgttttagaaaatacctctaaaacaccaacatttaatcttgaaagtagaataattcaaataaaaaatactatttctcatttacctaatattgaagttatttcttattctggtctaactgttgattgtgcgaatgatcttaaagctaatcttattcttagaggcttaagagcaatgagtgattttgagtatgaacttcagattgctcatacaaataaatctcttaataatgatattgaaactatatttctatcgacaaatacaaactatagttttcttagtagttctttagtaaaagaagttgcaaaatttggtggtgaaattaatcacatggtacccccctctgttgagagagatttaaaagaatattttaaataa

SEQ ID NO: 253968 - DNA, 430 bp, Unknown
  Bacterial polypeptide expressing nucleotide sequence isolated from the Sargasso Sea
aatgaaaaatattgcaatatatcccggaacgtttgacccaataacatttggtcacatagatttaattaaaaaaggtataaatttatttgataaattaatagtcgcagtttctgaagtaggagataaaaatcacttattttccatagatgaacgtatcattttagtaaagaactctttacataatgacatgaagatttcatcaaaaaaaattcaagttattaaattttcatcattaacaactactttatgtcaaaaatataaatcaaactttatattaagaggattaagagcggtatcagattttgaatatgaatttcaattagctggaatgaatagaaagttaaatgaaaaaattgagacaatattcttaatgtctgatgtagataatcaagttatatcatcaagattagttaaggaaatagcaaattaa

SEQ ID NO: 253969 - DNA, 496 bp, Unknown
  Bacterial polypeptide expressing nucleotide sequence isolated from the Sargasso Sea
atgaaaagagcggcaatatatccaggtacctttgatccaataacatttggacatatagatgtgattcaaaaatcattaaaaattattgataaactaattgttgctatatctgactcaaatgaaaaaaattatttatttactgccgaagaaagaattgaaattgttaaaaaggctttatttaatgatctaaaatttaataaaaacaaaattaaagtagtgacatttaattctcttactacagatttgtgcaaaaaatttaaatcaaacattatattaagaggattaagagctgtatctgattttgaatacgaatttcagttagctggaatgaacaggaaacttaataataaaatagaaactatttttctaatgtctgatgtgaaaaatcaaattatatcatcaagattgattaaagaaataatagaacataacggagatataaaaaaatttacaacaaaaagtacaattaattcattaaaaaaaaaatatgaataaa

SEQ ID NO: 253970 - DNA, 496 bp, Unknown
  Bacterial polypeptide expressing nucleotide sequence isolated from the Sargasso Sea
aatgataagaacaggcatatatcccggtacctttgacccaataactttcggacatatcgatgtaattaaaaaatcattaaaaattgttgacaaacttattgtagctatttctgactcatcagaaaaagattacttattttcaacagatgaaagaattgaaattttaaaaaaatcactatttaaagatttaaaattaaaaaaaaataaaatcaaaatagtatcttttcaaacacttactgttaaactatgtaaaaagttcaatgcatcgattataatacggggattaagagctgtgtcagattttgagtatgaatttcaacttgcaggaatgaataaaaaacttgataataagattgaaactatttttttgatgtcaaatattgaaaatgaaattatttcatcaaaatttgtaaaagaaattggttatttgagaggagacctaaagaaatttgtatctaactctgtaataaaagcaattaaagataaacttgaatga

SEQ ID NO: 253971 - DNA, 505 bp, Unknown
  Bacterial polypeptide expressing nucleotide sequence isolated from the Sargasso Sea
aatgaaaaaaattgcaatttatccaggtacatttgatcctataacttatggtcatatagatgtaattaaaaaatcactaagaattgttgatagcattattgtaggcatctcagaagttggacaaaaaaattatttatttaatataaacgagagaatcaaaattgtagagagagctctttatatagatttaaagtttaaaaaaaatcaaattaaagttattaagtttaaatctttaactacatcattatgtaaaaaatacagatctaatattatcttaagaggcttaagagccgtttcagatttcgagtatgaatttcaactagctggtatgaatagaaaattaaacaactcaatcgagacaatatttttaatgtcagatgttgacaaccaaattatttcatcaaggtttgttaaagagatagctcaattaagtggagatctaaaaaaatttactacaaaaagtacaattaaagctttgaaaaaaaaatatgagaactctttttaa

SEQ ID NO: 253972 - DNA, 498 bp, Unknown
  Bacterial polypeptide expressing nucleotide sequence isolated from the Sargasso Sea
taatgagtaaaattgcaatttacccaggaacatttgatccaattacttttggtcatatagatgtaataaaaaaatcattaaaactatttgataaagtagtcgtaggtgtgtctgatgaaagtaataaaaattatttattcagctctgatgaaagaatagaaatagtgaataaagctttatttaaagatctaaagttaaatagaaaaaaaattaaaatagtttcttttggctctttaactactgatttatgtaaaaaatataaatcaaacattattttaagaggattaagagctgtatctgattttgaatatgaatttcaattagctggtatgaatagaaaattgaaccaaaatattgaaacaatttttttaatgtctgatgtagaaaaccaaataatctcatcaagatttgtaaaggatatagttaaattaaaaggtgatataaaaaaatttactacaaaaagtacaattaaatctttaaaagagaaatatgaataaa

SEQ ID NO: 253973 - DNA, 433 bp, Unknown
  Bacterial polypeptide expressing nucleotide sequence isolated from the Sargasso Sea
attaaaaaatctcttaaaatagttgatagagtaataattgccacaacagataatattaataaagattattttttttcaatagatgagagactagaaattattaagaattctctttttaaggacttaaaaatgagtagaaaaaaaataatagtaattcctttcgacactttgactataaatttatgtaagaaatataaatctacattaataataagaggattgcgagccgtttcagatttcgaatatgaatttcagttagccggaatgaataaaaaacttaacaataatattgaaacgatttttttaatgtccgatttagaaaatcagataatttcatcaaaatttgtcaaagaaattgccaaattgaatggaaatttaaaaaaattcattactaattcagctataaaagctttaaaagataagttcaaatgaa

SEQ ID NO: 253974 - DNA, 389 bp, Unknown
  Bacterial polypeptide expressing nucleotide sequence isolated from the Sargasso Sea
aatgtcaaaaattggaatatacccaggaacttttgacccaatgacaaatggacatctaaatataattcaaagagcgctaaagatagtagataagttaataattggagtagcggataacttaaataaaacgccccttcttagtattgatgaaagaaaaaatataattgaaaatgatatattctctttgcagcaaaataataaaaaaatagaaatttatccagttaatggacttttaactgagtttgcaaaaaagtgtaatgcagattgcattattagaggattaagagcggtctcagattttgaatatgaatttcaaatgacaggaatgaactacaaattaagtcctgaaattgagactatatttttaatgtcagctgataatattcttt

SEQ ID NO: 253975 - DNA, 482 bp, Unknown
  Bacterial polypeptide expressing nucleotide sequence isolated from the Sargasso Sea
tatgaaagtagcaatctaccctggttcatttgatcccattacagttggacatatggatattgttgaaagagcaactgtgctctttgataaggttatcattagcgttgccgagacagacatgaaaaatccacttttttcttctgaagaaagattagacttagtgagctcaatctatgctgataatgaaaagattgaggttgttgcatttaaaaagaaacttacagttgatcttgcaagggaaaataatgcatgtgccatcattagaggtttgagagcagtatctgattttgagcatgagtttcaactagctacaatgaatagggcacttgctccagacatagaaagcatttttttgactcctaaggatacactcatttatgtatcatcaagtctagttaaggaaattgctagtttaggaggagatatttcaaattttgttcatgaaaatgtagaaatggctcttaaagcgaaactaaatcatt

SEQ ID NO: 253976 - DNA, 493 bp, Unknown
  Bacterial polypeptide expressing nucleotide sequence isolated from the Sargasso Sea
atgagcaaagtcggcatatatccaggaacttttgatccaattacttatggtcacatttcaataattaaaagtgctttaaaaattgttgataaattaattgtagctgtctcaaatgattactccaaagattatttattttcagctgaagaaagagttttattaacaaaaaaatcgcttttcaaagacttaagattcaaaagcaaagatattaaagtattatctttcaatacacttacaacttcactatgtaaaaaaaataatgccactattatgtttagaggtttaagagctgtttctgattttgaatatgaatttcaattagctggaatgaatagaaaacttgatagtacaattgaaacagtttttttaatgacagatgttgaaaaacaagttatttcatctaaatttgtaaaagagatagccagactaaatggtaaaattgataactttgttaccaggagtgcagttaaagctattaagaaaaaaatatgat

SEQ ID NO: 253977 - DNA, 496 bp, Unknown
  Bacterial polypeptide expressing nucleotide sequence isolated from the Sargasso Sea
atgaaaaaaattgcaatttaccctggaacatttgatccaatcacatttggacatattgatgttattaagaaaggtttaaaattatttgataaattagttgttgctgtttctaatggtgaaaataaagaatacttatttagttctgatgaacgtatccaaattgtaaaaaaagccttgttttctgatttaaagcttaataaaaaaaaaattgaaattatttcttttacctcactaaccacagatttatgtagaaaatataagtccaatataatcttaagaggtcttagagctgtttcagattttgaatatgaatttcaattagctggaatgaatagaaagttaaatagtaatattgaaacaatattcttgatgtcagatgttgaaaatcaaattatttcttcaaaatttgtaaaagaaattgtaaaattgaaaggtaatattaaaagatttacaactcaaagtacgattaaatcacttaaaaataaatatgaataaa

SEQ ID NO: 253978 - DNA, 481 bp, Unknown
  Bacterial polypeptide expressing nucleotide sequence isolated from the Sargasso Sea
atggcaaaggctttatacccaggtacttttgatcctataactctcgggcacatagatatcattgaaagagcacttcatctttttgatgaagtaactatagctattgccacaagtgcttcaaaaaaacctatttttactcttgaagagagaatagaacatgtagaaaaaatatttcaaggaaataagaatgttaaggccattggctttactggactagttgtagatctagctaaagaacaagaatctaatatattgataagagggttaagagcagtttctgatttcgagtatgagtttcaattagcaaatatgaatagggcaatgtcacctgatttagaaagcatattcttgactccaaaagctaaattctctttcttgtcttctacactagttcgagaaatagcttctatgggtggtgaaatagattcatttgttgaccctgtagtgaaagcagccttacaagaaagattcaaaacctagt

SEQ ID NO: 253979 - DNA, 496 bp, Unknown
  Bacterial polypeptide expressing nucleotide sequence isolated from the Sargasso Sea
atgaaaaatatagcaatttaccctggtacatttgatcctattacatttggacatatcgatgtaattaaaaaagctttaaaatttgttgataaagtagtaattggaatttcagatggaaatcaaaaaaattttttattctcaatagatgaaagagtaaaaattgtacaaaaagctatttttaatgatttaagatttaaaaaagataagataaaaataataacttttaattctttaacaacagatctttgtaaaaaatataaatcaaatattatattaagaggcctaagagctgtatcagattttgaatatgaatttcaattagctggaatgaatagaaaacttaacaacaaaatagaaacaatctttcttatgtcagatcttgaaaatcagattatttcttcaagatttgtcaaagaaattgcacagcataatggagatctaaaaaagtttactacaaaaagtacaattgtatctttaaaaaatatttatgcttaaa

SEQ ID NO: 253980 - DNA, 496 bp, Unknown
  Bacterial polypeptide expressing nucleotide sequence isolated from the Sargasso Sea
atgaataaaattggactttatccaggaacttttgatcctattacattcggacatatagatgtaataaaaaaatcattaaagatagttaataaattgatcattgctgtatcaaatgattattctaaagattatctattttcagcggaagaaagagtttttataatcaaaaacgctctttttaaagatttaaaattaaattcaaataaactaaaaattttatcatttaatacactaactacatcgttatgtttaaaacataaagcaacgataatatttcgtggtttaagagcagtttccgacttcgagtatgaatttcaacttgctggtatgaatagacagctaaataaaaacatagaaactgtttttttaatgtcagaaccatcaaaacaggttatttcatcaaaatttgttaaagaaattgtaaaattaaatggtaaaatagatgcatttgttacaaaaagtactaaaaaggcattaaaagaaaaatatgattaaa

SEQ ID NO: 253981 - DNA, 390 bp, Unknown
  Bacterial polypeptide expressing nucleotide sequence isolated from the Sargasso Sea
aatgtcatcgcccaaaatcgggatttatcccggcaccttcgatccgattacaaacggccacacggatatcatcggccgggccgcgcgactgctcgacaagctggttgttggggttgctgtaaaccccgggaagggaccgatattcaccatcgacgaacgcgtcgagatcgtgcgtgaagagatgaaccatctcggaaacggtttgagcgacagaatcgaagtaacccagtttagcggtttactgatcgatttcgcgcatcaggaaaacgcgactgtgattattcgcgggcttcgggcggtttcggatttcgactatgaattccagatgtccagcatgaacgccaaaatggcacccgatgttgagacggtgtgcctgatggcatcggataa

SEQ ID NO: 253982 - DNA, 496 bp, Unknown
  Bacterial polypeptide expressing nucleotide sequence isolated from the Sargasso Sea
aatgaaaaaaactggagtttaccctggtactttcgatccaattacttttggtcacatagatgtaattcaaaaatctttaaaaattgtagatcaagttatagttgcaatctctgatggagataataaaaaatatttattcacaatagaagaaagaattaaaatagttaataaagcattattttctgatttaaaatttaagaaaaataaagttaaagttatttcttttaactcgttaacaacagatctttgtaaaaaatataaatcgaatataattctacgaggtttgagagcagtttcagactttgaatatgagtttcaattagccggcatgaatagaaaattaaataaaaatatagaaacaatttttttaatgtctgatgttcaaaatcaaataatttcttcaagattaataaaagaaataatagaattaaaaggtgatataaaaaagtttactacaaaaagtacaattaattcattaaaaaaaaaatatgaataa

SEQ ID NO: 253983 - DNA, 384 bp, Unknown
  Bacterial polypeptide expressing nucleotide sequence isolated from the Sargasso Sea
aatgaataaaattggaatatatccaggaacttttgatcctttgaccgctggtcatatggacataattaaaagatcattaagaatagtagataatttagtaatagctgtcgctaataatattaacaagcattcattatttagtattcaagaaagaattaatattatcaaaagcgatatcagttctgtaaatgaattaaattcaaaaattaatgttattgaattgtcaggattacttacaacattcgctaaagatcaaaatgccacatgtataatacgtggtttaagagctgtatccgattttgagtatgaatttcaaatgactggcatgaattatcaacttaatcctgatattgagacaatatttcttatgacttcagaaaaaaa

SEQ ID NO: 253984 - DNA, 496 bp, Unknown
  Bacterial polypeptide expressing nucleotide sequence isolated from the Sargasso Sea
atgaaaaaagctatttaccctggaacttttgatccgattacatttggacatatagatctaattaaaaagtctttgaatatttttgatagagtaattgttgctgtgtccgatggaaatacaaaaaattatctttttagcgcagaggaaagagagaacttaattaaaaaagctctttttaaagatttaagatttagtaaaaaaaaaatagatgtcacatcgtttaaaactttaactaccgatttttgcagaaagatgaaatcaaacgttattattagaggtttacgtgccacttccgattttgaatatgaatttcaattggcaggaatgaataaaaagttaaataagttagttgagactgtttttttaatgtctgatccagaaaatcaaattatttcatctaaatttgttaaagaaattattgaattaaatggtgacatacgaaaatttaccactaaaacagtaataaaatctttaaaagataaattttatgaataaa

SEQ ID NO: 253985 - DNA, 496 bp, Unknown
  Bacterial polypeptide expressing nucleotide sequence isolated from the Sargasso Sea
atgaaaaatattgctatttatcctggaacttttgatccaattacatttggtcatattgatgtaataaaaaaatccttaagatttgtggatagagtaatagtagctatatctgatggaaatcaaaaaaattttttattttcaattgatgaaagagttaagattgtgcaaaaagctatttttaatgatctaaattttaaaaaaaataaaattcaagttataacttttagttcactaacaacagatgtttgtaaaaaatataattctaatatcatacttagagggttaagagctgtttctgactttgaatatgaatttcaattagctggaatgaatagaaaattaaacagtaaaattgaaactattttccttatgtcggatctagaaaatcaaattatatcttcaagatttgttaaagaaatagcacaacataagggagatttaaaaaaatttacaacaaaaagtacaatcaaagcattaaaaaatatttatgtttaaa

SEQ ID NO: 253986 - DNA, 493 bp, Unknown
  Bacterial polypeptide expressing nucleotide sequence isolated from the Sargasso Sea
aatggacaaaataggaatttatccaggaacatttgatccattaacttttggacatattgatgtaataaaacgttcattaaaaatagttgataaactaataattggtatagcagataacgataataagacccctttattatcaattgaagaaagaaaattaattattgatagtgatataaaagattattttaatcaaaataataaaattattattaaaaatattgttggcttacttactgattttgcaaaattaaataaagttacttgtattattaggggattaagagctgtatcagattttgattatgaatttcaaatgactggaatgaattatcagcttaacccagatttagaaactatatttttaatgtcttcagataaaaattcatttatttcttctaactttgttaaagaagttcacaaattaggaggtgatgtttccaaatttgtttcaacaaatacaattaaaattttagataataaaaacacgtaa

SEQ ID NO: 253987 - DNA, 505 bp, Unknown
  Bacterial polypeptide expressing nucleotide sequence isolated from the Sargasso Sea
aatgaaaaaaattgcaatatatcctggaacattcgatccaattacatacggtcatattgatgttataaaaaaatcactaaaaatagttgacaatttaattgttgcaatatctgaagttggtgaaaaaaattatcttttttcaatcaatgaaagaatagatttggttaaaaaagctttatattccgatttaaaacttaagagaagtagaataaaagtaataaaatttgaatctcttacaacatctttatgcaaaaaatataaatcaaatattattttaagaggtttaagagctgtatcagattttgaatacgaatttcaattagcaggaatgaatagaaagctaaatagtaaaattgaaaccatttttttaatgtccgatgtagataatcaaattatatcttcaagatttgtaaaagaaattgctcaattaggtggaaatttaaataaatttacaacaaaaagtataataagtgctttaaaaaaaaaatatgaaaattctttttaa

SEQ ID NO: 253988 - DNA, 499 bp, Unknown
  Bacterial polypeptide expressing nucleotide sequence isolated from the Sargasso Sea
atgaaaaaacacaatgctggttatttgggtagctttgatcctcttacaaatggtcatctcgatatcatttcaaggggaagtcggatttttacaaaattaattatcggagttggtggatctacgaaaaaaaatctaacttttagtcaaaaagaacgattagctatgctgactcgcacctgtaagcatcttaataacgtcgagatttcttcttttgatggcctggctgttgacttttgcaaaaaaaaaaacatttctgtgatcattcgagggcttcgtactgaagctgattatgtctatgaaatgcaaatggcaatgatgaatttcacccttgatccaaaaattgatactttttttatcccaacaagacaagatctcagccatatatcttcttctttagtaaaagaagtagcttttcttggtggagatgtcagtaagctcgtaccagaagcaagtttggagcttctaacatctaagaagaacaacacaaataaatcgtaac

SEQ ID NO: 253989 - DNA, 409 bp, Unknown
  Bacterial polypeptide expressing nucleotide sequence isolated from the Sargasso Sea
atgaaagtagctatttacccaggctcatttgatccaataacttatggacacatggatattattgatagggcttgcaatctttttgataaaattgtcattgctattgcaaaaaatgaagcaaaaaatccattatttaaccttgaagataggataaagcttgcaaaagagatatataaagataattctcatgtagaggtagtaggctttccaaggcagttaacagttgatattgcaaaagaacaaaatgcatgtgcaatcataagaggcctaagggcagtctctgattttgaatatgaatttcaattagctactatgaataggtcacttgctccagatattgagagtatctttttaactcctaaagagagtttaatttatgtatcttcaaagtttaataaaagagatatgt

SEQ ID NO: 253990 - DNA, 325 bp, Unknown
  Bacterial polypeptide expressing nucleotide sequence isolated from the Sargasso Sea
atgaataaagttgcaatctatcctggaacatttgatccaattacgtttggccatattgatgtaattaaaaagggtttaaaactttttgataaaattgtggttgcagtatctaacgtagaaaataaggactatttatttgattcagatgaaagaattgaaattgtaaaaaaagcattattttatgatttgaaactgaataaaaaaaaagttgttgtaatttctttcagctctttaaccaccgatttatgcaaaaaatataaatcaaatattattctaagaggtttaagagcagtttcagattttgaatatgaatttcagctagcag

SEQ ID NO: 253991 - DNA, 496 bp, Unknown
  Bacterial polypeptide expressing nucleotide sequence isolated from the Sargasso Sea
atgtccaaaactgccatttatcccggaacatttgatccaataacttttgggcatatagatgttataaaaaaatctttaaagattgttgatagattaatagttgcaacaaccgataatattgaaaaagattatttattttcattagacgaaagaattgaaattttaaataagtgtttgtttaatgacttacgatttaacaaaaataaaattaagataatttcttttgatgacttaacagtaaaaatctgtaaaaaatataaggcatctataattataagaggattaagagctgtatcagattttgaatatgaatttcaattagctggaatgaataagaaacttgataaaagtgttgaaactatttttttaatgtctgatattgaaaatgaaataatttcttcaaagtttatcaaagaaattggaaaattgaagggtgatttaaaaaaatttgctacaaaatctgttataaaggctattaaatctaaattctcgtgaa

SEQ ID NO: 253992 - DNA, 495 bp, Unknown
  Bacterial polypeptide expressing nucleotide sequence isolated from the Sargasso Sea
tgtctaaaattgcaatatacccaggtacatttgatccaattacattcggacatatagatgtaattaaaaaatcattaaagctatttgaaaaagtaattgttgccgtctcagatgttgaaaacaaaaaatatttatttgatgtagaagagagaattgaaattgtaaaaaaagctttatttttagacatgaaattaaataaaaaaaaaattatggttatttcttttacatcattaacaacagatttatgtaaaaagtataaatcaaatataatattacgaggtttaagagctgtatctgattttgaatatgaatttcaattagctggaatgaatagaaaacttaataataatattgaaactatttttttaatgtcagatgtagaaaatcaaattatttcttcaagatttgttaaagaaattgtcaaactaggtggtgatattaaaaaatttactacaaaaagtactataagatcactaaaagaaaaatatgaataaa

SEQ ID NO: 253993 - DNA, 359 bp, Unknown
  Bacterial polypeptide expressing nucleotide sequence isolated from the Sargasso Sea
tatgaaagtagctatatatccaggctcatttgatccaataacctttgggcatatggatattattgatagagcttgcggcctttttgataagatcataattgctattgcaaaaaatgaagctaaaaacccattatttaacttagaagacagaataaaacttgcaaaagaaatttataaagatagttcacaagtagaagtggtgggattcccaagacaattgaccgttgatcttgctaaagagcaaaatgcatgtgcaatcataagaggattaagggctgtttctgactttgaatatgaatttcagctagctaccatgaatagatcactagctcctgatatagaaagtatattcctcacac

SEQ ID NO: 253994 - DNA, 331 bp, Unknown
  Bacterial polypeptide expressing nucleotide sequence isolated from the Sargasso Sea
attgaacacaattgataaaatatttgaaggaaataaaaaggttaaggcaattgggtttactggccttgtggtagatcttgcaagggagcaagaatctaatattctcattagaggtttaagagccgtttctgatttcgagtacgaatttcagctagcaaatatgaatagagcaatgtcgccagatttagagagtatattcttgaccccaaaggctaaattttcatttctttcttctacccttgtaagagaaatagcttccatgggtggaaaaattgattcattcgttgacccaatcgtcaaggaagctttgcaagaaaggtttaaaagatag

SEQ ID NO: 253995 - DNA, 496 bp, Unknown
  Bacterial polypeptide expressing nucleotide sequence isolated from the Sargasso Sea
atgaaaaatatagctatatatccaggtacatttgatccaataacaaacggccacatagatgtcattaaaaaagctctaaaattggcagacaaaataattgtcggtatatctgatggaaatgagaaaaattttttatttcaaatagatgaaagattaaaaattgtttcaaaggctttatatggagacctaaaactttcaaaaaataaaatccaggttattaaattcaattctcttacgacagaattgtgtaaaaaatacaattcaaacttaattctaagaggtttaagagctgtttcagattttgaatatgaatttcagctagctggaatgaatagaaaattaaacaataaagtagaaacagtgtttcttatgtctgatgttgaaaatcaaattatttcatcgagatttgttaaagaaatagcccttcataagggtgatttaaaaaaatttacaactaaaagtaccatcaagtcactgaaagaagcttatgcttaaa

SEQ ID NO: 253996 - DNA, 490 bp, Unknown
  Bacterial polypeptide expressing nucleotide sequence isolated from the Sargasso Sea
atgaaaactgctatttatcctggtacctttgatcccattacttacggtcacatagatgtaatcaaaaaatctttaaatatctttgatagggtgattattgcaacaactgataatataaataaagattattatttttcgattgaagagagactagacattatcaataattcacttttcaaagatctaaggttaagtaaaaagaaaattaaagtcatctcatttcataatcttacaataaatttatgtaaaaaatataacgcaaaagctatcataagaggtctcagggctgtatctgattttgagtatgaatttcaattagcaggtatgaataaaaaacttaattcaaagattgaaacaatgtttttaatgtctgatgtggaaaatcaaataatttcatcaaaatttgttaaagaaattgctagtcttggtggtaatattgatagatttgttactaaatatactgttaaactattaaaaagtaaattttgat

SEQ ID NO: 253997 - DNA, 496 bp, Unknown
  Bacterial polypeptide expressing nucleotide sequence isolated from the Sargasso Sea
aatgaaaaaagcaatttatcctggaacttttgatccaatcacatttggacacattgatcttattaaaaaatctttaaatatttttgatcaattgattgttgccgtttccgatggcaatacaaaaaactatctttttgatgccaatgaaagggaacaactaataaaaaaggctttatttagcgacttgaaatttagtaaaaaaaaaataattgtaacctcgttcaaaactttaactaccgatttttgtaaaaaaatgaaatctaatgttattattagaggtctccgtgcaacttctgatttcgaatatgaatttcaattagctgggatgaataaaaaattaaatagtttagttgaaactgtttttttaatgtcagatcctgaaaaccaaattatttcttctaaattcgttaaagaaataatcgaattaaatggaaatatcaaaaaatttactaccaaaacagtaattaaatctttaaaatataaatttaatgaataa

SEQ ID NO: 253998 - DNA, 496 bp, Unknown
  Bacterial polypeptide expressing nucleotide sequence isolated from the Sargasso Sea
atgaagaaaactgctatttaccccggtacatttgatccaataacttttggtcatattgatgttataaataaagcattaaagatttttgattatcttatcgttgctgtatctgatggtaataataaaaattatttatttgaaattgacgaaagaatagaaattgttaaaagagcattattcacagactcaaaaataaaaaaaaaaaaattaaaagttatttcatttaaatctttaactacagctttatgtaaaaaacataaatcgaacattatattacgtggtttaagagcagtttcagactttgagtatgaatttcaattagctggaatgaacagaaaactaaataaaaacatagaaacagtatttgtcatgtctgatgttgctaaccaaataatttcttcaagatttgttaaagaaattgcagaattaaatggtgatataaaaaaatttactacaaaaagtacaataaaagcattaaaaaataaattaaaatgaa

SEQ ID NO: 253999 - DNA, 496 bp, Unknown
  Bacterial polypeptide expressing nucleotide sequence isolated from the Sargasso Sea
aatgccaaaaactgcaatttatccaggtacatttgatccaataactttcggacatatagacgtcataaagaaatctttaaagatcgttgataaattgattgttgcaacaactgacaatatagaaaaagactatttattttctttagatgaaagaattgaaatattaaacaaatctttgtttaatgatttaagattaagtagaaataaaattaaaattatatcctttgatgatttgactgttaaaatctgtaaaaaatataaagcctcaattattataagaggcttacgagctgtatcagattttgaatatgaattccaactagctggaatgaataaaaaacttgataaaagtgttgaaactatttttttaatgtccgatattgaaaatgagataatttcttctaagtttataaaagaaattgggaaattaaagggtgatttaaaaaaatttgctacaaaatcagtaataaaagctattaaatctaaattctcgtga

SEQ ID NO: 254000 - DNA, 484 bp, Unknown
  Bacterial polypeptide expressing nucleotide sequence isolated from the Sargasso Sea
atgaaagtagcaatctacccaggttcatttgacccaattacggttggacacatggatattgttgaaagagcaactgtgcttttcgataaggttattattagtgttgccgagacagatatgaaaaatccacttttttcttctgaagaaagattagacctagtaagctcaatctatgctgataatgaaaagattgaagtcgttgcatttaaaaagaaacttacagttgatcttgcaagggaaaataatgcatgcgccatcatcagaggcttgagagcagtatctgattttgagcatgagtttcaactagcgaccatgaatagggcacttgctccagatatagaaagcattttcttgactcctaaggatacactcatttatgtatcatcaagtctagtcaaagaaattgctagcttaggaggagatatttcaaattttgttcatgaaaatgtagaaatggctcttaaagcgaaactaaatcattagt

SEQ ID NO: 254001 - DNA, 284 bp, Unknown
  Bacterial polypeptide expressing nucleotide sequence isolated from the Sargasso Sea
agtcatcccatttaacttgttgacggtaaagttgtgtaaaaaatataatgcaaatgtaataatacgaggtttaagagctgtttcagattttgagtatgaattccagttagctggcatgaataaaaagttaaatgaaaaaatagaaactatctttttaatgtcagatgtggaaaatcagataatttcatcaaaatttgtaaaagaaattgcaaaatttaatggcaaaattgataattttttaacaaaatcggtaataaaagaacttaaagagaaactagaatgaa

SEQ ID NO: 254002 - DNA, 493 bp, Unknown
  Bacterial polypeptide expressing nucleotide sequence isolated from the Sargasso Sea
atgaaaattgctgtttaccctggaacatttgatcctataactaatggtcatatagatgttataaaaaaatctcttaaaatctttgataaactaataattgcaaccactgataatacagataaaaactattctttttcggtaaatgaacgtttggatataattaataattctctttttaaagatttaaaattaagtaaaaaaaaaattaaggtaatttcttttgataaccttactatagaattatgtaaaagatataaagctaatgctataattcgaggtttaagggcagtttctgactttgagtatgaatttcaattagctggaatgaataaaaaattaaattcaaaaatagaaacaatgtttcttatgtctgatgttgaaaatcaaattatctcatcaaaatttgtaaaagaaattgcaattttaggtggtaatattgatagatttgtaacaagatatacagttaaaatgcttaaaaataaatttttatgaa

SEQ ID NO: 254003 - DNA, 496 bp, Unknown
  Bacterial polypeptide expressing nucleotide sequence isolated from the Sargasso Sea
aatgagcaaagtaggtatttatcctggaacttttgacccgattaccaatggtcacattgatgtaataaaaaggtcattaaaaatagttaaaaaattaattatagctgtttcaaatgactattctaaagattacctattttcatctgaggaaagagttgccataatagaaaattctctttttaaagacttaagaattaaaaaacaaaaagtaaaagttttatcttttaacacattaacaacatctctatgtgcaaaatataaagcaacaataatatttaggggtctaagagccgtatctgattttgaatatgaatttcaattggcaggcatgaatagacagttgaacaaaagtatagaaactgtttttttaatgtcagatccagataatcaagttatttcatctaaatttgtaaaagaaattgcaaaattaaatggaaaaattgatgcttttgtaacaaaaagtactaagaaagcgataaaagaaaaatatgattaa

SEQ ID NO: 254004 - DNA, 496 bp, Unknown
  Bacterial polypeptide expressing nucleotide sequence isolated from the Sargasso Sea
atgactaagataggtatatatcctggtacttttgatccattaacttttggtcatttagatgtaataaatcgttccttaaaattagttgataaactaatcattggaatagctaataatgataataaaaactctttattatcagttaatgaaaggcaaaatattattgagaacgatatcaacgaatatttagaaaaaaataccaaagttagcattaaggtaattgaagggcttctaactgattttgctaaattaaataatgctgtatgcattattcgaggcttaagagcagtttcagattttgaatatgaattacaaatgacaggcatgaattcacaacttaacccagaaatagaaactatttttttaatgtcatctgataagaactcatttatttcatcaaacttagtaaaagaagttcataaattaggaggaaatgtttctcgatttgtttctcaaaacacaattaagattttagatctgaaaaactctccatcat

SEQ ID NO: 254005 - DNA, 337 bp, Unknown
  Bacterial polypeptide expressing nucleotide sequence isolated from the Sargasso Sea
atgaaaaatatagctatatatccaggaacatttgatccaataacaaacggccacatagatgtcataaagaaagccctcaaattagcagataaaataattgttggtatatctgatggaaatgaaaaaaattttttatttcctatagatgaaagactgaatattgttacaaaagctttatatggcgacttaaaattcccaaaaaataaaatccaagtgattaaattcaattctttaacaactgaattgtgtagaaaatataaatcaaatctaattcttagaggtttgagagctgtgtcagattttgaatacgaattccaactagcaggaatgaatagaa

SEQ ID NO: 254006 - DNA, 424 bp, Unknown
  Bacterial polypeptide expressing nucleotide sequence isolated from the Sargasso Sea
atctttaaaaattgttgataaacttattgttgctactactgactcatccgataaagaatatttattttctgttaatgaaagaatagaaattctcagaagatcactttatggtgatttaaaactgagtaaaaaaaggatcaaaataatttcatttgataatcttactatcaaaacatgtaaaaaatttaaagcatctcttataataagaggtttaagagctgtatcagactttgaatacgaatttcaattagcagggatgaataaaaaacttgataaaaatatagaaactatttttttaatgtctaatatagaaaatgaaattatatcatcgaaatttgttaaggaaataggtgttctgaaaggagatttaaaaaagtttgtaacaaaatctgttattaaggcaatacaaaataaactaagatga

SEQ ID NO: 254007 - DNA, 493 bp, Unknown
  Bacterial polypeptide expressing nucleotide sequence isolated from the Sargasso Sea
aatgaataaaataggaatttatccaggaacattcgatcctatgactaaaggtcattttaatattattttaagatctttaaaaattgttgataaattaatagtaggggttgcagacaatccaaataaacgaccacttttatcaacagatgaaagaattaatataattaaaaatgatatttctataaataatttagatttaaacttaatagatatacagccagtaaaaggtttattaactgattttgctaaatcttttaacgctcagtgtattattagaggtttaagagctgtttcagattttgaatatgaatttcaaatgacaggaatgaattatcaattaaacccacatattgaaacaatctttttaatgtcttcagataataattcttttatatcttcaaacttagttaaagaagttcacaagttaggaggtgatgtttctaaatttgtctctaaaaacacaatcaatattttggataataaaaatttctaa

SEQ ID NO: 254008 - DNA, 468 bp, Unknown
  Bacterial polypeptide expressing nucleotide sequence isolated from the Sargasso Sea
tatgaaagtagcaatctaccctggttcattcgacccaattacggttggacatatggatattgttgaaagagcaactgtactttttgataaggttattattagcgttgctgaaacggatatgaaaaatccacttttttcttctgaagaaaggttaggcttagtgagctcaatctatgccgataatgaaaagattgaggtcgttgcatttaaaaagaaacttacagttgatcttgcaagagagaataatgcatgtgccatcataagaggtttgagagcagtatctgattttgagcatgagtttcaactagctacaatgaatagggcacttgctccagacatagaaagcatttttttgactcctaaggacacactcatttatgtatcatcgagtctagttaaggaaattgctagtttaggaggagatatttcagattttgttcatgaaaatgtagaaatggctcttaaagc

SEQ ID NO: 254009 - DNA, 415 bp, Unknown
  Bacterial polypeptide expressing nucleotide sequence isolated from the Sargasso Sea
aatgaaaaataatgcactataccctggtacatttgatcctataacttatggacacatagacgtaataaaaaaagctttaaagatagttgatagagttattatagcagtttctgaaaatagtaataaaaattatttagttgatataaatgaaaggctaaagattataaataaagcattatttaaagatttaaaaatgaaaaccagtaaaataaaagttagaccattcaattcattaacaacagatttgtgtaaaaaaatgaattcaaaaattattttaagaggtctcagagcagtttcagattttgaatatgaaatttcactggctggaatgaatagaaaattaaacaacaaaattgaaacagttttttttatgtcagatgtagaaaaatcaattagttcatctagatttgttaaa

SEQ ID NO: 254010 - DNA, 433 bp, Unknown
  Bacterial polypeptide expressing nucleotide sequence isolated from the Sargasso Sea
atctttaaagatctttgatagagtagtagttgctgctacagacaatattaataaaaattatttttttgcagtagaagatagactttcaattattaagaattctttatttaaagatcttcgattgaataaaaataaaataaaagtagtttcttttaaaacgttaacgataaatctttgtaataaatacaaagcatctgttataataagaggtttacgagcagtatcagattttgaatatgaatttcaactagcagggatgaataaaaaactcaataataatattgagactatttttttgatgtcagaagtagaaaatcaaattatttcatcaaattttgtaaaagaaatcactaaattaaaaggtaatattaataagtttgtaactaaatcaacagtcaaaatgcttaaagataaattcaatgaagaaatttag

SEQ ID NO: 254011 - DNA, 496 bp, Unknown
  Bacterial polypeptide expressing nucleotide sequence isolated from the Sargasso Sea
atgactaaagtagctatataccctggaacctttgatcctataactttcggtcatatagatataataaaaaaatcattaaaaattgtagataggttaatagtagcaacaactgataattcagaaaaagattattttttttctttagaagatagattagaaattttgaacaaatcactattcaatgatttgagacttagcaaaaagaaaattgagattgtttcatttaacagtttaacagttaatttgtgtagaaaacacaatgcatatataattataagaggccttagagctgtgtctgattttgaatatgaatttcaacttgcaggaatgaacaaaaaacttgataaaaacatcgaaactatttttctaatgtcagatatagaaaatgaaattatttcttctaaatttataaaggaaattggtaaacttaaaggaagtttaaaaaagtttgttacaaaatctgttataaaggccattaaatcaaaaattgaatgaa

SEQ ID NO: 254012 - DNA, 313 bp, Unknown
  Bacterial polypeptide expressing nucleotide sequence isolated from the Sargasso Sea
tatgaaaaatatagcaatctacccaggtacttttgatccaattacttatggtcatattgacgttataaaaaaaggaataaacatatttgataaattaattgttgcagtttctgaaaatggtgaaaagaaccatttattttcaacagaggagagaataactttagttaaaaagtctttaaatgatgtcaaaattgatccgaaaaaaatccaagtaataaaatttgcatccttaacaactactttatgtaaaaaatatcagtctaaaattattttaagaggactaagagctgtttcagattttgagtatgagttt

SEQ ID NO: 254013 - DNA, 312 bp, Unknown
  Bacterial polypeptide expressing nucleotide sequence isolated from the Sargasso Sea
gatgaaaaatatagctatatatccagggacatttgatccaataacaaacggccacatagatgttataaaaaaagctctaaaattggcagataaaataattgttggtatatctgatggaaatgaaaaaaattttttatttcctatagatgaaagactgaatattgttacaaaagctttatatggagacttaaaattcccaaaaaataaaattcaagtaattaaattcaattctttaacaaccgaattgtgtagaaaatataaatcaaatctaattcttagaggtttgagagctgtgtcagattttgaatatga

SEQ ID NO: 254014 - DNA, 379 bp, Unknown
  Bacterial polypeptide expressing nucleotide sequence isolated from the Sargasso Sea
aatgaataaaacagctatctacccaggaacttttgatccaatcacttttggacacatagatgttataaaaaaatcattaaaattatttaacaaaataatagtaggagtttctgacgaaagtaataaaaattatctctttagttcagaagaaagaatagaaatagtgaataaagcattatttaaagatctgaaattaaataaaaaaaaaattaaagtagtttcttttggctcattaaccactgatttatgtaaaaaatataaatcaaatattattctaagaggtttgagagctgtatctgactttgaatatgaatttcaattagctggaatgaatagaaagttaaaccaaaatatagaaacaatttttttaatgtcggat

SEQ ID NO: 254015 - DNA, 493 bp, Unknown
  Bacterial polypeptide expressing nucleotide sequence isolated from the Sargasso Sea
tatgaaaaatattggaatttatccaggaacatttgatccaatcacacttggtcatatagatgttattaaaagagcgctcaaaattgtgaaaaaacttgtaattgcagtttcaaatgacttttcaaaggattatttattttcttcagaggaaagagtaattattgttaaaaaagccatctatgatgatctaaaaatatccaaaaaaagcgttgatgtaatgtcatttaatagtttaacaacgtctctttgcaaaaaattaaatgcaaagattatatttagagggcttagggctgtttctgattttgaatatgaatttcaattagccggcatgaacagacaattaaataataaagttgaaaccgtatttttaatgtcagacgttgaaaaacaagttatatcgtcaaagtttgtaaaagaaattgcaattttgggaggtaatatagataattttgtaaccaaaagtacaaaaaagacaataaaaatgaaaatatga

SEQ ID NO: 254016 - DNA, 496 bp, Unknown
  Bacterial polypeptide expressing nucleotide sequence isolated from the Sargasso Sea
atgccaaaaactgcaatttatccaggtacttttgatccaataacttttggacatatagatgttataaagaaatctttaaagattgttgataaactgattgttgcaacaactgacaatatagaaaaagaatatttattttctttagatgaaagaattgaaatattaaataaatctttgtttaatgatttaagattaagtaaaaataaaattaaaattatatcatttgatgatttgactgttaaaatctgcaaaaagtataaagcatcaattattataagaggtttaagagctgtatcagattttgaatatgagtttcagttggccggaatgaataaaaaacttgataaaagtgttgaaactatttttttaatgtctgatattgaaaatgaaataatttcttctaagtttataaaagaaatcgggaaactgaagggtgatttaaaaaaatttgcaacaaaatccgtaataaaagctattaaatctaaattctcgtgaa

SEQ ID NO: 254017 - DNA, 496 bp, Unknown
  Bacterial polypeptide expressing nucleotide sequence isolated from the Sargasso Sea
aatgagtaaaattgcaatttatcctggaacatttgatccaattacttttggacatatagatgtaataaaaaaatcattaaaattgtttgataaaatagtagtgggtgtttcagatgaaagtaacaaaaattatttatttagttctgaggaaagaatagaaatagtaaataaagccttatttaaagatctaaaattaaatagaaaaaaaataaaagtagtatcatttggctctttaaccactgatttatgtaaaaaatataaatcaaacattattctaagaggattaagagctgtatctgattttgaatatgaatttcagttagctggtatgaatagaaaattgaaccaaaacatagaaacaatttttttaatgtctgatgtagaaaatcaaataatctcatcaagatttgttaaggagatagttaaattaaaaggtgatataaaaaaatttactacaaaaagtacaattaaatctttaaaagagaaatatgaataa

SEQ ID NO: 254018 - DNA, 258 bp, Unknown
  Bacterial polypeptide expressing nucleotide sequence isolated from the Sargasso Sea
ctattgaactttgtaaaaaatataaagcttctgcaattattagagggttacgagctgtatcagattttgaatatgaatttcaattagcaggcatgaacaaaaaactaaacccgaaaattgaaactatgtttttaatgtctgatgttgaaaatcaaattatctcatcaaaatttgtaaaggaaatagcaaatttaggaggaaatattgacagatttgttacaaaatatgctgttaaaatgttaaaaaataaattttgat

SEQ ID NO: 254019 - DNA, 259 bp, Unknown
  Bacterial polypeptide expressing nucleotide sequence isolated from the Sargasso Sea
tactattgatttatgtaaaaaatataaagcgaatacaataataagaggtttaagagcagtttctgattttgaatatgaatttcaattggcaggtatgaataaaaaactaaactcaaaaattgatacaatgtttttaatgtcggatattgaaaatcaaattatttcatctaaatttgttaaagaaattgctagtttaggtggtgatatcgatagatttgtcactaaatcgactgcaaaattactaaaaaaaaatttttaa

SEQ ID NO: 254020 - DNA, 496 bp, Unknown
  Bacterial polypeptide expressing nucleotide sequence isolated from the Sargasso Sea
aatgaaaaatatagctatatatcctggaacatttgatcctataacaaatggccatattgatgttattaaaaaagctctaaaattggcagataaaatcattgttggtatatctgatggtagtgaaaagaattttttatttccaatagatgagagattaaaaattgtttccagagctttatatgcagacttgaaactttcaaaaaacaaaattcaggtgattaaatttaattctttaacgacagaattatgtaaaaaatataagtcaaacctaatccttagaggtttaagggctgtttcagattttgaatatgagtttcaactagctggtatgaatagaaaattaaataataaagtagaaacaatttttctcatgtcagacgttgaaaatcaaataatttcatcaagattcgtcaaagaaatagctttacataagggtgatttaaggaaatttacaaccaaaagtaccataaagtcattaaaagagatttatgcttaa

SEQ ID NO: 254021 - DNA, 361 bp, Unknown
  Bacterial polypeptide expressing nucleotide sequence isolated from the Sargasso Sea
aatggctaagaaaataggtatttatccaggtacatttgacccattaacatttggtcacatagatattattaaaagatcattaatgatagttgataaattaattattggggtagctaataatgttaataagatccctatgttatcaattaatgatagaaaaaaaataataaaaaaagatgtaattaaatatattgataagaatgataaaattattatcaaagatataaaaggtctgcttacaaattttgcaaaaacaaataaagcaacatgcatcattagaggtttgagagcagtttcagactttgagtatgaatttcagatgactggtatgaattataaattaaaccctaatatagaaact

SEQ ID NO: 254022 - DNA, 484 bp, Unknown
  Bacterial polypeptide expressing nucleotide sequence isolated from the Sargasso Sea
aatgaaagttgctatatatccaggttcatttgatccaataacttttggtcatatggatattattgatagagcatgtggtcttttcgataaaatcataattgcaatagcaaaaagtgagacaaaagacccattattttcacttgaagataggctcaagcttgcaaagacaatatataaaaataactctcaagttgaagtaataggcttcccgagacaactaactgttgatgttgcaaaagagcataatgcatgtgcaattataagaggtcttcgagctgtttctgattttgaatatgagttccaacttgcaacaatgaatagatctttggcaccagatattgaaagtatattcttaactccgaaagaaagtttaatttatgtttcttctagtttgataaaagaaatctgtgatttaaaaggggatatatcaaaatttgttgatccaattgttcagcaagctttaaaagcaaaattagactcttaa

SEQ ID NO: 254023 - DNA, 484 bp, Unknown
  Bacterial polypeptide expressing nucleotide sequence isolated from the Sargasso Sea
tatgaaagtagcaatctaccctggttcatttgatccaattactgttggacatatggatattgttgaaagagcaactgtgctttttgataaggtcattatcagtgttgctgaaacagatatgaaaaatccactcttttcttctgaagaaagattagacttagtgagctcgatctatgctgataatgaaaagattgaggttgttgcatttaaaaagaaactcacagttgatcttgcaagagaaaataacgcatgtgccatcatcagaggtttgagagcagtatctgattttgagcatgagtttcaattagcgacaatgaatagagcacttgctccagatatagaaagcattttcttgactcccaaggacacacttatttatgtatcatcaagtctagttaaggaaattgctagcctaggtggagatatttcaaattttgttcatgaaaatgtagaaatggctcttaaagcgaaactaaatcattag

SEQ ID NO: 254024 - DNA, 478 bp, Unknown
  Bacterial polypeptide expressing nucleotide sequence isolated from the Sargasso Sea
tatggcaaaagctttatatccaggtacatttgatcccataacccttggtcatatagacataatagaaagagcgcttcatttatttgatgaagtaactattgccatagcgacaagcgagtcaaaaaaaccagtatttaccttagaagaaagaatatcccacgttgaacaaatatttaaggggaataaaaaagtcaaggcaattggctttacaggcttagtagtagatttagctaaggaagagaattctaatatccttatccgtggattaagggctgtatctgattttgaatatgaatttcagttagcaaatatgaatagagcaatgtctcctgatttagaaagcgtttttttaacgcctaaagccaagttttctttcttatcttcaactttagtgcgtgaaatagcttcgatgggcggagaaatttcctcttttgtggatccaattatagaaaaggctcttaaagaacgctttaaataa

SEQ ID NO: 254025 - DNA, 487 bp, Unknown
  Bacterial polypeptide expressing nucleotide sequence isolated from the Sargasso Sea
atgagagtagctatttatccaggttcatttgatccaataacatatggacatatggatattattgaaagaggttgtaacttatttgataaaataattgttgctatagctaaaagcgatgcaaaaaaacccttatttactttagaggaaagaatagctctatcatcgagcatttttgaagataatgaaaaagttgaggtggttggttttccaaggcagctaacagttgatctagcgagagaacataatgcatctgcaataattagaggcttaagggcggtatcagatttcgaatacgaatttcaattagctaccatgaacagatctcttgcaccagatatagaaagcatttttttaactcctaaagaaagtctaatatatgtttcatccagccttattaaagaaatatctgatttaaaaggagatgtttctaaatttgttcatccaaatattgaaaaagctctaagagcaaaattagattctcattaag

SEQ ID NO: 254026 - DNA, 484 bp, Unknown
  Bacterial polypeptide expressing nucleotide sequence isolated from the Sargasso Sea
tatgaaagtcgcaatttatcctggatcttttgatccaataacatatgggcacatggatatcattgatagggcatgtggtctttttgacaaaattgtcatagctattgctaaaaatgaagcaaaaaatccactttttagccttgaagatagaatcaaactagctgattcgatttataaggataattctcaggtagaaattgttggatttccaagacaactcacagtggatattgctaaagaacaaaatgcctgtgcaattataagaggtctaagagctgtctccgattttgagtatgaatttcaactagctacaatgaatagatcacttgctccaaacattgaaagcattttcctcacccctaaagaaagtcttatatatgtatcttcaagcttgattaaagaaatatgtgatttaaaaggtgatattagtaagtttgttcatccttctgtggagaaggctttaaaagctaaactagcatcttaa

SEQ ID NO: 254027 - DNA, 484 bp, Unknown
  Bacterial polypeptide expressing nucleotide sequence isolated from the Sargasso Sea
atgaaagttgctatatatccaggttcatttgatccaataacgtttggtcatatggatatcatagatagagcgtcaggtttatttgataaaatcctcattgcaattgctaaaagcgaaacaaaaaatcctctattttcattagaagatagaataaaacttgctaatactatctatgaagataatgataaggttgatgttattggcttccctagacaattaactgttgatgtcgctaaagaaaacaatgcatgcgcaataataagaggtctcagggctgtttcagattttgagtacgaatttcaattagcaacaatgaatagatcactagcacctgatattgaaagtatatttttaacacctaaggaaagtttaatatatgtttcgtcaagccttattaaggaaatttgtgacctcaaaggagatatttctaaatttgttcatcctactgttgagcaagctctaaaagcaaaacttgattcttaat

SEQ ID NO: 254028 - DNA, 484 bp, Unknown
  Bacterial polypeptide expressing nucleotide sequence isolated from the Sargasso Sea
atgagagtagctatttatccaggatcatttgatccaattacttatggtcacatggatattattgatagggctagtggtctttttgataaaataattatcgctgtagcaaaaagtgaggcaaaaaatccacttttcactcttgaagatagaatgaaattagctaagaccatctatggagataatgataaagtagatattgttggctttcctagacaacttacagtcgacgttgcaaaagaacataatgcttgtgcaattataagaggattaagagcagtatctgattttgaatatgagtttcaattagcaaccatgaataggtcattagctcctgatatagagagcatatttttaacaccaaaagaaagtttgatatatgtatcgtcaagcttaattaaagaaatatgcgatttaaaaggtgatatttctaagtttgtccaccctacagttgagcaggcactaaaagcaaagcttggttcttaat

SEQ ID NO: 254029 - DNA, 475 bp, Unknown
  Bacterial polypeptide expressing nucleotide sequence isolated from the Sargasso Sea
atgaaaattctttatccaggtacatttgatcctttaacaaatgggcatcttgatttaatagaaagggctgaaaaaatatttggcaatctagtagttgctgttttagaaaatacctctaaaacaccaacatttaatcttgaaagaagaataatacaaataaacaatactctttctcatttacctaatattgaagttatttcttattctggtcttactgttgattgtgccaatgatcttaaagctaatcttattcttagaggcttaagagcaatgagtgattttgagtatgaacttcagattgctcatacaaataaatctcttaataatgatattgaaactatatttctatcgacaaatacaaactatagttttcttagtagttctttagtaaaagaagttgcaaaatttggtggtgaaattaatcacatggtacccccctctgttgagagagatttaaaagaatattttaaataat

SEQ ID NO: 254030 - DNA, 484 bp, Unknown
  Bacterial polypeptide expressing nucleotide sequence isolated from the Sargasso Sea
tatgagagttgcaatataccctggttcgtttgatccaattacatatggacacatggacataattgatcgtgcttctggtttattcgacaaaattattgtcgctgtagcaaaaagtgaggctaagaatactttgtttagtcttgaagatagagtaaagctcgcaacaacaatttataaagataatcctaaagttgaaatagttgattttccaagacaactaactgttgatgttgctaaggatcacaatgcttgtgcaattgttaggggtttgagagctgtatccgactttgaatatgaattccaattagcaacaatgaatagatctcttgctccagatattgaaagtatatttttaactccaaaagaaagtctcatatatgtttcatcaagtttgataaaagagatttgtgatttaaaaggagatatatctaaatttgttcacccagcagttgaacaagctcttaaggccaagctaggttcctaa

SEQ ID NO: 254031 - DNA, 481 bp, Unknown
  Bacterial polypeptide expressing nucleotide sequence isolated from the Sargasso Sea
catgagcaacattgctgtatatcctggtacttttgatcctattactaatgggcatactgatttggtaaataggggttgtagattatttgataaaataatcatattagtagcagaaaagactcaaaaaaacacgttattcactatcgatgagagaattaagtttgtagaatcagtttttagtgataataaaaaaattattgtagaacctttaaatgagttagtagtcgattatgctactaaaaaatctgctaagattattctcaggggcttaagagctatctctgattttgagtatgaagtacaacttgcgagcatgaacagatcgatgcagccagatattgaaagcgtatttatgagtccctctgatgaatatagtttcttgtcctcgagtattgttaaagatattgctcgtcacggcggtgaccttagcaaatttgtccatccaagtgttctcagcgagcttgtaaaaaaatttagttag

SEQ ID NO: 254032 - DNA, 484 bp, Unknown
  Bacterial polypeptide expressing nucleotide sequence isolated from the Sargasso Sea
atgaaagtagcaatctaccctggttcattcgacccaattacggttggacatatggatattgttgaaagagcaactgtgctttttgataaggttattattagcgttgctgaaacggatatgaaaaatccacttttttcttctgaagaaagactagacttagtgagctcaatctatgccaataatgaaaagattgaggttgttgcatttaaaaagaaacttacagttgatcttgcaagggaaaataatgcatgtgccattatcagaggtttgagagcagtatctgattttgaacatgagtttcaactagcgaccatgaatagggcacttgctccagatatagaaagcattttcttgactcctaaggatacactcatttatgtatcatcaagtctagtcaaagaaattgctagcttaggtggagatatttcaaattttgttcatgaaaatgtagaaatggctcttaaagcgaaactaaatcattagt

SEQ ID NO: 254033 - DNA, 523 bp, Unknown
  Bacterial polypeptide expressing nucleotide sequence isolated from the Sargasso Sea
tttgcgtgatgacaggaggagcgacatggtagtcgccgtgtatcccggtacgttcgatccgctgacgcgcgggcacgaagacctcgtgcggcgtgcgtcgagcatttttgatacgctggtggtcggtgttgccgacagccgcgcgaaaaagccgttcttctccctcgaagaacgtctgacgattgcgaacgaggtgctcggccattatccgaacgtgaaggtgatgagtttcaccggcctcctgaaggatttcgtccgcaccaacaatgcgcgcgtgatcgtgcgcggcctgcgcgccgtgtccgatttcgaatatgagttccagatggcggggatgaaccgctacctgctgcccgacgtcgagacgatgttcatgacgccgtccgatcagtaccagttcatctcggggacgatcgtgcgcgaaatcgcgcagttgggcggcgatgtcagcaagttcgtgtttccgtccgtcgagaagtggctgaccgagaaagtcgctgcgatcggaggccctgccgcgtaa

SEQ ID NO: 254034 - DNA, 481 bp, Unknown
  Bacterial polypeptide expressing nucleotide sequence isolated from the Sargasso Sea
atggcaaaagctttatatcccggtacgttcgatccaataacacttggtcatatagacatcattgatagggcattacatctatttgatgaggttacagtggcaattgcaactagtgctgcaaaaaaacccatttttactctcgaagagagaattgaacacatcgataagatatttgaaggaaataaaaaggtaaaggcaataggatttactggccttgtggtagatcttgcaaaagaacaggaatctaacattcttattagaggtctaagggccgtatctgatttcgagtacgaatttcaactagcaaatatgaatagggcaatgtctccagatttagagagcgtattcttgactcccaaagcaaaattttcatttctttcttctaccttggtgagagaaatagcctccatgggtggaaaaattgactcattcgttgaccctatcgtaatgagagctttacaagaaaagtttaaaaagtaga

SEQ ID NO: 254035 - DNA, 484 bp, Unknown
  Bacterial polypeptide expressing nucleotide sequence isolated from the Sargasso Sea
atgaaagtagcaatctatccaggttcgttcgacccaataacatatggccatatggatattattgatagggcaactaacctttttgataaagttattattgcaattgcaaaaaatgaagcaaaaaaccatttatttacacttgaagataggattaagctagccaaaaatatatataaagataactcaaatgttgaagttctaggctttcccaggcaacttacagtcgatgtagcaaaggaaaataatgcatgtgcaattattagaggcttaagagccgtttctgattttgagtatgaatttcagcttgcgactatgaatagatctttggcgcctgatgtagaaagtatttttttaactccaaaagaaagtttaatttatgtgtcatcaagccttattaaagaaatttgtgatttaaaaggggacgtgtctaaatttgttcatccatctgttgaacaagctctgaaagcaaaactaggctcttaat

SEQ ID NO: 254036 - DNA, 484 bp, Unknown
  Bacterial polypeptide expressing nucleotide sequence isolated from the Sargasso Sea
tatgaaagtagcaatttacccaggttcgtttgatccaataacatttggacatatggatatcatagatagggcatcaggtttatttgataaaattatcattgcaattgctaaaagcgaaacaaaaaatccattattttcattagaagataggataaaacttgctaatactatctataaagataacgataaggttgatgtgattggatttccaagacaattaactgttgatgttgctaaagaacatgatgcatgcgcaataataagaggtctaagggctgtttcagattttgagtacgaatttcaattagcaacaatgaatcggtcattagctcctgatattgaaagtatatttttaacaccaaaagagagtttaatatatgtttcatcaagcttaataaaagaaatttgtgacctcaaaggagatatttctaaatttgttcatcctagtgttgagcaagctttaaaagcaaaacttgattcctag

SEQ ID NO: 254037 - DNA, 496 bp, Unknown
  Bacterial polypeptide expressing nucleotide sequence isolated from the Sargasso Sea
atgaataaaatagcaatttatcccggaacttttgatccaattacatttggtcatatcgatgtaataaaaaagtcattaaaattattcgataaaattgtagtgggagtttcagatgaaagtaataaaaattatctatttagttcagaagaaagaattgagatagttaataaggctttatttaaggatttaaaattaaataaaaaaaaaataaaagtagtttcctttggttcattaactactgatttatgtaaaaaatataaatctaatataattttaagaggattaagagctgtatctgactttgaatatgagtttcaattagctggcatgaatagaaagctaaaccagaatatagaaacgatttttttaatgtccgatgtggaaaatcaaataatttcatcaagattagttaaagatattgttaaattaaaaggtgatataaaaaaatttactacaaaaagtactataaaatcattaaaaaataaatatgaataaa

SEQ ID NO: 254038 - DNA, 502 bp, Unknown
  Bacterial polypeptide expressing nucleotide sequence isolated from the Sargasso Sea
aatgagaattggattatacccaggaacatttgacccacttacattggggcatgtagatatcattagaagagcatcatatcttgtggataaattagtaattggtgttgctgtcaataattctaaatcaccaatgttcagtttgcaagaaagagtaaatatgattaatgaggaaattgaatcaatagaaaacgaattcaaaattcaaattattactcatccttttgaaaacttactaattgaatgtgcaaaagatgttaatgctaatataattattagaggtttacgagcagtttcagattttgaatttgaatttcagatggttggaatgaatagggtcctctcaaatgaaatagaaactgtttttttaatggctgacaattcttatcaatcgatagcatcaaaacttgttaaagaaattgcaagattgggtggtaatacaaagaaatttgtaccaaactcggtctataaaaggttaatcaatattaaatcaaaaaaaaaataa

SEQ ID NO: 254039 - DNA, 481 bp, Unknown
  Bacterial polypeptide expressing nucleotide sequence isolated from the Sargasso Sea
catgaaaaatattatatatccaggtacttttgacccaattactaatggtcatttagatattgctgaaagagcatctactctttttgatgaagtcatgattgtcatcgctaataatcctaggaaagaatcgcttttcaccattgatgaaagaattgatttaattaagaaatcaacttcgcatttaaagaatgtattagtacatacaactgaatcgttaattgtgaattttgccagaaagaataaatcagttgcattaattcgaggtcttcgatccataagtgattttgaatatgaatttcaaatggcactaatgaatcgatcattagcgcctgaaataagcacgatatttatgatgcctgatgaaaaatacatgcatttaaattctactgtagttaaagaaattgcggctttagaaggagatatatcttcatatgtacctgaagttgtgaatacagctttaaaatctaaattaactaaataa

SEQ ID NO: 254040 - DNA, 463 bp, Unknown
  Bacterial polypeptide expressing nucleotide sequence isolated from the Sargasso Sea
ttgaccccaatgactaatggccatatggatattattaaaagatcacttaaaatagttgataatttagttatagctgtagcaaaaaatttaaataaaaactcattatttaatgtaagtgaaagaatagatattgttaaaaatgatatcagtttattaaatgaaataaattctaaaattaaagtaactgaattatcgggattattaacaacttttgctaaaaaccaaaatgctacatgtataattcgtggtttaagagctgtatcggattttgaatatgaatttcaaatgactggaatgaattatcaattaaatccagacattgagactatatttctcatgacttcagaaaaaaactcatttatttcttctaattttgtaaaagaagtccataaacttggtggtgatgtttctagtttcgtatctagtaatactttaaacatacttaacaaaaaaaactcttagt

SEQ ID NO: 254041 - DNA, 499 bp, Unknown
  Bacterial polypeptide expressing nucleotide sequence isolated from the Sargasso Sea
tatgtctaaaattggagtatatcctggcacttttgatcccatgactaatggtcatttaaacataattaaaagatcactaaaaattgttgatcaattaataataggtgtagcagataatcaaaataaaaaacccttgttaagtataattgaaagaaaagatatcattgcaaatgatttaaaatcagaaaatatggataataacaaaatttctattttctctgttaaaggacttttaactgaatttgcaaaaactcataacgcaaattgtattatacgaggtttaagagctgtatctgactttgaataccaattccatatgacaggaatgaattatcaacttagtccagatattgagacagtttttttaatgtcatcagataataattcttttatctcttctaatttagttaaagaagttcataaattaggtggagatgtatctaaatttgtttcaaaaaatactatcaacattttaaatcgtaaaaactctatatcatag

SEQ ID NO: 254042 - DNA, 423 bp, Unknown
  Bacterial polypeptide expressing nucleotide sequence isolated from the Sargasso Sea
gatcattaagaatagtagataatttagtaatagctgtcgctaataatattaacaaagtttcattatttagtgttcaagaaagaattaatattatcaaaaatgatatcagttctgtaaatgagttaaattcaaaaattaatgttactgaattatcaggattacttacgacttttgctaaagatcaaaatgccacatgtataatacgtggtttaagagcagtatctgattttgagtatgaattccaaatgacaggcatgaactatcaacttaaccccaatatcgagacaatatttcttatgacttcagaaaaaaactcattcatttcatctaattttgttaaagaagtccacaaacttggcggtgatgtttcaaattttgtttctaaaaatactttagagcagcttaataaaaaaaactcttagt

SEQ ID NO: 254043 - DNA, 496 bp, Unknown
  Bacterial polypeptide expressing nucleotide sequence isolated from the Sargasso Sea
atgaaaaatatagccatatatccaggaacatttgatccaataacatttggtcatattgatgtaataaagaaagccttgaaatttgtagataatgtaattgtaggtatttctaatggaaaccaaaagaattttctctttcctattgatgaaagaataaatattgtttcaaaagctttgtttgaagatttaaagttttcaaaaaaaaaaattaaagttataacttttaactctttaacaacagatttgtgcaataaatatagatctaatcttatactaagaggtctaagggcagtctctgattttgaatacgagtttcaattagctggtatgaatagaaaattaaatgataaagtagaaactatatttcttatgtcagacgttgaaaatcaaattatatcatccagatttgttaaagaaattgcccaacatcatggtaatttaaagaaatttacaacaaaaagtactattaaatctttaaaagaaaagtatgaataaa

SEQ ID NO: 254044 - DNA, 426 bp, Unknown
  Bacterial polypeptide expressing nucleotide sequence isolated from the Sargasso Sea
aatgagcaaaatagcaatatacccaggcacatttgatccaatcacctatggtcacatagatgttataaaaaaagctttaaaattatttgataagattgttgttggtgtatctgatgttagcagtaaaaattatctttttagttctgaggagagaattgagatactaaacaaagctctatttaaggatttaaaacttaataaaaaaaaaattatagttgtatcttttagctcactaaccaccgatttgtgcaaaaaatataaatcaaatattatcttaaggggattaagagctgtgtcggattttgagtacgaattccaattagctggaatgaatagaaaattaaatcagaatatcgaaactatttttttaatgtcagatgttgaaagtcaaataatctcttctagatttgttaaagagattgtaaa

SEQ ID NO: 254045 - DNA, 487 bp, Unknown
  Bacterial polypeptide expressing nucleotide sequence isolated from the Sargasso Sea
aatgtctaaaaccgctatttatcctggaacgtttgatccaattacgtttggtcacatagatgtaattaaaaaatctttaaagttatttgataaagttgtagtagctgtttcaaatggtgaaaataaggattatttatttgatgtagaagaaagaattgaaattgtaaaaaatgctctttttaaagatttaaaaatgaataaaaaaaagataattattatttccttcaagtctttaacaactacactttgtaaaaaatataaatctaatattattttaaggggattgagagcagtctcagattttgaatatgaatttcaactcgctggtatgaatagaaagttaaatgacaatatagaaacaatatttttaatgtcagatgttgaaaatcagattatatcttcaaaatttgtaaaagaaattatcaaacttaaaggggatataaaaaaatttactaccaaaaccacaattaaagccttaaaaaataaa

SEQ ID NO: 254046 - DNA, 493 bp, Unknown
  Bacterial polypeptide expressing nucleotide sequence isolated from the Sargasso Sea
atgaacgttactgcaatttaccccggcacttttgatccacttactaatgggcatacagacctaatacaacgtgctgccaaaatgtttgacactgttttggttgctgttgctaataacccaagtaaacagccatgttttaaccttgaagaacgtgtggcgctagcaaacacaatattaagccacttagataatgtaaaggtcattggtttttctggattactggccgatttagcacgcgatcacaatgcacacgtacttattcgcggtataagagcggtgtctgactttgattatgaatttcaattagcaaacatgaatcgccgcctaaaccccgaccttgaaagtgtatttttaacaccggctgaaaagaattcttttatttcatctactttagttaaagaagtggcgcgtcatcatggcgatgtaagcgaatttgtagaccctattattgtaaaagcactcaaagaaaaagtaggctgcaatactaattaag

SEQ ID NO: 254047 - DNA, 496 bp, Unknown
  Bacterial polypeptide expressing nucleotide sequence isolated from the Sargasso Sea
aatgagtaaaatagcaatttatcccggaacatttgatccaattacttttggacatatagatgtaataaaaaaatcattaaaattgtttgataagatagtagtaggtgtttcagacgaaagtaacaaagattatttatttagttctgatgaaagaatagaaatagtaaataaagctttatttaaagatctaaagttaaatagaaaaaaaataaaagttgtttcttttggatctttaactactgatttatgtaaaaaatataaatcaaacataattttaagaggattaagagctgtatctgattttgaatatgaatttcagttagctggtatgaatagaaaattgaaccaaaatatagaaacaatttttttaatgtctgatgtagaaaatcaaatcatttcatcgagatttgttaaagagattgttaaattaaaaggtgatataaaaaaatttactacaaaaagcacaattaaatcattaaaagataaatatgaataa

SEQ ID NO: 254048 - DNA, 496 bp, Unknown
  Bacterial polypeptide expressing nucleotide sequence isolated from the Sargasso Sea
atgaaaaatatagctatatatccgggaacttttgatccaattacttttggccatatagatgtcattaagaaatcacttaagatagtagataaagtaattgtaggtatttcagatggaaatcagaaaaacttcctattttcattagatgaaagaatagaaattgttaaaagagctctttataaagatctgaaatttaaaaagaataaggttgatgttataaaatttaatactttgacaacagacctttgcaaaaaatataaatcaaatatcattttaagaggcctaagggctgtttccgattttgagtatgaatttcaattagctggaatgaataggaaacttaataatcaagttgagacaatttttttaatgtcagatgttgaaaatcaaataatatcatctagatttgttaaagaaatcgctcaacacaatggtgatttaaaaaaatttacaactaaaagtacaattaaatcattaaaagaggtttatgaataaa

SEQ ID NO: 254049 - DNA, 502 bp, Unknown
  Bacterial polypeptide expressing nucleotide sequence isolated from the Sargasso Sea
catgcgcgcgctgtatcccggcagctttgacccggtgacctttggtcacctggacctgatccaacgtgcatcgcagctctttgatgaggtgatcgttgcggtgctgcgcaaccccaacaagcagccgagcttcagcctcgaagaacgccttgagcagctcagcagcgtgaccagccatctgccccaagtgcgggtcacgagctttgagggcttaaccgtgcatttcgccctggagcaggacgcccgggtgattttgcggggtctgcgcgccttgagtgatttcgagtttgaactgcagttggcccacaccaacgccagcctctcggatcaagtggacacactttttatggcgacggccgtgccccatagctttttgagcagcagcgtggtgaaagaagtggcgcgctttggtggggatgttcaacacctggtccctgagacggtggcgattgatctccgcaggttgtttaatcagcgggttgatgtcagcggtgatcgatga

SEQ ID NO: 254050 - DNA, 496 bp, Unknown
  Bacterial polypeptide expressing nucleotide sequence isolated from the Sargasso Sea
atgaaaaaaactggagtttaccctggtacctttgatccaattacttttggtcatatagatgttattcaaaaatctttaaaaattgtagatcaggttatcgttgcaatctctgatggagataataaaaaatatttatttacaatagaagaaagaattaaaatagttaataaagcattgttttcagatttaaaatttaagaaaaataaagttaaagttatttcttttaactcattaaccacagatctctgtaaaaaatataaatcgaatataatcttaagtggtctgagagcagtctcagactttgaatatgaatttcaattagctggaatgaatagaaaattaaataaaaatatagaaacgatttttttaatgtctgatgttcaaaatcaaataatttcttcaagattaataaaagaaattatagagttaaaaggggatataaaaaaatttactaccaaaagtacaattaattcattaaaaaaaaaatatgaataaa

SEQ ID NO: 254051 - DNA, 355 bp, Unknown
  Bacterial polypeptide expressing nucleotide sequence isolated from the Sargasso Sea
atgaaagttgctatatatccaggttcttttgatccaataacatttggacatatggatattatagatagggcatcaggtttatttgataaaattatcattgcaattgcaaaaagcgaaacaaaaaatccattattttcattagaagatagaataaaacttgctaatactatctataaagataacgataaggttgatgtgattggatttccaagacaattaactgttgatgttgctaaagaacatgatgcatgcgcaataataagaggtctaagagctgtttcagattttgagtacgaatttcaattagcaacaatgaatcggtcattagctcctgatattgaaagtatatttttaa

SEQ ID NO: 254052 - DNA, 484 bp, Unknown
  Bacterial polypeptide expressing nucleotide sequence isolated from the Sargasso Sea
tatgaaagtagctatatatccaggctcatttgatccgataacctttgggcatatggatattattgatagagcttgcggcctttttgataagatcataattgctattgcaaaaaatgaagctaaaaacccattatttaacttagaagacagaataaaacttgcaaaagaaatttataaagataattcacaagtagaagtggtgggattcccaaggcaattgaccgttgatcttgctaaagagcaaaatgcatgtgcaatcataagaggattaagggctgtttctgactttgagtatgaatttcagctagctactatgaatagatcactagctcctgatatagaaagtatattcctcacacctaaagaaagtttaatttatgtttcttcaagtttgataaaagagatatgtgacttaaaaggagatatttcaaaatttgtgcatcctagtgttgagcaagctttaaaagctaaactaagttcttaa

SEQ ID NO: 254053 - DNA, 475 bp, Unknown
  Bacterial polypeptide expressing nucleotide sequence isolated from the Sargasso Sea
catgaaaattctttatccaggtacatttgatcctttaacaaacgggcatcttgatttaatagaaagggctgaaaaaatatttggcaatctagtagttgctgttttagaaaatacttctaaaacaccaacatttaatcttgaaagaagaataatacaaataaaaaattctctttctcatttacctaatattgaagttatttcttattctggtctaactgttgattgtgcaaatgatctaaaagctaatcttattcttagaggcttaagagcaatgagtgattttgagtatgaacttcagattgctcatacaaataaatctcttaataatgatattgaaactatatttttatcgacaaatacaaattatagttttcttagtagttctttagtaaaagaagttgcaaaatttggtggtgaaattaatcacatggtacccccctctgttgagagggatttaaaagaatattttaaataa

SEQ ID NO: 254054 - DNA, 496 bp, Unknown
  Bacterial polypeptide expressing nucleotide sequence isolated from the Sargasso Sea
aatgaaaaaaattgcaatctatcctggtacgtttgatccaattacctacggtcatgttgatgtaataaataaatctttaaaactggtagataaaattttcgttgcaatttctgagagcaatgaaaagaaatgtcttttttcagttgaggaaagaatggcaatagttaaagaagctttatataaagatttaaagtttaaaaaaaataaaattaacattatatcttttaataacttaacaactgatatctgcaaaaaatttaagtctaatattattttaagaggattaagagctgtttcagattttgaatatgaatttcagctagctggtatgaatagaaaacttaataataatattgaaactatttttttaatgtcagatgttaaaaatcaaattatttcatcgagacttattaaagaaatagctgaattaaaaggtaacataaatagttttacatcgaaaagtgtaattaaagcattaaaaaaaaaatatgaataa

SEQ ID NO: 254055 - DNA, 466 bp, Unknown
  Bacterial polypeptide expressing nucleotide sequence isolated from the Sargasso Sea
ccaggctcatttgatccattcacaaacggacataatgatattcttgtaagatcgttaaaaatctttgataaggtcataattgctgtagtgaagaactcagcaaaaaattacttattttcgttagaagatagagttcaaatgatagatgatttatttaaagatcatgaaaatattagttgtgtaggacttgactctaagcttacagtagatttggcgtcagaattaaatgctcaagctataattagaggactgagagcagtgtcagactttgaatatgagtttcaaatagcaagtattaacagatcacaaaatcccgaaatagaaagtgtgttcttcacgcccgatgaaaaactaacctttatttcctctagcatggttaaagagttagcaagttatggtggcgatatttcagaatttgtacatgccgacataaaaaatgcattaataagaaaatttaaaaactaat

SEQ ID NO: 254056 - DNA, 475 bp, Unknown
  Bacterial polypeptide expressing nucleotide sequence isolated from the Sargasso Sea
atgaaaattctttatcctggtacattcgatcctttaacaaacgggcatattgatttaatagaaagagctgaaaaaatatttggcaatctagtagttgctgttttagaaaatacttctaaaacaccaacatttaatcttgaaagaagaataatacaaataaaaaattctctttctcatttacctaatattgaagttatttcttattctggtctaactgtagattgtgcaaatgatctaaaagctaatcttattcttagaggcttaagagcaatgagtgattttgagtatgaacttcagattgctcatacaaataaatctcttaataatgatattgaaactatatttttatcgacaaatacaaattatagttttctcagtagttctttagtaaaagaagttgcaaaatttggtggtgaaattaatcacatggtacccccctctgttgagagggatttaaaagaatattttaaataat

SEQ ID NO: 254057 - DNA, 496 bp, Unknown
  Bacterial polypeptide expressing nucleotide sequence isolated from the Sargasso Sea
atgaataaagttgcaatatacccaggtacttttgatcctattacttacggacatatagatgttattaaaaaagcattaaaaatttttgataaaataattgtagctgtatctgaggtaagcgataaaaattatttatttagccttgatgaaagaataagtattgttaacaaggctttattcagtgatcttaaacttaataaaaaaaaaatattagttgtatcatttggatctttaacaacagatttatgtaaaaaatataaatcaactataattttaagaggattaagagcagtatctgatttcgaatatgaatttcaattagctggtatgaatagaaaattaaatagcaatatagaaacaatatttttaatgtcagatgtagaaaatcaaataatttcttcaaagtttgtaaaagaaattgtcaaattaaaaggagatataaaaaagtttactactaaaagtactattaaatctttaaaagaaaaatatgaataaa

SEQ ID NO: 254058 - DNA, 496 bp, Unknown
  Bacterial polypeptide expressing nucleotide sequence isolated from the Sargasso Sea
aatgtctaaaatagcaatttatcctggaacatttgatccaataacttatggtcatattgatgtaattaaaaaatctttaaaattatttaaaaaaattgttgttgcagtttctaatgttgaaaataaagattatttattttcttctgatgaaagaattgatattgtaaaaaaagcattattttcagatttaaaattagataaaaaaaaaattatagttatttcttttagttctttaacaactgatttgtgtaaaaaatataaatcaaatataattttaagaggactacgtgcagtatctgattttgaatatgaatttcaattagctggtatgaatagaaaacttaataacaacatagaaacactatttttaatgtcagatgtagaaaatcaaattatttcatctaaatttgttaaagaaattgtaaaattaaatggagatataagaaaatttactacaaaaagtacaataaaatctttaaaagaaaaatatgaataa

SEQ ID NO: 254059 - DNA, 481 bp, Unknown
  Bacterial polypeptide expressing nucleotide sequence isolated from the Sargasso Sea
atgcagagagcagtttatccaggtacttttgatcctatgactatgggtcacgttgacttagttaaaagagcaagcaagttatttgatttagtaataatcgcaattgcttccagcgattcgaagaaacctatgttttctcttgaggaaaggatcgagataggaaataaaatatttgctgacgatcctaaggttgaagtggttggtttttctggactattagtcaattttgctaaagataacgatgcaaatattttgatcagaggtttaagggtagtggcagactttgaatacgaatttcaattagccaacatgaatagggcaatgagtcctgatattgagagcgtattccttacccccaaagaagaatactcttatatctcatcaagtttagtaaaagaaattgctatgatgggcggagatgtaacaaggtttgtcgacccagtgaccttagaagctcttaatcagaagatcaaaaattagt

SEQ ID NO: 254060 - DNA, 496 bp, Unknown
  Bacterial polypeptide expressing nucleotide sequence isolated from the Sargasso Sea
atgaaaaataatgctatttatccaggtacgtttgatccaataacctatggtcatattgacgtaataaaaaaagctttaaaaattgttgatacggtcatagttgctatatcagatgttaataataaaaattatctttttgactcagaagagagaattgaaattgtaaaaaaagctttatatcaagatttaaaattgaataaaaaaagaattaaagtagttaaattcaatgctttaacaacaagcttgtgcagaaaatataaatcaaatattattcttagaggtttaagagctgtttcagatttcgaatacgaatttcagttagctggaatgaataggaaattaaacagcaacatagaaacaatttttttaatgtctaacgttgaaaatcaaattatatcgtcaaatttcgtaaaagaaattatatctttaggtggtgatgtaaaaaaatttactaccaaaagtacaataaaagctttaaagcttaagtatgaataaa

SEQ ID NO: 254061 - DNA, 484 bp, Unknown
  Bacterial polypeptide expressing nucleotide sequence isolated from the Sargasso Sea
atgaaagtcgcaatttatcctggatcttttgatccaataacatatggacacatggatatcattgatagggcgtgtggcctttttgataaaatagttatagcaattgctaaaaatgaagcaaaaaatccactatttagccttgaagataggatcaaattagctgattcgatttataaggataattctcaggtagaaattgttggatttccaagacaactcactgtagatattgcaaaagaacaaaatgcctgtgcaattataagaggtctaagagctgtatccgactttgagtatgaatttcaactagctactatgaatagatcacttgctccaaacattgaaagtattttccttactccaaaagaaagtctcatatatgtatcttcaagcttgattaaagagatatgtgatttaaaaggggatataagcaagtttgttcacccttctgtagagaaggctttaaaagctaagctagcatcttaaa

SEQ ID NO: 254062 - DNA, 484 bp, Unknown
  Bacterial polypeptide expressing nucleotide sequence isolated from the Sargasso Sea
tatgaaagtagcaatttaccctggttcattcgacccaattacggttggacacatggatattgttgaaagagcaactgtgctttttgataaggttatcattagcgttgctgaaacggatatgaaaaatccacttttttcttctgaagaaaggttagacttagtgagttcaatctatgccgataatgaaaagattgaggtcgttgcatttaaaaagaaacttacagttgatcttgcaagagagaataatgcatgtgccatcataagaggtttgagagcagtatctgattttgagcatgagtttcaattagcgaccatgaatagatcacttgctccagatatagaaagcattttcttaactcccaaggacacacttatttatgtatcatcaagtctagttaaagaaattgctagcttaggcggagatatttcaaaattcgttcatgaaaatgtggaaatggctcttaaagcgaaactaaatcattag

SEQ ID NO: 254063 - DNA, 493 bp, Unknown
  Bacterial polypeptide expressing nucleotide sequence isolated from the Sargasso Sea
atgaataaaattggaatatatccaggtacttttgaccctatgactgcaggtcatatggacataattaaaagatcattaagaatagtagataatttagtaatagcagttgctaacaatatgaataaagattcattgttcggtgttcaagaaagaattaatatcatcaaaagtgatattagtaatctaaatgaatttaattcaaaaattaatgttatggaattatcaggattacttacaacatttgctaaaaatcaaaatgccacatgtataatacgtggtttaagagcagtatcagattttgagtacgaatttcaaatgacaggtatgaactaccaacttaatcctgatattgagacaatatttcttatgacttctgaaaaaaactcattcatttcatcaaattttgttaaagaagtccacaaactaggtggagatgtttcaaaatttgtttctaaaaatactttagaacaacttaataaaaaaaactcttagt

SEQ ID NO: 254064 - DNA, 496 bp, Unknown
  Bacterial polypeptide expressing nucleotide sequence isolated from the Sargasso Sea
aatgaaaaatattgctatatatccaggtacatttgatccaataactaatggacatatagatgttataaaaaaagctttaaaacttgctgataaaatcattgttgggatttctgatggtaatgaaaagaatttcctttttccaattgatgaaagatataaaattgtttcaaaagccctatatcatgatttaaaattttcaaaaaataaaattaaagtaattaaatttaactctcttacaacagaactttgtagaaaatataaatcaaatctaattttaagggggttaagagcagtatcagattttgagtatgaatttcagttagctggaatgaacagaaaattaaataataaagtcgagactatttttcttatgtctgatgttgaaaatcaaattatttcatcaagatttgtaaaggaaatagctcttcacaaaggtgatttaaaaaaatttacaacaaagagtacaattaaatctttaaaagaagtttatgcttaa

SEQ ID NO: 254065 - DNA, 280 bp, Unknown
  Bacterial polypeptide expressing nucleotide sequence isolated from the Sargasso Sea
taaaagtatcgatggcttacttactgattttgcaaaattaaataatgttacttgtattataagaggattaagagctgtgtcagattttgattatgaatttcaaatgactggaatgaattatcaacttaatccagatttagaaactatatttttaatgtcttcagataaaaattcatttatttcttctaactttgttaaagaagttcataaattaggaggtgatgtttccaaatttgtttcaaaaaatacaattaaaattttagataataaaaacacgtaa

SEQ ID NO: 254066 - DNA, 496 bp, Unknown
  Bacterial polypeptide expressing nucleotide sequence isolated from the Sargasso Sea
aatgaaaaatattgcaatatatcctggtacttttgatcctataacctttggtcatatagatgtaattaaaaaagctttaaaatttgtagacaaggtggttgtagcaatttcagatggaaatcaaaaaaattttttatttccaatcgatgagagagtagatatcgttaagaaagctttgttctctgatcttaaatttaccaaaaaaaatattgatgttattacatttaattcattaacaacagatttatgcaaaaaatatagatcaaatattattttaagaggtcttagagctgtttctgattttgaatatgagtttcaattagctggaatgaatagaaaactttacaataaaatagagacaatatttctaatgtctgatgttgaaaatcaaattatttcctcaagatttgtaaaagaaattgctcaacataatggagatttaaaaaaatttacaactaagagtacaatcgaatctttaaaggagagatatgcttaa

SEQ ID NO: 254067 - DNA, 442 bp, Unknown
  Bacterial polypeptide expressing nucleotide sequence isolated from the Sargasso Sea
atgaaaaaagcgatttaccctggaacttttgatccaatcacatttggacacattgatcttattaaaaaatctttaaatatttttgaccaagtgattgttgcggtttccgatggcaatacaaaaaactatctttttaatgctgaagaaagagagcaacttattaaaaaagctctttttaacgatctgaaatttaatcgaaaaaaaataattgtgacaacatttaaaaccctaaccaccgatttttgtaaaaaaaagaaagcaaatgttattataagaggtctacgtgcaacctcagattttgaatatgaatttcaattggcagggatgaataaaaagttaaatagtttagttgaaactgtctttttaatgtcagatccagaaaaccaaattatttcatctaaatttgtcaaagaaattatcgaattaaatggagatatcaaaa

SEQ ID NO: 254068 - DNA, 450 bp, Unknown
  Bacterial polypeptide expressing nucleotide sequence isolated from the Sargasso Sea
aatgaaaaatatagctatctatccaggaacttttgatccaattacttttggccatatagatgtcattaaaaaatcacttaagatagtagataaagtaattgtaggtatttcagatggaaatcagaaaaacttcctattctcattagatgaaagaatagaaattgttaaaagagctctttatgtagatctgaaatttaaaaagaataaggttgatgttataaaatttaatactttgacaacagacctttgtaaaaaatataaatcaaatataatcttaagaggcttaagagcagtttctgattttgagtatgagttccaattagctggaatgaatagaaaacttaataatcaagttgagacaatttttttaatgtcagatgttgaaaatcaaataatatcatctaggtttgttaaagaaatcgctcaacataatggtgatttgaaaaattt

SEQ ID NO: 254069 - DNA, 373 bp, Unknown
  Bacterial polypeptide expressing nucleotide sequence isolated from the Sargasso Sea
gatgaataaaattggaatatatccaggcacttttgaccccatgactgcaggtcatatggacataattaaaagatcattaagaatagtagataatttagtaatagcggttgctaataatattaataaagactcattgtttagtgtgcaagaaagaattaacatcatcaaaagtgatattagtaatctaaaagaatttaattcaaaaattaatgttatggaattatcaggattacttacaacatttgctaaagatcaaaatgccacatgtataatacgtggtttaagagctgtatcagattttgagtacgaatttcaaatgacaggtatgaactaccaacttaatcctgatattgagaccaatatttctttatga

SEQ ID NO: 254070 - DNA, 496 bp, Unknown
  Bacterial polypeptide expressing nucleotide sequence isolated from the Sargasso Sea
atgaaaaaaacagctatataccccggtacatttgatccaattacttttggccatattgatgtaataaaaaaagctttgaaactttttgataaagttgttgttgctgtatccaatggtaacaataaggattatctttttgactctgaagaaagaattgaaatcattaaaaaagctctttttattgattgtaaattaaaaaagaaaaagattgatgtgatttcttttgtttcacttactaccgacttatgtaaaaaatataaatctaatattattctaagaggattaagagctgtatctgattttgaatatgaatttcagttagcaggaatgaatagaaaattaaataataatgtagaaacattttttttaatgtccgatgttgagaatcagattatttcatcccgatttgtaaaagaaatagttaaattaaatggggatataaaaaaatttactacaaaaaatacaattaagtcattaaaaaaaaagtatgaataaa

SEQ ID NO: 254071 - DNA, 496 bp, Unknown
  Bacterial polypeptide expressing nucleotide sequence isolated from the Sargasso Sea
atgtctaagacagctatctatccaggaacttttgatccaattacttttggtcatattgatgtaataaaaaaggcattaaaattatttgataaaattgttgtggccgtatcagatggtgaaaataaagattatctttttgatgctgaggaaagattagaaattgtaagaaatgctctttttaaagatctaaaaatgaataaaaaaaaaataactttgatttcatttaaatcattgacaactagcctttgtaaaaaatacaaatcaaatattatattgagaggtttgagagcagtatcagattttgaatacgagtttcaactagctggtatgaatagaaaattaaataataatattgaaactttatttttaatgtcagatgttgaaaatcaaattatttcttcaaaatttgttaaagaaatcattaaacttaatggagatattaaaaaattcacaactaagagcactattaaagctttgaaagaaaaatatgagtaaa

SEQ ID NO: 254072 - DNA, 490 bp, Unknown
  Bacterial polypeptide expressing nucleotide sequence isolated from the Sargasso Sea
aatgtcaaaaattggtatatatcccggttcattcgatccaattacttatgggcatctcgatattattcaaaggagtttaagtgtagttgatgaattagttatagctgtttcaaataataagtctaaaaatcacctaatatctattgatgatagattaaatttaatcaatcaatcaattctatctcttccagagaaagatttatcaaaaattaaagtagaaaaatttgataatttactagtacactatgtaaaatcaaaaaatgcttcattaattattcgaggtttaagagctgtttcagattttgagtatgaatttttaatgactggtatgaatagatcaattgataaagatattgaaactatttttttaatgtcttcagaaaaatatcattttatatcatcaagatttataaaagagatacacaagttgggtggggatatttccaaaagtgtaccaaaaccagtccttgatttcttggcaaaaatttga

SEQ ID NO: 254073 - DNA, 496 bp, Unknown
  Bacterial polypeptide expressing nucleotide sequence isolated from the Sargasso Sea
atgaaaaatatagcaatttatcctggtacatttgatcctataacttttggtcatatagatgtaataaaaaaagctttaaaatttgttgacaaagtaatagttggaatttctgatggaaatcaaaaaaattttttgttttcaattgacgaaagagttaaaatagtaaaaaaagcaatttttaatgatctaaatttcagaaagaataaagttgaaattataacgtttgattcattaacaacagacctttgtaaaaaatataaatcaaatattatattaagaggcttgagagcggtatcagattttgaatatgagtttcaactagcggggatgaatagaaaacttaatagtagtatagaaacaatttttcttatgtctgaccttgaaaatcagattatatcctcaagatttgttaaagaaatagctcaacacaaaggtgacttaaaaaaatttacaactaaaagtacaataaaatcattaaaaaatatctatgcttaaa

SEQ ID NO: 254074 - DNA, 484 bp, Unknown
  Bacterial polypeptide expressing nucleotide sequence isolated from the Sargasso Sea
atgagagtagctatttatccaggatcttttgatccaattacctatggacatatggatattatcgatagggctagcggccttttcgataaaatcatcatcgcggtcgcaaaaagtgaggctaaaagcccactttttactcttgaagacagaatgaaattagcaaaaactatctatggagataacgataaggtggatgttgttggttttcctagacaactaacagtagatgtagctaaagaacataatgcgtgtgcaattattaggggcttaagagctgtatctgattttgaatatgaatttcagttagcaaccatgaataggtcattagccccagacattgaaagtatctttctaacaccaaaggaaagtttgatatatgtgtcatcgagtttaataaaagaaatttgtgacttaaaaggagatatctctaaatttgtccatccgtctgttgagcaagcgctaaaagcaaaacttggatcttaat

SEQ ID NO: 254075 - DNA, 496 bp, Unknown
  Bacterial polypeptide expressing nucleotide sequence isolated from the Sargasso Sea
atgaaaaatatagctatatatcccggaacatttgatccaataacaaacggccatatagatgttattaaaaaagcccttaaattggcagataaaataattgttggcatatccgatggtaatgaaaagaattttttatttccaattgatgaaagattaaaaattgtttcaaaagctttgtatggagacttaaaactttcaaaaaataaaattcaagtgataaaatttaattctctaacaactgaattatgtaaaaaatataagtcaaacttaatccttagaggtttaagggctgtttcagattttgaatacgagtttcaattagctggaatgaatagaaaattaaataataaagtagaaacaatttttcttatgtcagacgttgaaaatcaaatcatttcatcgagatttgttaaagaaatagcactacacaaaggtgatttaaggaaatttacaaccaaaagtacaatcaagtcattgaaagagatttatgcttaaa

SEQ ID NO: 254076 - DNA, 496 bp, Unknown
  Bacterial polypeptide expressing nucleotide sequence isolated from the Sargasso Sea
gatgaataaagtagccatatatcctggtacattcgatccaattacatttggtcatatagatgtaattaaaaaaggtttaaaattatttgataaaattgtagtagcagtttcaaatgtagataataaagattacctttttgattgtgaagagagaatagaaattgttaaaaaagcattattttctgatcttaaacttaataaaaaaaagattactgtaatttcatttacatcgttaactacagatttatgtaaaaaatataaatctaatattattttaagaggtttgagagctgtatcagatttcgaatatgaatttcaattagcaggtatgaatcgtaaacttaataagaatattgaaacattatttctgatgtctgatgttgaaaatcaaattatatcttccaaatttgttaaagaaattatcaaattaaaaggtaatataaaaaaatttactactaaaagtactattaaattattaaaaagaaaatatgaataa

SEQ ID NO: 254077 - DNA, 496 bp, Unknown
  Bacterial polypeptide expressing nucleotide sequence isolated from the Sargasso Sea
aatgagcaaaatagctatatatccaggcacatttgatccaattacctatgggcacatagatgtaataaaaaaagccttaaaattatttgataagattgttgttggtgtatctgatgttagcagtaaaaattatctttttagttctgaggagagaattgagatactcaacaaagccctatttaaggatttaaaacttaacaaaaaaaaaattataattgtatcgtttagctcattaactacagatttgtgtaaaaaatataaatcaaatattatcttaaggggattaagagctgtgtcggattttgagtacgaattccaattagctggaatgaatagaaaattaaatcagaatattgaaactatttttttaatgtcagatgttgaaaatcagataatctcttctagatttgttaaagagattgtaaaattaaacggtgatattaagaaattcactactaaaagtactatcaaaactttaaaagaaaaatatgaataa

SEQ ID NO: 254078 - DNA, 496 bp, Unknown
  Bacterial polypeptide expressing nucleotide sequence isolated from the Sargasso Sea
atgaaaaatatagctatctatccaggaacttttgatccaattacttttggtcatatagatgtcattaaaaaatcacttaagatagtagataaagtaattgtaggtatttcagatggaaatcagaaaaacttcctattttcattagatgaaagaatagaaattgttaaaagagctctttacaaagatctgaaatttaaaaagaataaggttgatgttataaaatttaatactttgacaacagacctttgtaaaaaatataaatcaaatttaatattaagaggcttaagagcagtttctgattttgagtacgaattccaacttgctggaatgaatagaaaacttaataatcaagttgagacaatttttttaatgtcagatattgaaaatcaaataatatcatctaggtttgttaaagaaatcgctcaacataatggtgatttgaaaaaatttacgaccaaaagtacaattaaatcattgaaagaggtttatgaataaa

SEQ ID NO: 254079 - DNA, 496 bp, Unknown
  Bacterial polypeptide expressing nucleotide sequence isolated from the Sargasso Sea
atgaaaaatattgcaatttatcctggaacatttgacccaataactaatggtcatattgatgttataaaaaaagctctaaaattagctgataaaattattgttggtatatctgacggtaatgagaaaaattttttatttccaattgatgaaagattaaaaattgttactaaggccctatataatgacttaaaacttccaaaaaataaaattcaggtgattaagtttaattctcttacaactgaactatgtaaaaaatataagtcaaatttaatcctcagaggtttgagagcagtttcagattttgaatatgaatttcaactagctggtatgaatagaaaattaaataataaagttgaaacagtttttcttatgtcggatgttgaaaatcagataatatcatctagatttgttaaagaaatagcccaacataaaggagatctaaagaaatttacaaccaaaagcaccatcaagtcattaaaagagatttatgcttaaa

SEQ ID NO: 254080 - DNA, 496 bp, Unknown
  Bacterial polypeptide expressing nucleotide sequence isolated from the Sargasso Sea
atgtctaagacggctatctatcctggtacttttgatccaatcacttttggtcacattgatgtaataaaaaaatccttaaaattatttgataaaatagttgttgctgtatcagatggtgaaaataaaagttatctttttaatgctgaggaaagattagaaattgtaaaaaatgctctttttaaagatttaaaaatgagtaaaaaaaaaataattttgatttcgtttaaatcattaacaactactctttgtaaaaaatataaatctaatatcatattaagaggtttaagagctgtttcagattttgaatatgagtttcaactagctggaatgaatagaaaattaaacaccaatattgagacattatttttaatgtcagatgtcgaaaaccaaattatttcttcaaattttgttaaagaaattattaaacttaatggagatataaaaaaatttaccacaaaaagtactattaaagctttgaaagaaaaatatgaataaa

SEQ ID NO: 254081 - DNA, 496 bp, Unknown
  Bacterial polypeptide expressing nucleotide sequence isolated from the Sargasso Sea
gatgaaaaaatcagcaatttatcctggtacatttgatcctataacatttggtcatattgatgtaataaaaaaaggattaaaaatttttgataaaataatagttgctgtttctgagtcaaactctaaaaaatgtttatttgattcttatgaaagaattaaaattgttaatgatgctttatttaaagatttaaagtttaagaaatcaaatataaaagttatatctttcgattcacttactacagatctttgcaagaaatttaaatcaacggttatactaagaggacttagggcagtgtcagatttcgaatatgaatttcaactttctggtatgaacaaaaaattaaataataatatagaaactttatttttaatgtcagatgcagataaacaaattatttcttcaaagttaattaaagaaattacagaattgcgtggtgatattaaaaaatttacaaccaaaagtactgttaaagcactaaaagataaatatgtataa

SEQ ID NO: 254082 - DNA, 427 bp, Unknown
  Bacterial polypeptide expressing nucleotide sequence isolated from the Sargasso Sea
aatgaataaagtcgcaatatatccaggaacatttgatccaataacatatggacacattgatgtaattcaaaaagcactaaaattatttgataagatagtagtgggtgtttcaaatgttaataataaaaattatttatttagctcagaagaaagaatagatattgtaaataaagcattatttaaagatctcaaattgagcaataaaaaaattatagttatttcctttaattcattaacaactgacttatgtaaaaagtttaagtcaaatatcattctaagaggcttaagagcagtttcagattttgaatatgaatttcaattagctggaatgaatagaaaattaaacaataatatagagacaattttcttaatgtcggatgttgaaaatcagattatctcgtcaaaatttgttaaagaaatatgttaa

SEQ ID NO: 254083 - DNA, 496 bp, Unknown
  Bacterial polypeptide expressing nucleotide sequence isolated from the Sargasso Sea
aatgccaaaaactgcaatttatccaggcacatttgatccaataacttttgggcatatagacgttataaagaaatctttaaagatcgttgataaattgattgttgcaacaactgataatatagaaaaagattatttgttttctttagatgaaagaattgaaatattaaataaatctttgtttaatgatttacgattaagtaaaaataaaattaaaattatatcctttgacgatttgactgttaaaatttgcaaaaagtataaagcatcaattattataagaggtttacgagctgtatcagattttgaatatgaatttcaactagctggaatgaataaaaaactagataaaagtgttgaaacaatttttttaatgtctgatatagaaaatgaaataatctcttctaaatttataaaagaaattgggaaattgaagggtgatttaaaaaaatttgctacaaaatctgtaataaaagctattaaatctaaattctcgtga

SEQ ID NO: 254084 - DNA, 484 bp, Unknown
  Bacterial polypeptide expressing nucleotide sequence isolated from the Sargasso Sea
atgaaagtagcaatctaccctggttcattcgacccaattacggttggacatatggatattgttgaaagagcaactgtgctttttgataaggtcattatcagcgttgctgaaacagatatgaaaaatccactcttttcttctgaagaaagattagacttagtgagctcgatctatgctgataatgaaaagattgaggttgttgcatttaaaaagaaactcacagttgatcttgcaagagaaaataacgcatgtgccatcatcagaggtttgagagcagtatctgattttgagcatgagtttcaattagcgacaatgaatagagcacttgctccagatatagaaagcattttcttgactcccaaggacacacttatttatgtatcatcaagtctagttaaggaaattgctagcctaggtggagatatttcaaattttgttcatgaaaatgtagaaatggctcttaaagcgaaactaaatcattagc

SEQ ID NO: 254085 - DNA, 484 bp, Unknown
  Bacterial polypeptide expressing nucleotide sequence isolated from the Sargasso Sea
atgaccaacaaggtaatctatcccggcaccttcgatcccgtcaccaacggccacaccgacctcatcggccgggccgccaaactgtttgatgaagtggtggtcggggtggccaacagcccgagcaagcggccgctgttcgacctggacgagcgggtgcagctggctcgccaggtgaccgcccacctgcccaacgtcaaggtggtcggtttctccggcctcttggtggatttcgccagggagcagcaggccaacgtgctgatccgcggtctgcgcgccgtctccgacttcgagtatgaatttcagctggccaacatgaaccgccgcctgatgccggagctggagagcgtgttcctcaccccggccgaggagaactctttcatctcctccaccctggtgaaggaggtcgccctgcacggcggtgacatccgccagttcgtcgaccccgccgtggccgccgccatcaaggccaaacagaccaagtaac

SEQ ID NO: 254086 - DNA, 493 bp, Unknown
  Bacterial polypeptide expressing nucleotide sequence isolated from the Sargasso Sea
gatgaataaaattggaatatatccaggaacttttgatcccatgactgcaggtcatatggacataattaaaagatcattaagaattgtagataatttagtaatagctgtcgctaataatattaataaagattcattatttagtattcaagaaagaattaaaatcatcaatgctgacattagtactgtaaatgaattaaattcaaaaattaatgtcatggaattatcaggattacttacaacatttgctaaagatcaaaatgccacatgtataatacgtggtttaagagcagtatccgattttgagtacgaatttcaaatgactggtatgaactaccaacttaatcctgatattgagacaatatttcttatgacttctgaaaaaaattcattcatttcatctaattttgttaaagaagtccacaaactaggtggtgatgtttcaaattttgtttctaaaaatactttagaacaacttaataaaaaaaactcttag

SEQ ID NO: 254087 - DNA, 496 bp, Unknown
  Bacterial polypeptide expressing nucleotide sequence isolated from the Sargasso Sea
aatgagcaaaatagcaatatacccaggcacatttgatccaatcacctatgggcacatagatgtaataaaaaaagctttaaaattatttgataagattgttgttggtgtatctgatgttagcagtaaaaattatctttttagttctgaggagagaattgagatactaaacaaagctctatttaaggatttaaaacttaataaaaaaaaaattatagttgtatcgtttagctcattaaccaccgatttgtgcaaaaaatataaatcaaatattatcttaaggggattaagagctgtgtcggattttgagtacgaattccaattagctggaatgaatagaaaattaaatcagaatatcgaaactatttttttaatgtcagatgttgaaaatcaaataatctcttccagatttgttaaagagattgtaaaattaaatggtgatattaagaaatttactactaaaagtactatcaaatctttaaaagaaaaatatgaataa

SEQ ID NO: 254088 - DNA, 475 bp, Unknown
  Bacterial polypeptide expressing nucleotide sequence isolated from the Sargasso Sea
atgaaaattctttatccaggtacatttgatccactaacaaacgggcatatagatttaatagaaagggctgaaaaattatttggcaatatagttgttgctgttttagaaaatactgctaaaactcctacatttaatcttcaaaaaagaatatcacaaataaaaaattctcttttttatttaaataatgttgaagttatttcttattcaggcctcactgttgattgtgccaatgatttgaaagccaatcttatcttaagaggtttacgagcaatgagtgattttgagtatgaactacagattgctcatacaaataaatctttaaataaggatattgaaactatatttctatcgacaaatacaaattttagttttcttagtagttctttagtaaaagaagttgcaaagtttggtggtgaaattaatcacatggtaccgccatgtgttgaaagggatttaaaggaatattttaaataat

SEQ ID NO: 254089 - DNA, 496 bp, Unknown
  Bacterial polypeptide expressing nucleotide sequence isolated from the Sargasso Sea
atgagaaataatgcactatacccagggacatttgatccaataacttatggacatgtggacgtcataaaaaaagctttaaagatagttgatagagttataattgcagtttcagaaaatagtaataaagattatttgtttgatataaatgaaagattaaacattataaataatgcattatttaaagatttaaaaatgaaaccaagtaaaataaaagttatatcatttaattcattaacaacagatttgtgtaaaaaaatgaattcaaaaattattttaagaggacttagggcagtttcagattttgaatacgaatttcaacttgctggaatgaatagaaaattaaataataaaattgagacagtttttttaatgtcagatgtagaaaatcaaattatttcatctagatttgttaaagaaataattgatttgggtggtgatattagaaagtttactacaaaaagtaccgttaaagcacttaaagataaatatgcataaa

SEQ ID NO: 254090 - DNA, 496 bp, Unknown
  Bacterial polypeptide expressing nucleotide sequence isolated from the Sargasso Sea
aatgagtagaataggtatatatcctggaactttcgatccaattacttttggccacattgatattatcaaaaaatcattaaaagtagttgataaacttgttgtagcaatatcggattcttcagaaaaagattatttattttctactgatgagagaatagaaattttaaaaaaatcattatttaatgatttaaagcttaaaaaaaataaaattaaaattgtttcattccaaagtcttacagttaaattatgtaaaaaatttaatgcatctataataatacgtggtttacgagcagtgtcggattttgagtatgaatttcaattagctggtatgaataaaaaacttgacgacaaaatagaaacaatttttttaatgtccagtatagaaaacgaaattatttcatccaaatttgttaaggaagtaggaaaacttaaaggagatttgaaaaagttcgtatcaagatctgttattaaggcaattaaagaaaaacttgaatga

SEQ ID NO: 254091 - DNA, 484 bp, Unknown
  Bacterial polypeptide expressing nucleotide sequence isolated from the Sargasso Sea
atgaaagttgcgatatatccaggttcattcgatccaattacacttggccacatggatattatagatagagcatgtaatcttttcgagaaaatcataattgcaatagcaaaaagtgatacaaaagatccattattttcacttgaagataggcttaagcttgcaaagacaatatataaagataattctcaggttgaagtaataggtttcccgagacaactaactgttgatgttgcaaaagagtataatgcttgtgcaattattagaggtcttcgagcagtttctgattttgaatatgaattccaacttgcaactatgaatagatctttggcaccagatattgaaagtatatttttaactccaaaagaaagtttaatttatgtctcgtcaagcttaattaaagaaatttgtgacttaaaaggagatatatcaaaatttgttgatccagttgttgagcaagctttaagagcaaaattagactcttagc

SEQ ID NO: 254092 - DNA, 499 bp, Unknown
  Bacterial polypeptide expressing nucleotide sequence isolated from the Sargasso Sea
atgtcaaaaattggaatatacccaggaacctttgaccctatgacaaatggacatctaaatataattcatagatcgctaaaggtagtagataagttaataattggagtagcagataacttgaataaaaaacctcttcttactattaatgaaagaaaaaatataattgcaaatgatatttactctttgcagcaaaataataaaaaaatagaaattcatacagttaatggacttttaactgagtttgcaaaaaagtgtaatgcagattgcattattagaggattaagagcggtctcagattttgaatatgagtttcaaatgacaggaatgaactaccaattaagtcctgaaattgagactatatttttaatgtcagcagataataattcttttatttcttcaaatttagttaaagaagttcataagcttggtggagatgtatcaaaattcgtttctgataataccattaagattttaaataataaaaactcttcatcatagc

SEQ ID NO: 254093 - DNA, 496 bp, Unknown
  Bacterial polypeptide expressing nucleotide sequence isolated from the Sargasso Sea
atgaaaaatacagctatctatccaggaacttttgatccaattacttttggccatatagatgtcattaagaaatcacttaagatagtagataaagtaattgtaggtatttcagatggaaatcagaaaaactttctattttcattagaagaaagaatagaaattgtaaaaagagctctttataaagatctgaaatttaaaaagaataaggttgatgttgtaaaatttaatactttgacaacagacctttgcaaaaaatataaatcaaatatcattttaagaggcctaagggctgtttcagattttgagtatgaattccaattagctggaatgaatagaaaacttaataatcaagttgagacaatttttttaatgtcagatgttgaaaatcaaataatatcatctaggtttgttaaagaaatcgctcaacacaatggtgatttaaaaaaatttacaactaaaagtacaattaaatcattgaaagaggtttatgaataaa

SEQ ID NO: 254094 - DNA, 496 bp, Unknown
  Bacterial polypeptide expressing nucleotide sequence isolated from the Sargasso Sea
atgtctaaagtagcaatatatccaggaacttttgatccaattacatttggtcatatagatgtaattaaaaaatcactaaagctctttgaaaaattaattgttgctgtttctgacggagaaaacaaagaatacctatttgatgttgatgagagaattgaaatagtcaaaaaagctctattttttgatttgaaactaaatcgaaataaaatatctgttatatcttttacgtctttaacgacagatttatgtaaaaaatataaatcaaatattatactcagaggtttaagagcagtatcagattttgaatacgagtttcaattagctggaatgaatagaaaacttaataataatatagaaactttatttttgatgtcagatgtagaaaatcaaattatctcatcaaaatttgtgaaagaaattgttaaattaggtggtaatataaataaatttacaactaaaagcacaattaaatctctcaaacaaaaatatgaataaa

SEQ ID NO: 254095 - DNA, 511 bp, Unknown
  Bacterial polypeptide expressing nucleotide sequence isolated from the Sargasso Sea
tctgagtcgagtcagcaaagtgcatacaagagcgatttatcctgggactttcgatcccatcaccaatggtcatgccgatttgattgagcgtgcggctaagttgtttaagcatgtgattattggtattgcggccaatccatctaagcagccaaggtttactctcgaggagcgcgttgagttggtaaaccgcgtcacagcccatttggataatgtggaagtggttggtttttcgggcttgctggtggattttgctaaggaacagcgtgcgagcgtgctggtgcgtggtttgcgtgcggtttccgactttgagtatgaattccaattggccaacatgaatcgcagattaagccctgatcttgagagcgtgtttttaacaccggctgaagaaaactcctttatttcttccaccttagtgaaggaagtcgcgcttcatggcggcgatgtgagtcaatttgtacaccctgaggtggcaagcgcgttgaccgccaagcttaacctcgcaaaagcctga

SEQ ID NO: 254096 - DNA, 556 bp, Unknown
  Bacterial polypeptide expressing nucleotide sequence isolated from the Sargasso Sea
aatgaactttgttttaataattcccgctagatataattcttctcgattccctggaaaacctcttactttattaaaaggtaaatctatgattaggcgtgtttatgatcaatgtttaaaagctgttcctagagactcaatatatgttgctacagaagataggagaattgcagatcattgtaaaaaaaataacatacagtttataatgacttcagatgagtgtttaactggtacagataggttatgtgaagtttcaaaattagttgaagcagactattatataaatattcaaggggatgaacctctatttaatcctattgatattcaaaatttaattcaagagctagataaacaaaaaaatctctatgatgtttactgcggatattgtagtattgacagtgaagacacatttttttctttcaatatgccaaaagttatttttaataaaagaaaagagttagtttatatatccagagcaccaattccttcaaataaacaaaatgagtttaggaagggatttagacaagtttgtggatatgcttttccaaaaaaagttgga

SEQ ID NO: 254097 - DNA, 535 bp, Unknown
  Bacterial polypeptide expressing nucleotide sequence isolated from the Sargasso Sea
aatgacaagtaaaaaacataaacgtgccacagacaggtcttcagaagctttaaataaagtcgaaattaaagaaaaatgtaagtatgacttagttacaatggtccagggagatgagccattagttaacaataaaatgattaaacaatctttggctccatttaaacataaggatacaaatgtagttaatttaatgggtaaaataggtaaaaaagattttttagatgaagactgtattaaagttgtaacaaataaatataataatgcattatatttttcaagaaaaccaatcccatatttaggaaaatcaaaatctagtttatttaaacaaatatgtataattacttttagaaaaaaatttttaaaaaaatatatcaaaatgaaacctactcctttggaaatcttagaatctattgacatgttgagaattttagaaaatggctatgatattaaactagtaaaaacaaatgaaatatcaattgcagttgatagggctagagatattaaaaaagtcgaaagctttttaaacaaaaaataa

SEQ ID NO: 254098 - DNA, 669 bp, Unknown
  Bacterial polypeptide expressing nucleotide sequence isolated from the Sargasso Sea
tagacttaaatggaaagagtttaattgaaagagtttttctcagagccattcagagcaatgcaaaagaagttttcatagcaactgattcaaaaaagattgaggatcatgtaaaaaacttttcacctaatgtcatcttaacttcaaaagaacatgagtctggcactgatagagttcatgaatgtgcgacaaaattagatattagtaatgacatggtcattgttaatgttcaaggcgatgaaccatttataaatccagaaacaataaataaaacagcagatataatttttaaaaataaaaatgcatctgttggttcagcatgtacgttgtttaaagataatgattttaatgatcccaataatgtaaaagtttatttatcagactcaaatagagctataaattttttacgaaatgttgatccaatcaatctctcgaagaataaagcaaagtatttccaacatgtaggtatatattcatacaattataaaactttaagtacttttgtatcattacccagatctaaaaatgagatttctgaaagccttgagcaattgagatttttagacaatggacatgagatctatttagttgaaattgaagaattaagtataggaattgatacagagactgattataaaaaagctttaaggattcttaataataatgactaaa

SEQ ID NO: 254099 - DNA, 733 bp, Unknown
  Bacterial polypeptide expressing nucleotide sequence isolated from the Sargasso Sea
cttggttattggtgttatcccagcaagaatcgaatctaccaggttccccaaaaagatattagctgatatagagggcaagcctatggtagcacatgtagctgaaagggctttaaaggcaaaaaaattagatagggtgatcattgccattgattcagaagaaacaaaaaatgcattatccaattatgaatttgagcttgttatgacaaaatcgagccataatagtggtacggaccgtgttgctgaggtagttaggtcggttgaggaagcagaaataattatcaatattcagggagatgaaccactattagatcctagcatcattgatggtttggtagggctttttgatgaccctagtgtttcaatgggcactgtagtaagccgaaatattggagtaaatgattatttagatagaaatattgtaaaagtatttttagatgaaaaccaaaacgcatatgattttaaacgcgatatttatgattctgaaataggcgggttatttaggcatattgggttttatggttttcaaagagattcgctttttgaatttacttcacttccaccttcacataatgaattggagtactctcttgagcaatttagagctattgataataatatttctattaaagcacttataacaaacgctgaacagcttgctgttgatgttccaggtgatatagaaaatgtattatcaaaaatgaaaaaactatttgaggcaacaacagtagaataa

SEQ ID NO: 254100 - DNA, 754 bp, Unknown
  Bacterial polypeptide expressing nucleotide sequence isolated from the Sargasso Sea
cgcataaaatatgaatatatgagcaattcaattataataattccatcaagattagcagcaacaagacttcctcaaaagccattaataaaaattaataataaaactctaattatgcatgtatatgaaaaagctataaaaagccaaactggagaggtttatgctgcaacatgtgatgaggaaattgcctcagaagtaagaaaaaatggaggtaaattcataatgacagatataaatcacacaactgggacagacagagtattcgaagcctctcaaaaattagatttaaaagatatagattttattatgaatatccaaggtgatgaaccaatgattaatcctttagatattaaaaatttaaataatttatcaaaggaaaaagacttaaatttttcaacattagcatacaaaattgagaaaaatgaagattataataatgaaaatattgtgaaagttatcactaaatataaattatcggataactcaatatcagaagctttaaattttcatcgagtaattaaaggagatcgctatgacaatatatatcaacattctgggatatacctatataagtattcagctttaaaaaagtttgttaatttaaaaaaaagcaaaaatgaaatcaaggaaagactggaacaactaagagcaatcgataataatatgaaaattgacgtaatattggcaaattatttttcctctggaattgatactaaaaaagatctagaagaatacatgaaactattgaataaatagc

SEQ ID NO: 254101 - DNA, 403 bp, Unknown
  Bacterial polypeptide expressing nucleotide sequence isolated from the Sargasso Sea
atgaagattgcttttgtaataccagctaggtatagatctaaaagattaccaggaaaaccactcaaaaaaattctaggtgttccaatgctttcaaggactgtgagtcaatgtttaaaagttatcgataaaaaagaccttttcgtgctaacagataaccaaaaaatttatagtttttgcaaaagtataaaaataaactgtattgtaataaataaaaagagcttaactggaactgatagagttgctcattttgccaatactaataaaagtaaaaagtattcaaattttattaatatacaaggagatgaacctatttttaatccagtagatttgatgaaaattattaaatctactaaaaaaaaccctagattaatatatggagggtatttaaaattaaagatttaaa

SEQ ID NO: 254102 - DNA, 641 bp, Unknown
  Bacterial polypeptide expressing nucleotide sequence isolated from the Sargasso Sea
aatgaatattcttgctcttatccctgctcgaatgggaagtagtcgttttcctggtaagccgatggcaaaaattcttggtaagcctatgattggacacgtttatgataatgtgaaaaaaaataacttaattactgatttagctgtagcaacatgtgatgatgaaatttataattatgttaaatcaattaatggaagagccatcatgacatcagataaacatgagcgagcatccgatcgttgcgcggaagcactgctaaaaattgagagtgaagataatataaactatgatatcgtagtcatggttcagggagatgaacctatggtccatccagatatgctttcacaggcattgcagccattgattgataatacaaatatcttaataactaacttattaggttctattaaaaatgataaagaatttcaggataataatacaataaaagtagtatgtgataagaactataatgcactttatttttcaagagaaccaattccatcgaagtgccataataattctgctatgggaaaacaggttccaataatcccatttagaagagatttcttaattaaatataatgaattagatcctacgccattagaaatttcagaatctgtagatatgcttcggattttagaac

SEQ ID NO: 254103 - DNA, 646 bp, Unknown
  Bacterial polypeptide expressing nucleotide sequence isolated from the Sargasso Sea
tatcccgattatcttgaaaacttacagagcagcattagatacaggcctttttgaaaatgtttatgtcgttagcggtaatgatgagatacttgagctcattaagtcagatggaggtaagacctttaaatctcaaaaaaaacataattcaggtacagacagaattgctgaagcagcaattaaattaaatactgatattgttgttaatcttcagggtgacgaaccatttattaataaaaatgctattgaaagtttgattagatcatttgatgataaaagcgttgaaatggcctcacttatgacaaagtttgaatcatttgaagaattaaacaatccgaataatgtaaaagtaatagtagataataatcacaatgcactatacttttctagattacctatacctcatgcttcaaaaaacttaattgattataaccgtcatattggtgtatatgcatttctaaaacaatctttaattgaattttcaaatttaaaaagactaaatcttgaaattatagaaaatcttgagggaaatagagttgtagaaaattcaaaaaaaattaggatggtaagtactgattttcatggattatcaatagatacacctgaagatcttttaaaagctgaaaaatttatctctttgaatgattag

SEQ ID NO: 254104 - DNA, 463 bp, Unknown
  Bacterial polypeptide expressing nucleotide sequence isolated from the Sargasso Sea
tatgagtaattcaattataataattccatcaagattagcagcaacaagactccctcaaaagccattaataaaaattaataataaaactctaattatgcatgtatatgaaaaagcattacaaagccaaattggagaggtttatgttgcaacatgcgacgaggaaattgcctcagaagtaagaaaaaatggaggtaaatttataatgacagatataaatcacacaactgggacggatagagtatttgaagcctctcaaaaattaaatttaaaagatacagattttattgtgaacatccaaggtgatgaaccaatgatcaatcctttagatattaaaaatttaaataagctatcaaaggaaaaaagcttaaatatttcaacattagcgtacaacattgagaaaaatgatgattatgacgatgaaaatattgtaaaagttattacaaaaaataaaatatctgataac

SEQ ID NO: 254105 - DNA, 632 bp, Unknown
  Bacterial polypeptide expressing nucleotide sequence isolated from the Sargasso Sea
aaaaaaacttaatgatgcatatatatgttgtgacactagaaaagttctaaatgtagcaaaaaaatttaatgctaaagcaatactaacttctaaaaaacataaatgtggtaccgacagaatagcggaagctttaaaaaaacttaaaaaaaaatatgatcaaatagtaaatattcaaggagatgaacctcttattgacccaaaaaatatcgattatgtgattagtcatcatagaaaaaatcgtgagtatgatataattttacccaacttaaaaacaaaatttagcaaagatccaaacgttgtaagattaatatttaataaaaaaaaacaagtaatttatataactagatcagtaacaccttaccaatttatttcaaaaacaaattatatatttaaacatttatcaatagtttcctttaaaccaaaagcactcattaaatacacaaaaaataaacaaagtaaattagagaaaatagaagatatagaattattaagagcaattgatttaggcttaatgataaaaacattttcgttaaaaggaaatagtttttctatcgatatcaaaaaaaatcttcgagatgcgaggaaaataatctataaagataaatttttcaaaaaatatgcaaaaaaataat

SEQ ID NO: 254106 - DNA, 702 bp, Unknown
  Bacterial polypeptide expressing nucleotide sequence isolated from the Sargasso Sea
aatgaaaattatttcaataattcctgcaaggatgggatccagccgcctccctggcaaacccatgaaagatatacttggtatgcctatgataggacatgtatataaaagaataaagatgtgcaaaactttaagtgaagtttatgtagctacttgtgacaaagagatatttgattacatagagtcaattggtggtaaagctgtgatgacaagtgatattcatgaaaggtgtgcagatagatgtgcggaagcaatgataaaaattgaaaatcagattaaagagaaatgtgatatcatagttattgtgcaaggtgatgaaccactaacattccctcaaatgatagatgaggctttaaaaccaatgattgaagataaaaatattctcattacaaaccttgtggctgatatagataacccagaggcttttgaaaatccaaatgaaataaaagtagtaatagataaaaaaaaaaatgcactctattttagtcgtgaaccaatacccagcagaaaaaaaagtactctaaaagtaccaatgaaaaaacaagtatgtgttataccttttaaaagagactttttaatagaatataataaaatggatccaacaccactagagataattgagtctatagatatgatgagaattcttgagaatggtggcaaggttaagttgtgtgaaacaaattataaaacaaaagctgtagatac

SEQ ID NO: 254107 - DNA, 670 bp, Unknown
  Bacterial polypeptide expressing nucleotide sequence isolated from the Sargasso Sea
cctaataaaccccttaaggatatagcaggtaaaaccttaattgaaagagtagtcgatcaggcaagaaaaactactgctaaatctatacatgtggcaactgattctgatgaaattatgtatcactgtaatgaaattaacgtagaggctctttcaaccagtgcaaaccataaaacaggatctgatagattatttgaatcatgcgatattctaaaattattggatgaagaattaataattaacatacaaggagacgagcctttcatagaccccaaagatatagaaaacttagcgcaattagctgaaaaagaaaatgccaatatggttactttgtatacaagcctagaatcaaatgacctagcaaacaatgacgtagtaaaactttggctggattcaaatatagttaaagacttctcaagagatgtggatcatttaccaagaaaagacgctaagaaacatataggagtctatggatataaagtaaatttccttcagaagttcataaaatggaatcaaagcgaaaatgagatcaaaagaaatcttgaacaaatgcgggttatggataatggagagaagatttatgcaatagaatcatctggaaaatatcatatcggtgttgatactgaaagtgatctcaagcaagcaatagagatagctctagatttagaatgaa

SEQ ID NO: 254108 - DNA, 733 bp, Unknown
  Bacterial polypeptide expressing nucleotide sequence isolated from the Sargasso Sea
atgaaaacattagttataataccttcaagattatcagcaactagattgccagggaaacccttattaaagattaatgggttatcaataatttcccatgtttttaaaagagctgaaaaagccaatatcggagaggttatagtggcagctgaagataaggaaattgctgaggatgttaaaatgaatggtggaaatgctattttaactagcaaaaaacctaaaactggaacagatagaatttatgaggcattaaaaatattagatagaaaaaacattgatttgattatgaatattcaaggagatgagccagagattgatatcgaagatattaaaaaattatataataatatgaaaaataataaaaaaaccagaattggtactttagcagcgaaaatttctgatattaaaatgtatgagaatcaaaatattgttaaggtaaaaaccaaagagtcttttgaacaaaatcaatttccattagcggataatttttttagaaatattgaaaaaaaagaaaatatctttcatcatatcggcatttattgttatgaagttgaaactttaaaaaattttgtttcatttaatcaatccaaaaatgaattggataataaacttgaacagttaagggctctagataacaatatagatataaatgttgctcaggctaattcatctcctattggcattgataccaaagaagattacctggctataaaaaaaataatagaatataaataaa

SEQ ID NO: 254109 - DNA, 597 bp, Unknown
  Bacterial polypeptide expressing nucleotide sequence isolated from the Sargasso Sea
aatgcgatctgtcgtgttaataccagcgagatatgcttctagtcgttttccgggtaagccattagttccgttactgggcaagcctatggtgttgtgggtagccgagctttcagcaaaagctgttggtaaagagaatgtatatgtagcgactgaagacgtcagaattgctgatgtagtcgctgcggcaggttttaaatcggtgatgacaactgatcaatgtctaacaggtacagatcgcctggctgaagctgcactgcaggttaaagcggatatatatgtaaacgtgcagggtgatgagccaattattgatccagacgatattcttgaagccattaaagttaaacagcaggatttgtctgcaatcgtaaatggatattgctggttatcagatcatgaaaacccggaaagtgtaaatattccaaaagtgattaccaacgaacacaacactttagtttatatgtcacggaacgcaattccggggtttaaggatgcaaagtgtgcgccgaaacgttataaaaagcaggtttgtatttatgcttttactttcgatgagttggtagcatttaaagaatttgggcgcaaaagtgagttagagtt

SEQ ID NO: 254110 - DNA, 715 bp, Unknown
  Bacterial polypeptide expressing nucleotide sequence isolated from the Sargasso Sea
gatgaatgagtttatcgtaataattccttcaagactttctagtacaagactcaaagaaaaagctcttctagacttaaatggaaagagtttgattgaaagagtttttctaagagccattcagagtaatgcaaaagaagttttcatagcaactgattcaaaaaagattgaggatcatgtaaaaaaatttacacctaatgtcatcttaacatcaaaagagcatgagtctggcactgatagagttcatgaatgtgcggcaaaattagatattagtgatgatatggtcattgttaatgttcaaggtgatgaaccatttatagatccagaaacaataaacaaaacagcagatataatttttaaaaataaaaatgcatctgttggttcagcatgtactttgtttaaagatgatgattttaatgatcccaataatgttaaagtttatttatcagactcaaatagagctataaattttttacgaaacgttgatccaatcgatctccctaagaataaagcaaagtatttccaacatgtaggtatatattcatataattatgaaactttaagtacttttgtttcattacccagatctaaaaatgagatttctgaaagccttgagcaattaagatttctagacaatgaacatgagatctatttagttgaaatcgaagaattaagtataggaattgataccgagactgattataaaaatgctttaaag

SEQ ID NO: 254111 - DNA, 331 bp, Unknown
  Bacterial polypeptide expressing nucleotide sequence isolated from the Sargasso Sea
ttggttattggtgttattccagcaagaattggatctaccaggtttcccaaaaagatattagctgatatagatggtaagcctatggtggcgcatgtagctgaaagagctttagaggcaaaaaaaatagatagggtgattattgccattgactcagaggaaacaaaaaatgcattatccaattatgaatttgaacttgttatgacaaaaccgagccataatagtggtaccgaccgtgttgctgaggtagttaggttggttgaggatgcagaaataattatcaacattcagggagatgaaccactattagatcctagcatcattgatggtctgg

SEQ ID NO: 254112 - DNA, 604 bp, Unknown
  Bacterial polypeptide expressing nucleotide sequence isolated from the Sargasso Sea
tatgaaagttattgggatcattccttgccgttatggctcatcacgcttacccggcaaagcattggccgatattcatgggaaaccgatgatgtggcacgtctaccagcaatcaaagaaaagtcccatgttaggtgaagtttatattgcgactgacgatgaaagaattgctgaaacctgtaaaaaactagatttgaactacctcataaccagtattcatcatttaacaggaacggatcgagttgctgaatgtgttaacgtcatcgacgccgacatatacgtcaatattcaaggcgacgaaccaatgattgaacccatggctattagtgaggtggtagacgctcttaagtgtaatgactcagaaaatataatggctgcgaacgcttatgtgccaatggaaaatccctctgatgtcatcgacaccaataatgtaaaagttgttttgaaagccgacggaacggcattagtttattctcgttctcctataccatatccaaaaggcgcggagacccactatttaaggcagttaggattatatgcttttaaaaaaaatggcctaaagcgattcgcagagcataagccgggacctctggagcagagtgaaaat

SEQ ID NO: 254113 - DNA, 643 bp, Unknown
  Bacterial polypeptide expressing nucleotide sequence isolated from the Sargasso Sea
tatgattataagaacttacaaccaatgcaaaaaagtcgttccagaatcaaaaattttagttgctacagatgatcaaagaataaaaaaagtttgtcaagatgtaaaaattaatacagttatgacttcaaaaagatgtttgacaggaacagatagggtagctgaggtagcaaagaaacttaaggcagatttctatctaaacatacaaggagatgaacctatatgtaatccaacggacattaaaaaacttttgattgcagcaaaaaataatccaaaaaaaattattaatggatatacagaaattaaagataaaaaattattttattctgggcatattcccaaattagtatttagaaaagatggaagacttttataccaatctagagctccaatacctacaactaaagacaaaaaatttgtaaaatcttggagacaagtttgtatttattctttaccttacaagccattaattaaattttcttctgtaaaaaataaaactccacttgaagctcttgaagattgtgaattattgagatttctagaacttggttatgaaataaaaatgattaaaatgtctgataaatctgtatcagttgatacgaaagaatctttaaaggaagttagaaaaataataaaaaaattataa

SEQ ID NO: 254114 - DNA, 427 bp, Unknown
  Bacterial polypeptide expressing nucleotide sequence isolated from the Sargasso Sea
atgaaaacattaataattataccttctagaatgtcagctactagattaccaggcaaacctttactaaaaataaatggtcaatctataatttcacatgtatttaaaagagctcaaagtgctgagataggagatgtaatagtagcagctgaagatcaagaaataatagatgatgttaaaagtaatggtgggaatgcaattttaacctctaaaattcacaagactggcactgatagaatttatgaagctctcacttcattaaacaaaaaagatattaattttgttatgaacatccaaggagatgaacccgatgttgacttaaacgatatcaaagttctagatagcaggatgaagattaatagatcaaaaattggaacattagcagcgaagattaataatgaagaaatgtatgataatgaaaatatagtta

SEQ ID NO: 254115 - DNA, 271 bp, Unknown
  Bacterial polypeptide expressing nucleotide sequence isolated from the Sargasso Sea
agaaaggcaaaaaatgcaaatattggagaagtgtatgtggcaacagaggatgaagaaatattgaatgatgttaaaaaaaatgggggtcaagcaattataacaagtaaaaatcacaaaactggcacagatagaatttgtgaagctctagataaattaaaaaaaccaaatattgaattagtcttgaatatacaaggagatgagcctttaatgaacatagaagatataaaaaatttacatgaattaatgattaaaacagattctaaattgggca

SEQ ID NO: 254116 - DNA, 370 bp, Unknown
  Bacterial polypeptide expressing nucleotide sequence isolated from the Sargasso Sea
aatgataataggattaatacctgcaagatatcaatcatctcgtttacctggtaaacctttgctaatgtttggagataaaacaatgattcaaagagtatatttacaatctataaaatcagaattaattgataaagtttatgttgtaactgatgatgagagagtgaaaaaatcaattgatgatataggtggtaattgtttgatgataaaagatgaatgtttaaacggtactgaaagaatatgtattgcattaaatagatatcatgaaatatttaaagatacaaaatttattgttaatgttcaaggtgatgaaccatttataaaccctaatcatattgatatagctattactaaaatgttaaaaaacaaataa

SEQ ID NO: 254117 - DNA, 376 bp, Unknown
  Bacterial polypeptide expressing nucleotide sequence isolated from the Sargasso Sea
tttgaatattggtgttgtaccagcacgtcttgcgtcaaaacgtttacccaaaaagattcttgcagatcttgacgggaaacctatggttgttcatactatggagcaggtattaaaaacacagaaattagataaagttattttagcaattgattctgaagagacccttgatgcgctgaaggattttggatttgatatggtaatgacatcaaaagatcattgttctggtacagaccgagtagctgaagtagttaagaaaaatgaagatgcagaagtaatcattaatattcagggtgacgagccgctagtggatccaaatattattgatgaacttgttgatctttttgagataagaatgtcaatatggggactgctataa

SEQ ID NO: 254118 - DNA, 613 bp, Unknown
  Bacterial polypeptide expressing nucleotide sequence isolated from the Sargasso Sea
atgttagataaactgatcgtaattcctgcaagatataactcgtctcgtcttcccaaaaagattttagcaaacatccatggattccctatgatttattgggtagctaaacgaattgagaatgcaaatctaactaaatacgttgttgctgctgataatgagaaagtctttgatgtttgtaagaagtataatatacccgttgttatgactaatcctgatttaaaaaatggaactgaacgtgtattcgaagtatctaagatctttaatgaatacaataattttataaacatacaaggtgacgaaccactaattaacattcaggtagtagatgatttaattggtgaatccaaaagttatgccttcaacacagcaatgtcgaaaataccagcagagaaaccgaataacgtatcagaagttaaagtagcgttaacaaaagaaaatcgaattgtttatgcttcacgagcaaaaataccacattttcaatcagaatcaacttttcgatataaaattcaaggtgtttatctttatagccgagaaattctggaaagatttgtgaattctgaaatggggccacttgaacaatatgaaagtgtagaacaactccaggtgtattgag

SEQ ID NO: 254119 - DNA, 697 bp, Unknown
  Bacterial polypeptide expressing nucleotide sequence isolated from the Sargasso Sea
attgaaaactgcaattataattcctgcaagatacaaatcctcgagatttcccggtaaaccattggcaaaaatacttgggaaagaaatgattttaagagtgcttaatatatgtgctaaagcaattaataaaaaaaatatttatgttgctacagatgacaacagaattaagatacgagttttagaaaataactttcaggctattatgacaccaaaacaatgtaaaacaggtacagatagagttgcaatagcttcgaaaaaaataaatgctagaatttttgttaatgttcagggagatgaaccgttaataaattataaagatattaaaaaaattatatctgccaaaaaaaaatttcccaaaagtgttatatgtggatatacaaaaatatcaaaacaagaaaatcctaaaaatttaaacttaccgaaagttgtcattagcaaatcaaacaatttaatttatatgtcgcgacttccaataccaggatcgaaaagttcaaaacttgataacaaaaaaaactttttaaaacaagtttgtatttatgcttttaacaaaaatgaattaaatagttttttgaaatttggaaaaaaaacatatctagaaaaatttgaagatattgaaattctacgtttttttgagatcggaatacctataaagatggtcgaattaaaaaaacagagtatcgctgtcgatgtaaaaagt

SEQ ID NO: 254120 - DNA, 527 bp, Unknown
  Bacterial polypeptide expressing nucleotide sequence isolated from the Sargasso Sea
attgaatataatcggtataattcccgcaagaatggaatcttccaggtttcctggaaaaccattagcaagtattttaggcatgcccatgataggtcatgtttataatagaagtaaaatgtccgctatattagatgaagtctatgtagcaacatgcaataaagaaatatttgattatatagagtcaaatggtggtaaagcgataatgactgcatcgacgcatgagagagcatctgatagagctgcagaagctttgctcaaaattgaaaaagaaaaaaaaggtcaaaaaatagatattattgtaatgttgcaaggtgatgagccaatgattattcctagtatgattgaagatgcggtaaaccctttaattcaagatgctgaaatacaagtatctaacttaatatctgaaataagaactgaaaaagaatggattgacccaaatgaagtaaaagtagtttgtgatattaattataatgcactttatttttctagagagccaattcccatcattaaaaaatacaatggaaagt

SEQ ID NO: 254121 - DNA, 455 bp, Unknown
  Bacterial polypeptide expressing nucleotide sequence isolated from the Sargasso Sea
caatattcagggagatgaaccactattagatcctagcatcattgatggtttggtagggctttttgatgaccctagtgtttcaatgggcactgtagtaagccgaaatattggagtgaatgactatttagatagaaatattgtaaaagtatttttagatgaaaaccaaaacgcatatgattttaaacgcgatatttatgattctgaaataggcgggttatttaggcatattgggttttatggttttcaaagagattcgctttttgaatttacttcacttccaccttcacataatgaattggagtactctcttgagcaatttagagctattgataataatatttctattaaagcacttataacaaacgctgaacagcttgctgttgatgttccaggtgatttagagcatgtattatcaaaaatgggggaatcatttgaggcaacaagagtagaataat

SEQ ID NO: 254122 - DNA, 727 bp, Unknown
  Bacterial polypeptide expressing nucleotide sequence isolated from the Sargasso Sea
atgaccgaaaaaaataatatcataacgataattcctgctcgaatgggtagttcccgtttcccgggaaaacctatggcggaaataaatggtaaaccaatgattggtcatgtatatgaacgtgccaaattaagtaaaattattagggaaacctttgtggctacatgtgatagtgagattgcagattatatccattctattggagggcatgtaattatgacatcttctagccacgagagagcatcagatcgtactgcagaagcgatgttaaaagctgaaacgattattggtaaaaaagtggaaatagtagttatggttcaaggggatgagcctatggttactgcggatatgattgaaaaatcaattaaaccatttaaagatattgatgtcaatgtggttaacctaatgtcaaagatggaaacaatagaggaattcgaagaccccaatgaacctaaagttgttgtagatatcaatagtaatgctctttatttttctagggagccgataccatcaaggaaaaagggtgttctcgatgttccaatgtataagcaggtttgtatcattccttttcgaaggcaagctttacttgattttaatggattgccagagacagaactagagcgaatagaatctattgatatgaatcgtattttagaacacgggggtagtgtaaaaatggttcttgtcggtgaaaatcctataagtgttgatacaaaaagtgacccttagg

SEQ ID NO: 254123 - DNA, 610 bp, Unknown
  Bacterial polypeptide expressing nucleotide sequence isolated from the Sargasso Sea
gatgaagtttaaagttttattagtgataccagcaagatatggctcaactaggttgccaggtaaacctttgaaaaaaataggcaataaaactatgattcagcatgtatatgaaagagcaaaaaaagtaaattgttcaaaaacaattattgccacagatgataaaagaattttacaacattgtttattaaataaaatgaactgtgttatgacaaaaaaaagtcatgagacaggctcagatagagtctctgaagtatgtaaaaaatataattatcaatgggttttaaatctacaaggcgatgaaccgcttattaatattaaagatgttaaaaatttaataagaaagacactagcatataataaaaaaaataaaaaattttctgtttctacattatattttaaaaaaaaagagacaaatgaatataaccctaatgaagctagacttctaataaacaaaaaaaatgaagtattaatctttagtagaaaaaagattactaatacttcaaaagaaaaaagttatttgaaacatataggaatatttttttatcgaaaagactttttagtaaaattttcaaaattaaaagaaagatttttagaaagagatcaaaagctg

SEQ ID NO: 254124 - DNA, 380 bp, Unknown
  Bacterial polypeptide expressing nucleotide sequence isolated from the Sargasso Sea
aatgagcttttttgtcgttattccagcccgttataattctagtcgtcttccaggaaaacctttgaaagacattgcgggtaagccaatgattcaacatgtatacgaaaatgcgcgcaagagtgctgcaaaggacgttgtagtagctactgatgattcaagaatccttgattgcgttgaaaagtttggaggaagagccctattaacttcgaaagatcacacatcaggaactgaacgagtccaagaggcagctaatattttaaatctttctttagatgacattgttgtcaatgtccaaggggatgaaccattaatgccgcccgaggcgatagataaagtagcgattgatttgaatgaaaggaaaaattttggcatttctactt

SEQ ID NO: 254125 - DNA, 697 bp, Unknown
  Bacterial polypeptide expressing nucleotide sequence isolated from the Sargasso Sea
atgaagtattatctagtcattcctgcaagatataactctaagagatttccagggaagccactgattgatatttgtggagttcccatgataatcagaacttacaatcaatgtaaaaaagttgttccaaaatctaaaattttgattgctacagatgataaaagaatccaaaaagtttgtgaaaaagaaaaaattaaagtagttatgacttcaaaaaaatgcttgacgggtactgacagaatagcagaagtttcaaaaaaatataaagctgatttttatttaaatatacaaggcgatgagcctatatgtaatccatccgatattaaaaagctattaattgctgcaaaaaaaaatccaaaaactataattaatggttacacagaaattaaagataaaaaacttttcaattcaggacatattcccaaagttgtttttagaatggatgggaggctgttatatcaatcaagagctcctataccaacaacaaaggacaaaaaatttgttaaatcttggagacaagtatgtatctattcacttccttttaagtcattaatcgcatttaaatcagtgcgaaataaaacaccattagaaaaattagaagattgtgaattgttaagatttttagaattagggcatgaagtaaaaatgatcaagatgtctgataaatctatttcagtagatactaaagaaaatttatcag

SEQ ID NO: 254126 - DNA, 757 bp, Unknown
  Bacterial polypeptide expressing nucleotide sequence isolated from the Sargasso Sea
tttgaaaaatattagaacaatagcaattatacctgtccgtcttgagtcttctaggctaccaaataaagccttactagacatttgtggtttacctatgataattcatacttgcaagagagtagcaatggccaaagaaattgatcaggtttttcttgctactgataatgaaaaaatcaaggatgtagcagaagctaatgggattaaagtaataattacaagcaaggaccattcttgtggatctgaccgtgtagctgaagcagttcaaaatgtcccctgcgatattgtcataaatattcaaggggatgagccacttgtttatcctgagcatattgatgcaattgccaaaactataaaagacaataccactattaaatgtgcattagggtataccaaatactccaaaaaaaatagcccctcagatattaaggcggttcttgatatcaatagcaatgtaatttattgctctcgcactgatctaccaagtgatgcctataagacggttgataaaatgaaaaaattatgttttatagtagctttccgaaagtcttttttagctaaatatgcatcctggtccccgactcctcttgagaaaatagaattaaatgagtacttgcggattcttgaaaatggtgagaagattcgtgctgttcaaatcgatggtgcaaaaatcagtgtagacacaaaagaggatttaattatagtccgcaaactaatggaagaggacaaactcaagttaagttatttacctactcaataa

SEQ ID NO: 254127 - DNA, 368 bp, Unknown
  Bacterial polypeptide expressing nucleotide sequence isolated from the Sargasso Sea
tatgaatattggaataataccagcgcgtcttaattcaaaacgttttcctagaaaaatattagaaccattaaatgggaaaccaatgattgcacatacggttgaaagatctttattggcagaaaaacttgatcgagtgattcttgcgattgattctgaagaaacaaaatatgcattgaaagattttgattttgaaattattatgactgctatcgaacatcaatctggtactgatagaatagctgaggttgctcaaggtattaaagacgcagatttaataataaatatccaaggagatgagccattaattaatcccaaaataattgattcacttgtacgaaaacttgaaaacccaaatgttaattttgcaa

SEQ ID NO: 254128 - DNA, 270 bp, Unknown
  Bacterial polypeptide expressing nucleotide sequence isolated from the Sargasso Sea
aaaggatttcaaaaaaagtgaatgaatatggttttaattcaataatgactagctctaatcttttaacaggtactgatagggtcgcagaggcctcaaaaaaattagattatgatatttttgtaaacgttcaaggagatgagccattaatagatccaagcgatatattaaagtctattgaattgaagaaaagattcccatcctcagtagttaatagtttttgttttttgtctaaagaccccccccccccccctatttctgtcccgctctagc

SEQ ID NO: 254129 - DNA, 667 bp, Unknown
  Bacterial polypeptide expressing nucleotide sequence isolated from the Sargasso Sea
atgaaaaagataattattatcccctcaaggatggcttcatctcgattcaaaaataagccattagcaagtattctaggtatgcctatgattggccattgttactttcgatcaaaaatggtgaaaaatattgacgaagtattcgtagctacatgtgatagagaaatatttgagtatgtggagtccataggaggtaaatgtattatgacttctgataagcatacaagagcttctaccagggctgctgaagcattacaaaagattgaaaaagaatatcgcatgatgattccattagtggttatggtgcaaggagatgagcctgcaatatctcctaatgtaatttcaaatatcgtccatgcttttgatgatgaagatgttcagatagcaaacataatgtctcttataaggtctgaagaagattttaatgataaaaataatgtcaaagtagttgttgatagaaataatgatgctctatatttttctagagagcctattccttcctcttgggtagaggatcaacatgcaccaagatttatgcaaaccggaataattgccttcagaagagacgcccttattgaattcaattcaatggacgaaactactcttgagaaggttgaatcgatagatatgaatagggttctggaatcaggtagatcagtaagaatggtta

SEQ ID NO: 254130 - DNA, 505 bp, Unknown
  Bacterial polypeptide expressing nucleotide sequence isolated from the Sargasso Sea
caaggggacgagcctcttctgcctactgatatcgtgaaccatctgattagctttatgaagtcagacgaagattctggcattgaatttgcgacggtttctgaaccaattagtgaccaaagcgaatttgagaacccaaactgcgtcaaggtggtgaccgatcgagatggtgcggctctatatttttcccgcgcgccgattccttttcctcgggatcaaggcgtttctgaagctacttcaaatggcgaatataacaatttggtgaaagtagactatccgattaagcgacatgtaggaatatatgcctttcgagtgcatgccttgagagagttctcggcacttccggagtcaggtctcgagcggctcgagaaactagagcagcttcgatggttagaggctggacgaaaaattcatgtgatccacagcgaggaacttcttccgggcggagtagatacccctgaggacctcgctatagtcgagccattattattgaagaaacaaaagtagt

SEQ ID NO: 254131 - DNA, 694 bp, Unknown
  Bacterial polypeptide expressing nucleotide sequence isolated from the Sargasso Sea
atgagtgagtttatcgtaataattccttcaagactttctagtacaagacttaaagaaaaagctcttctagacttaaatggaaagagtttgattgaaagagtttatcttagagctattcagagcaatgctaataaagttttcatagcaactgattcaaaaaagattgaggatcatgtaaaaaaattttcacctaatgttatcttaacctcaaaagatcatgagtctggcactgatagagttcatgaatgtgcggcaaaattggatattagtgatgacatggttattgttaatgttcaaggtgatgaaccatttatagatccagaaacaataaacaaaacagcagatataattttaaaaaataaaaatgcatctgttggttcagcatgcacattgtttaaagataatgattttaatgatcccaacaatgtaaaagtttatttatcagattcaaatagagctataaattttttacgaaatgttcatccaatcgatctctcgaagaataaagcaaagtatttccaacatgtaggtatatattcatataattatgaaactttaagtacttttgtttcactacccagatctaaaaatgagatttctgaaagccttgagcaattgagatttttagacaatggatatgagatctatttagttgaaattgaagaattaagtataggaattgataccgagaccg

SEQ ID NO: 254132 - DNA, 516 bp, Unknown
  Bacterial polypeptide expressing nucleotide sequence isolated from the Sargasso Sea
atcaatcaagaaaaaaatgtgacataatggtgttggtacaaggtgatgaaccattaacatttccagaaatgatagatgaagctttggaaccaatgctgaaagacaagagtgtgaaaattacaaatttagttgcagatatggatacagaggaagaatttaacaattcaaatgaagtaaaagtagtaatggataacaaaaacaatgcattatattttagtagagaaccaataccgagtaaaaaaaaaactaaattgaaaatacctatgaaaaaacaagtttgtgtaattccttttagaagagattttttattacaatataatagaatggagccaacgccattagaggaaatagagtcagtagatatgatgagaattcttgaaaacggtggtgatgttaagatgtgccatacaaaatatttaacaaaagcagtagatactgaaaaagatttagatttagtttgtaagatgatgaaagaagatagtctatatgaaatttataagacaaacgaaggataag

SEQ ID NO: 254133 - DNA, 535 bp, Unknown
  Bacterial polypeptide expressing nucleotide sequence isolated from the Sargasso Sea
aataacagatacaaatcacacaactgggacagacagagtatttgaggcctctcagaaattagatttaaaagatatagattttataatgaatatccaaggtgatgaaccaatgattaatcctttagatattagaaacttaaataaattatcaaaggaaaaaaactttaatatttcaacattagcatacaacattcggcaaaaagaagattatgataatgaaaacattgtaaaagtaattacaaaaaataagatatccaataagtcagctacagaggctttaaatttttatagggtaattaaagaaaatagctctagcaatatctatcatcattttggaatatatctatacaagtattcggctttaaaaaaatttgtaaattttaaaaaaagtgaaaatgaaactaaagaaaaactggagcagcttagagcaattgataataatatgaaaatcaatgtaatattggcaaactatttttctagtggcattgatacaaaaaaagatctagaagattacattaaagcatttaaaaaataa

SEQ ID NO: 254134 - DNA, 727 bp, Unknown
  Bacterial polypeptide expressing nucleotide sequence isolated from the Sargasso Sea
atgattgaagaaaaaaaagtaatcacagttattcctgcaagactaggctcttatagatttcctactaaacctatagaattaatagatggaatacccatgcttgaaagagtttataaaggcgcaattgattctaaatattcggatatggtagttgttgcaacaccagatgaagaaattatggagttttgtagagaaagaaatttaaatgtctataaaagtcaaaaagaatgtaaaagaggcacagaaagggtttatgaaacatataagaatttgatgccagatgcagatattattgtaaatctacaaggagatgaacctcttattgatgctcccacattggatttatgtatccttgaactttttaaagacacatctgcagcaagtttaaatatgtataaaaaagcaacttatgaagaagctgaatctgaccaaaatgaagtaaaagtcgtaactgatttcgatggatatgcattgtatttttccagaaatcctttaccagcaaaatggcttggcgataaaaatttcgattgtaaattagagatatgtgtaatgccattttgggcatggtctattgaaaaatttatggtctctagagagggaatcctagaggatattgagtcggtagatatgcttagattacttgaaaatggaatgaaagttaaaatgattgaagctcctattgaaatgcagagtgtagatgttccagaggatataaaaaaggtgaaag

SEQ ID NO: 254135 - DNA, 430 bp, Unknown
  Bacterial polypeptide expressing nucleotide sequence isolated from the Sargasso Sea
ttgcaatttataactccctcttattatcagtcacagcttcctactcgcgtgctgggtgtaattcctgcccgttatcattcttctcgcttcccaggtaagccgttagtgaagattaatggtataccaatgattcaacgtacgtatgatcaagttaagcgttcaacagcgttagatgatattgttgttgctacagatcatgatgaaatctataactattgtctctctcagaatatgaacgtaattttaaccagtcaagaaaatttaaccggtactgatcgagtggccgaggtggcgacacaattagattatgatttctatgtcaatatacaaggtgatgagcctgttataaacgattcttctattgatttagtagttaacgcatataagtcttgtcagggacagtatgagatattcaatttattaaagagtg

SEQ ID NO: 254136 - DNA, 340 bp, Unknown
  Bacterial polypeptide expressing nucleotide sequence isolated from the Sargasso Sea
tatgagtaattcaattataataattccatcaagattagcagcaacaagactccctcaaaagccattaataaaaattaataataaaactctaatcatgcatgtatatgaaaaagctgtacaaagccaaattggagaggtttatgttgcaacatgcgacgaggaaattgcctcagaagtaagaaaaaatggaggcaaatttataatgacagacataaatcacacaactgggacggatagagtatttgaagcctctcaaaaattaaatttaaaagatatagattttattatgaacatccaaggcgatgaaccaatgatcaatcctttagatattaaaatttaa

SEQ ID NO: 254137 - DNA, 632 bp, Unknown
  Bacterial polypeptide expressing nucleotide sequence isolated from the Sargasso Sea
taatgctgtgatgacatcacccacagcgccgaatggaacggctcgaatcgtagaagccctttcacaattcccaaatgccgagattattgtgaatgttcagggagatgagccagacatttcacccgaggcgattgagtccgcaatcgatctccttacccaatgtccagaagcaggtctcgcaactcttgtcacaccgattcgttcacaggacacactcgctgatcctgctgcggtcaaagctgtgctgactccatggcggcaaacatcgacttctggcttcaaggatgccgcagttgttgaaggcatatggagagctatcacgttcagccgtgcgtcagtcccagcagcacgagagtggaacgatgacctgcttgatgctactcctccactctattggcaacatattgggctctatgccttccgacgccatattttggaacgatgggaatcgctcccggaatcacgactggcacaacttgagagcctcgaacaactccgtgcaatagaagccggcattccaatagcagttggtccgattgatcatgctgctcgtggcattgatacccaaaaggactatgatgacttcgtcgaacgatggaaagaacatcaccagccaggcacgggcatctgac

SEQ ID NO: 254138 - DNA, 454 bp, Unknown
  Bacterial polypeptide expressing nucleotide sequence isolated from the Sargasso Sea
cttggttattggtgttatcccagcaagaattggatctaccaggtttcccaaaaagatattagctgatatagatggtaagcctatggtggcgcatgtagcagaaagagctttagaggcaaaaaaattagatagggtgattattgccattgatgcagacgaaacaaaaaatgcattatccaattatgaatttgagcttgttatgacaaaaccgagccataatagtggtacggaccgtgttgctgaggtagttaggtcgattgaggatgcagaaataattatcaatattcaaggagatgaaccactattagatcctagcatcattgatggtttgataggcctttttgatgaccctagtgtttcaatgggaactgtagtaagtcgaaatattggagtgaatgactatttagatagaaatattgtaaaggtttttttagatgagaaccaaaacgcatat

SEQ ID NO: 254139 - DNA, 622 bp, Unknown
  Bacterial polypeptide expressing nucleotide sequence isolated from the Sargasso Sea
tttgagagtaattcgttttgatgaggtctacatagccacggacgatagccgaatcgcagaggctggtcagaaccttaatctaaacgtattaattacacgcaaggagcacaggactgggaccgatagggtcgctgaatgtatggaacttgttgatgccgacatttatgtgaatattcagggtgatgagccgatgatcgagccaaaagcgatcgaaatggttaccgctgccctcgccgaatgcgatgatgcacgggtaatggcatctaacgcatacgtacctttttcagatccttgcgatgtggtggatactaataatgtgaaagttgttctttcaaaaaatgaccgggcgctattttattcgcggcaacccattccttatcctaagtcatcgaccacgcactatctaaggcagcttggattgtacgcttttcgaaaaaagggcttgcaggttttcgctgaacacaagcctggtgcagttgagaatgcagagggcgtcgagatgttgaggttcctcgaatatgatcacgaggtcttaatggttaaagtcaatgatagttcaattcctgttgatactgaagcggatttatctcgggtaattgagttgatgttgccgctggcttaa

SEQ ID NO: 254140 - DNA, 475 bp, Unknown
  Bacterial polypeptide expressing nucleotide sequence isolated from the Sargasso Sea
agatattagtgatgacatggtcattgttaatgttcaaggtgatgagccatttatagatccagaaacaataaataaaacagcagatataatttttaaaaataaaaatgcatctgttggttcagcatgtacgttgtttaaagataatgattttaatgatcccaataatgtaaaagtttatttatcagactcaaatagagctataaattttttacgaaacgttgatccaatcgatttctcgaagaataaagcaaagtatttccaacatgtaggtatatattcatacaattataaaactttaagtacttttgtttcattacccagatctaaaaatgagatttctgaaagccttgagcaattaagatttctagacaatgaacatgagatctatttagttgaaatccaagaattaagtataggaattgataccgagactgattataaaaaagctttaaagattcttaataacaatgactaa

SEQ ID NO: 254141 - DNA, 733 bp, Unknown
  Bacterial polypeptide expressing nucleotide sequence isolated from the Sargasso Sea
aatgaaaactcttataattataccctctagattatcagcaactaggcttccaggaaaacctttattaaaaatcaatgacatttcaattatttcacatgtatttaagaaggcaaaagaggcaaatattggagaggtaattgtggctgctgaggatcaagagattgtcaatgatgtaaaaaaaaatggaggaaaagccattttaacaagcaataaacataaaactggaacagacagaatatatgaagcttatcaacaacttaaattagataatattgattttataatgaatattcagggcgatgaaccagcaattaatattcaggatattattaacctaaaccaaatgatgataaatcataaagcagaaataggtaccttggctgctaaaatacaaaataaatcagatttaacaaatgaaaatatagttaaagttattactcaaaataatttagaagatgatccgttttctaatgcaaaaacatttttaaggaaatctgaagatgtattaaatatttatcaccatattggaatttattcttattcatctgaaattcttaaaaaatttgttgaattagcacaatcaaaaaatgaaattgaaaatagattggaacaacttagagctctagataacaatattaaaataaatgttgctttagcaagtaaagcacctataggaattgatacagaggaagattatctggccttaaaaaaaataatggaatataagtcctga

SEQ ID NO: 254142 - DNA, 469 bp, Unknown
  Bacterial polypeptide expressing nucleotide sequence isolated from the Sargasso Sea
atgaccggccaggttctaggcattgtgcctgcccggctagggtcgacgcggctcccccggaaacccctccatccgcttttagggagaccgcttatagagtgggtttggcgtcgggtcgctgcgatgaaagtccttgatcacgccctagtcgcgaccgattctcctgaggtggtcgatgtgtgccacgcaatcggggcgcccgttgaattaacatccgaggatcacgtatctggaactgaccgtgtcgcggaggtagtcggacggccgggttacactggatatggcttggtggtgaatatccaaggcgatgagcctctgatagaagaagaacatgttcgaagcgccatcgaattagtccgcagcggtaactggcaggtcgggacctgtgcgacaccagttcaggaggctggtgtttcagaagatccttctatggtcaaggtcgcacgagcggactcaggccgagccctct

SEQ ID NO: 254143 - DNA, 733 bp, Unknown
  Bacterial polypeptide expressing nucleotide sequence isolated from the Sargasso Sea
atgacagtctctgccttaattcctgcaagattaaattcctctagacttgaaaaaaaattgattaaagatttggatggaattccggtaattgtgaggacatataaaaatatagtttctacaaatctatttaaagaagtaattgttgtgactgacgctgatgaaattgtagaaattttaaaaagacataatataaagttcttaaaaagtttgaaatcacataacactggaacagatagaattgctgaatttgccgataaattaaattctgatattattgttaatgttcaaggagatgagccatttattagtaaagatgatctaatcagtataatcaacgaatttaagtgcgattcaaataatcttgttaatgtagtttcattaatgatcaaactatccaatattgatgaaataaacaacccaaataatgtcaaagtagtagttgataataataatgactctattttattttcaagaagtatcatcccatttgatagagatgatttaaaacctaattattataagcatataggagtatatgcattcagatcattatacttaaaaaaatttgcaaaatatgatcaaacaccattagaaaaagctgaaatgatcgaagctttaagaatagtcgaacatggtgagaagattagaatgattgagatctttaaagaacatgtatcaattgacactattgatgatctaaagatggctgaatcaattctaaaaggaaaatgat

SEQ ID NO: 254144 - DNA, 718 bp, Unknown
  Bacterial polypeptide expressing nucleotide sequence isolated from the Sargasso Sea
gatgagctatagaataatcattcctgccaggattggctcaactagactacccaataagcctcttaaggatatagcaggaaaaaccttaattgaaagagtagttgatcaggcaagaaaaacttctgctaaatctatacacgtggcaactgattctgatgaaattatgtatcactgcaatgaaattaacgtagaggctcttttaactaattcaaaccatagaacaggatctgatagattatttgaatcatgcgatatcctaaaattatcagatgaagaattaataataaacattcagggagacgagcctttcattgaacccaaggatattgaaaacttagcgcaattagctgaaaaagaaaatgccaatatggttactttgtattcaagccttgtatcaaatgacttagcaaataaagacgtggtaaaactttggctggattcaaatatagtaaaagatttttcaagggatgtggaccatttaccaagaaaagacgctaagaaacatataggagtctatggatataaagtaaatttccttcagaagttcatcaaatggaaacaaagtaaaaatgagatcaaaagaaatcttgagcaaatgcgagtcatggacaatggagagaagatttatgcaatcgaatcatcgggaaaatatcacatcggtgttgatactgaaagtgatctcaagcaagcaatagagatagctctagatttagaatga

SEQ ID NO: 254145 - DNA, 688 bp, Unknown
  Bacterial polypeptide expressing nucleotide sequence isolated from the Sargasso Sea
atgcaattacaaagtagatcgactatcagatctcccaaaattattggtttaattccagctcgatggcaatcttcacgttttgaaggtaagcctctcaagctaataaatggcaagccgatgatagagagggtatataatcaatgttcccttgtagaatcacttgataaagtaatagtgctcaccgatgatgatcgaatacaggagttctgtgaagagaattcaataccttatttgagagttgatgatgattgtgaaacaggtacagatagatgcgcaaaagctattgaatccatagaggcagacttttttgtaaatatccagggagatgagcctgtaattgatcctggttcaattgatttactaattaagaattttttaggaaatgacagaagcgcaaatgtgtcatccagatcagaaattagaattgggaatgcatatacagaaataaaagatgataaaaagttgcatgataaaaatgttgtaaaagttgtttttgataaaaataaaaaggctctttttttctcaagatatccgttgccatttcttaaaggaaaatcaggaaaatttttccaacaacttgggttatatatttattctaaagaggctcttaatcttttttcaaaactgccgagtctttcgctagaaaaatcagaggaggttgaattattgagatttttggagcatgggt

SEQ ID NO: 254146 - DNA, 736 bp, Unknown
  Bacterial polypeptide expressing nucleotide sequence isolated from the Sargasso Sea
atgaatgagtttatcgtaataattccttcaagactttctagtacaagacttaaagaaaaagctcttctagacttaaatggaaagagtttgatagaaagagtttatctcagagcaattcaaagcaatgctaaaaaagtttttatagcaactgattcaaaaaaaattgaggatcatgtaaaaaacttttcacctaatgtcatcttaacctcaaaagaacatgagtctggcactgatagggttcatgaatgtgcggaaaaattagatattagtgatgacatggtcattgttaatgttcaaggcgatgagccattcatagatccagaaacaataaataaaacagcagatataatttttaaaaataaaaatgcatctgttggttcagcatgtacgttgtttaaagataatgattttaatgatcccaataatgtaaaagtttatttatcagactcaaatagagctataaattttttacgaaacgttgatccaatagatttcgcgaagaataaagctaagtatttccaacatgtaggtatatattcatacaattataaaactttaagtacttttgtttcattacccagatctaaaaatgagatttctgaaagccttgagcaattaagatttctagacaatgaacatgagatctatttagttgaaatcgaagaattaagtataggaattgataccgagactgattataaaaaagctttaaagattcttaataacaatgactaaa

SEQ ID NO: 254147 - DNA, 742 bp, Unknown
  Bacterial polypeptide expressing nucleotide sequence isolated from the Sargasso Sea
atgagtaaaactttaattttaatcccctcaagattagccgcaaaaagacttcctagaaaacctcttttaaaaataggaggtaaatctctaatttatcatgtttataaaaaagctaaagaaagtaaaattggagatgttttcgtagcgaccggtgataaagaaatatacaatgatataatagataatggtgggaaatgtatattgaccaaaacccttcataaatcaggcacagatagaatttatgaggcgtttaagaaattaaaaatcaaaaaagttaaatatgttcttaatattcaaggtgatgaacctcttataaataaaaatgatatagtaaatttaaataaaattgctgtaaaaaataaacttgatttttgcacattgggttctttaatcgataaaaaaaaaatacatagtaataaaaacatagtaaaagtagaaactataaataaattaaaaaaaaataattatttattagcaaaaaatttctttagaaaaaagaaactaaataaatatgtcaatatatatcatcatattggcatctatcattatagcgtttcagcacttaaaaaattccaatcttttaaacaaacaaaaaatgaaaaaaaatataaacttgagcaattaagagctatggataataaaatgtctgtaaacgttgtgttagctaactcttcacctataggagttgatactttaaaagaatacaaaaaagtaaaacttttaatggaaagaaatagctaat

SEQ ID NO: 254148 - DNA, 733 bp, Unknown
  Bacterial polypeptide expressing nucleotide sequence isolated from the Sargasso Sea
ttggttattggtgttattccagcaagaattggatctaccaggtttcccaaaaagatattagctgatatagaaggtaagcctatggtggcgcatgtagcagaaagagctttagaggcaaaaaaattagatagggtgattattgccattgatgcagacgaaacaaaaaatgcattatccaattatgaatttgagcttgttatgacaaaaccgagccataatagtggtacggaccgtgttgctgaggtagttaggtcgattgatgatgcagaaataattatcaatattcaaggagatgaaccactattagatcctagcatcattgatggtttgataggcctttttgatgacccaagtgtttcaatgggcactgtagtaagtcgaaatattggggtgaatgactatttagatagaaatattgtaaaggtttttttagatgaaaaccaaaacgcatatgattttaaacgcgatatttatgattctgaaataggtgggttatttaggcacattgggttttatggttttcaaagagatttgctttttgaatttacttcacttccaccttcacacaatgaattggagtactctcttgagcaatttagagccattgataataatatttctattaaagcacttataacaaacgctgaacagcttgctgttgatgttccaggtgatttagagcatgtattatcaaaaatggggaaatcatttgaggcaacaacagtagaataat

SEQ ID NO: 254149 - DNA, 700 bp, Unknown
  Bacterial polypeptide expressing nucleotide sequence isolated from the Sargasso Sea
cttggtaattggagtcatacctgcaaggttgaaatcaacaaggtttccaaacaaaatcctcacccctattaatgacaagccaatggttatgcacgtatatgagcgttcaaaagaatcagaaaaacttgatgatgtaatcattgctattgatagtaaagaaactgaagacgcattaaaacagtataaacctaatattaaaatgactcaccctgatcatttatcaggaactgaccgtgttgctgaagtgattaaagacatggatgctgatattatattaaatattcaaggcgatgagcccatgcttgatcctttaattattaatcagttagtagattgttttgatgatgaattagtggatatggcaacaataggtagtacagtaattaacaactcagattatttgaatccaaactctgttaaggtaacaataaatgaaaatggttttgcatcatcattttgccgtgatataaatgatcaccaaattggaggatattaccaccatgtaggaatttatggatatcgtaagaatacattacaacatctaactaaccttgatcagtctataaatgaaaaaagtttaaaccttgagcaattacgtgcattggacaatggaatagaaattaaagttgcaatgacagattatccacatcggggaatagatacaaaagaagatcttaatcaaattgagttaaataaatga

SEQ ID NO: 254150 - DNA, 573 bp, Unknown
  Bacterial polypeptide expressing nucleotide sequence isolated from the Sargasso Sea
ttgcctcagaagtaagaaaaaatggaggtaaatttataatgacagatataaatcacacaaccgggacggatagagtatttgaagcctctcaaaaattaaatttaaaagacatagattttattatgaacatccaaggtgatgaaccaatgatcaatcctttagatattaaaaatttaaataagctatcaaaggaaaaaagcttaaatatttcaacattagcatacaacattgagaaaaatgaagattatgacaatgaaaatattgtaaaagttattacaaaaaacaaaatatctgataactcaatatcagaagctttgaattttcatcgagtaattaaagaggacagctatgacaatatataccagcattttgggatatacttatttaagtattcagctttaaaaaagtttgttaatttaaaaaaaagtaaaaatgaaatcaaagaaagactggaacaactgagagcaatcgataataatatgaaaatcgacgtgctattggcaaattatttttcctctggaattgatactaaaaaagatctagaagaatacataaatttattgaataaataac

SEQ ID NO: 254151 - DNA, 481 bp, Unknown
  Bacterial polypeptide expressing nucleotide sequence isolated from the Sargasso Sea
cgatcttattgttaacgtgcaaggggacgagccactcttagatccatgtttaattgacgcggtccttagtcgcctgcaggccgacccgcccgcgaatatcgtgaccgcccgctgtgccatcaccatgcaatctgaattcactaatccaaatatcgttaaagtcgttgtgaccgcagacgactacgccttgtacttctcgcgggctcctattccccagcatcgaggagagtcagacgagtcgccaactatactcggctacaagcatattgggctgtatgcctaccagcggacaactttgctcgaacttaacaatcttcaaccaaccgtactcgaaaaagcagaacaacttgagcaacttcgagcactgcaatacggatatcgcattgcgactatcgaaacggacacccattcactcggcgttgacacgcccgaagacctcgatgaagtccgtcgccttgtttcaacgggagccaatgaatga

SEQ ID NO: 254152 - DNA, 631 bp, Unknown
  Bacterial polypeptide expressing nucleotide sequence isolated from the Sargasso Sea
gttattgtagcaactgatgataatcgtatctttaattgtatcaaagattttggtggaaaagtaatattaactaagaagaatcataaaaatggaactagcagatgtttagaagcagtcaatatatattgtgaagaaactggtaaagaatttgaatacattgtaaatgttcaaggagatgagccattaattcatgaagatcatttaaaaaaattaattcattgttttcaagatccaaacacaaatttcgcaacagttgcactccaattatcaaataaaaaacctctaccaaatggaaaagtatttttggtaaaagatatgaatgaatatgcactttatttctctagaaatatcataccatttattagagctaaaaacaaagaaaatataactgataatacatctttttaccaacatattggaatttatggatataccaaaaaagctttagaaaagttttgtaatcaaaagccttcttcactagaaatgtctgaaaaactagaacaacttagatggcttgaaaacggaggaaaaattaaagttgggataacaaagcaattatcatatcctgttgacacaatcgaagatttaaatgaggttagaaaaatttatgaaaaaaaacatcatatataat

SEQ ID NO: 254153 - DNA, 525 bp, Unknown
  Bacterial polypeptide expressing nucleotide sequence isolated from the Sargasso Sea
aatggagtttcatgttgttatcccggtgcgctaccattctaatcgattcccaggtaaagccttagccgatattgcaggaaagccgatggtgcagcgtgtctatgataatgcaatggctagtggtgcagaaacggttatcatcgcaacggatgacgaaaagatcgcagaggttgccagtggttttggagcaaaagtatgtatgacgtcggatacgcatcagtcaggcacggagcggattgcagaggctgtagaggcgcttgattatgaaaaagatgagattattgtcaatgtgcagggtgatgagcccttaataccgccgcatgccattaagcaggtagcacaagcgttgggagaacatgacaatgttaaagtatcgtcgctttgtcatcccattgagtctcttgaagagctcaataatactaatgctgttaaagttattttgagtcgtcgtcattttgcgatgtatttttcacgttcgatgattccatggcaacgcttatcagatgaagctgctgtactcgagtt

SEQ ID NO: 254154 - DNA, 520 bp, Unknown
  Bacterial polypeptide expressing nucleotide sequence isolated from the Sargasso Sea
atgaccaattcaaatcatcaaactggaacagacagatgcgctgaaataatcgagaaaaacccaggttatgatattgtaattaatattcaaggagatgaaccattggttaaccctattcaattaaatacccttatacaatcatttgaaaacaatgctaaacaagaaattgcaactttagctattcgttgccttcatcaagaagaaatcagtaattcaaatcgtattaaggttgtatgtgattacaaaaacaatgctttatattttagcagaacatctattccattctcaaaaaaaaccgatacaaaaaaataccttagacatattgggctttacgcatatcaaagtgaaactctattgaaaatagctaaactaactccttgtgaaattgaaaaaatggaatccttagaacaattgagatggctattttatggatattctataaaagttattgaaaccgacattgaaacacctaacatcgatagtccagaagatgtcaaaaatgttattaaacacctctaaa

SEQ ID NO: 254155 - DNA, 522 bp, Unknown
  Bacterial polypeptide expressing nucleotide sequence isolated from the Sargasso Sea
aatgcaggattttatcgttttaataccatctagaatggaatctactcggttaccaggaaaaccgttaaaattaataggtaataaaacattaatacagagagtttatgaacaagctctacaaagcaaggctaagaaagttttagttgctacggattctgaagagattatttctcactgctccaataatagtatcgatacggttttaaccagacgtggacatttaacagggtcagataggctcgctgaagtggtaaatattcttgatttggaaaacgatcagattgttgttaatgtgcagggagatgagccttttatagatcccgacgatattaataatttgttcgacttaatggtgcaaaaatcttcaaacatggcaactttattcgctaatttagatgccaaagacataacaaatacaagtgtcgttaagttatggattaatgaggacggaagtgtagttcatttctctcgaaaggtagatgataagtatgatattgataaagccaaaatgcatcttggtat

SEQ ID NO: 254156 - DNA, 652 bp, Unknown
  Bacterial polypeptide expressing nucleotide sequence isolated from the Sargasso Sea
ccaacatgtgtgggaacgtgtaaaacagacaccatcaatagatcaaattttggttgcaacagacgataagcgtatcttggatactgttagaaattttggaggtgacagcgtacttacaagtattgaacatgaaactggcacagaccgtattgtcgaagtagctaatgaaatttcttgtggatggatattgaatatccaaggagacgaaccaactgttatgcctgcagacttggatcgtcttatcaggcaggctaaaattaaaaaagggactaaagctgcaacactaatttataatataaataatcaggtactgttaaatgatcccaatattgtaaaagttgtgatagatattaacaacatggcattatatttttctcgttcgatgataccatacccgcattcaggtcaatccacggattgtaaaatttggcgacacctaggagtatatcttttccaacgcagtttccttatggagttcagtcaatggccgagatcaaaactggaaatatctgagcaattagaacaacttagaattcttgaaaacggtgagtctttgctttgcgtggaagcagaaaacgaagtagtgagtgtagatgttcctcaagatttagtttacgtggagaatttaatgaagaaaaaaattactagctga

SEQ ID NO: 254157 - DNA, 748 bp, Unknown
  Bacterial polypeptide expressing nucleotide sequence isolated from the Sargasso Sea
tatgcaatcagagcatgactacgttgtagtaattccagcaagatatcattcaacaagacttcctggtaaaccacttattaagattttggggattgaaatgcttcaaagaacttataatcaatgcctcaaagcggtagataaagaaaaaatttttgttgctactgatagtaaaaagattaccgattattgcattgaaaataacattcaatctttattaacttcaaaaaattgtcttacaggaacagacagaattgctgaagtatctaaaatcattgatgctaaggtatatataaatgttcaaggcgatgagcctcttctcaatcccgatgacttgaaacttctgatagaatcctcagaagaatatccagatattatttttaatgggtattgtgaaattgatgacaactctcaatatatctctgaaaatataccaaaagtagttttttcaaacacaaaagacctgctatatatgagcagatcaccaatcccatttcataaaaacaaaaaaaatcatcattcatatcgtcaagtatgtatttatgcctacccaaaacatgttttatcaatttttcttgaacagcccaaaaagactaagtttgaaagctatgaagatattgaaattctaagatttcttgagcttggttgtaaaattaaaatgttaaaaatgagctcagagtcagttgcagttgatgtcccaaaagacataattaaagttgaggaaattttaaaattaagtaatgaaaaatga

SEQ ID NO: 254158 - DNA, 1009 bp, Unknown
  Bacterial polypeptide expressing nucleotide sequence isolated from the Sargasso Sea
ctgcaacgcggacaagctcgcctacccgatccgcgacggcatccccgtgatgctggtcgacgaggcacgtcagaccgtcgaaggcacgccggtcgacccggccggccgctaagccgcccgacccggccctcgtcgcggcccgtccgcagcgagggcgccgaacccgcgggcggcccccgttctgacgcgccgcccgctccgctctcttcaccgccctccccgatgactcaacccttcatcgccgtcattcccgcccggctcgcttcgacgcggctcccgaacaagccgctcgccgatctcggcggcaagccgatggtcgtgcgcgtcgccgagcgcgcgcgcgaagcgggcgcgcagcaggtgctggtcgcgtccgacgcgcagagcgtgctcgatgcggcccgcgatcacggtttcgaagcggtgctgacgcgcgccgaccatccgtccggcaccgaccggctcgcggaagtcgcggcgacgttcgggtggagcgacgacaccgtcgtcgtcaacgtgcagggcgacgaaccgctgatcgaccccgtgctcgtgcgcgacgtagcgtcgcacctcgcgacccatccggcctgcgcgattgcgacggccgcccacccgatccacgacgcggccgacgtgttcaacccgaacgtggtgaaggtcgcgctcgacgcgcagagcgtcgcgctgtacttctcgcgcgcgccgattccgtggagccgggacgcgtaccagccgcactggcccgacgtcgcggccatgcctgcaccggccttcccggtctatcggcacatcggcctctatgcctatcgcgcgcgtttcctgcgcacctatccgacgctcgcgcaggcgccgatcgaacaggccgagcagctcgagcagctgcgcgcgctctggcacggcgagcgcatcgcagtgctgatcaccgagtccgcgccggaagccgggatcgacacgccggccgatctcgcacgcgtgcaggccctttttcagccgtcatcaaaataac

SEQ ID NO: 254159 - DNA, 751 bp, Unknown
  Bacterial polypeptide expressing nucleotide sequence isolated from the Sargasso Sea
atgtcatttacagttgtgatccctgctcgatacggctcaagtcggtttcctggcaaacccttagcgcttattgacggaaagccgatgattcaacatgtggttgaacgtgctaaagaagctggagcggataacgtcattgttgccacggacgatgaacgtattcaaaacgtcgtgctaggttttgctcaagtatgcatgacgtctgtcaaccaccaatctggaacagagcgcattgccgaggttatcgaaaaagaaggcattgcgagttctactattgtggttaacgtacagggggatgagccatttattcccgccgaaaacatcaggcaggttgcagataatcttgccaatgcgcctcagtgccagatggctacattatctacgcctatcgaacgtgttgaggatgtgtttaaccccaatatcgttaaggtgttggtaaacgaaaagggtgagtctatctatttctcacgttctcctattccttttgaacgcgatcacatgatggcaaagccgcaatctgcaaatacgtcgctgtacaaacgccatataggtatttatgcctatcgtgctgaatacgttaagcaatatgttgcttatgcgcctagctctctggagcaaattgaatccttagaacagcttcgagccatatggtatggcgataagattcactgtgaggtggcgatagcgccaccgcctgttggaattgataccccggaagatctagaacgtcttttaaagactataagttaat

SEQ ID NO: 254160 - DNA, 799 bp, Unknown
  Bacterial polypeptide expressing nucleotide sequence isolated from the Sargasso Sea
atgacgtcattcaatagtgcacgcccggtacatgtcgtgattccggcgcggtacggttcgacccgcctgccgggcaagccgctcgtcgacctgaacggcgagccgatgatcgttcgcgtgcacgcgcgtgtgagccgcgcgctgcccggtgcggacatcgtcgtcgcgatcgacgacgcgcgtatcgcggaagcgctcgacgcgcgcggcatccgcttcgcgatgaccggcacccatcatgcgtcgggcaccgaccgcgcggcggaactcgcgcgagcgtccggctggcgcgacaccgacgtggtgctcaacgtgcagggcgacgagccgctcgtgcccgagaggctgctgaaggcctttgcaggctactgcgttgcggtgccggatctcggcatcgcgacagtggcgtgcccggtcggcgatgccgcgctgctcgacgaacccggcatcgtcaagctcgtcgtcgatcgccgcggccgtgcgctgtacttctcgcgcgcggcgatcccgttctgtcgcgatggccggccggcgggtgcggacctcggcgggcacctgcggcatatcggcctctacggttattcgaatgcggcgttgcagacactggcgcataccgcgccgtgcgaactcgagcagctggagcagctcgagcaactgcgcgcgctgtggctcggcatgccgatcgaagtgatgcgctggcccgatgcgccgccggccggcgtcgatacgcccgacgacgtggctcgcgtcgtctcctttctcaaacggcaaacccaagatgagacagaaccacattgaa

SEQ ID NO: 254161 - DNA, 916 bp, Unknown
  Bacterial polypeptide expressing nucleotide sequence isolated from the Sargasso Sea
cctggctctccgatccgccgcaattcaccgtcgtatttgccctctttcccgttggcgcgcgcaatgcacgacttgcgagcgctttcttccggttgcatcgccgcccgtccttccgatgaccaacgctaacgtcaccactcctccgtttgtcgccgtcgtaccggcccggctcgcctcgtcgcgcctgcccaacaaaccgctcgccgacattggcggcaagccgatggtggtgcgggtcgccgaacgtgcccgcgaatcgggcgcgcaacaggtgctgatcgcctccgacgcgcagccggtgctggatgtggcccgcgagcacggcttcgacgccgtgctgacacgcgccgatcatccgtcgggcaccgaccgtctcgcggaagtggcggcgcagttcggctggagcgacgacacgatcgtggtgaacgtgcaaggcgacgagccgttgatcgatccggcgctcgtgtgcggcgtcgcgtcgcacctcgcgtcgagccacggatgcgcgatcgccaccgccgcgcatccgatcaccgatgcggcggaaatcttcaatccgaacgtcgtcaaggtcgtgctcgacgcgcgcggcgtcgcgctgtatttctcgcgcgcgccgattccatgggcacgcgacgcgtatcaagcgcattggcccgatgtggcgtcaatgcctacgccgccggcgcccgcggtggtctatcgccatatcggtttatacgcgtatcgcgcccagtttctgcggacctatccaagcctcgcgatttcgccgatcgagcaggtcgaagcgctcgaacaactgcgcgcgatgtggcacggcgagcgaatcgcggtgctggtcacggagaatgcgccgctgcccggcgtcgacacgcccgccgatctcgcgcgggtacaggctttattcggggcgtga

SEQ ID NO: 254162 - DNA, 742 bp, Unknown
  Bacterial polypeptide expressing nucleotide sequence isolated from the Sargasso Sea
tttgtcttcctcacaaaaaacattagcaataatacctgcacgctattcttcaacgagattccccgggaaacctttagtggacattgctggtaaaccgatgatccagcatgtatgggaacgagtgagacagactccatcaatagatcaaatattggttgcaactgacgatgaccgcatactaaatactgtcaggaattttggaggtgaaggtgtacttacaagtacaaaacatgaaactggtacagaccgcattgtagaagtagttcaagaaatttcatgcgatttggtattaaatatacagggagatgaaccaactgtcctgccagcagaccttgaccgcctaatcaagcagacgaaaattagaaaagggactaaagctgcaacactaatttataatattaccgacaagacacagttaaatgatccaaatatagtgaaagttactgtaaatgtaaataacatcgcattatatttttcacgttctctgataccctacccgcgttcaggtcaaaattctaattgtaagatttggcgtcaccttggaatataccttttccagcgcaaatttcttttggagtatagtaaatggccaaggtctaacttggaaaaatcagagcaattagaacaacttagaattcttgaaaacggtgagtctatactttgcgtggaagcagaaaatgaaacagtaagtgtagacgttcctgaagatttagtttacgtgaaaaatttattgaagcgctaa

SEQ ID NO: 254163 - DNA, 727 bp, Unknown
  Bacterial polypeptide expressing nucleotide sequence isolated from the Sargasso Sea
atgaatattggtgttgtgccagcacgtcttgcgtcaaaacgtttacccaaaaagattcttgcagatcttgatgggaaacctatggttgctcatactatggagcaggttttaaaagcgcagaaattagataaagttattttagcaattgattctgaagagaccttcgatgcgctgaaggattttggatttgatatggtaatgacatcaaaagatcattgttctggtacggaccgagtagcagaagtagttaagaaaaatgaagatgcagaggtgataattaacattcagggcgatgagccactaattgatgcaaatattattgatgaccttcttggtctttttgaagataaggatgtcaatatgggcactgctataagtacaaaacttagggctgatgaccttctagatgataatgtagttaaagcgattattgaccaggataaaaatgtaatagattttaaaagaaatatatatgattctgagattggcggcctttatcgtcatattggtatctatggtttccgaagaaatacactttttcaattttcgatgttggaccaatcaccaagagagaaaaataggaagctagagcagatgagagctctagataatgacctgcctatacgtgctacaatcactggtttcgaaagctttgcagtcgatacgaagagcgatttaaataaagtattacaaataatggaagcaaaggagataggtttagactgat

SEQ ID NO: 254164 - DNA, 657 bp, Unknown
  Bacterial polypeptide expressing nucleotide sequence isolated from the Sargasso Sea
aatgggtttcattgcggtgatccccgctcgtttcgggtcgacgcgcctccctggaaaaccgctcctcgatatcgccggtcaacctatgattcagcacgtctacgctcgcgcccagtcgtctcgtgcagaccgcgtatttgtcgcaacagacgatcagcgaatcgaggacgtcgtgaggggttttgggggcgaatgtttgatgacagcgtcagatcatccaactggaacagatcgattggcggaagtcgcagatgttttaggattggcggccaatgtaattattgtcaacgttcaaggggatgagccactactacctgcgtctgcgatccatcaggtcgctgaaatgttgatcgcgcatccagaggcgtccattgcgacactgtgtgaaccgatccaggatgcatctgatattgacgatccaaatcaggtaaaagttgtcaaaagccgctcaggccgagcgttatatttctctcgagcacgtattccgggttatcccacgtccgcgattggagcccactatcggcatgtcgggctatacgcgtatcgcgctggctttcttcgtgacttcaggacttgggagcccacgtcacttgagcggtttgagcgattggaacagttgagagcccttgagcatgattgcttgattcaggtcgatgt

SEQ ID NO: 254165 - DNA, 659 bp, Unknown
  Bacterial polypeptide expressing nucleotide sequence isolated from the Sargasso Sea
catgttccacgtcatcatcccggcacgttatgcctccacccgattaccgggcaagccattgcagctgattgaccgcaagccgatggtccagcatgtctggcagcaggcgtgcaagagcggtgcggcctcggtgattgtggccaccgatgatcagcgcatcatggatgcctgtgctggttttggcgccagggcaatcatgacccgggcggaccatccgaccgggactgatcgcctgcaggaagtagtgagtcagttgggtctgccggacgacgcctgtgtggtcaatgtgcagggtgatgagccgatgattccgcctgcggtcattgatcaggtggcggccaacctgatcgcggcgcaggacgcaggtatcgctacccttgctgagccgattcacgacagcgagaccctgttcaatcccaatgcggtcaaggtggtctgtgatcatcagggctacgcgctgtacttcagtcgagcgcccatgccctggtgtcgtgatcagtttgcaaacggcccggcggcgttgccggatgccattccgttccgtcgccacgtgggtatctatgcctacaaggtcagcttccttcatgcctacgttggctggcctgccagtccgctggaaacggccgagtcacttgagcaattgcgtgcgctctggttcg

SEQ ID NO: 254166 - DNA, 538 bp, Unknown
  Bacterial polypeptide expressing nucleotide sequence isolated from the Sargasso Sea
atcaggcacagaacgtttagctgaggttgttgaacagttaaaacttgaaagtgacactattgttgtcaacgtgcaaggtgatgagcctttattggcaagcgaaaatgtatctcaagttgccatgctacttgctgattctgatgcgccaatggcgactttgagcaccagcattgatgagattgacgatatatttaatcccaattgcgtgaaagtcattaacgatgcagacaacaacgcactgtatttttcgcgctcgccaatcccttatcatcgtgatgcgatgatgaatgatgaccgagataagctaaatcttgctgattttgcgcgccatattggtatttatgcttatcgtgctggcttcattaaagactacatcgaattaccagaatctcgattagagcttttagagtcattagagcagcttcgtgtactttatcatggtcacaaaattaaaatcgcaaaagctctgtgtgcaccgcaagcaggcgtagatactcctgaagatttagcgcgcgttattgcagtgcttggcaactaa

SEQ ID NO: 254167 - DNA, 628 bp, Unknown
  Bacterial polypeptide expressing nucleotide sequence isolated from the Sargasso Sea
gataattgcaaccgatcatcaaaaagtatttgatgaggttagtacgtttactaatgatgttgtgatgacgcgtgaagatcaccagtcaggcaccgagcgcttagcggaggtagttgctttattaaatttagatagcaataccatagttgtaaatgttcaaggtgatgaaccattactagctcccgataacgttttgcaagtagctaagttgctaaatgaatcatcagcacccatggccacattaagtgttgccattgaacataaagacgaaatatttaatcctaatgcagtcaaggttgttagcgatataaataaaaacgcgttgtatttttcgcgtgcaagtattccgtttgatcgacttgcgatgttagacgaaaaaagagatttagaactttcatcatttcaacgtcacgtgggtatttacgcttacagagcagggtttattaatcaatatattgcacttagtatttctcctttagagttattagagtcattagagcagctgcgtgttttatatcacggttatagtattaaaatagagcaggcaaaagtagctccgcatgcaggtgttgataccgctgaagatttagcaaaagtaattgcgtttttacaaaataaaaacgcgtga

SEQ ID NO: 254168 - DNA, 766 bp, Unknown
  Bacterial polypeptide expressing nucleotide sequence isolated from the Sargasso Sea
aatgagcgcagtcttcaccgtcgtcattcctgctcgttatgcctccacccgcctgcccggcaagccgctgcaggacatcgccggcaagcccatggtgcagcacgtctgggagcaggcgaagaagagttcggccagccgcgtggtggtcgccaccgacgatgcacgcatcgtcgaagcctgccaggccttcggcgccgaggtgctgctgacccgcgaggatcacaactccggcaccgaccgcctggccgaagtggccacccagctcggtttgccggccgacgccatcgtggtcaacgtgcagggcgacgagccgctgatcccgcctgtgatcatcgatcaggtggcggccaacctggcggccaacccgcaggccggtatcgccaccctggctgaacccatcgaggacgtcaccgcgctgttcaaccccaatgtggtcaaggtggtcgccgacaagaacggcctggccctgaccttcagccgcgcgccgctggcctgggcgcgcgacgcctttgccaagaaccgcgacgtgctaccggccggcgtgccgtatcgccgtcatatcggtatctacgcctaccgcgcgggtttcctgcatgacttcgtcgcctggggcccgtgctggctggaagacaccgagtgcctggagcagttgcgcgcgttgtataacggcgtgcgcatccatgtcgccgatgcgctcgaagcaccggctgccggtgtggataccgctgaagacctggagcgggtgcgccacctgttgggggcctga

SEQ ID NO: 254169 - DNA, 646 bp, Unknown
  Bacterial polypeptide expressing nucleotide sequence isolated from the Sargasso Sea
tcaggctattaaaagtggtgcagagcgggtggtgattgcaactgacgatgcccgtgtgaaacaggcatgcgaaggctttggcgctgaagtttgtatgaccagtccggcccataactccggcactgaacgtctggccgaagtcgtgtctttattggatcttgcggacgatacagtggtggtgaatgtacaaggcgacgagccttttattccgcccgctattatccgtcaggtcgcacagaacctggcgagtcaaagcaaagcccgtatggccactttatctgtgcctatcgagcatagcgacgaagtacaaaatcctaatgtggtgaaagtacaaagcgacaaacatggttatgcactgtatttcagccgctctgtgatcccatttgacagagataaagcttttacaacacaactggctgatatctatcgtcgtcatataggtatttatgcctaccgtgctggttttattaaagagtacgtccgttggccggcatctcagttagagcagattgaatgcttggagcagctgagagtcttgtggcaaggcgaagctatacatgtggctactgcgcttgaagtgcctgctgtgggcgtggatacgccagaggatttagaacgtgcccgcctggttgcggctactctgtaa

SEQ ID NO: 254170 - DNA, 754 bp, Unknown
  Bacterial polypeptide expressing nucleotide sequence isolated from the Sargasso Sea
atgtctgcgtttctggttgttattccggcccgttacgccagcagccgtctgccaggtaaacctttggctgatattgcaggcttgaccatgattgaacgggtataccgtcaggccattaaaagtggtgcagagcgagttgtgattgccacagacgatgctagggtgcaacaggtttgcgaaggctttggtgctgaagtctgtatgacaagcccagcccataactccggcactgagcgtctggccgaagtggtgtctttattaggtttggccgacgacaccgtggtggtaaatgtacaaggcgacgagccttttattccgccagccattatccgtcaggtggccgaaaacctggctaaccaaagcaaagcccggatggcgactttatctgtagctatagagcatagcgacgaagtacaaaaccccaatgtggtgaaagtacaaagcgataaaaatggttatgcattgtatttcagccgctctgtgatcccatttgacagagacaaggcttttaccagtcaactggcggatatttatcgtcgccatataggtatttacgcttaccgtgctggttttataaaagattatgttagctggccagcttcacagcttgagcaaattgaatgcttagagcaattaagagtgctgtggcaaggtgaagctattcatgtggctactgcgcttgaagttccagctgtaggcgtggatacaccagaagatttagaacgtgcccgtctggtggcggcagctctgtaaa

SEQ ID NO: 254171 - DNA, 774 bp, Unknown
  Bacterial polypeptide expressing nucleotide sequence isolated from the Sargasso Sea
attgtctgataggcaactttgtgattgtgaaatgatcatggatggaagtttcaaaccattaaatcattttatgaaagaaagtgattatgaatcagtattagctgagatgagattatcaaatggttttttattcccactgccaattacgcttgatgtaaataaagaattttcaaatcaattaattattggtgaaagaataatacttcttgacaaagaaggatttaagattgcatacatgatgattgatagtatatgggagccaaattttgatcgtgaggcagaattggtttatggcacaaatgatatgtctcatccagcagttaactacatgtataacattggaaataaagtatatattggtggaagaattaaaaagatctctatgccaaatcattatgattttaggaatcataggatagctcctgctgaagcaaaaaatgaatttaattcaagaggttgggaaaagattgttgcatttcaaaccagaaatcctttacaccgagctcatattgaaatgacgcaaaaggcaatggtcgaattaaatgcaaaactattcttgcatcctgttgtgggtttaactaaaccaggtgatgtaaatcattatacaagaactagatgttatgagcatgctattaataaatatccagatggttctgcaattttggcaattctacccttagcaatgagaatgggtgggccaagggaagcagtattacatgcaataatcagaaagaattatggttgtacagatataatcattggtcgagatcatgc

SEQ ID NO: 254172 - DNA, 218 bp, Unknown
  Bacterial polypeptide expressing nucleotide sequence isolated from the Sargasso Sea
gatgaggaaaaatcacgctcaaaagaaagaattttttcatttcgagataaaagccatcgttgggatcctaaaaatcaaaaacccagagctttggaatctatttaataccaaaattgataaagatgaaagtgttagggtattcccattgtctaactggactgaaattgatgtatggcaatatatttatcaagaaaagataccgattgtaccgctgtatt

SEQ ID NO: 254173 - DNA, 727 bp, Unknown
  Bacterial polypeptide expressing nucleotide sequence isolated from the Sargasso Sea
actgatcgacaaatttgcgattgcgaaatgattttagacggtagttttcacccacttaatcattttatgaatgagaatgactattatcaggttttagaaaatatgaggcttgagacagggcagttatttccaataccaatagttttagatgtaaatacagatttctctcaaaatttagaattaaacgaacggattattcttcgagataaagaaggatttattattgcatatatgacagtggaaagtatttggaaaccaaatcttaaaagggaggctcaaaaactgtataagactacggataagctacatcctgctgtaaactttttatttcactctaaaaataaagtatatataggtgggaaaattgaaaaggtaatgatgcccaaccattacgattatgaaaaatatagattaacgccaaaagatgtaaaaaataagtttgaaaaaatgggatgggaaaaaatcattgcattccaaacgaggaaccctcttcataaagcccatgttgaaatgacttttagatctatgaaagaatttaatgctaatctttttattcacccagctgttggtcaaactaaaccaggtgatatagattactataccagagtaagatgttatgagcatgtaattaaaaaatatccaaataacacagcttttttggctttattaccgctttcaatgaggatgggggggccaagagaagcattattacatgctattataagga

SEQ ID NO: 254174 - DNA, 151 bp, Unknown
  Bacterial polypeptide expressing nucleotide sequence isolated from the Sargasso Sea
atggatataaataccttttttaaaaaacagaatacaaaaaatcaggttaaaattcttacatgtggatctgtcgatgatggtaaatcaacattaattggaagactgctatttgattcaaaaaatatttttcatgatcagatttcgcaagctg

SEQ ID NO: 254175 - DNA, 572 bp, Unknown
  Bacterial polypeptide expressing nucleotide sequence isolated from the Sargasso Sea
aatgatatcattaaaaaataaaagtcccgaaatatattggaaacttaatgataggcagttatgtgatttagaattgattttaaatggaggattttctccactaaaagggttcctaaataagaaagattatcaaagtgttattaaggatatgaggttagagaatggagacctctggccaataccaataaatttagacgtagatgaaaactttagaaatagtttgagtttaggacaaagcatatatttaaaggataaggagggttttgttttagctacattacaagttgaagaaatatggaagcctgatcttttaaatgaagctttgctagtttatgatactgttgatcaaaaacatcctgctgttagatatctattgaattacagtaatccttattacattgctggtaaaatcaaattcaagagtcttccaaatcattatgactttaaggaacaaaggcatactccttcttctttgaagtctattttcaaagaaaaaggatggaaaaaaattgttgcatttcaaactagaaatccattgcataaagctcatattgagatgacaaaacgtgcca

SEQ ID NO: 254176 - DNA, 324 bp, Unknown
  Bacterial polypeptide expressing nucleotide sequence isolated from the Sargasso Sea
tgatcgttggtcgtgatcatgccggagtgggtgattattacggtgccttcgacgcacaaaccatcttccaggagaaagtgccagcgggtgcactggaaattaaaatcttcgaagccgaccacaccgcctattcgaaaaaactcgatcgcgtggtgatgatgcgcgatgtgcctgatcacaccaaagacgattttgtactcctgtcaggtaccaaggtgcgtgagatgttgggccaaggcattgcgccgccgccggaattttcgcgcccggaagtggcacagattctgatggattattatcaggcgctggatgccggaaagtaat

SEQ ID NO: 254177 - DNA, 874 bp, Unknown
  Bacterial polypeptide expressing nucleotide sequence isolated from the Sargasso Sea
tattccggatttgaattgggaatgtgaaaatgcttatggtactatagatgataatcatccatatgtaaaatataaattatctcataaaggaaaagtatatgtatcaggtcctttacaaaagattaatgatattaaacattatgattttaaggatataagattatatccaaatgatgtaagagaatttataaaagaaaataattggaaaactgttgtaggttttcaaactagaaatccaatgcataaagctcattatgaattaacaaaatatgctttaagaaaaacaggtgataaagaagcaaaattatttttaaatcctgtagttggtgaaactcaaacagtagatatagattattttactagagttaaggtttataaaaatattgttaaaaaatatgatgataatgtagtaaaattaggattattacctttagccatgagaatggctggaccaagagaagcttgtttacatgctttaattagaaaaaattatggttgtactcattttgtagtaggaagagatcatgctggaccaagttataaaaaaaaggatggtagtaatttttatgggccatatgatgcacaagaaatgttttttaaatattcagatgaaataggtattataccaattgtaagtaaaatgattgtatataatgtaactaaaaatatttatcaaccaattgatgatgtagataaaaatgacgagacattatttttatctggttcagaagttagaagaagattaaaagaaaatgaagaaatacctgattggtttagttttcctgaaatagttgatttgttaaaaaaatctgttaagaaaagaggcatttgttattattttacaggtttatctggtagtggtaaaagtttttaa

SEQ ID NO: 254178 - DNA, 433 bp, Unknown
  Bacterial polypeptide expressing nucleotide sequence isolated from the Sargasso Sea
tccaaaagctcaacgacctgaactctggaatctttataataccaagcttcatactggacaaactatgagagtttttccaatttcaaactggaccgaaaaagatgtctggcagtatcttctgaaggaaaaaatctcaattgttcctttatatttcgcaaaagaaaggcccgtagtataccgcaatgaaactttgataatggttgatgacgaaagaatccccttagaaactggagaagagccacaattgaaatctgttcgtttccggactctgggatgctatccgttaactggtgccattgaaagtaatgcctctactttagaggaagttgttcttgaaacgatgatggctagaacatcagaacgtgaaggacgtctcattgatagtgatgaaacaggatctatggaaaagaaaaaacgagaaggatatttttag

SEQ ID NO: 254179 - DNA, 208 bp, Unknown
  Bacterial polypeptide expressing nucleotide sequence isolated from the Sargasso Sea
attgacacaagttaatacatctatttcaatgcaaaatattagtgagtttcttttaaatcagaatcaaaaaaaaactttaagactcattacttgtggcagcgttgatgatggtaaaagtactcttataggcagacttttacatgaatcacagaatgtatttgaggatcaactgaaaactctagagagagactcagaaaaattcggaact

SEQ ID NO: 254180 - DNA, 838 bp, Unknown
  Bacterial polypeptide expressing nucleotide sequence isolated from the Sargasso Sea
catgggagtcatgagcgaaatccccggcacggcattgacgcctgtgcagaacgagcacctcgactggctggaagccgagtcgatttacatcatccgtgaggtggtggccgaatgccgcaatccggcgctgctgttttccggcggcaaggattcgatcgtcatgctgcatctggcgctcaaggccttccgtctgggcgagcgcaagatcgagctgccgttcccgctggtgcacatcgacacgggtcacaactaccccgaagtgatcactttccgcgacgagcaggtcgccaagcttggtgctcgcctggtggtgggccatgtggaggattccatcaagcgcggcaccgtgcgcctgcgtaaagagaccgattcgcgcaacgccgcacaggccgtcacgctgctggagacgatcgaatcgcatggcttcgacgccctgatgggcggtgcccgccgcgacgaagaaaaggcccgtgcgaaggaacgcatcttctcgttccgcgacgaattcggccagtgggatccgaaggcccagcgcccggaactctggagcctgtacaacgcacgcatggcgcagggcgagcagatgcgcgtgttcccgatctccaactggacggaactcgacgtgtggcagtacatcgcccgcgagaacttagccctgccgccgatctactacgcgcacgagcgtgaagtggtgcgcaagaacggcctgctggtgcccgtcacgccgatcacgcccaaggcggatggggacgtgagcgaggtcctgtcggtgcgcttccgcaccgtgggcgacatcagctgcacgtgcccggtggcgagcacggccgcaacgccggcc

SEQ ID NO: 254181 - DNA, 586 bp, Unknown
  Bacterial polypeptide expressing nucleotide sequence isolated from the Sargasso Sea
aatgatcgcttacaatttagaattaaaaaatcaagcaaacaattatccttcatggcaattaaatgataggcaaatttgcgatttagagctaatcttgaatagaggtttccagccactaaatggattcctttccaagaaggattacaactctgttgttaataaaatgagattggctgatggagctctatggccaatacctattaaccttgatgttaatgataaatttattgaagaaatttcaaataattcaaagataactcttcgagataaagaaggtttcgcactggcaatattaactatttcagatatctggaaacctgatttaaaacatgaggcacaatcaatttttggaaccttggacacaaaacatcccggagtcaaccatcttctcaatattggaaataacaactatgtaggcggaactgtagaaatgatttctttgccgcaccatcatgactacaacgattttagacataatcctgatgaattaaaacatgattttaagacaaaggggtgggataaaattgtagcatttcaaactagaaatcctctccacagggcacattttgagctcactaaaaatgca

SEQ ID NO: 254182 - DNA, 264 bp, Unknown
  Bacterial polypeptide expressing nucleotide sequence isolated from the Sargasso Sea
ttgtttttagaaatgatcaacttattttagtagacgacgaacgtctgaaaattcttaacgatgaaaaaattgaaaacaagcaagtacgctttagaacactaggttgttatcctctaacaggtgcagttgagtctgaagcttcgtcaatcgatcaggttataaaagaaattaaaatttcgcaattctctgagagaggcggtcgattaatcgacaaagatcagattggctcgatggaaaagaaaaaaaaagagggttatttttagt

SEQ ID NO: 254183 - DNA, 187 bp, Unknown
  Bacterial polypeptide expressing nucleotide sequence isolated from the Sargasso Sea
atggacatagaaactttttttcaaaatcaaaataataaaaaacaattaaaaattttaacttgtggttctgtagatgatggtaaatcaacgctcattggcagactattatttgattcaaaaaatatttatagtgatcagttaagtcaaagtaagattgaaagtgaaaagtatggcacaccaaggtaag

SEQ ID NO: 254184 - DNA, 517 bp, Unknown
  Bacterial polypeptide expressing nucleotide sequence isolated from the Sargasso Sea
atgtctgacaggcaactttgtgactgtgaattgataatggatggtagttttaatccgctagatcaatttatgtcagaaattgattatgagtcagtattaactcaaatgagattatcaaatggtgatttatttcctattccaattgtgctagatgtaaacaaagaattttcagattctctgagcttaggtgaaaagattcttcttcgagataaagaaggatttaaaattgctcatatgaccattaatagtatttgggagccagatttaaatcgtgaagcagaattggtttatatgacaaatgatttaactcatccagcattgaactatatgtttaacataggcaacaaagtatatattggtggaaaagttgagaagatctctatgccaaaccactatgattatagacaatataggatttctccaaacaaagtaaaaaatgagtttattaatagaggatgggataaaatcattgcatttcaaacaagaaacccattgcatcgtgcccatgtgaaatgac

SEQ ID NO: 254185 - DNA, 134 bp, Unknown
  Bacterial polypeptide expressing nucleotide sequence isolated from the Sargasso Sea
aatggatataaataccttttttaaaaaacagaattcaaaaaatcaggttaaaattcttacatgtggatctgttgatgatggtaaatcaacattaattggaagacttctatttgattcaaaaagtatttttcttg

SEQ ID NO: 254186 - DNA, 334 bp, Unknown
  Bacterial polypeptide expressing nucleotide sequence isolated from the Sargasso Sea
gatgttgtggcaatacatcaatagagaggggatcgagattgtgcctttgtactttgctgcagaaaggccggtgatagagcgtgatggcatgttgcttatggtggatgatgatcggatgagaatgagtgaaggagaagagattcgaacacgcctggttcgatttagaactctgggctgttatccactaactggagcgattgattcgtcggcgacttctctccctgagatcgttcttgagctactgcagagtaagaccagcgaaagacagggcagggcaattgattctgattcatcggcctcgatggagaagaagaagcaagaaggttatttttga

SEQ ID NO: 254187 - DNA, 181 bp, Unknown
  Bacterial polypeptide expressing nucleotide sequence isolated from the Sargasso Sea
aatgaaacataatcatcttaaaaaactagaatctgaaagtattcatattattagagaggttgcggcagagttttcaaaccctgttatgctttattcaatagggaaagattcatcagttatgcttcacttaacaatgaaagctttttcaccaaataaaatcccatttaaacttttacatgta

SEQ ID NO: 254188 - DNA, 469 bp, Unknown
  Bacterial polypeptide expressing nucleotide sequence isolated from the Sargasso Sea
tatgaacttaacccatttagaaaaattagagtctgagagtattcacattattagagaagtagcatcagagtttgaaaatcctgtcatgctatattcaataggaaaagactctgctgtcatgctacacttagcattaaaagcttttgcaccaagtaaactgccatttaaattattgcatgttgatacaacttggaaatttaaagaaatgataacttttcgtgatcaaatagcaaaagaatacaacttagatttattagttcatattaatgaagaaggtgtaaaaaataatattggtcctattactcatggctctaaacttcatacagatgttatgaagacacaagcactgaagcaagcattagaaaaatataagtttgatgctgctttcggaggagcaagaagagatgaggaaaaatcaagagcaaaagaaagagtattttcttttagagataagcaacatcattgggat

SEQ ID NO: 254189 - DNA, 655 bp, Unknown
  Bacterial polypeptide expressing nucleotide sequence isolated from the Sargasso Sea
atgctatcaaataaaataaaaaaaagtaaagcaaataatttaaaattagaatccaatatttataagtcatggacattatcgaatagacagttatgtgatttagaaatgattcttaataattcgttttccccattgagtaattttttaaataagtcaaattatgattcagttttgcataatatgagattagaaactggtgaactttggccaataccaattaatttagacattacatcaaaatttcaaaataaaattaaagattcagataaaataactcttaaagataaagaagggtttccagttgcaatattaaaaatttcagatatttgggaaccaaatttaaaaaatgaagctgaattaatttataatacaaagaacattgaacatccaggggtaaactatttattaaatagggttaataaaatttatatatctggtgatatactgaaaatagctgatataaggcatcatgattatgcgtatttaaggcatacaccatttcaactaaaatcaatctttaaaaaaaataattgggaaaaaattgtagcatttcaaacaagaaatcccctccatagggctcatgtggaaatgatgaaaaaaacaattaaaaatcttggagcaaaagttattgcttcatccctgttgttggaatgac

SEQ ID NO: 254190 - DNA, 705 bp, Unknown
  Bacterial polypeptide expressing nucleotide sequence isolated from the Sargasso Sea
caaatttatttgtaagtaactttaaaattaggtcagcatatagaattattatagataactatataaaagaaattttagatactaaatttaaaatttctcaattaagaaataaatataaaactattggtgcctttcaaactaggaatattcctcacctaggtcatgaaaaaattattgagatgatgcttgatcattgtgatgtcgtggttataaacccaattctagggcctaaaaaacctggtgatttaaacactgaacgacttaaatttatttatgataatattttaaaaaccagatttaacaatagaattttatttatacctttaagggcaaatatgttttatgctggtcccagagaggctttacatcatacattaataagggaatggttaggttttagtcatttttcagttggtcgtgatcatgctggatcagatgatttctataaaccagaagaagcaaaaaatactctaaaaagttatcaaggcttatttaatattaaaattttataccataatggtgcttatttctgtaagtcttgtaataaaattatacttaaaggtgactgtaaacatttagactctgaactaaaagaagtatcaggaagcaaattaagaaattgtttaaagagtaataaaacttataaatatgcttcaaaagacgttcaaaattggtcaaaagaaaatattaaaactttatactaaa

SEQ ID NO: 254191 - DNA, 243 bp, Unknown
  Bacterial polypeptide expressing nucleotide sequence isolated from the Sargasso Sea
aatgtcagcaactgttacctcgttaaacgagcagctaaacaccttaggtattcgtggttatctgcaacagcatcaggataaaggcctgctgcgggtactaacctgtggcagcgtcgatgacggcaaaagtaccttaattggccgcctgctgcacgacagccagcagttatatgacgatcagctcgatgcgctcaagcgcgaccataaaggccgcaacagcgatggcgagttggagctggcgat

SEQ ID NO: 254192 - DNA, 781 bp, Unknown
  Bacterial polypeptide expressing nucleotide sequence isolated from the Sargasso Sea
tatgcaaaatctaatacctgagctttatgttgcaagtgattccagtcaagctcttaaggataaagctgcccatttgcagtgctgggaccttacaccgcgtcaaatttgtgatttggaattaattatgaacggtgggtttaatccgttagcaggatttcttgggcaagaagattacaaaaatgtagtcgaaaatatgcgactttcgaatggcactctatggccaataccaattactttggatgtttcgcaacaatttgcagatggcgttgaagaaggtgaagaaatagtgctgcgcgatttggaaggggttgtcctggctgtactcaccatttctgacaaatggtcaccaaataaaaagtatgaagcagagaaagtattcggtaccaatgatattaaacatcctgctgttcattaccttcaaaatgtagctgggccagtctatttaggtggtcaaatattaggtcttcaaaaacctgtacattatgatttccgtgctcgccgcgatactccgaacgagctacgtagttattttcataaactgggctggaaaaagatcgttgcctttcaaacacgaaaccctcttcatcgggcacatcaagaactaactttccgcgcagctaaagaagtacaagcaaaccttttgattcatccaatagttggaatgacaaaacctggtgatgtagatcattttacaagagtacgttgctatgaagctgtattagataaataccccgcagcgaccacaactatgagcctcttaaacctagctatgcgaatggca

SEQ ID NO: 254193 - DNA, 841 bp, Unknown
  Bacterial polypeptide expressing nucleotide sequence isolated from the Sargasso Sea
attccgtttattgaatctgtgaagatgctcgatgcgcgtattcagaccatggacaaccaggccgatcgctttgttaccaaagagaagaaagacctgattgttgactcctacatcaagtggcgtatcagtgactttagccgttactacctggcaacgggcggtggcgatgtttctcaggcggaagtcctgctgaaacgtaagttctctgaccgtctgcgttctgaaattggtcgtctggacgtgaaggacatcgttaccgattcccgcggtcgtctgaccctggaagttcgtgacgcgctgaactccggttctgctggcacggaagatgaagtggcgactccagcagcagatagcgcgattgccgaagcggctgaacgtgttcaggctgaaacgaacggtaaagtaccggtcatcaacccgaacagtatggctgcattgggcatcgaagtggttgacgtgcgtattaagcaaatcaacctgcctgctgaagtgtccgaggctatctacaaccgtatgcgcgctgagcgtgaagcggtagcgcgtcgccatcgttcacaaggccaggaagaggcggaaaaactgcgtgcaacggcggactatgaagtcactaaaacgctggcagaatctgagcgtcagggccgtatcatgcgcggtgaaggcgatgcagaagccgctaagctgtttgccgatgcatttagtcaggatccagatttctacgccttcatccgtagcctgcgtgcttacgagaagagcttcgaaggcaaccaggacgtgatggtcatgagtccggacagcgatttcttccgctacatgaagacaccgagttccgcgacacgctaat

SEQ ID NO: 254194 - DNA, 1663 bp, Unknown
  Bacterial polypeptide expressing nucleotide sequence isolated from the Sargasso Sea
tatgcaagatgaaaaatatctaaataagtttaacaaagatattcttcaattaaaatcatggactttatctgatcgacaattatgtgatattgaaatgatattaaatggaggattctcacctctcgatggttttatgaatcgtaaagattataattcggtttgtgaaaaaatgagattagaaaataaccttctgtggccaattcctattacattagatattaatgatgaacttgttgatacattggaaatcaatgaggaaatagcgcttagagataaggaagggtttgtaattgctattttaactattggtgatatatggactccggataaagaaaaagaagctcaacaaatttatcaaacaacagatatatttcatcctggagtaaatactttattaaatgaaacgcactctacctatgttggtggtacgttgaaagggattcattatcctaagcattatgattacccacagttaaggcacacacctcaagaacttagagaaagttttgataattggggttggaaagatattatagcatttcaaacccggaaccctatgcatcaggcccatattgaattaaccaaaagagctttaaatgaaaaaaatgctaaattattaatacatcctgtagtaggtcttacaaagcctggagatgtaaatcattatacaagggttcgttgctacaaacatattatgaataaatatcctaaaaatatggctgcattgagtttgttacctttggcaatgcgaatggctggacctaaagaagcgttatggcatgcaataattcgaaaaaattatggatgtaattattttattgttggaagagatcatgctagccctggattaaacaaggataatacgccattttatggaccatatgatgcccaagaaatgttaaatacaaacacaaatgaacttgggataaagatgatccctttcaaacaattagtctatgtaaaagaaaaaaaatcttttattggagtagatgaagttccaaaaaatttaaccgctttaacagtgtctggtacagaattacgcaagttacttgatgaagggaaagaaattccagaatggttttcttacccagaagttatttcagaattacaaaaacaacgtccctctctttcaaatagaggttttacaattttcttcacaggtttatctggatcaggtaaatcaactcttgcaaatggtcttcttgtaaaattacttgaagaaggtcgccggccagtatcgttgctagatggagatattgttcgtacgcatctttcaagtgaattaggattttctaaagaacatcgatctttgaatgttcgaagaatagggtttgttgcaagtgaaataactaaaaatggtgggattgcaatttgtgcgcctattgcaccatatagactagaccgtcaatttaatcgtaatatgattgatcctctaggaggatatattgaaatatttgttagcaccccattagaagtatgcgagcaaagagatgcaaaaggattatatgctaaagcacgaaagggtatattaaaacaatttacaggtatagatgacccatacgaaaaaccacgaaatgctgaaattgtaattaattcaagtaatgataagccagaaacgctagtagatcaaatattacaccaaatccacaaaatgggatattaa

SEQ ID NO: 254195 - DNA, 964 bp, Unknown
  Bacterial polypeptide expressing nucleotide sequence isolated from the Sargasso Sea
atgagcaccacgctcgattccactgtgaatgcaccgctggccaatacggcaacccgaatggatcacctcgactggctcgaggccgagtcgattcatatcctgcgcgaactggtcgccgaatgccgcaagcccgcgttgttgttttcgggcggcaaggattcggtggtggtgctgcacctcgcactgaaggcgtttggcattggcgcgaatcgcaagaccgtgttgccgttcccgctcgtgcatatcgacactggccacaactacgaagaagtgatcgacttccgcgatcgccgtgccaaagagatcggtgctgaactcgtggtgggtcacgtcgaagattcgatcaagcgcggtacggtgcgcctgcgccgcgaactggattcgcgcaacgccgcgcaagccgtgacgctgctcgaaacgatcgctgaacatgagtacaccgcgctgattggcggcgcgcgccgcgacgaagaaaaggcccgtgccaaagagcggatcttctcgttccgcgacgaattcggccaatgggatccgaaggcgcagcgcccggaactgtggagcctgtataacgcgcgtctgcacaacggcgaacatctgcgcgtgttcccgatttcgaactggaccgaactcgacgtgtggcaatacattgctcgcgaacagctcgaactgccgtcgatctattacgcgcatcagcgcgagatcgtgcgccgtaacggcctgctcgttccggttacgccgctcacgccgatgcgtgagggtgaaaccagcgaaacggcgctggtgcgtttccgtacggtgggcgatatcagttgcacgtgcccggtggaaagcgatgccgacgatctcgagaagatcatcgccgaaacggccgtgacggaaatcacggaacgcggagcgacgcggatggacgatcaggtctccgaagccgcgatggaacagcgtaagaagcaaggttatttctaag

SEQ ID NO: 254196 - DNA, 964 bp, Unknown
  Bacterial polypeptide expressing nucleotide sequence isolated from the Sargasso Sea
catgagcacgacgctcgagcaatccgcctttgccccgcccgccggtgccgacagccgcatgggccacctcgactggctcgaagccgagtcgatccacatcctgcgcgaactggtcgccgaatgcagcaagccggcgctgttgttctcgggcggcaaggattcggtcgtcgtgctgcatctggcgctgaaggcattcggcctcggcgcgaaccgcaagacgacgctgccgttcccgctcgtgcacatcgatacgggccacaactacgaggaagtgatcgacttccgcgatcgccgcgcgaaagaactcggcgccgagctggtcgtcggccacgtcgaggattcgatcaagcgcggcacggtcgtgctgcgtcgcgaaaccgattcgcgcaatgccgcgcaggccgtcacgctgctcgagacgatcgaggagcacggctacacggcgctgatcggcggcgcgcgccgcgacgaagagaaggcgcgtgcgaaggaacgcatcttctcgttccgcgacgaattcggccagtgggatccgaaggcgcagcgcccggaactgtggagcctgtacaacgcccgcctgcacaagggcgagcacctgcgcgtgttcccgatctcgaactggaccgagctcgacgtgtggcagtacatcgcgcgcgagaacctcgaactgccgtcgatctattacgctcaccagcgcgagatcgtgcgccgcaacgggctgctcgtgcccgtcacgccgctcacgccgatgcgtgacggcgagacgagcgagctcgcgcaggtgcgcttccgcacggtcggcgacatctcctgcacgtgcccggtcgaaagcgacgcggacgacgtcgagaagatcatcgccgagacggcggtgaccgagatcaccgagcgcggcgcgacccggatggacgaccaggcctccgaagccgcgatggaacagcgcaagaagcaaggttatttctga

SEQ ID NO: 254197 - DNA, 1003 bp, Unknown
  Bacterial polypeptide expressing nucleotide sequence isolated from the Sargasso Sea
tcttggcatcaaacacatcattgtggcaatcaacaaaatggacattgttgactacagtcaggatgtgtttgaatccattcgtcgagactatgttgactttgctgcgcgacttgaattgcccgatgtgcacttcatgccaatctctgcactcaaaggtgacaatgtcgtgacaaacagtgaaaagatggcatggcatgagggcccaccgctcatgcatcttctcgaaacggtctacatcggttctgaccgcaacatggaagactttcgatttcctgtgcaatacgtcacacgacccaacctcgactttcgtggctttgctgggactgttgcatcaggaattattcgtaagggtgatgagatcattaccttaccgtctcgcaagaagagtcgaattcaatcaattgtgactttcgatggtgaacgtgatgaggcatttgctcctcagtcagtaaccctcacccttgaagatgaaattgactccagtcgtggtgatatgattgtccgagtagggaatctcccaaaggtcgatcagaaatttgaagcaatgcttgtctggatggatgaaacgtcacttattccagggaaagaatatcttttcaaacagaccggaaaagtcacaccaggtcgagtaagttccatcaagtatcgagtcgatatcaatacacttcaccgcgaacctgcaccgacgttagcactcaatgagattggtcgctgtggagtgactcttgctgttccaattgctcatgactcgtatcgacgtaatcgaacaactggctcttttatcattattgaccggctgacaaacggaactgtcggcgcaggcatgattctcgatcgagaaccagaagaaggagctgcccactgggacgatgagccagcgaccgaaggcctcacggtctcctccagtgaagttaccattgaagaacgccaggctcgttttggacaaaatccagtcactatcctcattacgggccctcacggttcaggaaagacacagtcgctc

SEQ ID NO: 254198 - DNA, 848 bp, Unknown
  Bacterial polypeptide expressing nucleotide sequence isolated from the Sargasso Sea
tatgcctaatcattatgattatagacaatataggcttcgtccagatgaagtaaaaatcaaattcaaagataagggatgggataagattgttgcatttcagactagaaacccattgcatcgtgcgcatattgaaatgacattgaaatcaatggaagaacttgacgctaaactttttctgcatccagttgtgggtatgaccaaacctggtgatgtagatcattatactagagttagatgctatgagcatataattaagaagtatcctaaggattctataatgctttctttgttgcctttggctatgagaatgggtgggccaagagaaactttattgcatgcaattataagaaaaaattacggatgcactcatataatagttgggcgagatcatgccggaccagggaatgataatactggcaatccattttatggcccctacgatgcccaagaattgttaaatcaatataaagatgaaattggtattgagatcgtacctttccaatttatggtatatactccaagtgacaatacctataaacctttagaatcattagatgataatgagaattatcaaacaatatccgggactgaattaagaaatattttagataaaggtgcccaaattcctgaatggttttcataccctgaggttgctgaagaattaaaaagatcaagacctccattaaatgaaaggggttttactttatttttcactgggctttctggttctggaaaatctacaattgcaaatggattactaataaaattccttgaagagggtagtaggcctgttacattattggatggcgatattgttagaactcatttatcaagtgaattaggttttt

SEQ ID NO: 254199 - DNA, 792 bp, Unknown
  Bacterial polypeptide expressing nucleotide sequence isolated from the Sargasso Sea
caggaaatatctgaaattaccagtttgaatgacgatgaattacaattgctcacacacaaaatttttggcacaactgatacagaacacccgggtgttgctaattttctcagtcttggaaatgttatgttggctggaaatatccaagtattgaattatagctattttccagaagatttccccggtactttctatactgcgccagaaattagagatatgttagcaaaagctaactggggtactacggttgcgtttcaaacaaggaatccaatgcatagggctcatgaagaattatgcaaaatggcattagaaagagtagaagctgatggtgtattaattcatatgacattaggtaaacttaaagatggtgatatccccggagatattagaaacaaagcaatagaaaaaatggtcgaattatacttccctgaaaataccgttatgattactggttttggttttgacatgctttatgctggaccgagagaagcacttctacatgcggtttttcgtcaaaattgtggatgcactcacttaattgtcggaagagaccatgctggtgttggagattactatggcccatttgaggcacaagaaaactttgacttagatattgtcaagaaatctcttaagcttaagattttctcggcagaccatactgcatattctaaaaaactcaataaagttgtaatgatgcgagatgtgaaagatcataataaggatgattttgtccttctttcaggaaccaaagttagagagatgttatcaaatggagaagagttaccagaagaattt

SEQ ID NO: 254200 - DNA, 880 bp, Unknown
  Bacterial polypeptide expressing nucleotide sequence isolated from the Sargasso Sea
aaccattgatagcatttggatgcctgatttagagcgtgaagcagaattagtttacgggacaaacgacatatctcatccagctattaactacatgttaaatataggcaataaagtatatattggtggaaaagttaaaaagattgctatgccaaattattatgattataaagagtatagactaaatccaactgatgcaaaaaataaatttattgaaagaggctggaaaaagattgttgcatttcaaactaggaatccccttcaccgagcccatattgaaatgacaagaaaggcaatgattgaatcaaatgcaaaactatttctgcatcccgttgtaggattaactaagcctggtgatgtggatcattatacaagaaccagatgctatgagcatgctattaataggtatccaaacgattcagcaatgttggcaattttacccttagcaatgagaatgggtgggccaagagaagcaatattacatgcaatcattagaaagaattatggctgtacccatataatcattggccgagatcatgcaggtccaggaaataatattgatggagaacccttttatgaaccctatgaagctcaagacttaattaaaaaatatgaagatgaaattggaataaaaatgattccatttcaatatatggtatatgttccaagtgaaaataaatatatgccgataagtgaagttgaaaacaatacagattataaaacaatctctgggactgatttacgagagatactagacaaagggaatgatattccgagctggttctcttatccagaaattgcactagagctaaagaaatcaagacctcctatctataaaagaggttttactgtatttttcacgggtctttccggatcgggaaaa

SEQ ID NO: 254201 - DNA, 304 bp, Unknown
  Bacterial polypeptide expressing nucleotide sequence isolated from the Sargasso Sea
atccccatcgtacctctttaccttgcggctgagcggcccgtgattagcagagacggaatgcttattttggtggacgatgatcgcctaaaactatttcccggagaaaaaattgaaataatgaaggttagattcagaactctgggttgctatcccttaacaggagcaattgcctctgacgctgattctttgcctaaaattctactagagctttttgaagcgaaaaccagtgaaaggcaagggagggcgattgataatgattcttccagttcgatggagaaaaaaaagaaggagggttatttctgac

SEQ ID NO: 254202 - DNA, 560 bp, Unknown
  Bacterial polypeptide expressing nucleotide sequence isolated from the Sargasso Sea
tatgaaattatcacatatagataaattagagtctgaaagtatagacattataagagaggttgcttcagaatttatcaatcctgtaatgctttattcaataggtaaagactcatctgtaatgcttcacttagctcaaaaagcattttatccaagtaaaattcctttcaagttaatgcatattgatacaacatggaagttcaaagaaatgataaactttagagatgatattgctaagaagtataatttggacttattagttcatatcaaccaagaaggagtgagtaataatataaatcctatttctagtggctcaaaaattcatacagatgtaatgaaaacacagtcattaatacaagcattagataaatataaatttgatgctgcatttggaggtgctagaagagatgaagaaaaatcgcgagcaaaagaaagaattttttcatttagagataaaaaacatcgttgggatccaaaaaatcaaaaaccagagctttggaatttgttcaatactaaaatagatcaaggtgaaagtgttagagtttttccattatctaattgga

SEQ ID NO: 254203 - DNA, 618 bp, Unknown
  Bacterial polypeptide expressing nucleotide sequence isolated from the Sargasso Sea
tatgagtcacttaaaatacctagaagccgaagctatccatataattcgtgaaattatatctgaatctacaaatccagttgtgttatactctatcgggaaagatagtgctgttatacttcatcttattaaaaaggctttctacccatcaataccaccattgccactactacacgttgataccacttggaaatttaaagaaatgtataatttaagggacaaagtggcaaaagatattgggatggagcttattgtctatcaaaatcaagacgctataaataaaggtatcaatccctttgatcatggtactttgcacactgatatttggaaaacagagggtttgaaaaaagcctttaataagtatgaatttgatgctgctatctgtggtgcgagaagagacgaagaaaaatcacgtgcaaaagaacgaattttttcttttcgtaattcaaaacatttttgggactctaaagctcaaagaccagaattatggtctttatataatgcaagaaaattcacaggtgaaaatattcgtgtatttcattatcaaactggacagaatagatatttggcatatatatatatggaaaaaattgaaatcgtctcattgtaccttgctgcacc

SEQ ID NO: 254204 - DNA, 889 bp, Unknown
  Bacterial polypeptide expressing nucleotide sequence isolated from the Sargasso Sea
atttggaaacctgatttagagcaagaagctaaatcaatttttggaaccttggacaccaaacatccaggagttaatcatctttttaatatcggaaataacaactatataggcggaaccataaaaatgatttctttgccacatcatcatgactataacaattttagacatagccctgatgatttaaaacattattttaaatcaaaggggtgggataaaattgtagcatttcaaactagaaatcccctccataaggcacattttgagcttactaaaaacgcaatgcgtgaactggatgcaaatattttaatccatcctgttgttgggcttactaaacctggagacgttaatcactatacacgaatgcggtgctatcaacatgtaatgaatgaatatccaaaaaattctgcaaaactaagccttttacccttagcaatgcggatgggtggacctagagagaccctccttcatgcaataattagaaaaaattatggatgtacgcatttaattgttggtcgagatcatgctggtcctggtttagattcaaaaaacaatccgttttatgggccttatgatgctcaagaaatgctaaataaatatcaacgagaaattggcattgaaatggttccatttaagtttatggtttatattacaaagactaaaaattataaaccaatcgatgaagtcaaaaaaaatgaggattataaaacgctatcaggaacggaattacgacaacttttagataaaggtgagggaatacctgattggtttacttttagggctgtttcgcgtgaattagagcgctctaaccctcctttgacaaagcgaggtctaactattttctttaccgggttgtctggatcaggtaaatcaacgcttgcaaacggattat

SEQ ID NO: 254205 - DNA, 617 bp, Unknown
  Bacterial polypeptide expressing nucleotide sequence isolated from the Sargasso Sea
actgattttatttgttcaatatattgaacttaataatacaaaatttttatttgctaatgatagacgtaacggaagattatgggtaaaagttaaatcaaaaaaaattaatgatatatctaaaggtctaaaatacttttcaaagcttaggaaaaaaaatattattatttttccagatattaatctattaaatacttttgttgaagagaagattaatgaaaagctagcaaactataaattaaagcaccctattcattttcctgattatttatttaaaataaataaattaaatatcaaagatacaaaattattaaaaaaatttaacttacctcaaaacagctatctctctgatctagaagcagaaagtatccacattataagagaggttgttagtgaaactaaaaatcctgtcatgctttattctataggaaaagatagttcagtgatgttaagacttgcacaaaaagctttttatcccagccctcctcctttccctttggtacatgtagatactcggtggaaatttcgtgaaatgtatttatttagaacttggattgcaaaaaatagtggtatgaagttaattactcacataaatcctgagggtattaaatcaaatataa

SEQ ID NO: 254206 - DNA, 659 bp, Unknown
  Bacterial polypeptide expressing nucleotide sequence isolated from the Sargasso Sea
aatgcctcatggctcaaacgaactgaatacactttatatagaagacgaattagcccgagcatctatgctatctgcagctgcagaaatgagaacacttgaaatatcatcagcagcagcagcgaatgcagttatgctagctgctggttattttaatccccttacagggtatatgaataaagatgacgctcttcgagtatcaaaagaaatgcttactactgataatttattttggcctatacctatagtaaatcttacaacagacgcaaactcacttgattatactcatggcgaggaaatcgccctcaaggatcctaatgtagcgggaaatccggttatagctattcaaagagtcgacaacgttgaaaaacttacggatgaggacatagatgttatagtcacaaatgtatttggtaccaatgacgataatcatcctggagttaagacttttaaagatcaaggaaggtatatcatctcaggatcaattgaggtactcaattacagctactttccaactgattttccagaaacctttgccactgctccacaaattagagaaatgcttacaaaagctggttggtcaaaaacagtagcttttcaaacaagaaatcccatgcatagagcccatgaagaattatgtaaaatggcactagataggttgg

SEQ ID NO: 254207 - DNA, 172 bp, Unknown
  Bacterial polypeptide expressing nucleotide sequence isolated from the Sargasso Sea
atgagttaccacagtgaactgattgcttctgatatccaagagtatctgcatcagcatgaaaataaagaactgctacgctttttgacgtgcggtagtgttgatgatggcaagtccacattgattggccggttgttacatgattccaagatgatctatgaagatcagcttgcgg

SEQ ID NO: 254208 - DNA, 805 bp, Unknown
  Bacterial polypeptide expressing nucleotide sequence isolated from the Sargasso Sea
caaatgagattatcaaatggtgatttatttcctatcccaattgtactggatgtaaacaaagaattttcagattctctaagcttaggcgaagaaattcttcttcgagataaagaaggatttaaaattgcctatatgaccattaatagtatatgggagccagatttaaatcgtgaagcagaattagtttatgggacaaatgatataactcatccagcattgcattatatgtttaacataggtaacagagtttacattggtggaaaagttgagaaaatctctatcccaaaccactatgattatagaaaatataggatttctccaaataaagcgaaaaatgagtttattaatagaggatgggataaaattattgcattccaaacaagaaacccattgcatcgtgcccatgttgaaatgacacttagatcaatgagagaattagatgctaacctttttttgcatcctgttgtgggtatgacaaagccaggtgatgtggaccactacacaagacttagatgctacgaacatgttattggtaaatatccaaaggataacgctattttagcattattacctcttgctatgagaatgggtgggccaagggaagcattattgcacgcactaataagaaagaattatggttgtacacatataatcatcggccgggatcatgcaggtcccggaaacgatattaatgatgagccattttatgggccctatgaagcgcaagatttaatcaaaaaatataaagatgaaatagatataaaaatgattccatttgagtttatggtctatgttccagatagta

SEQ ID NO: 254209 - DNA, 179 bp, Unknown
  Bacterial polypeptide expressing nucleotide sequence isolated from the Sargasso Sea
aatgactgctagtatcccgtctgtaacgcatttgaaacaactcgaagccgagagtatccagattttccgtgaggttgctgctgagtttgaaaacccagttatgctttactctgtaggaaaagactcttctgtactgcttcaccttgcccgtaaagcgttcgcgcccggcaaaattcttt

SEQ ID NO: 254210 - DNA, 858 bp, Unknown
  Bacterial polypeptide expressing nucleotide sequence isolated from the Sargasso Sea
gaagacatttggtgtcctgaaaaattatttgaagctgataaagtttttagttctactaacaatgaacatccaggagtaaattatcttttaaataaatctaacaaaatttaccttggaggaaaattaatcgggattaataagcctactttttatgattttaaacattttagaaactctcctaatgaattaagaaaaatatttaataaattaggttggtcttcagtggttgcttttcaaacaagaaatccacttcatcgtgctcatttcgaactaactttaagagcctcatcagagagtgaagcaaatttattaattcatccggttgtggggatgacaaaaccaggtgacattgatcattttacaagagtacgttgctatgaggctattttaaaatattattcaaaatcaactacttgcttatcactccttaaccttgcaatgaggatggctggtcccaaagaagctattcttcatggattaattagagctaattatggttgtactcattttattgtaggaagagatcatgctgggcctgggttgaaagctaatatggttccattttataaagaatatgaagcacaagagttatttgccaaatatcaagacaaaattaatatacaattattaaaatttcagaactttgtatttctggaagacagtgctgaatatgtaccaattaatgaagtacctaaaaattcaagtgtagtacaaatatcaggaacagagttaagaagaagacttaataaggatcttaaaatacctgagtggttttctttcccagaggttatagcagaattaaaaaaaacaaaaccaccgttacacaaacaaggttttgcagttttttttaccaggttt

SEQ ID NO: 254211 - DNA, 961 bp, Unknown
  Bacterial polypeptide expressing nucleotide sequence isolated from the Sargasso Sea
ctttgggccgatacccatcacactagatgtgtcaaaagaattttctaaacacctgaaaattggagaaaaagtagcactccgaaaccttgagggcgttattttagccacaattcaaattgatgctaaatggtctccagacaaatttcgagaagctgacaaagtttttcaaacacgagatgaaacacatcctggtgtaaattttcttatgaataatactggtgaaatttatttaggaggtgaagtagtcgggctggaaagacctcagcactatgattttaaaagcagaagacaaactccgaatgagttgagaaaatatttccagaaaatgggctggcagaaaattgtggctttccaaactagaaacccgctacaccgtgcacaccaagaattaactttgacagctgcccgggaagttgaagcaaatttactaattcaccctgttgttggtatgactaaacctggtgatgttgaccactttactcgtgtacgatgctacgaggcaattttggataagtacccaacattttcaacaaacttatcgctaatcaatcttgcaatgcgaatggcagggcccaaagaagcaatttggcatggtcttattcgaaaaaaccatggctgcacgcatttcattattggaagagaccacgcaggtcctggtaaagatgcatatggaaataacttttacaccccctatgccgcacaaagcttattcaaaaaatattcaaaagaaattgggataaagatggtgagttttaaagagttagtatatgtacctgatcaagcaaaatttaaatctattgatgagttgggtgacggtattaaaacgttaaatatctcagggactgaactgagacggcgtttgtatgaaggaatagagattccagattggttttcatttccagaagtactggaagagcttcgcaaaacattacctccgttatcaaaaacgcggttttactat

SEQ ID NO: 254212 - DNA, 484 bp, Unknown
  Bacterial polypeptide expressing nucleotide sequence isolated from the Sargasso Sea
atggatattgaaacattttttgaaaaacaaaattctaaaaatcaacttaagatcttaacctgtggttctgtagatgatggtaaatcaactttgattggaagactgctatttgattctaaaagtatttacagtgaccagctttcacaaactaaatttgaaagtgaaaaatatggcacacaaggaaaagaaatagatttagcattacttattgatggcttacaagctgaaagagaacaaggtataacaattgatgtcgcttatagatattttgaaacagataaatgtaagtttataattgctgatactcctggacatcaagaatatacaagaaatatggcaactggagcgtctaattcagatgttggtattattttaattgattcaacaaaaggtatattagaccaaacaaagagacatacatttattttatcacttttagaagtcaaccatatcgttattgcaataaacaaaatggatttagtaa

SEQ ID NO: 254213 - DNA, 439 bp, Unknown
  Bacterial polypeptide expressing nucleotide sequence isolated from the Sargasso Sea
ctgggatccaaaaaaccaaaaaccagaattatggaatttattaataccaagatttcaaaagatgaaagcgtaagaatattccctttatctaattggacagaggttgatgtctggcaatatatttatcaagaaaagattccaattgtccctctatattttgcagcaaaaagaccagtaataaaaagagatgatatgctgataatggtggatgataagcgccttgaaataaataaaaatgagaaagttgaggagaaattagttagattcagaactcttggatgctaccctttaactgccgcaatagagtcaaaagcttcaaatatagaagaaattattattgaattgctggagtcaaataattctgaaagacaaggaagattaatagattcagatcaaattggatcaatggaaataaaaaaacaagatggttatttctaat

SEQ ID NO: 254214 - DNA, 766 bp, Unknown
  Bacterial polypeptide expressing nucleotide sequence isolated from the Sargasso Sea
acccgcccgcccgctcgtccgcccgcgcgcacgcgcgcacgcgggcacagagagagacgcacacgcacgcgcgcacgcacacacacacacacgcgcgctcgcacacacacacatacacggagtcagagagagacaagcgcacacacgcgcgcacacacacgcgcagacacaccgaggcgcacgcagacacgcagacacgccgacacgcaggcacgcagacagacatacacacacacacgcgcagatacacaggcacgccggcagccagacagacacaaacacactgacacgcagacacgcaacgactcagacacggacacagacacaggaacaggcacagacacagacacagacacagaaacacgggcacacggacacgcaggcacgcagacacatagacacacagacacacataaacgcagacacgcagacacgcagacacggagacacggagacacgcagacacgcaggcacggacacggacacagacacagacacaggcacaggcacaggcacaggcacaggcgcagacacagacgcagacgcagacgcaaacacagagacagacacaggcacaggcaccgacgcaggcacagccacagacacagacacagacatagacacacgcacacgcatgcacgcgcgcgtacagacacacacacgcgcgccacacacacacacacacacgcgcgcgcacagagagggatcgcttcagccagtcagacagacagacacgcagccagccagacaggcatacagccagaca

SEQ ID NO: 254215 - DNA, 886 bp, Unknown
  Bacterial polypeptide expressing nucleotide sequence isolated from the Sargasso Sea
tgatttattccccatcccaattgtacttgatgtaaccaaagagttttcagattccataagcttgggtgaaaggattctacttcgtgaaaaagaaggttttaaaattgcgtatatgaccattgatagcatttggaaaccaaacttcaatcgcgaggcagagctagtttatgggacaaatgacatatcccacccagctgtgaattatatgtttaatttaggtcatgaagtatatattggtggaaagattgagattatttctaaaccaaatcattatgattataggggctataggattgctcctgatgaggcaaaaattaaatttaaggaaatgggatgggataaaatcgttgcatttcaaactaggaacccactacaccgtgcccatgtcgaaatgactttgaagtcaatgaatgaattaaatgcgaatctatttttacatcctgtcattggtatgacaaagccaggtgatgtagatcattataccagagttagatgctacgagcatattcttgataaatatccggaaaataatgctattttagcattattacctctagcgatgaggatgggtggaccaagagaagcattattgcatgcacttataagaaagaactacggttgttcccatattattattggaagagatcatgctggtcctggaaatgatattaataataatccattttatgctccatatgaagcgcaagaaataatcagaaaatatgaagatgaaatagatataaaaatgataccatttgaatttatggtatatattccggagactaagaattataagcccataagtgagattggtaaaaatacagattataaaacgatatctgggactgaattaaggcagatattagatagaggagaaaatatacca

SEQ ID NO: 254216 - DNA, 265 bp, Unknown
  Bacterial polypeptide expressing nucleotide sequence isolated from the Sargasso Sea
ctgtcgtaatttcgatgggatcgatattctcgtagatgatgatcgaatgccaattcgggatgatcagaaaattgagttgaaaagtgttcgattcagaactttaggatgttatccgttgacaggtgcagtggaatcaaatgcaacaactctacccgagataattcaagagatgctcctgacgaaaagtagcgaacgacaagggaggttgattgatgctgatcgggcgggttccatggaagagaagaaacgcaagggttatttctag

SEQ ID NO: 254217 - DNA, 773 bp, Unknown
  Bacterial polypeptide expressing nucleotide sequence isolated from the Sargasso Sea
tttgaataaatatcaattaacacatctagaggaattagaatctgaatcaatttttctgtttagagaagtggcctctcaatttgaaaatccagtattgcttttttcagggggaaaagattcaatagtttgttatcatttagctagaaaagcattttttcccgctaatttgcctttccccttattacatattgatactggacataattttactgaactttataaatttagagatgagttaattaaagaaactaatggaagacttttaattggttctgttcaaaaatcgatagatgatggtaaagtaattgaagaaaaagggatcaattctagtagaaataaacttcaaactattacacttttaaacagcattgaagagaatcaattcgattgtgcaattggaggagctagaagagatgaagaaaaatccagagcaaaagaacgttttttttctcacagagatgattttggacaatgggatccaaaaaatcaaagacccgaattatggaatttatttaatgggaagaaaaattttggagaacactttagagctttccctatcagtaactggacggagatggatgtctggcaatatattttacaagaaaaaattaaacttccatccttatatttctcacatgaaagaaattgttttatgagaaatggcgttctaatggctaaaactgattttattaaactaaaccatgatgaaaaaataatgaaaatgaacgttcgatttagaacaattggagatgttacttgcacaggtgctacaa

SEQ ID NO: 254218 - DNA, 771 bp, Unknown
  Bacterial polypeptide expressing nucleotide sequence isolated from the Sargasso Sea
aatggataataaaagtgaatcgaataattataaaacttgggtgttaactgatagacagatctgcgacttagagttaataatggatggtagtttttctcctttaacaggatttttgaatgaagatgattataatagtgttttagataacatgaaactaactgatggatctgtttggccaatgccaatcaatttagatgtaaataatgaatttatagaatctatttcagatgaatcctctattacccttcgagataaagaaggatttgcaatcgcaatattagatattgaatctaaatggaaacccaataaagaaaatgaagccttaaaagtatatcaaacaaaaaatcaagaacaccccggagtacactacattataaatcaaactcatgattggtatattgggggaaaaatacggagcatacaaaaccctaagcattatgattatactaatattaggttaacaccttctaaggttaaagaaaaaatttctaaaatgggttgggatagagttgttgcattccaaacacgaaacccaatgcatagagcgcatgtagaaatcactcatttagctgcaaaagaaaacaatgcgaacctattaattcatccagtggtagggatgactaagccaggtgatgttgattattttactagagtgcgttgttacaataaaataattaaaaaatatcctagtggttcagccatgctatcactgctcccattatcaatgcgaatggctggcccaagagaagccttatggcatgccttaattag

SEQ ID NO: 254219 - DNA, 811 bp, Unknown
  Bacterial polypeptide expressing nucleotide sequence isolated from the Sargasso Sea
tagtggttatttagacatggagcttcttcggtttaccaccgtaggaagtgttgatgacggtaaaagcaccttaatcggtcgcttgctatatgatagtaagtctatttttgaagaccaatatgaatccatcaaaaaaaccagtgaaagtagaggcgaggaaaatgtaaaccttgcattggttactgatggacttagggatgaaagagagcaaggaattacaattgatgttgcctatcgttacttttcaacaccaaaacgaaaattcattattgcagacactcctgggcatatacagtatacccgaaacatggttacgggagcctctactgcacactgtgccctcattttaatagacgccagaaaagggattgtagaacaaacatgtaggcattcctttattgcatctcttttgcaaattcctcatttaattatctgtgtaaacaaaatggatttagtcgattatgacaagtcggtttatgagaaaatcaaacaggagtttaagaagttttcatctaaacttcaggtaaaagacattcggtttgttccaataagcgcacttgaaggagacaatgttgtaaacaagtcaaataacatggattggtacgaaggaacaacgttaatgtatcttcttgagaccattcacattggaagtgatagaaacttggttgattgcaggtttccaattcagacagttattcgtccacaaaccaaagaacatcacgattatcgtggttatgcaggagaaatagcagggggtatatttaaaaagggagacgatgtaatggttttaccttctgggtttacttcaaaa

SEQ ID NO: 254220 - DNA, 186 bp, Unknown
  Bacterial polypeptide expressing nucleotide sequence isolated from the Sargasso Sea
actacttcgcttgctcacttgcggtagcgtagatgatggcaagagcacccttattggtcgcttattgcatgactcaaaaatgatctatgaagatcatctcgcctctatcgcagctgagagtgcgaagtctggatcaactggtggcgaattaaatttggcccttctagtggatggtctacaagcaga

SEQ ID NO: 254221 - DNA, 793 bp, Unknown
  Bacterial polypeptide expressing nucleotide sequence isolated from the Sargasso Sea
tttgcaatcaaaaactccaatgcatcaaaaattactcttagggacaaagaaggctttgctctcgcggtattaactatttcagaaatttggaaaccaaatttaaaacaagaagcaaaatcaatttttggaacaacggacaccaaacacccaggggtaaatcatcttcttaatattggaaataacaattatgtaggtggaactgtaaaaatgatttctatgccccatcatcatgactataatgattttagacatacaccggatgatttaaaacatgattttaagtcaaagggttgggataaaattgtagcatttcaaactagaaacccccttcacagggcacattttgagctaactaaaaatgcaatgcgtgaactggatgccaatattttaatccatccagttgttgggctaactaaacctggagatgttaatcactatactcgaatgcgatgctatcaacatgtaatgaatgaatatccaaaaaattctgcaaaactaagccttttgcccttagcaatgcggatgggtgggcctaaagagacccttcttcatgcaataattagaaaaaattatggatgtacgcatttaatagttggtcgcgatcatgctggtcctggtttagattcaaaaaacaatccgttttatgggccttatgatgctcaagaaatgctaaataaatatcaacgagaaattggcattgaaatggttccatttaagtttatggtttatattccaaagactaaaaattataaaccaattgatgaagtcaaaaaaaatgaggattataaaacgc

SEQ ID NO: 254222 - DNA, 861 bp, Unknown
  Bacterial polypeptide expressing nucleotide sequence isolated from the Sargasso Sea
gtgttttgtgtcgaatgaaaaagagcgcgatgctctcttaaaagaagctgagactttgccgtccctgttgttaaattcggcggccgcagcaaatgctgtgatgctcggcggtggatattttaatcctcttaagggttttatggatcttgaggaggcgttgtccgtagcagagcatatgaggacgaagagtggattgttttggccagttccgatagtcaatcttaccaacgaggattgggtgaaatccggccaaagaattgcgctttgtgatcctaatatagaggataatcccattttagcagtgatgaatgttgcagatgttgaagaagtatccttggagcatcatagattcatggcagaaaatatatttggtactctggatgaaagccacccaggggtcgcgacatttcttggtttaggtagaaagattttatctggttctgtgcaggttttaaacttctcttattttgaaaaagaatttggagacacttttttaaccgctaatcagattaggtctgaaattcatcgacttggctggagtaaggtggtcgcgtttcagactcgcaacccaatgcatcgagcccatgaggaattgtgtcgaatggcaatgcaggacttagaggccgatggcattctaattcatatgcttttaggaaaattgaaggaaggtgatatacctgcaatggttcgagattcagccattcgcaagatggtggaactctactttccgatgaataccgcaatggttgccggttatggttttgatatgctttacgcaggtcctcgagaagcggttttgcatgcagttttccggcagaattgtggttgctcacatttgatagtgggccgtgatcatgcggg

SEQ ID NO: 254223 - DNA, 559 bp, Unknown
  Bacterial polypeptide expressing nucleotide sequence isolated from the Sargasso Sea
gatggctgagttacaaactagtcccgagcgaatacaagaatacatagatcgtcaaatgggtctggatcttctcagattcattacctgtggaagcgtcgacgatggtaagagtacgctcataggtaggatgctttatgaggctcagttgatttttgatgatcaagtcgcaagtctgcagagcgattcaaaaaagcacggtacccaagaaggcgaaattgactttgctttgttggttgatgggctagcggctgagagagaacaaggtataactattgatgttgcgtatcggttttttggtaccgatcgaaggaaatttatagttgcggatacccctggccatgaacaatacacccgtaacatggtcacgggggcttcgaccgcggatgtcgcggtgattttggttgacgcgtcccagggtattctcgttcaaacacgaaggcactcttttttaacttcgttgctcggggtcaaacatgttgttttagcggtcaacaaaatggacctcataagctatgacgaacaacgttatcaacagatcgttgacgaatatgaggtcttc

SEQ ID NO: 254224 - DNA, 694 bp, Unknown
  Bacterial polypeptide expressing nucleotide sequence isolated from the Sargasso Sea
catgtccactttagtccccccgcatggcggcagtgcgctcaatccacgattactgcctaaaaccgagcaagccagcgcgttgaaaagggcggagggtcttaaacaagtccctttaacaagccgggaatcgtctgatgtactgatgctttcgatgggggcctatacgccgcttgaaggttttatgagcgaagctgattggaaaggtacttgcggtgagatgaaactctccaatggtgttttttggccaattcccgtcacattgtcagccgatgaaacactcgccggatccattaaagatggcgaggaagttgcgctcgtagatgaagattctggggaaatcttggcaactatgacggtcaccgagaaatatactattgaccacgagtttgaatgccagaatgtttttggtacgacggacaaagatcaccctggcgtcgccaaggttttagggcaacgaggcgtcaatctctctggcccagtggttgttttcaacgaaggcgaaatgccaaatttgtataaagatctatatttacgccccaaggagtcgcgcgacctttttgaaaaaatgggttggtcaaaggtcactgcgttccaaactcgtaatcccatgcatcgcagtcatgaacatcttgtaaaaattgctctcgaagtgaccgacggtgtttttattcaccaagttctcgggaaaataaaa

SEQ ID NO: 254225 - DNA, 958 bp, Unknown
  Bacterial polypeptide expressing nucleotide sequence isolated from the Sargasso Sea
aatgattttagataaaagttttcatcccctaaatcgatttatgacagaggatgattataattcagtattaaatgaaatgagactctctaatggagaattgttcccaattcctatcacactagatgtaaataagggattctttgatcaacttgaaattggtgaacaaataattcttcgtgaaaaagaaggttttaaaattgctacgatgaccattcaaagcaaatggaagcctgattttcaaagagaatcagagcttgtttatggctccgttgacaagtatcaccctggagttaattatttgtttaatactagtaatgaattttacgtaggtggagaagttgaaaaaatttctatgcctaaccactatgattacaggcaatacaggattaaaccagaagaaagtaaaaaaatatttaaaacaatggggtgggaaaaaatcattgcatttcaaaccagaaatccgctgcatcgtgctcatatagagatgacaattaaatcgatgaccgatttgagtgctaatttacttttacatccagttgttggtttaacgaaacctggtgatgtggatcattttactagggttagatgctatgagcatgttattaaaaagtatccaaaaggttctgcaatcttaggtttattgccacttgcgatgagaatgggggggccacgtgaagcattattacatgctttaataagaaaaaactttggctgcactcattttataattggtagagatcatgccggcccaggtaacaatagtaatggagagccgttttatagcccatatgatgctcaagaacttttaaataaatataaaaaagagattgggattgaagtagtcgcttttaagtttatggtttatgtgcctagcgatggtaaatatagggcattagaagatttagataaaaacgaagaatacaaaacaatctccggatcagaatacgagctatcctag

SEQ ID NO: 254226 - DNA, 745 bp, Unknown
  Bacterial polypeptide expressing nucleotide sequence isolated from the Sargasso Sea
cctggtgttgaaaaagtgatggctcagaacccggtcaaccttgccggttcaatcactgttcttaacgaaggcagctatccgtcgacctatgacgggctatattttaaacctcaagaaacgcgggcaatgtttgaaaaaaacaactggtcaacagttgctgcttttcaaacaagaaatccgatgcatcgcagtcatgaacacttggcaaagattgcaatagaaatttgtgatggcttgcttattcatcaagttttaggtgctctaaaacctggagatattccggctgatgttagggtggccgcaatcgatgcattagtggaaaactattttgttgccgggacagccattcaagctggttatcccatagaaatgcgctatgcagggccacgggaagccctcttacatgctttgtttcgtcaaaatttcgggtgctctcaccttgttgtcgggagagaccatgccggcgtcggtgattattacggcccattcgatgcccacaagatttttgacgaaataccatttggtagtttggagactcaagcgctgaaaattgacatcgctttttacagttacaaatgcggtggcatggctacgggtagaacgtgtccgtccgatgacagtcagagactgaatatttcaggaacacgtctgagggagatgcttgccaatggagaaacggtgcccaacgagttcagtcgcccagaggtcatcgaagtactgaggagatattataactcattgtaat

SEQ ID NO: 254227 - DNA, 367 bp, Unknown
  Bacterial polypeptide expressing nucleotide sequence isolated from the Sargasso Sea
tagggtattcccattgtctaactggactgaaattgatgtatggcaatatatttttcaagaaaagataccgattgtaccgctgtattttgctaaaattagaccaataattaaacgtaataatatgttgatcatggttgatgatgatcgattagaattaaaacaaaatgaaaaaatagagcaaatacaggtcagatttagaactttaggttgttatccactaacagctgctgttgagtcctcagcatcaagtgtggaagaaattttaattgaacttttagaaactaaacactcagaaagacaaggaagactaatagataatgatcaaatcggttcaatggagagaaaaaaacaagagggatatttttaa

SEQ ID NO: 254228 - DNA, 224 bp, Unknown
  Bacterial polypeptide expressing nucleotide sequence isolated from the Sargasso Sea
ccgtatgccgctagagaaaggtgaagtaccagagatgcgctctgtacgtttccgtactcttggctgttacccacttaccggtgcggtagagtcagaagctgctaccctacctgaagttattcaagaaatgctgcttaccaagacgtctgaacgtcagggccgagttatcgaccatgacagcgcaggctctatggagaagaagaaaatggaagggtacttctaat

SEQ ID NO: 254229 - DNA, 211 bp, Unknown
  Bacterial polypeptide expressing nucleotide sequence isolated from the Sargasso Sea
tatggattctaatcttagtcacctagaatttctggaagctgaatctattgaaattataagagaagccattgctggagctaagaatccagtaatgctatattcgatcggtaaggattcttctgtgatgcttcaattagctttaaagtcattttatcctgcatcgccaccccttccccttctacatgtagatacaacatggaaattcaaggaa

SEQ ID NO: 254230 - DNA, 835 bp, Unknown
  Bacterial polypeptide expressing nucleotide sequence isolated from the Sargasso Sea
gatggctgagttacaaactagtcctgagcgaatacaggaatacatagatcgtcaaatggatctggatctgctcagattcattacctgtggaagcgtcgacgatggtaagagtacgctcataggtaggatgctttatgaggctcagttgatttttgatgatcaagtcgcaagtctgcagagcgattcaaaaaagcacggtacccaagaaggcgaaattgactttgctttgttggttgatgggctagcggctgagagagaacaaggtataactattgatgttgcgtatcggttttttggtaccgatcgcaggaaatttatagttgcagatacccctggccatgaacaatacacccgtaacatggtcacgggagcttcgaccgcggatgtcgcggtgattttggttgatgcgtcgcagggtattctcgttcaaacacgaagacactcttttttaacttcattgctcggggtcaaacatgttgttttagcggtgaacaaaatggacctcataagctatgacgaagaacgttatcaaaagattgttcacgattatgaggtcttctcgactggtttagcttttaagtccgtgacacctattcctctatcggctttagagggagacaacgtcattgaaagatctgccaatacgggatggtataaagggccaactttgttgggctaccttgaaacggttgatatcagagatgagttcaatgaaaagccactgcgattcccggttcagtgggtaaatagacctagtgcggagtttcgaggtttttcgggttcggtagtttctggccaggttgctgtgggtgacaaattaaggttctactttctg

SEQ ID NO: 254231 - DNA, 592 bp, Unknown
  Bacterial polypeptide expressing nucleotide sequence isolated from the Sargasso Sea
ttgcttttcaacgcgcaaccccatgcatcgcgctcatgaagaactttgcagaatttctcaaaaacagttgaacgccgatggaatcctagtgcatatgttgctgggtaaactcaagaaaggagacatacccgctgatatacgtaatgcttcaattcgcaaaatggtagaactatattttcctgagaacactgtaatggttactggctacggttatgacatgctttatgcaggaccaagagaagcaattttgcacgccattttccgtcaaaacgccggctgctcacacttgattgttggaagggaccatgcaggtgtaggagattattatggtgcatttgatgcccaaaccatattcgaaagcatacctgagggaacactgcaaattgagatttttcgtggtgatcacacagtgtggtgttttaaatgcgatgaggtggtgatgatgagagattgtccgcatgataaggaggactatctcctgctttcaggcacaagggttcgtgaaatactctccgaaggtaaagaacttcctcctgaattttcacgccctgaagttgcaaagattttatctgaatactaccaaacattataa

SEQ ID NO: 254232 - DNA, 836 bp, Unknown
  Bacterial polypeptide expressing nucleotide sequence isolated from the Sargasso Sea
gaagatgactataaaagagttttgaatgatatgcgacttgcaaatggttttttattcccattaccaattacattagatgtggataaagaattctctaagaaagttagcgttggagaaaaaattattcttcgtgaaaaagaaggttttcaagtagctaatatgacaataacaagtatttgggaaccagactttgatcttgaggcagaactcgtatacggcaccactgaccaatcacatcctgctgtaaactatctattcaattttagtaataaagtttatattggcggagaagttgaaaaaatttctatgcctaatcattacgattatcgagaattaagattaaatcctagtaatgtaaaaaagcaatttaaagaactaggttgggatataattgtcgcatttcaaacaagaaatcctttacatcgtgcgcatattgagatgaccctcgaatcaatgaaaaatttaaatgcaaagctgttacttcatcctgtggttggtatgaccaagcctggtgatgtagatcattatactagagttaggtgttatcagcatgttataaaaaaatataataagaacaatgctatgctcgctttattgccactagcaatgaggatgggggggcctagagaagcattattacatgctctcattaggaaaaattttggttgtactcatattataattggtcgagatcacgcaggtcctgggaatgacagtagcgggaatcctttttatggcccctatgatgcgcaagaattattgaatgaacataaagaggaaattgaaattgaaattgttcctttcaaatttatggtttatactccaaaagatgggaa

SEQ ID NO: 254233 - DNA, 760 bp, Unknown
  Bacterial polypeptide expressing nucleotide sequence isolated from the Sargasso Sea
taccacggcgagactctgatgaccatcctggagcaggtcgagctacgcaaagaccagaacgtggaagattttcgttttccggtgcagtttgtaaaccgcccgaacctggattttcgcgggtactgtggcacggtcgccagtggtgtggtgcacaagggtgacgagctggcggtgctgccgtctggcaagacgtctcgggtgaagggtatccacacttatgagggcgagattccacgggcatggcctggtgatgcggtgaccattacgctggaagacgaaatcgacatttcccggggcgacctgctggtgcacgccaaccagaaaccggcaatgggccagcggtttgctgcccacgtggtttggatgaatgagaaagcgttggtacctggccgcgaatacggcataaaaatcggcaccaaagtgactggctgctttgtgaacaaggtgctggaagaggtggatgtgaacaccttggcgcggaacaccaacgtagccactggcctggaactgaacgccattggactgtgcgatgtggagctgtctgagcctgtggtggttgaagattaccaggcgcatccgggcaccggcgccttcatcctgattgaccgcctgaccaatgtgacggtggctgcgggtatggtggcgcagggattggatggggctggtgaggcaccacaacgtgaatacactgaagccgagcggaacctgaaccggtttatccgcgagaactatccggaatggggttgtaaagcagtatgag

SEQ ID NO: 254234 - DNA, 1119 bp, Unknown
  Bacterial polypeptide expressing nucleotide sequence isolated from the Sargasso Sea
ctgatgtaaaagaaaacagcggaatagattttgcattaattacagatggtttaaaagcagagagggaacaggggataacaattgatgtcgcctatagatatttttcaactcctaaaagaaaatttattattgccgatacaccaggacacatccaatatactcggaatatgtttacaggtgctagtaattctgacttagcaattatacttattgatgctaggaagggtgttcttcaacaatcaaaaagacatctttatatcagttggcttttaggaatcaagcaaataatagtagcaataaataagatggatctagtaaattatgaagaaaaaacttttgattttataagaaaagattttttaagcatttctcaaaaccttgaattgcctaaaattgatttagtacctatatcagcattaaatggagataatataatttctaaatctaagaatatggaatggtatcaagataaaacattaatagagttgttagagggtgcagaacctaggtctaataaagatagttcgggtataagatttccagttcagcttgttaatagagttgataatgaagatactaaggattatagaggatttttaggaactctcgttggtggcaaattctctattggtaccgagataaatgttcttccctcgaattttaatgcaaaaattactaaaattataaaatcaagtgtagaggtagatattgcaaatcttggtgattctgtaagcatttgcttagataaagaaattgatatatcacgcggtgatatgatagtaaagtcagatgatcttcctcaaatttcaaataaaattattgctaatatttgctggatggataatgatccattgaatattaaaaagaaatatttatttaaacactgtaataagattactaaatgtatgataaaagatttagtatataaaattgatatggaaacactagagcagcaaaaagctatatcatctattgaaatgaatgatgttggtcaaatttctttgacactgttaaaaagcattgcttatgattcttactcaacaaaccaaagcactggtgcttttattttaattgatcctgatacaaataatactgttgcagctggtacaatttcttaag

SEQ ID NO: 254235 - DNA, 1096 bp, Unknown
  Bacterial polypeptide expressing nucleotide sequence isolated from the Sargasso Sea
aaaaaaaggaaggttatttttaacttgaaagattcaattggaatacttagatttgctacagctggaagtgtagatgatggaaaatcaactttaataggtaggttactttatgattcgaaaggaatattttcagatcaacttgaagcattagaaaatgactcgaaattgaaaaatcaaaaaaatattgaccttgctcatctaaccgatggtttaaaagatgaaagagagcaagggattacgattgatgtagcttacagatatttctctactacaaaaagaaaattcataatagccgatactcctggacatgaagaatacactagaaatatgttcactggtgctagtaattcaaatctagctataatcctaattgattctagaaaaggtgtattagaacaatctaggagacatttatatataagctatttgctgggtatcaaagatataattgttgctgtaaataaaatggaccttattgaatatagtgaaaaaaaatttttttcaatcaaaaatgaatttaataaaattgcaaaaaaattatctataaaatccataaaatttattccaatttctgcgctccatggagatatgattgtcaaaagaggggataatttaccttggtataaaggggaaacattattaagtatgctagaaaacactgttgtacattctaatgatgaatcaagtcattcatcattccctattcaattggtatctagagttgataatgatgaaattaatgattttcgtggttatatgggaatgacagcttctggagaatttaaaattggagataaaattcgtattcttccaggcaagaaagaatctgaaataaaaaatattatagtatcaggctcaaatacaaataaaataaccaaaaatcaatcaggaacattattgataaaagatgagcttcaaatctcaagaggagatacggttacatcattaaattataaccctaggatagatagtacaatttcggctcaaatatgctggatgggtgacgaagaacttaaccctaacaaaaaatatcttataaaacatagtaataaaatttcaaaaatcttaattaaacaagttgtggataaaattaaat

SEQ ID NO: 254236 - DNA, 1141 bp, Unknown
  Bacterial polypeptide expressing nucleotide sequence isolated from the Sargasso Sea
tatgtcaaattcaattatacagccacatggtggaaaactatgtaattcatttattcaaaaagaaaatctaaatgacattaaaaatgaaatacttcgtttaagatcatggtctttaactgataggcagttgtgtgatgtagaattgatattaaatggtggattttctcctttagtggggtttatgaatcaggatgattacgatagtgtttgtgaaaaaacaagattacaaaataatcatctttggccgattccaattacattagatattaccagcgaactggctgataaattagtaactaatgaaaaattagttctgagagataaagagggctttgccattgctctactaacaattaatgatatatgggttccagataaaggtaaagaagcacaaaatatctatggaacaacagacacgtatcacccaggagtaaattttttaataaatgaaactcaccccacttatgttggtggtacaatacaaggtatagatagcccaacacattatgattatccagaattaagacacaccccttttcaactaagagaattatttaaaaaattaagatggactaatattattgcatttcaaacgcggaatcctatgcatcgagcccatgttgaactaactaaaagagcattaaatgaaaataatgcaaagctattaatccatccagcggttggagtaacaaaacctggagacgttaatcattatactagagtcagatgctataaaagtataatggataaatatgataaagatatggctgcattaagtttattacctttagcaatgcgcatggcggggccacgagaagcgctttggcatgcgattattcgaaaaaactatggatgtaatttctttatagtggggagagatcatgctagtcctggattaaataaaaataataaaccctattatggtccttacgatgctcaagaaaatctaaatgaacattcaaaagaattagaaatgaatattattccatttaagcaattggtatttgtcaaagaaaagaaatcttttatggaaatagataaagtaccaaatgattgcactgccttatctgtatcagggacagagctacgtgatatgctggataaaggaaaaataattccagaatggttttcgtatccagaa

SEQ ID NO: 254237 - DNA, 1204 bp, Unknown
  Bacterial polypeptide expressing nucleotide sequence isolated from the Sargasso Sea
atgactaatctaatcttgccacatggctcgaatgaactgaacacactctacattgaagatgaaatggcaagatcgtcaatgttatctgcatcagccgaaatgcgaagtcttgaaataaattctgctgctgccgctaatgcagtcatgatggctgctggttactttaatcctttaacaggttatatgaataaagaggaggcgttgaaagtatcaagagagatgctgacactaaatgacatattttggccggttccgattgttaatattacaacagacgcaaactcacttgactatacacatggcgaggagattgctctcaaagacccgaacgttgaaggcaatcctgtcattgcgattcaaagaatagataacgtagaaaagctaagtgacgatgacatagagatcattgttaaaaatgtttttggaacaactgatgtaaatcaccccggtgtaaaaaattttaaagatcagggtaaatatattatttctggaccaattgaagtcttaaactacagttattttccgcatgattttccaaatacatttgctacagctccagatatacgaaagatgctaacaaaagctggttggtctaaaactattgcattccaaactaggaatccaatgcacagagcgcacgaagaactttgcaaaatggcttatgagcgactagaggctgatggagttttgatacatatgctcttgggtaagctcaaagagggtgatatcccaggagatgtaagagatgctgcgataaggaaaatggtagaattatatttcgaggagaacactgctatcatatctggatttggattcgacatgatgtatgcaggtcctcgtgaagctctgcttcatgcggtatttaggcaaaatgcaggatgcacacatttgatagttggtcgagatcatgctggcgttggtgattattatgaaccatttgaggcgcaagaaatatttgatttggatattgtgagagattcactcaaaatcgagatttttaaagctgatcacacagcttactccaaaaaattagataaagtggtaatgatgagggatgccgaagatcactctaaagatgatttcgttttactttctgggacaaaagtgagagaaatgctagctgcaggtcaagaattacccccagaatttgcaagaaaagaagtagccaagatattgatgacttattatcaggagagaagctgaa

SEQ ID NO: 254238 - DNA, 1201 bp, Unknown
  Bacterial polypeptide expressing nucleotide sequence isolated from the Sargasso Sea
tatgacaaatttggtagcccctcatggctcagatatacttaaaccattgataattagagataaatctgaaaaagacaacataattactcaatcaaaaaatcttcatcaacttaaattgaattctgctgccgctgcaaatgcagttatgttagctgcgggctattttacccctcttgagggctatatgaacaaaaaagacgcattaagcgtttcagaaaacatggtcactactaatggattattctggccagttcccattattaatttaactaaagaggatataacaggtgtttctgttggtgatgaaattgccttattagatccgaatgtcgaaggcaatcctgttttggcaattcaacgtattgaaacaatcgagaaaatatctgacgaagacttatctcttatggcaaaaaacatttttggtactaacgatagtgaacatccaggtgttaaaaattttactagtctagggaataccctaatatcaggaagtataaaagtactgaactatagttacttcccctcggattttccaaatacatttgcgacggctgaagaaattagaaaaaaattatctgactctggatggacaaaagttgttgcttttcaaactcgtaatccaatgcatcgagctcatgaggaactttgcaagatggccctggaaagacttagcgctgatggagtgctcattcatatgacccttggaaagttgaaagagggcgacattccgggcgatatcagagatgccgctataagaaaaatggttgaaatttactttcctaaaaataccgtaataatctcagggttcggatttgatatgttgtatgctggtccaagggaagctcttcttcatgcaacattcagacaaaattgcggttgctcacaccttattgttggccgtgatcacgctggagtaggagattattatgaaccttttgcagctcaagaaatttttgacaacgaaattgtaaaaaaatcccttaaaattgagatttttgctgcagatcatacagcattctcaaaaaaacttaataaagtagtcatgatgcgtgatgtcgacgatcattctaaggacgattttgtgctcttatccggtacaaaagttagggaaatgttatccaatggtgaggaccttcctgcagagtttgcgcgtaaagaagtagcagatatactgaaaagttactatcaatccttaaaataa

SEQ ID NO: 254239 - DNA, 556 bp, Unknown
  Bacterial polypeptide expressing nucleotide sequence isolated from the Sargasso Sea
atggatctagatctgctcagattcattacctgtggaagcgtcgatgatggtaagagtacgctcataggtaggatgctttatgaggctcagttgatttttgatgatcaagtcgcaagtctgcagagcgattcaaaaaagcacggtacccaagaaggcgaaattgactttgctttgttggttgatgggctagcggctgagagagaacaaggtataactattgatgttgcgtatcggttttttggtaccgatcgcaggaaatttatagttgcagatacccctggccatgaacaatacacccgtaacatggtcacgggagcttcgaccgcagatgtcgcggtgattttggttgatgcgtcgcagggtattctcgttcaaacacgaagacactcttttttaacttcattgctcggggtcaaacatgttgttttagcggtgaacaaaatggacctcataagctatgacgaagaacgttatcaaaagattgttcacgattatgaggtcttctcgactggtttagcttttaagtccgtgacacctattcctctatcggctttag

SEQ ID NO: 254240 - DNA, 1189 bp, Unknown
  Bacterial polypeptide expressing nucleotide sequence isolated from the Sargasso Sea
aatgcctcatggctcgaatgaattgaatacactgtatatagaagacgaattagcccgtgcatctatgttatctgcagccgcagaaatgagaacactagaaatatcatcagctgctgctgcaaatgcagttatgcttgcagcaggttacttcaacccgctcactggttatatgaacaaggatgatgctctaagagtatcaagagaaatgctcaccatggataatcttttttggcctgttcctatagtcaatctcacaactgatgcaaactcacttgattatactcatggagaagaaatcgcactcaaagatcctaatatagaaggaaatcctgtaattgctattcagcgtgttaataatgttgaaaaacttagtgatgaggatataaatattatagttacaaacgtatttggtaccaatgatgataatcatccaggtgtaaagacatttaaagaacaaggaaggtatatcatttcaggttcaatagaggttctcaattacagttatttcccatctgattttccagatacatttgcaacagctcctcaaataagagaaatgcttacaaaagctggttggtcaaaaacagtagccttccaaacaaggaacccaatgcacagagcccacgaagaattatgtaaaatggcactagatagattagaagctgatggcgtattgatacatatgacacttggaaaactaaaggagggtgatatacctggtgatgttagagattcagcaataagaaaaatggttgaaatctattttcctgagaatacagcaattatatctggttttggttttgatatgatgtatgcaggcccgagagaagcattgttgcatgctgtatttagacaaaatgctggctgtactcatttaattgttggaagagatcatgcaggcgttggtgattattatgagccatttggggctcaagatatatttgatcaagatgtagtcaaaaattcacttaagattgaaatatttaaggctgatcacactgcttactctaaaaaacttaatgaagtagttatgatgagagatgctaaagatcatacaaaagatgattttgtcttgctgtccggtacaaaagttagggaaatgcttgctgaaggacaagaattacccccagaatttgcaagaaaagaggtagcagagattctgatggcttattatcagaagattggctag

SEQ ID NO: 254241 - DNA, 381 bp, Unknown
  Bacterial polypeptide expressing nucleotide sequence isolated from the Sargasso Sea
aaggcgaaagcattcgtgtattcccaatgtctaactggactgagctagatatctggcaatacatctacctagaaaacattgatattccgcaactttacctttctaagcctcgccctgtcgttgagcgcgacggcgttcttattatggttgacgacgaccgtatgccgctagaagaaggtgaagtaccagagatgcgctctgtgcgtttccgtactcttggctgttacccacttaccggtgcggtagaatcagaagcagctaccctacctgaagttatccaagaaatgctgcttaccaagacgtctgaacgtcagggccgagttatcgaccatgacagcgcaggctctatggagaagaagaaaatggaagggtacttctaat

SEQ ID NO: 254242 - DNA, 556 bp, Unknown
  Bacterial polypeptide expressing nucleotide sequence isolated from the Sargasso Sea
tttaaaagacgctcttgatatacaaaaatacgattttgtttttggcggagctcgaagagatgaggagggaagtaggtcaaaagaaaaaattctttcacatagatcaaattttcatatatggacacctgaaaatcagagattggaaccttggaatttattcaactatgaaaaaaaagataatgaaagttttagggtttttccattatcaaattggacagaaataaatatatgggaatatattaaagattcaaatttaaaagtagtaccactttattttgcaaaagaacgaaaagtagtcattaaggataatgaaatttttctatatgatgataaaagatttatcttatcacctaatgataaggtaaaaaaattaaagataaggtttagaactctcggttgctatccgttaacagccggggttgaaagtagtgctgatactgttgacaagattataagagaattaaaaaaatctaaaaactctgaacgggctggaagaaaaatagacttagacaaaataggaagcatggaattaaaaaaaagagaaggttatttctga

SEQ ID NO: 254243 - DNA, 1111 bp, Unknown
  Bacterial polypeptide expressing nucleotide sequence isolated from the Sargasso Sea
ggaaaattagtaaatagagtaaaagatgttgatccatctgggctaatctcagttgatatatctgcagatttagcaaatgatgtagaaaatattgctgatggaattttttctccactagagggatttctaaaccaacaagattttgaatctgttatctcaaaaggaagactcgcaaacggtactgcatggactatgccaactgttttggatgttgatgatgacacaggtaaaaaaatgaaggatgctggagatgtattactaaaaaatccagatggagtaggaattgctgtattacatgtagaagatgtttattcttacgataaacaagccacaatgaatggagtatatggcacaaatgatgactcacatcctggtgtatctaaaacaaattcaatgaaagattttcttgttggtgggaaaattgattatattcaaagacaaaatgagactgaaattcgaaaacatagaatgactcctacacaaacaagagagttatttgaaaaagccggttggaaaacaattgttgcatttcaaactagaaaccctccacatgtagcgcatgaaatgttacaaaaaactgcaataacaacacgtgacggtgtttttgtaaatccacttattggaaagaaaaagtctggtgattttaaagatgaaattattgttaaagcatacgaagtaatgattgaaaaatactatccagaaaacaaatgtcaattagcaacattacatacagaaatgaagtatgcaggccctagagaagcaattcatcatgctatcatgcgtcaaaattatggatgtacacacataatcataggaagagatcatgcaggtgttggaaagttctacgatccatttgcagcacacaaaatatttgatgattatccagaacttgaaatagaaccaatctttttcccagcattcttttactgtaaaaaatgtcttacatttacaaatccaaatgtctgtccttgtgatccagaatatagagaacaaatttctggaacaaaaatgcgtgagatgattaacaatggtgaatctccatcagaattcatcttaagacctgaagttgctgaagtaatcattaactatgacaaaccatttgttgaatagc

SEQ ID NO: 254244 - DNA, 1129 bp, Unknown
  Bacterial polypeptide expressing nucleotide sequence isolated from the Sargasso Sea
attgattaatgcacacggtggaaaattagtaaatagagtaaaggatgttgatccatccggactaatctcagttgatatatctgcagatttagcaaatgatgtagaaaatattgcagatggaattttttctccactagagggatttctaaaccaacaagattttgaatctgttatctcaaaaggaagactcgcaaatggtactgcatggactatgccaactgttttggatgttgatgaagaaactggaaaaaaaatgaaagatgctggagatgtattactaaaaaatcctgacggaacaggaattgctgtattacatgtagaagatgtttactcttacgataaacaagctacaatgaatggagtctatggcacaaatgatgactcacatcctggtgtatccaaaacaaattcaatgaaagatttccttgttggtggtaaaattgattatattcaaagacaaaatgagactgaaattagaaaacatagaatgactcctacacaaacaagagagttatttgaaaaagcaggttggaaaacaattgttgcatttcaaactagaaaccctccacatgtagcgcatgaaatgttgcaaaaaactgcaatcacaacacgcgatggtgtttttgtaaatccacttattggaaagaaaaagtctggtgattttaaagatgaaattattgttaaagcatacgaagtaatgattgaaaagtactatccagaaaacaaatgtcaattagcaacactacatacagaaatgaagtacgcaggtcctagagaagcaattcatcatgctattatgcgtcaaaattatggatgtacacacataatcataggaagagatcatgcaggtgttggaaagttctacgatccatttgcagcacacaaaatatttgatgattatccagaacttgaaatagaaccaatctttttcccagcattcttttactgtaaaaaatgtcttacatttacaaatccaaatgtctgtccttgtgatccagaatatagagaacaaatttctggaacaaaaatgcgtgaaatgattaacaatggtgaatctccatcagaattcatcttaagacctgaagttgccgaagtaatcattaactatgacaaaccatttgttgaatag

SEQ ID NO: 254245 - DNA, 1129 bp, Unknown
  Bacterial polypeptide expressing nucleotide sequence isolated from the Sargasso Sea
ttgattaatgcacacggtggaaaattagtaaatagagtaaaggatgttgatccatccggactaatctcagttgatatatctgcagatttagcaaatgatgtagaaaatattgcagatggaattttttctccactagaaggatttctaaaccaacaagattttgaatctgttatctcaaaaggaagactcgcaaatggtactgcatggactatgccaactgttttcgatgttgatgaagaaactggaaaaaaaatgaaagatgcaggagatgtattactaaaaaatcctgatggaacaggaattgctgtattacacgtagaagatgtttattcttacgataaacaagctacaatgaatggagtctatggtacaaatgatgaatcacatcctggtgtatctaaaacaaattcaatgaaagattttcttgttggtggaaaaattgattatattcaaagacaaaatgagactgaaattcgaaaacatagaatgactcctacacaaacaagagaattatttgaaaaagtcggttggaaaacaattgttgcatttcaaactcgaaaccctccacatgtagcgcatgaaatgttgcaaaaaactgcaataacaacacgtgatggtgtttttgtaaatccacttattggaaagaaaaagtctggtgattttaaagatgaaattattgttaaagcatacgaagtaatgattgaaaaatactatccagaaaacaaatgtcaattagcaacactacatacagaaatgaagtatgcaggtcctagagaagcaattcatcatgccatcatgcgtcaaaattatggatgtacacacataatcataggaagggatcatgcaggcgttggaaaattctacgatccatttgcagctcacaaaatatttgatgattatccagaacttgaaatagaaccaatctttttcccggcattcttttactgtaaaaaatgtcttacatttacaaatccaaatgtttgtccttgtgatccggaatatagagaacaaatttctggaacaaaaatgcgtgagatgattaacaatggtgaatctccatcagaattcatcttaagacctgaagttgccgaagtaatcattaactatgacaaaccatttgttgaatagc

SEQ ID NO: 254246 - DNA, 1189 bp, Unknown
  Bacterial polypeptide expressing nucleotide sequence isolated from the Sargasso Sea
atgccacatggctcgaatgaactgaacacactctacattgaagatgaaatggcaagatcatcaatgttatctgcatctgccgagatgcgtagtcttgaaataaattctgctgccgcagctaatgcagtcatgatggctgctggttacttcaatccgctaacaggttatatgaataaggaggaggcgctgagagtatcaagagagatgctgacattaaatgatatattctggccggttccgatcgttaatattacaacagacgcaaactcacttgactatacgcatggagaggagatcgctctcagagacccaaatgttgatggcaatccagtcattgcgattcaaagaatagataatgtagaaaagctaagtgacgatgatattgagacaatcattaaaaatgtttttggaacaactgatataaatcaccctggtgtaaaaaactttaaagatcagggtaaatatattatttccggatcaattgaagtcttaaactacagttattttccacacgattttccaaatacatttgccacagctccagatatacgaaagatgctcactaaggctggttggtcaaaaactgttgcatttcaaaccagaaatccaatgcacagagcgcacgaagaactttgcaaaatggctcatgagagattagaggcggatggagttctgatacatatgctcttgggcaaacttaaagagggcgatattccaggagatgtaagagatgctgctataaggaaaatggtagaagtatatttcgaggagaatacagcaatcatatctggattcggatttgacatgatgtatgcaggtcctcgtgaagctttgcttcacgcagtatttaggcaaaatgcaggatgcacacatttgatagttggtcgtgatcatgctggcgttggtgattattatgaaccatttgaggcgcaagaaatatttgatttagatgttgtgaatgattcactcaaaatccaaattttcaaagctgatcatacagcttactctaaaaaattaaataaagtggtgatgatgagagatgccgaagatcactctaaagatgatttcgttttactttctgggacaaaagtgagagaaatgcttgctgcaggtcaagatttacccccagaatttgcaagaaaagaagtggccaagatattgatgacttactaccaagggagaggctgaa

SEQ ID NO: 254247 - DNA, 328 bp, Unknown
  Bacterial polypeptide expressing nucleotide sequence isolated from the Sargasso Sea
ttggcaatatatttatgaagaaaatattccaattgttcctctctatctagcaaaaaaaagaccggtaatattaagagataacatgctcataatggtagatgatgatagattaaaaattaaagaagaagaaaagatagaaacaaaattagtcagatttagaactttaggatgttacccattaactgctgctattgaatcaaatgccgctagtgttgaagaaataataatagaattacttgaatccaataattcagagaggcaaggtagacttattgatacagatcaaattggatctatggaaataaaaaaacgagaaggttatttttaa

SEQ ID NO: 254248 - DNA, 1129 bp, Unknown
  Bacterial polypeptide expressing nucleotide sequence isolated from the Sargasso Sea
attgattaatgcacatggtggaaaattagtaaatcgagtaaaagacgttgatccatccggattgatgtctattgatatttctgcagatttagcaaatgatgtagaaaatattgccgatggaattttttctccactggaaggatttctaaatcaacaagattttgaatctgttatttcaaaaggtagacttgcaaatggtactgcatggactatgccaactgttttagatgttgatgaagaaactggcaaaaaaatgaaagatgctggagatgtattactcaaaaatcctgatggaacaggaattgctgtattgcatgtagaagatgtatactcttatgataaacaagctacaatgaatggagtttatggaacaaatgatgaatcacatccgggtgttgtaaaaactaattcaatgaaagattttcttgttggtggaaaaattgattatatccaaagacaaaatgagactgaaattcgaaaacatagaatgactcctacacaaacaagagagttatttgaaaaagccggttggaaaacaattgttgcatttcaaactagaaatcctccacatgttgcgcacgaaatgttgcaaaaaactgcaataacaacacgtgatggtgtatttgttaacccactaattggaaagaaaaagcctggtgattttaaagatgaaattattgttaaagcatatgaagtaatgattgaaaaatactatcctgaaaacaagtgtcaactagcaacactacatacagaaatgaagtatgcaggtcctagagaagcaattcatcatgctatcatgcgtcaaaattatggatgtacacacatcatcataggaagagaccatgcaggcgttggaaaattttatgatccatttgcagcacacaaaatatttgatgattatcctgaacttgaaattgaaccaatcttcttcccagcattcttttactgtaacaaatgtcttacatttacaaatccaaatgtttgtccttgtgctccagaacacagagaacaaatatctggaacaaaaatgcgtgaaatgattaacaacggtgaatctccatcaaaattcatcttaagacctgaggttgctgaagtaatcattaactatgacaaaccatttgttgagtag

SEQ ID NO: 254249 - DNA, 982 bp, Unknown
  Bacterial polypeptide expressing nucleotide sequence isolated from the Sargasso Sea
aaaactaataatggtttgttttggccagtcccatgcgtcaaccgcacagatgatatttcaaggatggaagggtcttcagtaatcgcattgcgcgatccaaatgttacgggtaatcctgttcttgcaatacaaaatatagaagctatagaaactttagacgttgaaaaaattaatcatataaccaaacaaatttttggaaccttggatattgatcacccaggggttaaaacatttaaaaactctggtaaatatctaatttcaggaccaatcagggtgcttaattatagttactttaaatctgaattttcagatacatttcgtacagcaatggaaattcgaaatcagattcagaagaataactggaaaacagtcgtggcttttcaaacaagaaatccaatgcatagagcacatgaggagttatgtaaaatcgcaaaagactcggtaaatgctgatggtatattaattcatatgctattaggtaagcttaaaccaggtgatattcctgccgacattcgtaatgcagctattagaaaaatggttgagctctattttcctaaaaacacagtaatggtaacaggctatggttttgacatgctttatgctggaccgagagaggctgtattgcacgctgtatttcgtcaaaatgcgggttgtacacatttgatagttgggcgcgatcatgcaggggtgggtgattactacggcccttttgaggcacaaacaatttttgatagcaatgatgtttcagatgcattggatattgaaattttcaaagccgaccatacagcctattcaaaaaaattaaataaagttgttatgtttcgtgatgtcccagatcatacaaaagaggattttgtaatgctgtcgggaactcgtgttcgtgaaatattatcagctggaaaagatttgcctgctgaatttgcacgcccagaggtggcaaaaatattaatgtcttattatcagcaggaagcaaaccaataac

SEQ ID NO: 254250 - DNA, 1066 bp, Unknown
  Bacterial polypeptide expressing nucleotide sequence isolated from the Sargasso Sea
gatgtcaattgatatttctgcagatttggcaaatgatgtaaaaaatattgccgatggaattttctcaccattagaaggatttctaaatcaacaagattttgaatcagttatctcaaaaggtagacttgcaaatggaattgcatggactattccgactgttcttgatgttgatgatgatactggtaaaaaaatgaaagaagctggtgatgtcttactaaaaaatcctgatggaacaggaattgctgtattacatgttgaagacgtttactcttatgataaacaagcaaccgcaaatggagtgtatggaacaaatgatgactcacatccaggtgttgcaaaaacaaactctatgaaagatttccttgtcggtggaaaaattgactatattcaaagacaaaatgaaactgaaattagaaaacatagaatgagtccaacgcaaacaagagaattgtttgaaaaagcaggatggaaaactattgttgcatttcagactagaaatccaccacatgttgctcatgaaatgttacagaaaactgcaattacaacacgtgatggtgtatttgtaaatccattaattggaaagaaaaaatctggtgactttaaagatgaaattattgttaaagcatatgaagcaatgattgaaaaatactatccagaaaacaaatgtcaacttgcaacactacatacagaaatgaaatatgctggaccacgagaagcaattcatcatgcaattatgcgtcaaaattatggatgtacacacataatcataggaagagatcatgcaggtgttggcaaattctatgatccatttgcagcacataaaatatttgatgattatccggaacttgaaatcgaaccaatcttcttcccagcattcttctattgtagaaaatgtcttacgtttacaaatccaaatgtttgtccacatgatgcagaagatagagaacaaatttctggtacaaagatgagagagatgattgataacggtgaatctccatcagaatttatcttaagacctgaagttgccaaagtaatcatcgattatgacaaaccatttgttgagtag

SEQ ID NO: 254251 - DNA, 1120 bp, Unknown
  Bacterial polypeptide expressing nucleotide sequence isolated from the Sargasso Sea
aatgattaagacacacgcctcaaaagagttaaacccattgtttgtgcaagattcacatcaacgcgctgaactgacaaaagaagcagaatcattgccagcaatgacattaagctcatctgcagcatctaatgcagtaatgcttagcgctgggtatttcaccccattgaagggtttcatgaacaaagaagatacgttgtcagtggcaaatcagctaaccactgctgacggtttattttggcctacacctgtaattaatttgaccaacgatacaactgctattagtactgcaaagagaatcgcattgagagacccaaatataaagggacagccagtgcttgctattcaagatgttactgctatagaaactttaagcaagcaagagctagaacatgttacacaagaagtattttctacatgcgaccctgatcaccctggggttgctgcatttatttcacaaggaagccagttagtttctgggccaatacaagttttaaaccacagctactttgagacggagtttccagaaacatttagaacggctactcaaatacgtgacgaaataaaacagcgaggatggaaaactgttgtcgggtttcaaacacgtaacccgatgcaccgggcgcacgaggaactttgcaaaatggcgcaagaagctgttaatgcagatggtgtgcttattcatatgttgcttggtaagctgaagcccggagatattcctgcggacgtgcgtgatgcagcaatacgcaaaatggttgaactctattttcctgaaaatacagtaatgatcactggatatggttttgacatgctctatgctggcccacgcgaggcagttttacatgctgtttttagacaaaattgcggctgcacacatttaatagtgggtcgtgatcatgctggtgtcggggattattatggagcgtttgatgcccagactatttttgataaggcagtaccccctggcgcactcgacatagagatttttagggctgaccataccgcatattcaaaaaagctaaacaaggtagttatgatgcgtgatgcacccgaccattccaaagaagattttgtactactttcaggcacgaaggttagagagatgcttgctagcggaaaagaa

SEQ ID NO: 254252 - DNA, 555 bp, Unknown
  Bacterial polypeptide expressing nucleotide sequence isolated from the Sargasso Sea
catgactgatcagaaaacattaactcacttacaacaattagaagcggatagtattcatattatgagagaggttgttgctgaaactgaaaatccagtaatgctttattcaattggtaaggattcatcggttttactacatttagctagaaaggcattttatcctgcaaaaattccatttcaggtaatgcatgttgatacgacatggaaatttaaagaaatgatcgagtttagagataatttagctaaggaatatgatcttgatttaattgtttatacaaaccctgatggcgttaaacagaatgtggggccatttacacatgggtctgctgttcatacggatattatgaagacacaagcactaaagcaagctttggataaatatcagtttgatgttgcctttggtggagctagacgtgatgaagagaaatcgcgtgctaaggaacgtattttttcatttcgatcggctcagcatcggtgggacccgaaaaatcagagacctgaattgtggtctttgtataatacaaaaaagaagcctggtgaatcgattcgagtttt

SEQ ID NO: 254253 - DNA, 802 bp, Unknown
  Bacterial polypeptide expressing nucleotide sequence isolated from the Sargasso Sea
atgtcacatcaatccagtttaatcgaatctgatattttagggtatctacacgaccaagaacataaaagtttacttcgatttattacctgtggatcagtagatgatgggaaatcaacattaatcggacgtttattgtatgaatcaaaattaatttatgaagatcagttagcggcacttgaaaaagattcaaaaaaagtcggtactcaaggtgaggatattgattttgcattattagtggatggcttagcgtcggaacgtgagcaaggtattacgattgatgttgcataccgttatttttcaacagataaacgtaagtttatagttgctgatacgcctggccatgaacaatatactcgaaatatggctacgggtgcatctacggcagaacttgcgatattaatggtagatgctaggcacggtattatgactcagacaaagcggcattcaaccatagtccatttattaggtgttgataaaattgtattagctattaataaaatggatttagttgatttttctcagtctgtttatgaggatattttaaacgagtaccagtcgtttgcagctgaaattgggattaagcaatttactgcgattccagtatcagctctaaagggtgataatattacagagtctagtcgaaatatggattggtatacagggcctaatttaattgagtttttagaaacggttcctttaagtcaggttaatgaatcagaggcgttttcgatgccagttcaatgggttaatcgaccaaatttagattttcgtggttttgcaggtcaaataacgacgggtaaag

SEQ ID NO: 254254 - DNA, 775 bp, Unknown
  Bacterial polypeptide expressing nucleotide sequence isolated from the Sargasso Sea
actggaatcggaggcgatccacatctttcgagaaacagcggccgcatttcgcaaccctgttcttctctacagcatcggcaaagactcctcagtactccttcatctagcgctgaaagctttccatcccgctccactgccgtttcctgtcatgcacatcgatacgacgtggaagtttcgggagatgatcgagtttcgtgatcgacgtgcgcaggaactcaacctcgatcttcgcatcgccacgaatcagcaggcggtagcagatggggtgagccccttcagtcatggaacgcatgagtacacgcgcatcatgaagacggttgcccttcgtgaggggctggaccactacggattcgatgcagccatcggcggagcgcggcgggatgaagaacgcagcagagctaaagagagaatcttcagcctgcgtgagccggggcaccggtgggatccgcgaaagcaacgccccgagttctggaggaccgcaaacacggcgttggccgagggtcaaaccatgcgtgcgttccctctttcgaactggacggaactggacgtgtggcgatacatcgcgcgtgaagggatcgagattccggctctgtatttcgccaaagaacgcccggtcgtgcaacgagatggcacctggatcatggtcgacgatgatcgttacccgctcgaggaaggcgggactccggagatgaaatcggtgcgctttcgcaccctgggctgctatccgttgaacgggggcgggtcgagtcgaccgccgatgatctggcgacactga

SEQ ID NO: 254255 - DNA, 741 bp, Unknown
  Bacterial polypeptide expressing nucleotide sequence isolated from the Sargasso Sea
tatggaaaaaactcagcttcgctttttaacttgtggctcagtagacgatggtaaatcgacactgattgggcgaattctctttgactgtaaatcagttatggatgatcaagtttctcagtcgaaagcagagtctcgtcgatatggaactcagggaaccgatcttgatttagctcttctcgtcgatggacttcaagcggaaagagaacaaggaattactatcgatgttgcatatcgttattttgaaactaaacatcgaaagtttatcgctgtagatacaccgggtcatgagcaatacacacgtaatatgattacgggagcgtctaatgtagatttagccgtaatcctagtcgatgcacaaaaaggtgtgcttcaacaaacacgcaggcattcgatcatattaagccttattggaattaaaaaaattattttagctgtaaataaaatggatttagtccattatgaaaaagaaattttttcaaacataaagaatgaatatctctcatttattaaaaagcttgacctgatcgactgcacagcaattccaatttccgcaagaaatggtgatggggttacacacttaagcaaagaaatgaattggtactcagggccatcaattttagatctgttagagaagattgatattttttccgaaattgcagacaaaccaactcgcctaccgattcaatgggtaaatcgaccaaactcgtcgtttagaggattttcaggactaattaattctgg

SEQ ID NO: 254256 - DNA, 933 bp, Unknown
  Bacterial polypeptide expressing nucleotide sequence isolated from the Sargasso Sea
acgtcacggcactcagggcgaaaagcttgatctggcgttattggttgacggcttgcaggccgagcgcgagcagggcatcaccatcgacgtggcttaccgttatttctctaccgagaagcgtaaatttattattgcggacacacccgggcatgaacagtacacccgtaacatggcgaccggtgcgtcgacctgcgacctggcaatcctattgatcgatgcgcgtaaaggtgtgctggatcagactcgtcgtcacagctttatctccacgctgcttgggatcaaacacctggtggtggcgatcaacaaaatggatctggtggactttagcgaagagacatttaaccgcattcgcgaagactatcttacttttgctgaacaactgccgggcaacctggatatccggtttgtgccgctctctgcgctggaaggcgataacgtggcttcgcaaagcgccagtatgccgtggtacagcggtccgacgctgctggaagtgctggaaaccgttgagatccagcgcagtattgatactcagccgatgcgcttcccggtgcagtatgtgaaccgaccgaatctggattttcgtggttatgccggaacgctggcctccggtagcgtgaaggtcgggcagcgcgtcaaagtgctgccgtccggcgttgagtccagcgtagcgcggatcgtgacctttgatggcgatttacaggaagcgcatgcaggtgaagcgatcaccctggtgctgaaagatgagatcgatatcagccggggcgacctgttacttgatgccggtgaggcgttgccggcggtacaaagcgcagccattgatgtggtttggatggcggaacaacctctgtcgtctggacaaagctacgacatcaaagtcgcaggcaagaagacccgcgcacgcgttgatagcgtgcaatatcaggtcgatataaa

SEQ ID NO: 254257 - DNA, 587 bp, Unknown
  Bacterial polypeptide expressing nucleotide sequence isolated from the Sargasso Sea
gatgaatgacttaataaaaaaagttgacgagtatataaactcgcaagctaatctagacttgctgcgttttattacttgtggctctgtggatgacggaaagagtacgttgataggaagagtcttatacgaagcgcaacttatttttgaagatcaggtgaccagcctcaagagagaatcaaaaaaccaagggtctcaagatggtgatattgaccttgctctccttgtggatggattagctgcggaaagggagcaaggaatcactattgacgtcgcataccgttttttttctacagaacgtcgaaaatttattgttgcagatactccagggcacgagcaatacacgcgtaatatggctaccggagcttctaccgcggatgttgcagtaattttaatcgacgcgtctagtgggctaatgcctcagtcttacaggcactcgtttatttgctcgcttcttggtatcaagcatgttgcacttatcgttaataagatggacctagcagattttgatcagtctgtttttcaaaaaattgtctcggactatgagacttttgcaaaagatctagattttgaaagtattacccccatac

SEQ ID NO: 254258 - DNA, 811 bp, Unknown
  Bacterial polypeptide expressing nucleotide sequence isolated from the Sargasso Sea
aatgtccaaatctattgatattctaagatttgcaaccgctggtagcgttgatgatggcaaatcgactttaattgggagacttctttttgatacaaaaggagtttttactgatcagcttgaagcccttgaaggaacttctcattcaaatgaagaaaaaggaattgatttagctttgattactgacgggttaagagctgaaagagaacaagggataacgattgatgtggcatatagatatttctcaactacaaatagaaaatttataattgctgacacaccagggcatgttcaatatactcgaaatatgtttacaggggcaagcaattctgatcttgcaataatactgatagattctagaaatggtgtccaacaacaatcaaaaagacatctttatattagttggttattaggaattcagaacattattgtagcaatcaacaaaatggaccttgtaaactacgaccagaaaatatttgatttcctatgtaaagattttttaagtattacaaaaaatttaagcattaaacaaattgattttgtaccaatctcagcgctcaatggcgacatgattgtaaataggggtaaaaatatgaaatggtacaaaggccccacgctaattaaaattttagaatcaacaaaattaagctcctcacatgttaaagaagcagcaagatttcccgtacaattagtaaatagagtcaacaatgaagctgccaaagattttcgtggctatatgggaacattgttgtcaggaaaaatttcggttggcgattcaataaaaatcttaccttcaacaaaaaaacaaaaataa

SEQ ID NO: 254259 - DNA, 945 bp, Unknown
  Bacterial polypeptide expressing nucleotide sequence isolated from the Sargasso Sea
tttttgaagatcaggtgaccagcctcaagagagaatcaaaaaaccaagggtctcaagatggtgatattgaccttgctctccttgtggatggattagctgcggaaagggagcaaggaatcactattgacgtcgcataccgttttttttctacagaacgtcgaaaatttattgttgcagatactccggggcacgagcaatacacgcgtaatatggctaccggagcttctaccgcggatgttgcagtaattttaatcgatgcgtctagtgggctaatgcctcagtcttacaggcactcgtttatttgctcgcttcttggtatcaagcatgttgcacttatcgttaataagatggacctagcagattttgatcagtctgtttttcaaaaaattgtctcggactatgagacttttgcaaaagatctagattttaaaagtattacccccatacctgtttcagcattgcatggtgataatgttattgaacggtcaagcaggatgaaatggtatagcggacccacgtttataggtctcttagagacaatagatattagtaatttaagcaaatctcagtattttagaatgccggttcaatgggtaaataggcctaaccaaaattttcgaggtttttcaggaacggttgtctctggcggggttacgatcggtgatacagtgaaggtcttgccatcaggcgagacagctgacgtaaaagatatcgctttttactctgggagtaaaattcaagcgcttactgacgaggctgtgactctagtattaagtaaagagatagattgctcgaggggagacattattgttcaagctgatcgtcccgtagaggttgcggatcagtttcaagtcaacctagtttggctagactcggagcctggtcatcaggggagatcctacttaattaaaacaccaagtggttcaatgtggagcaagacttagg

SEQ ID NO: 254260 - DNA, 550 bp, Unknown
  Bacterial polypeptide expressing nucleotide sequence isolated from the Sargasso Sea
caagcattagataaatataaatttgatgctgcttttggtggtgcgcgccgtgatgaagaaaaatcacgtgcgaaagagcgtgtattttctttccgtgatcaaaatcaccgttgggatccgaaagtgcagcgtccagagctttggaatgtatttaatactcgtgttgataaaggcgaaagcattcgtgtgttcccgctatccaactggacagagcttgatatttggcagtacatctatttagaaaatatctcaatcgtgccgctttactattcagctaagcgtcctgtcgttgaacgcgatggcatgatgattatggtggacgatgatcgcttgccattaaaagagggtgaagtgcctgaaatgaagagcgtacgtttccgtacactcgggtgttacccgcttacaggtgctgttgaatcagaagcggtgacattgcctgatatcatccaagaaatgttgttaacaaccacatctgaacgtcaaggtcgtgcgattgaccacgatagttccggttcgatggagaagaagaagatggaaggttacttctagg

SEQ ID NO: 254261 - DNA, 913 bp, Unknown
  Bacterial polypeptide expressing nucleotide sequence isolated from the Sargasso Sea
tcactttttggagccactaaaagaaatgaagaaaccccgcaaatcaccacgcgataaaacatctaataggtctagtgtcctttctcatcttgacaggctagaagcagagagtattcacattattcgagaagtaatggctcatgcggacaatcccgtcatgctctactccgtaggcaaggattcatcggtaatgctgcatctcgcccgaaaagcattttacccaagttcgccgcccttcccacttctgcacgtggacacgcgatggaaattcaaagccatgtatgaattccgtgacatgatggcgaatgaatctgggatggatctaattgttcatgtaaacccagaaggtgttgaaaaaaacatcaacccttttgaccatggaagcgctctgcacaccgacataatgaagacacagggtcttaaacaggcacttgatgcgcagaaatttgacgttgctttcggtggtgccaggcgcgatgaagaaaagagtcgtgcaaaggaacgaattttctcattcagaagcagtagccaccgctgggatccgaaaaaccaacgaccggaagtttggaacatctataactgccgaaaaaatcaaaacgaaagcgttcgggtattccctctatctaattggaccgagcttgatatctggcagtatatctatcgagaaaatattccgattgttccactgtacttcgcggcaaaaagaccaattgtacgacgtaacggaatgcttattatgctcgatgacgacagaatgcagctgttaccaggcgaagtgattgaaacaatgatggttcgttttcgaactctgggttgctacccgctaacaggtgctattgaatctaccgctaatgatctttctcaaatagtcttagagctacttcaaagtcgtacaagcgagcgccagggccgg

SEQ ID NO: 254262 - DNA, 738 bp, Unknown
  Bacterial polypeptide expressing nucleotide sequence isolated from the Sargasso Sea
taaactttttacatgtagatacaacatggaagttaaaagaaatgataaaatttagagatgaagtttctaaaaaatataacttagatttaattattcatataaatcaggaaggtcttaaaaaaaatatcggtccaatatctcatggatcaaaaacacatacggacataatgaaaacacagtcattaaaacaagctttaagtaaatttaaatttgacgctgcatttggcggtgcaagaagagatgaagaaaaatccagagctaaagaaagagttttttcttttagagatgcaaatcatcgttgggatcctaaaaatcagagacctgaattgtggaatcttttcaatacaaaaataggtaataatgagagtgtaagagtatttccactctcaaattggacagaacttgacatttggcaatatatttatgaagaaaatattccaattgttcctctctatctagcaaaaaaaagaccggtaatattaagagataacatgctcataatggtagatgatgatagattaaaaattaaagaagaagaaaagatagaaataaaattagtcagatttagaactttaggatgttacccattaactgctgctattgaatcaaatgctgctagtgttgaagaaataataatagaattacttgaatccaataattcagagaggcaaggtagacttattgatacagatcaaattggatctatggaaataaaaaaacgagaaggttatttttaat

SEQ ID NO: 254263 - DNA, 745 bp, Unknown
  Bacterial polypeptide expressing nucleotide sequence isolated from the Sargasso Sea
cctcccttaccaatgctacatgtggacacgacttggaaattcaaagaaatgtatgagtttaggaatcaaatagctcatgatacgggaatggaaatgatcgtacataccaatcaggaaggaataaaggcaggtataaatccgtttactcacggttcgaactactacaccgatgttatgaaaacacaggcacttcgtcaagcccttgatgaaggaggttatgacgttattttaggtggtgcaagacgggatgaggaacaatctcgtgcaaaagagcgagtgttctcctttcgctctaagggacatgtgtgggacccaaaagttcagcgtcctgaactttggaatatatataacactagacttcttcctggacaaacaatgagagttttccctctttcaaattggaccgaaagagacatatggcaatatcttctacagaataagatttcggttgttcctctatatttcgcaaaagagaggccggttataagtcgtaatgataccctgatcatggtcgatgacgaaagaatacctttggaagctggagaaaaaccccaaatgaaatcggtacgttttcgtacccttggatgctatcctctaactggtgcagttgagagtgatgcctcaacattggaggaaattgttctagaaacactaaaggcatcaaactcagaacgtcaaggacgactcattgataatgatgaaataggatcaatggaaaacaaaaagcgtgatggttatttttaat

SEQ ID NO: 254264 - DNA, 901 bp, Unknown
  Bacterial polypeptide expressing nucleotide sequence isolated from the Sargasso Sea
tggttcagtcgatgacggtaaaagtacgctgattggccgtttattacatgacagccagcagatttatgaagatcaactggccgctttgcataaagacagcaaaacccacggcaccacaggggaaaccatagatttagctttgctggtcgacggtttacaggcggagcgcgagcagggtattaccatagacgtagcctaccgctatttctctaccgacaaacgtaagtttattattgccgacaccccgggccatgagcagtacacccgtaatatggccacaggcgcctcgaactgcgatctggctattattctggtcgacgcccgttatggcgtacaaacccagacccgtcgtcacagctttatctgttctttattgggcattaagcagtttgtggtcgccatcaataaaatggatttattgggttttgatcagcagcgttttgagcaaattaaacaggattacctgcaatttgctgcgcagctgaacgtaccttcaattacctttgtgccactgtccgctttgaatggcgacaacgtggtgcacagctccagccaaacgccctggtaccaggacggtcctttactgagcttattagaaaaagcacctgtcacaggttttaactggcaagccgaagcccgtttgccggtgcagtatgtcagccgccctaatctggatttccgtggttttgccggtactatcgccagcggtagctttaaagtgggtgatgctattgtggctttaccttcaggcaaaggctcggttattaagtctattgtgacttttgatggcgaatggcaggaagcagttgcaggtcaggcagttacgctgacgctgaacgacgaaatcgatatcagtcggggtgatgtgatagtaccagccacgcatcatgctgcggtttcg

SEQ ID NO: 254265 - DNA, 550 bp, Unknown
  Bacterial polypeptide expressing nucleotide sequence isolated from the Sargasso Sea
caagccttaaaccaatatggtttcgatgccgcattcggtggtgcgcgccgcgatgaggaaaagtccgcgccgagggagcgggtgtattcgttccgcgatcgtcaccatagatgggatcccaagaatcagcgtcccgaactgtggcgcacctataacggcgcagttaacaagggtgaaagtattcgtgtcttccctttatctaactggaccgaactcgatatttggcaatatatctaccaagaaaacattgagttagtgccactgtattttgctgccgagcgccctgtggttgagcgtggtggtcagctgattatggccgacgatgagcgtatgaagctcgaggaaggcgaaaccatcaagcatgaggtggtgcgttttagaaccttaggttgttatccattgacggcggcgatgcattcgcaggcggataatctcgaaaaaatcatcgaagaaatgctgctaactcgctcgagcgaacgccaagggcgattgattgactcggatcagagtgcatcgatggagcagaagaaacgccaaggttatttctaaa

SEQ ID NO: 254266 - DNA, 734 bp, Unknown
  Bacterial polypeptide expressing nucleotide sequence isolated from the Sargasso Sea
actattacacgtagataccacgtggagttttggtgaaatgattaagttccgtgacgacaaagctaagaagcacggttttgatttgcttgttcacatcaatgaagaaggtgttgaagctggtgttggcccatttagccacggttcagcaaaacatactgacatcatgaaaacccaagcacttaagcaagcgctgaacaaatataagttcgatgctgcatttggtggcgctcgacgcgacgaggaaaaatcacgtgccaaagaacgtgtttactcattccgcgacagcaaccaccgctgggacccaaaaaaccagcgcccagagctttggaatatttataattctcaggttaacaaaggcgaaagcattcgtgtattcccaatgtccaactggactgagctagatatctggcaatacatctacctagaaaacatcgatattccacaactttacctttctaagcctcgccctgtcgttgagcgcgacggcattcttattatggttgacgacgaccgtatgccgctagaagaaggtgaagtgccagagatgcgctctgtgcgtttccgtactcttggctgttacccactgaccggtgcggtagagtcagaagcagcaaccctacctgaagttattcaagaaatgctgcttaccaagacgtctgaacgtcagggccgagttatcgaccatgacagcgcaggctctatggagaagaagaaaatggaagggtacttctaat

SEQ ID NO: 254267 - DNA, 773 bp, Unknown
  Bacterial polypeptide expressing nucleotide sequence isolated from the Sargasso Sea
agcggaaaaggctttcttcccggggaaaatcccttttccgttgttacacgtagatacgggctggaaatttaaagaaatgataagttttagagataagcttgctataagtcacgacttaaaactattggttcataaaaatgaggctggctttaagagtggaataactccttttactcacagttcgagtgtgtacaccgacgttatgaaaacagaaagtcttaaacaggccctagatctacacaaatttgacgccgcttttggtggcgcaagaagagacgaagaaaaatcacgatcaaaagaaagaatattctcttttcgatcagcttcacaccgttgggatccgaaataccaaagaccagaattgtggtcagctttcaatactaaaatcagtttcggtgaaagtgttcgagtttttcctctttctaattggactgaactagacatatggcattatatttcgtgtgaggaaatccaattagttccactttatttttctgatgacagaccagtcgttaatcgcaatggaattctaattatggtagatgatgaacgttttaagttaaatgatggggaggaagtaaaaaataaaaaggttcgatttagaactttggggtgttacccccttaccggagctgtagagtctgaagcaactaacgttgaggaaataattttagaattactaggcggaacaaattccgaaagacaaggaagagtaattgacaaagatcaaactgcttctatggaaaaaaagaagcaagatggatacttctaaa

SEQ ID NO: 254268 - DNA, 694 bp, Unknown
  Bacterial polypeptide expressing nucleotide sequence isolated from the Sargasso Sea
tatgtctcatcaatcagatttaatctcaagtgatataaacgcctacttggcgcaacacgaacgcaaacaactcctgcgtttgcttacatgcggtaacgtggatgatggtaaaagtacactaatcggccgcttattacatgactcaaaaatgatttacgaggatcatttggcatctatcgctgcagaaagcgctaaaagtggaacgactgacggggatctggatctgtctctactagtcgatggcttacaagccgagagagagcaaggcatcactattgatgttgcttatcgatatttttcaaccgcaagacgaaagtttatcatagccgacactcccggccatgaacaatacaccagaaatatggcaacgggagcgtcaacgtgcgctcttgcaattattctcatcgatgcaagaaatggtgttcaaatacaaacacgaagacacagctttataacctccctgttaggaataaagcatgtcatagtagctatcaacaaaatggatcttgttgattacgaggaatcaatttttaataaaatcaaaaaagaattcctaaagttttcggctagcttaccacatgcggacttgcactttattccactttcagcccttacaggagtaaatgtcgtgcaggtcggtgaggaggtgccttggtataaaggaaaatcactgatggacattcttgagagcgtt

SEQ ID NO: 254269 - DNA, 397 bp, Unknown
  Bacterial polypeptide expressing nucleotide sequence isolated from the Sargasso Sea
taattctagagttaataagggtgaaagtaccagagtttttccattatcaaattggacagagctagatatttggcaatatatctaccaagaacaaataccaattgtacctttatattttgcaaaagttagacccgtggttattagagatggaatgattgttatgatcgacgatgatcgatttaatcttcaatccaatgaaaagattgaattaaaaaaaattagattcagaactcttggatgctatcccttaactggcgccattgaatcagatgcaaatacacttgaagatattgtactcgagctcctgcagtctaagacatctgaaagacaaggaagggctatcgactcagactcaagtagttctatggaaatgaaaaaaatcgatggatatttttaa

SEQ ID NO: 254270 - DNA, 541 bp, Unknown
  Bacterial polypeptide expressing nucleotide sequence isolated from the Sargasso Sea
aacaaatacaagttcgatgcggcatttggtggcgctcgacgcgacgaagaaaaatcacgtgccaaagaacgtgtttactcattccgcgacagcaaccaccgctgggacccaaaaaaccagcgtccagagctctggaatatctataactctcaagttaacaaaggcgaaagcattcgtgtattcccaatgtctaactggactgagctagatatctggcaatacatctatctagaaaacattgatattccacaactttacctttctaagcctcgccctgtggtagaacgtgatggcgtattgattatggttgacgacgaccgtatgccgctagaagaaggtgaagtaccagaaatgcgctctgtgcgcttccgtacccttggttgctaccctcttaccggtgcagtagagtcagaagcagctacgctccctgaagttattcaagaaatgctgcttaccaagacgtctgaacgtcagggccgagttatcgaccatgacagttcaggttctatggagaagaagaaaatggaagggtacttctaat

SEQ ID NO: 254271 - DNA, 843 bp, Unknown
  Bacterial polypeptide expressing nucleotide sequence isolated from the Sargasso Sea
tatccggctcttccgcctttccctcttcttcatgttgatacaacctggaaatttcgtgcgatgtatgaacatcgtgagcgaattgctaaagaatcaggaatggaaatgttggtctacattaaccagcagggtgtaaatgaagggataaatcctttcacccacggatcaaactaccatactgatgtgatgaagactcaggcgctcaaactagcgttggatctccacggattcgatgtgatctttggaggagcaaggagggatgaggaaaaatcaagagccaaggaacgaattctatcctttcgttacaaggggcaccgttgggacccgaagggacaacgtcctgaactctggaatgtctttaatactaatattagtttgggagagaccatcaggtcctttccaatttcaaactggaccgagctggacatatggcaatacctgcattcagagcagatccccattgtttccctttattttgcagcagagcgaaaggtggtaattcgtggtggaacaatgatcctggttgatgatgaccggatacagctggagtctggagaaatgcctgaggtcaagaaggtccggtttcggactttgggatgctatccgcttgcaggagccatagagagcccagcggaaaatcttgaggaggttatcgcagaaacattcattgctcgaagttctgagcgacaggggagactgattgataaagatctgcagggttcgatggaaaagaagaagctggagggatattttttatttacaagcatattaaagattttctggaggagcaaaaaaagaaacagactttgcgctttattacctgtggtagtgtggatgatggta

SEQ ID NO: 254272 - DNA, 859 bp, Unknown
  Bacterial polypeptide expressing nucleotide sequence isolated from the Sargasso Sea
aaacgacttacccacctgcggcaactggaagcggaaagcatccatatcattcgtgaggtggccgccgagttttctaatccggtgatgatgtattccatcggcaaagattccagcgtaatgctgcatctggcgcgtaaagcgttttatcctggcacgctgccgttcccattactgcacgttgataccggttggaaattcagcgaaatgtacgagtttcgtgaccgtacggcgaaagcctacggctgcgaactgctggtgcataaaaacccggaaggggtggcgatgggcatcaacccgttcgtccacggcagcgccaagcataccgacattatgaaaaccgaagggctgaagcaggcgcttaataaatacggttttgatgccgcgtttggcggtgctcgtcgtgacgaagagaaatcgcgtgccaaagagcgtatttactctttccgcgatcgttttcatcgctgggatcctaaaaatcagcgcccggagctgtggcacaactacaacggacaaattaacaaaggcgaaagtattcgcgtcttcccgctctccaactggaccgaacaggatatctggcagtacatctggctggaaaacattgacatcgtgccactgtacctggcggcggagcgtccggtgcttgaacgcgacggcatgttgatgatgattgatgacgacagaatcgatctgcaacccggggaagtgattaaaaaacgcatggtacgtttccgtacgctcggttgctggccactgacaggcgcggtggagtcgaatgcgcagacgctgccggaaattatcgaagaaatgctggtctcaaccaccagtgaacgtcagggccgcgtgattgaccgcgaccagg

SEQ ID NO: 254273 - DNA, 529 bp, Unknown
  Bacterial polypeptide expressing nucleotide sequence isolated from the Sargasso Sea
ttgcaaaacactggaaagactaaaaccaaagatgaaaggagccaacttcgatttttgacatgtgggtcagttgatgatggaaaatcaacactcattggaagaatattatatgacacaaatcgagtttcaaaagataacctatcacaaacgagggaagagtcagaaaagtacgggactcaaggccaagacttagatctggcacttcttgttgatggtttgcaagctgaacgagagcagggtataacaatagacgttgcctatcgttattttgaaactcaatttcgaaaatttatcgccatagatgccccggggcatgaacaatatacgcgaaatatggtaactggggcgtccaatgccgaaactgcaataattttgatagacgctgagaagggaataacaaagcaaactaaaagacactcatctatcataagtttgttgggaataaagagtgtattattagctgtaaataaaatggataaagttaattatgaccgccaaagtttttgtgaaaatttgcgcggaatatgag

SEQ ID NO: 254274 - DNA, 847 bp, Unknown
  Bacterial polypeptide expressing nucleotide sequence isolated from the Sargasso Sea
accatagatttagctttgctggtcgatggtttacaggctgagcgtgagcagggtattaccatagacgtggcttaccggtatttctctaccgataaacgtaagtttattattgccgacaccccaggccatgagcagtacacccgcaatatggccacaggtgcctccaactgtgacctggctattattctggtggacgcccgttatggtgtgcaaacccagacccgtcgtcatagttttatctgttcattgctaggcattaagcagtttgtggtcgctatcaataaaatggatttattaggttttgacctgcagcgctttgagcaaattaaacaggattacctgcaatttgctgcacagctgaacgtgccttctattcagtttgtgcctttgtcagccctgaatggcgacaatgtagtgcatagctcaacccaaacgccctggtatcaggacggtcctttattgagcttgttagaaaaggctcctgtcacaggttttaactggcaagccgaagcccgcttgccggtgcagtatgtcagccgccctaacctgaacttccgtggttttgccggtactatcgccagcggcagctttaaagtaggtgatgccattgtggctttaccttcaggcaaaggctccactattaagtctattgtcacttttgatggcgaatggcaggaagcagttgcaggccaggccgtgactctgacattaaaagacgaaatcgatatcagccggggtgatgtaatagtgcctgccactcatcatgcagcggtatccaaccgtattctggccaaagtagtctggatgcatgaagaaccgttgctgattggcaaaagctacaacatca

SEQ ID NO: 254275 - DNA, 639 bp, Unknown
  Bacterial polypeptide expressing nucleotide sequence isolated from the Sargasso Sea
tcaaccaagaaggagtacgtaataatataaatcctatttctagcggctcaaaaattcatacagatgtaatgaaaacacagtcattaatacaagcattagataaatataaatttgatgctgcatttggaggtgcgagaagggatgaagaaaaatcacgagcaaaagaaagaattttttcatttagagataaaaaacatcgttgggatccaaaaaatcaaaaaccagagctttggaatttgttcaatacgaaaatagatcaaggtgaaagtgttagagtttttccattatctaattggactgaaatagatatttggcaatacatttaccaggaaaacattccacttgtcccgttatattttgccaaaataagatcaattattagaagaaatgatatgatgattatggttgatgatgatcgtttaaaaattaaagaaaatgaaaaaatagaacaaaaaaaagtaagatttagaactttgggttgttatccattaactgccgccgtggaatctaatgcatctactgttgaagaaatcattattgaattattagagtcaaaatattcagaaagacaaggaagactaattgataatgatcaaattggatctatggagaaaaaaaaacaagaaggttatttttaat

SEQ ID NO: 254276 - DNA, 453 bp, Unknown
  Bacterial polypeptide expressing nucleotide sequence isolated from the Sargasso Sea
ataaaaatcatcgatgggatcctaaaaatcaaaaaccagagctttggaatttatttaacacaaaaattaatactgatgaaagtgttagggtatttccactatcgaactggacagagctagatatatggcaatatatttatcaagaaaaaataccaatagttcctttgtatttagctaaaactaggccaattatcaaacgtgatggcatgatgattatggttgatgatgatcgattagaaatcaaacagaatgaaaaaatagaacaaaaaaaagttagatttagaacattaggttgttatccattaacagcagctatggagtcttcagctactaaagtagaagaaatcattattgaacttttagaaactaaatactcagaaagacaagggagattgattgacagtgatcaaattggatctatggaaataaaaaaacaagaaggatatttctaat

SEQ ID NO: 254277 - DNA, 706 bp, Unknown
  Bacterial polypeptide expressing nucleotide sequence isolated from the Sargasso Sea
atgaattatctaaaaaggttagaatctgaagctatttacataattcgtgaagcattatcttcatcggataatccagttatgctttattccgtaggtaaagatagttcagtattgcttcatttggcaaagaaagccttttacccttctttacctccatttccattattgcatgttgatacaacttggaagtttcaagatatgtatgaattacgttcaaaagtagcaaaaaatgccaatatggaactaataattcatcaaaatccagagggaattaagaaaaaaattaatccatttgatcacgggagtgtccacacagaaatttggaaaacagatggtttaaagcaagctttaagaaaacataattttgacatggccttaggaggcgcacgtcgtgatgaagaaaaatctcgtgctaaagagagaattttttcttttagagataaaaattatatttgggatcccaaacaacaaagaccagaaatttggtcactttttaatactcgtaaaaatactaatgaaagttttcgggttttccccctctccaattggactgaattagatatttggcagtacatatatcttgagggcatagaaattgtaccactgtattttgcagcccctcgaccaacaataaaacgtgatggtttaataataatgatagatgacaaccggtttaaatttagacggggagaaaaatcaaaacttc

SEQ ID NO: 254278 - DNA, 877 bp, Unknown
  Bacterial polypeptide expressing nucleotide sequence isolated from the Sargasso Sea
actggaagctgaaagtatccagattttccgcgaagtagcggctgaatttgataatccggtgatgttgtattccataggtaaagattcctctgtgctgctgcatttagcgcgcaaagctttttatccgggcaaaattccgtttccactcttgcatgttgatacccgctggaaattccgcgagatgatcgagtttcgtgacaaagtggcgaaacaatatggctttgatttgctggtgcatatcaatccggaaggcattgccatggatatgaatccattcacctacggtagctcgaaacatactgacgtgatgaaaacccagggcttaaaacaagcgctggatcagtacggttttgatgctgcttttggtggtgcccgccgtgatgaagaaaaatcccgtgctaaagagcgcgtctattcattccgtgatcagcaccacagatgggatccgaaaaatcagcgccctgagctgtggcatacctacaacggtcaggtgaataaaggcgaaagtattcgtgtattcccgctgtcgaactggactgaactggatatctggcaatacatctatcaggaaaaaattgacatagtgccgctgtattttgccgctgtacgtcctgtggttgagcgcaacggcactttgattatggtggacgacgaacgtatgccactgaatcctggtgaagtaccagagcaaaaactggtgcgtttccgtactttaggttgttacccgctgacgggggctatcgagtcttctgccgacagcctgacaggtattattgaagagatgctgttgtcgacttccagtgaacgacaaggccgggtgattgaccacgattccagtggttctatggaaaagaaaaaacgtgaggggtatttctga

SEQ ID NO: 254279 - DNA, 592 bp, Unknown
  Bacterial polypeptide expressing nucleotide sequence isolated from the Sargasso Sea
atggcttttaatcatcttaaaaaacttgaatctgaaagtatccacataattagagaagtagcgtctgaatttgcaaaccctgttatgctttattcaattggaaaagactcttctgttatgttgcatttagcaattaaagcttttgcaccaaataaaattccctttaaacttttacatgttgacaccacttggaaattcaaagaaatgataaaatttagagatcaaatttcaagagactataacttagatcttattgttcatataaatcaggaaggggttaaaaataaagttggcccaatatctcatggatctaaaactcatacagatattatgaagacacaatcacttaaacaagcactcaataaatttaaatttgatgctgcatttggtggagccaggagagatgaagaaaaatctagagctaaagaaaggatattttcttttagagatattaatcatcgctgggatccaaaaaaccaaaaaccagaattatggaatttatttaatactaagatatcaaaagatgaaagtgtaagaatattccctttatcaaattggacagaggttgatgtctggcaaatatattatcaag

SEQ ID NO: 254280 - DNA, 903 bp, Unknown
  Bacterial polypeptide expressing nucleotide sequence isolated from the Sargasso Sea
gacaatgaaaaagtcggtaatgccggtgaagagcttgatttagcactccttgtagatggtcttcaagctgaacgtgagcaaggtattaccattgacgttgcttatcgttacttctcaacagcaaaacgtaagttcattattgctgatacgccaggacatgagcagtacacgcgtaacatggtaaccggtgcatcaaccagtgatgtggcgattatcttagttgacgctcgttacggcgtacaagtacaaactaagcgtcatagctttatctgtgactcactaggtattaagcagtttgttgttgctatcaacaagatggatatcgtcgatttcgatgaaaccgtatatgagaaaatcaaagcggattaccttaagtttgcagagcaactaaacgtttctaatatcaagtttgtgcctatgtcagcccttaaaggtgacaatgtagttacacgctcagagcacacaccttactacactgataaaccactacttgagttacttgaagactcaccagctgcagaacttgataacggttttgaagcacgtcttccggtgcaatatgtggcacgccctaacttagacttccgcggcttccaaggtaccttaacgtctggcaagttcagcgtgggtgatgcggtaaaagtattaccatcaggtaaaagctcaagcatcaaagagattgtgactttcgatggcaacttagatacagctgaagcaggtcaagcaattaccttaacgttaaacgacgaaattgatatcagccgtggcgatgtgattgtgccagccgcttcaaaagccgctgttacaaaccgtattcaagctaaattagtatggatgcatgaagcaccgttagtactaggtaaaagctacaactttaagttaggcagcaaaaatacctcggca

SEQ ID NO: 254281 - DNA, 517 bp, Unknown
  Bacterial polypeptide expressing nucleotide sequence isolated from the Sargasso Sea
atttggtggagctagaagagatgaagaaaaatcaagagccaaagagagaatattttcttttcgtgatgaaaatcatcactgggatcccaaaaaccaaagaccagaattatggaatttatataatacaaaaatcgataaaggagagagtgtaagagtattccctttatcaaattggactgaattagatgtatggcaatatatctatcaagaaaaaattgaaattgttcctttatacttagctgcaattcgtccaattataaaaagagacaatcttcttcttatggttgatgataaaagattagatgtcaaagaatctgaaactattgagaataagttagtgcgttttagaacattaggttgttatcctctaacaggtgcaattgagtctaacgcaaaatcagttgaacaaattattttagaattaattcaaagcaaaaactctgaaagagagggtagagcaattgataaagatcaaattggttctatggaaaaaaagaaacaagaagggtatttttga

SEQ ID NO: 254282 - DNA, 301 bp, Unknown
  Bacterial polypeptide expressing nucleotide sequence isolated from the Sargasso Sea
tttgatacatttagataaattctttcaagaccaaaataaaaagaaacaagttaaaattttaacctgtggatcagtggatgatggtaaatcgacattattaggaagattgttatttgattctcaaaatatttttcttgatcaaatggatcaagcaaaaatagaaagtgaaaaatatggaactcaaggaaaagagattgatttagcattacttgttgatggcttacaagctgagcgcgaacagggtatcacaatagatgtggcttatcgttattttgagacatcaaattgtaaatttattatt

SEQ ID NO: 254283 - DNA, 724 bp, Unknown
  Bacterial polypeptide expressing nucleotide sequence isolated from the Sargasso Sea
atgtctcaccaatccgatctgatcagccaggacatcctggcttacctggcccagcacgaacgcaaggaactgctgcgctttctgacctgcggtaacgtcgatgacggcaagagcaccttgatcgggcgtttgctgcatgactccaagatgatctacgaagatcacatggaagccatcacccgcgactccaagaagtccggtaccaccggtgaagacgtggatctggcgctgctggtggatggtctgcaggccgagcgtgagcagggtattaccatcgacgtagcctatcgctacttctcgaccgccaagcgcaagttcatcatcgccgacacccccggccatgagcagtacacccgcaacatggcgaccggtgcttctacctgtgatctggcgatcatcctgatcgacgcccgttacggcgtgcagacccagaccaagcgccacagctttattgcatccctgctgggcatcaagcacatcgtggttgcggtcaacaagatggacctgatggactttgatcagaccgtctttgacaagatccgcgaggactacctgcagtttgccaagggcctggaactgctggacggcgacaaggtgcagtttgtacccatgtcggcgctcaagggcgacaacgtggtcaaccacagcgagcgcagcccctggtacaccggcccctcgctgatggagatcctggaaaccgtcgagatcgccagcgaccgcaata

SEQ ID NO: 254284 - DNA, 652 bp, Unknown
  Bacterial polypeptide expressing nucleotide sequence isolated from the Sargasso Sea
atgctcgacaaattgacccatctgaagcagctggaggcggaaagcatccacatcattcgtgaagtggccgccgaattcgacaacccggtgatgctctattccatcggcaaggattcagccgtgatgctgcacctggcccgcaaggcattcttccctggcaagttgccgttcccggtgctgcacgtcgatacccgctggaagttccaggagatgtatcgctttcgcgagaagatggtcagtgaatatggcctggaactgctgacccacatcaaccccgatggtgtggcgcaggacatgaaccccttcacctacggtagtgccaagcacaccgacgtgatgaagaccgaaggcctcaagcaggcactggacaagtacggcttcgacgccgccttcggtggtgcgcgccgcgacgaagagaagtcgcgcgccaaggagcgcgtgtattccttccgcgacagcaagcaccgctgggacccgaagaaccagcgcccggagctgtggaacgtgtacaacggcaaggtcaagaagggcgagtccatccgcgtcttcccgctgtcgaactggaccgagctggacatctggcaatacatctacctggagcagatcccaatcgtgccgctgtacttcgctgccgagcgcgaagtgatcgaga

SEQ ID NO: 254285 - DNA, 729 bp, Unknown
  Bacterial polypeptide expressing nucleotide sequence isolated from the Sargasso Sea
atgttgcatttagcaattaaagcttttgcaccaaataaaattccttttaaacttttacatgtcgataccacttggaaattcaaagaaatgataaaatttagagatcaaatttcaagagactataatctggatcttattgttcacataaatcaggaaggggttaaaaataaaatcggcccaatatctcacggatctaaaactcacacagatattatgaagacacaatcacttaaacaagcacttaataaatttaaatttgatgctgctttcggtggagctagaagagatgaagaaaaatctagggctaaagagagaattttttcatttagagatataaatcatcgctgggatccaaaaaaccaaaaaccagaattatggaatttatttaataccaagatttcaaaagatgaaagcgtaagaatattccctttatctaattggacagaggttgatgtctggcaatatatttatcaagaaaagattccaattgtccctctatattttgcagcaaaaagaccagtaataaaaagagatgatatgctgataatggtggatgataagcgccttgaaataaataaaaatgagaaagttgaggagaaattagttagattcagaactcttggatgctaccctttaactgccgcaatagagtcaaaagcttcaaatatagaagaaattattattgaattgctggagtcaaataattctgaaagacaaggaagattaata

SEQ ID NO: 254286 - DNA, 649 bp, Unknown
  Bacterial polypeptide expressing nucleotide sequence isolated from the Sargasso Sea
catgaacaatgaaaacgaattattgagacaggacattctgtcttacctagaacaacacgaaaagaaagacatgctacgtttccttacctgcggtagcgtagacgacggtaaaagtaccctaattggtcgcttgcttcacgattctaaaatgatttatgaagaccaacttgcagctatcactaaagacagtaaaaaagtgggcactaccggcgagaaagttgaccttgcccttcttgtagacggtcttcagtctgagcgtgagcaagggattactatcgacgtagcataccgctacttctctactgacaagcgtaagtttattatcgcagatactccggggcacgagcagtacacccgtaacatggtaaccggtgcgtcaacgtgcgaccttgctattattcttgttgatgctcgcggcggcgttaaggtacaaacgaaacgtcactcgttcctggtttctcttctaggtataaaacacgttattgttgctatcaacaaaatggacttgatggactattcagaagaagtgtacaagcaaattcaggaagactacctgaagtttgctgagcagcttgatattcctgacattcagttcgtacctatttcagcacttgaaggcgacaacgtagtaggcaagagcgaaaagaca

SEQ ID NO: 254287 - DNA, 799 bp, Unknown
  Bacterial polypeptide expressing nucleotide sequence isolated from the Sargasso Sea
gcatcagaacgcgagcaaggcattaccattgatgtcgcttatcgctatttttcaacagataaacgaaaatttattgtggcagatacgccaggtcatgaacaatatacacgtaacatggcaactggggcttccactgcagagctggctattttaatggtcgatgcgcgacatggtattatgactcaaacacgtcgacattccactattgtccatatgttgggtgtagataagattgtcttggcaattaacaagatggatttagtggattatgaagagtctacgtatcaaaagattttagatgattatcgtacttttgctactgagcttggaattcgtgactttacggctattccggtgtctgctttaaaaggagataatattacggacccaagtgaagagatggagtggtattcagggcctagcttaattgaatttttagaaacggttcctcttaaaacagtggatactacagggacatttactatgccagtacagtgggtaaatcgtccaaatttagattttcgaggctttgcaggtcagattactacaggacaaatttcagtgggagatgccattgaggtgttacctggaaaggtaaggagtaccgtaaaatctatagtaacatttgaaaatgaagcaaaagaagctattcggggagagtcgattacacttacattaaatgatgaaattgatatatctcgtggagatgtattggtatgtaaaggaagtaaaacagaaattggtcatagttttgtatcgacacttttatggatgtcagaagaggctttagttccaggaa

SEQ ID NO: 254288 - DNA, 842 bp, Unknown
  Bacterial polypeptide expressing nucleotide sequence isolated from the Sargasso Sea
tttaagagaagttgtagctgaatttgaaagaccagtgatgctctattctgttggtaaagattccagtgtaatgctacacttggctcaaaaagcttttttccctgccaaggtgccttttcctctattacacatagatacaggatataaatttaaagaaatgtatgaatttagagattcatttgtaaagtcaattggtgctgaactcatagttcataggaacgaagaagcaattgcaaatggagcacacccatcaaaattaggagtggcaaagtgttgtggatctctaaaaacacaagcacttttggatgccctagaatttaataagtttgatgcagcaataggtggcgcgaggagagatgaagaaaaatctagggctaaagaaagagttttttcatttagagactcctttgggcaatgggatccaaaagcacaaagaccggaactatggaacatctataatggtgctattgatgagggcgaatctgttagagtatttccattatcaagttggactgaaggtgatatatggaattacataaaagaggaagagatcgagatagttcccttatattttgcaaaaaaaaggaaaattataagaaaagataaaaatctaattccattagataattcaaataatactgaagagaatgttgaagaggttttatgtaggtttagaactcttggctgtgctccatgtacgggagcagtagaatcctcagctacgactattgattcaattgttaacgaggcaactactgctactagaagtgagagagaaacaagaattatagatcacggttcaaataatatggaagataaaaagaaagaaggatacttttgat

SEQ ID NO: 254289 - DNA, 703 bp, Unknown
  Bacterial polypeptide expressing nucleotide sequence isolated from the Sargasso Sea
gtttcgcgaaatgattgaatttcgcgatcggctagccaaagagtacaactttgaactgttggtgcataaaaacccggaagggttggcgatgaacattaacccctttgtgcatggcagtgccaaacatactgacattatgaaaacccaaagcttaaagcaggcgctgaataagtacggctttgatgcggcttttggcggcgcgcgccgcgacgaggaaaagtcgcgcgctaaagagcgggtgtattcgtttcgtgataaacaccaccgctgggacccgaaaaaccagcggccggaactgtggaatttatacaacggcgccattaacgaaggcgaaagtatccgcgtgtttccactgtcgaattggacagagctggatatctggctttatatcctgcaggaaaacatcgacatagtaccgctgtatttagccaagccacggccggtggtagagcgtagcggcaccctgatcatggtggatgacgagcgcatgccgttggagccgggcgaagtgccacaaatgaagtcggtacgctttagaaccctgggctgctaccccttaaccggcgctattgaatctaccgccgatacgctggaaggcatagtagaagagatgctacgcgcccgcacatcggagcgccagggccgggtgatcgatcaggatcaatcgggaatggaactgaaaaaacgcgagggctatttctaa

SEQ ID NO: 254290 - DNA, 514 bp, Unknown
  Bacterial polypeptide expressing nucleotide sequence isolated from the Sargasso Sea
tggtggcgctcgacgcgacgaagaaaatcacgtgccaaagaacgtgtttactcattccgcgacagcaaccaccgctgggatccaaaaaaccagcgtccagagctctggaatatttataactctcaggtgaacaaaggcgaaagcattcgtgtattcccaatgtctaactggactgagctagatatctggcaatacatctacctagaaaacatcgatattccacaactttacctttctaagcctcgccctgttgtcgagcgcgacggcattcttattatggttgacgacgaccgtatgccgctagaagaaggtgaagtaccagagatgcgctctgtacgtttccgtactcttggctgttacccacttaccggtgcggtagagtcagaagctgctaccctacctgaagttattcaagaaatgctgcttaccaagacgtctgaacgtcagggccgagttatcgaccatgacagcgcaggctctatggagaagaagaaaatggaagggtacttctaat

SEQ ID NO: 254291 - DNA, 616 bp, Unknown
  Bacterial polypeptide expressing nucleotide sequence isolated from the Sargasso Sea
gccttccaaacccgcaaccccatgcaccgcgcccacgaagagctgtgccacatggcgatggaagatctctctgcagacggtgtgctgattcacatgttgctgggcaaactgaagccgggcgatatccccgccgacgtgcgagacgcctcgattcgcaagatggtcgacctgtacttcccacccaattcggtgatggtcaccggctacggcttcgacatgctgtatgccgggccccgtgaagcggttctacacgcggtgttccgccaaaacgcgggctgcacccacctgattgtcggccgtgaccacgcaggcgtgggcagctactacggtggctttgatgcacaaaccatctttgataatgaagtgcccgaaggcgcgttggcgttagacatctaccgcgccgaccacacggctttcagtaagaagctcggtcgcgtggtgatgatgcgcgacgcacctgatcacagccccgaggacttcgtgttgctgtctggcaccaaggtacgcgagatgctgggccagggcattgcgccaccgcccgagttctcgcgccctgaggtggctgagattttgatggcctactatcaagaaatcgacggcacagcggctggctaaa

SEQ ID NO: 254292 - DNA, 526 bp, Unknown
  Bacterial polypeptide expressing nucleotide sequence isolated from the Sargasso Sea
gatgctgcattcgggaggcgccagaagagatgaagaaaaatctcgttcaaaggaacgaatttttagctttcgctcaaataaccaccagtgggagccaaaatctcaacgaccagaactttggtcattatataatgcccgaaaaaaaactggtgaaagcgtgcgtgtctttcccctatcaaactggactgaattagatatctggcattatatttaccaacaaaacatagagattgtgcctttatattttgcaaagaagcggccagttgtcaaaagaggtgacctcttaatcgttgtcgatgacgatcgatttaagttcaaaaaaaacgaaaaatcagagatgaaatctgttagatttaggacacttggatgctatccattaaccggtgctgtagaaagtaatgcttccaatttaattgatgttattcaggaattattatcttcgaccaaatctgagagacagggaagggccatcgaccatgatcaaagctcttcaatggaacaaaaaaaacgtcaaggctatttctga

SEQ ID NO: 254293 - DNA, 547 bp, Unknown
  Bacterial polypeptide expressing nucleotide sequence isolated from the Sargasso Sea
gcgctggacaaatacggctttgatgctgcgtttggcggcgcccgtcgcgacgaagaaaaatcccgcgccaaagagcgtatctactctttccgcgaccgtttccaccgctgggatccgaaaaaccagcgtccggagctgtggcacaactacaacggccagattaacaagggcgaaagcatccgcgtcttcccgctctccaactggaccgagctggatatctggcagtatatctatctggaaaatatcgaaatcgttccgctgtatctggcggccgaacgtccggtgcttgagcgcgacggtatgctgatgatgattgatgacgatcgtatcgatctgcagccgggcgagatgatcaaaaagcagatggtgcgcttccgtactttaggctgctggccgctgaccggcgcggtggaatccaatgcgcaaacgctgccggagattattgaagagatgctggtttccaccaccagcgagcgtcagggtcgtatgattgaccgcgaccaggccggctccatggagctgaagaaacgtcaggggtatttctaag

SEQ ID NO: 254294 - DNA, 203 bp, Unknown
  Bacterial polypeptide expressing nucleotide sequence isolated from the Sargasso Sea
catgaacacgaccattgcccaacaaattgctaatgaaggcggcgtagaagcttatctgcacgcgcaacagcacaaaagcctgctgcgcttcctgacctgcggcagcgtcgatgacgggaaaagtaccctgattggccgtctgctgcacgatacccggcagatttacgaagatcagctctcatcgctgcataacgacagtaagc

SEQ ID NO: 254295 - DNA, 526 bp, Unknown
  Bacterial polypeptide expressing nucleotide sequence isolated from the Sargasso Sea
ttgagcaataatataaaaagtgctgtttacaaacctgatgctattatagctaaagatattaatgcctatcttaaatctcatcaaaaaaaatctcttctacgttttattacgtgtggttccgttgacgatggtaaatctacactaattggacgtttgctttttgaaagcaatatgctttttgaagaccatcttacacaacttgaatcagatagtaaaaaggctggaacacaagggaaagatttagactttgcacttctattggacgggttggaagcagagagagagcaaggaatcactattgatgtagcataccgattttttactacagagaagagaaagtttattgcagttgacactcctggccacgaacagtacacccgcaatatgataacagcggcctcaactgcagagcttgcgataattttaattgatgccagaaaaggcatacttactcaaacccgtcgccactctttcctatgtaatttaattggaattaacaattttattctagcaataaataagatgg

SEQ ID NO: 254296 - DNA, 1213 bp, Unknown
  Bacterial polypeptide expressing nucleotide sequence isolated from the Sargasso Sea
atgtcgtctacaaatgttacctcgttaaacgagcaattaaacactctgggtatccgcggttacctgcagcagcatcaggacaagggcctgctgcgcgtactgacctgcggcagtgtcgatgatggtaaaagcaccttaatcggccgcttactgcatgacagtcagcagctgtatgatgatcagttggatgcgttaaaacgcgaccacaaaggccgtaacagtgaaggcgagctggaattggctatgctggtcgacggcttgcaggctgagcgcgagcaaggcattaccattgatgtcgcctaccgctacttttctaccacagagcgcaaatttattctggccgatacgccgggccacgagcaatacacccgcaatatggccactggtgcatctacctctgatgttgccatactgctgattgacgcccgctacggtgtgcaaacccaaacccgccgccacagctttatttgctcgctgttgggtattaagcacttgatcgtcgcggtgaataaaatggatatcgtcggctacagcgagcatagctatcaggcgattaagcaggatgtgcaggcgctgatggcgcagctgcaggtgcctactgtcgatgtcgtgcccatcagtgcgctgaaaggcgaaaacattctgacgttatcggccaatatgccgtggtacaccggtaccgcactgttgcctctgctggaaaccttacccatcccgcaacgcggcggcgcggcgacccgctttccggtgcagtatgttaaccggccggatctgaacttccgtggttttgccggcaccctggtcagcggccgtttagcagtaggccaggccgttacggcttacccgtcaggtaaaaaaagcaccattaagcaactggttagctttgaaggtgagcacgcctcagccattgccggccaggcgattacagtgacactgaatgacgaaattgatatcagccgtggcgattggctggtgccgtcagatgaaaacgtcacgctgaccaaccgtgcactggcctatgtggtctggtttaacgatcagccattagaagcaggccgtttgtacgatttaaagctggcgacacgtaaaaccagtgtcagcattaaccgcctgaaccataaagtgaacgtaaacacgctggcgcaggaagctgccgagcaggtagcgatgaacgacattgcgctggtcgagctggagctgactgaaactctgc

SEQ ID NO: 254297 - DNA, 1420 bp, Unknown
  Bacterial polypeptide expressing nucleotide sequence isolated from the Sargasso Sea
gatgtcagtcgccaatgaattagcagaaatcggtattgagcagtacttagagcagcaacagcacaaatcgctgctgaagtttttaacctgtggttcagtcgacgacggtaaaagtacgctgatcggccgtttattgcatgacagtcagcagatttatgaagatcaactggctgcgttacacaaagacagtaaaagccatggtactacaggcgaagctgttgatttagccttactggtggatggtctacaggcggagcgcgagcagggcattaccatagatgtggcttatcgctatttctccactgataaacgtaagtttattattgccgacaccccaggccatgagcagtacacccgcaatatggcgacaggtgcctcaaactgcgacctggctattattctggtggatgcccgttatggcgtgcaaacccaaacccgtcgtcatagttttatttgttcattgctgggtattaagcagtttgtggtcgccatcaataaaatggatttattgggttttgatcagcagcgttttgagcaaattaaacaagagtacttgcagtttgccgcgcagctgaacgtgccctctattcagtttgtgcccttgtcggcgcttaatggcgacaacgtggtacatagctcgacccaaacgccctggtatcaggacggtccattactgggcttattggaaaaggcccctgttactggttttaactggcaagccgaagcccgtttgccggtgcagtatgtcagccgccctaatctggatttccgtggttttgccggtactatcgccagcggcagctttaaagtgggtgatgctattgtggctttaccttcaggcaaaggctcggttattaagtctattgtcacttttgatggcgaatggcaggaagcagttgcaggtcaggcagttacgctgacgctgaacgacgaaatcgatatcagtcggggtgatgtgatagtaccagccacgcatcatgctgcggtttcgaaccgtattctggccaaagtggtctggatgcatgaagagccactgttgattggcaaaagctacaacatcaaactggcgaccaagaaggtcagcggtaaagtgacagcgatagcgcacagtatagatgtcaatacactggcggaacatcaggctgataagctggagctgaacagcatagccttggtcgagctggaactgaccgaagctgtggtgtttgacccttatgcgcaaaaccgcgacacaggtggctttatatttatcgaccgcatcagcaatattacagtaggtgctggtatggtcgacagcgcattggccagtgttagcagcaaagctgaattctcagagtttgagctggaactcaatgccttagtgcgtaaacatttcccacactggcaggcactggatttaagccagttgaacaaaggctaa

SEQ ID NO: 254298 - DNA, 799 bp, Unknown
  Bacterial polypeptide expressing nucleotide sequence isolated from the Sargasso Sea
taaagattcctctgtgctgctgcatttggcgcgcaaagctttttatccgggcaaaattccgtttccactgttgcatgtcgatacccgttggaaattccgtgagatgatcgagttccgtgacaaagtggcgaaacaatatggctttgatttgctggtgcatatcaatccggaaggtgtggccatggatatgaatcctttcacttatggtagctccaaacacacagacgtaatgaaaactcagggcttaaaacaagcgctggatcagtacggttttgatgcagcttttggtggtgcgcgccgtgacgaagaaaaatcccgagccaaagagcgggtctattccttccgcgaccaacatcacagatgggacccgaaaaatcagcgtcctgagctatggcatacctacaacggtcaggtcaataaaggcgaaagtatccgcgtattcccgctgtcaaactggactgagctggatatctggcaatacatctatcaggaaaaaatcgacatagtaccgctgtattttgccgctgtgcgtcctgtggttgagcgcaacggtacgctaattatggtggatgatgaacgtatgccactgaatcctggtgaagtgccagagcaaaagctggtgcgtttccgcactttaggctgttacccactgaccggtgctatcgagtcttcagccgacagcctgaccggtattattgaagagatgctgttgtcgacctccagtgagcgacaaggccgggtgattgaccacgattccagtggttcgatggaaaagaaaaaacgtgaggggtatttctga

SEQ ID NO: 254299 - DNA, 889 bp, Unknown
  Bacterial polypeptide expressing nucleotide sequence isolated from the Sargasso Sea
ccatttagaaaaattagaatctgaaagcatacacattattagagaagtagcatcagagtttgaaaatcctgttatgctttattcaataggaaaagactctgctgtcatgctccacctagcattaaaagcttttgcaccaagcaagcttccatttaaattattgcatgttgatacaacttggaaatttagagaaatgataacttttcgtgatgagatcgcaaaagaatacaacttagatttattagttcatattaatgaagaaggtgtaaaaaataatattggccccataacccatggctctaaacttcatacagatgtaatgaagacacaagcactgaagcaagcattagataaatataagtttgatgctgcttttggaggagcacgtagagatgaagaaaaatcaagagcaaaggaaagagtattttcttttagagatcagcaacatcattgggatccaaaaaatcaacggcctgaattatggaatttatataatacaaaaatagcaaagggagaaaacgtaagagtttttcctctatcaaattggactgagattgatgtatggcaatacatttaccaagaaaagataaatattgttcctctatattttgcaaaagaacgccccgtaattaaacgtgatgatttacttttaatggttgatgacaaaaggctcgatgtaaaagaacatgaaaaaatagaaaatcgaatggtgcgttttagaacattgggttgctatcctttaactggtgctattgagtcaacagcaacatcagtggaagagattattattgaattattagagagtaaaaattctgaaagagaaggaagagcaatagataaagatcaaattggatcgatggaaaaaaagaagcaagaaggatatttttaa

SEQ ID NO: 254300 - DNA, 1516 bp, Unknown
  Bacterial polypeptide expressing nucleotide sequence isolated from the Sargasso Sea
atggaggcttttagatcaaccaagtaccagcagacttcacgaacagttgagcaagataagagtgagataaagatggataaagcggtcaataaaactaatcgtatggcggcagaaatcagccagcatggggtaaaagaatatctagcccagcagcaacataaaggtttgttgcgctttttaacctgcggcagcgtagacgatggcaagagcaccttgattggccgtttattgcatgacagcgcgcagatctatgaagatcaattagctagcttaaaaaatgatagcgctaagatggggacaacgggcgaagcaatcgacttagctttgctggtggatggtctgcaagctgagcgtgagcagggcatcactatcgatgtggcttatcgttatttttcaagtgataagcgtaagttcattatcgccgacaccccaggtcatgagcagtacacccgtaatatggcgactggcgcctcaacctgtgacttagcggtgatcttagtggatgcgcgttacggcgtgcagacccaaaccaagcgtcatgcctttattgcctctttgctgggtattcgccactttgtggtcgcggtcaataagatggatttactcgggtttgatgagcaagtgttcaatcgtatccgtaatgatttcagtgagttcgttaaaggctttggtgagttagatatccactttgtgcccttatccgcactcaatggcgacaacgtggtcgagccaagtttacataccccttggtatcagggcggtacattactggaattgttagaaaccattgatacccaacgtgaactgagtgccttacccgtgcgcttcccggtgcaatatgtgtcgcgtccaaatctggattttcgtggttttgccggtactttagcctctggtgtcatcaaggtgggtgatgaagtggtagcgctgccttcgggtaaacgcagcaaggttgagcgtatcgtgaccttcgatggtgatttggccgaggcaacggcggggcaagccgtgactatcaccttagaagatgaaatcgatatttcccgtggtgatttactggctctgccagaaagtgcgccacaggttgccaaccaaatcgtggctgacctcgtgtggatggatgaaaaaccactacaactcggccagttatatgacatcaaggttgcgggtaaaaagactcaagcctcagtctcgaccatagaatatgtggttgatgtgaacacacttgcgcgcagcagcgccgacacactagggctcaatgctatcgctcgcgtgaccttagagctgacagaagatatcgttttcgatgcctattctctggtacgtgatactggcggcatgatcctgattgaccgtttatccaatgcaacagttgcagcggtaatggtggtgtcaggccaacatgtaagcaagcaagtgtcttcacaatttagtgcctttgaaattgagtttaatgcgctagtacgtaaacacttcccgcactggcaagcgattgatatttcaaagcttggagcctaat

SEQ ID NO: 254301 - DNA, 910 bp, Unknown
  Bacterial polypeptide expressing nucleotide sequence isolated from the Sargasso Sea
atggccgggcgtgaattaagccacttacaacaactggaagccgaaagcattcagatcattcgggaagtcgcagccgaattcgataacccagtcatgttgtattccatcggaaaagattcttcggtgatgttacaccttgcgcgtaaagctttttatcccggcaagatcccattccccttgctgcatgtggatacgggctggaaattcaaagagatgatcgcctttcgtgatgcgcaggcgaaaaaatttggctttgaattattaactcatactaactcagagggcgttgcccaagggattaaccccttcgaccatggcagtgcaaaacacactgacatcatgaaaacccaaggcttaaaacaagcattaaaccaatatggttttgatgccgcttttggtggtgcgcgccgcgatgaggaaaaatcccgcgcgaaagagcgggtgtattcgttccgcgatcgccaccatcgatgggatcctaagaatcagcgccccgaactgtggcgcacctataacggcgctgtgaacaagggcgaaagtattcgtgtattcccgttatctaactggaccgaactcgatatttggcaatatatctaccaagaaaacattgagttagtgccactgtattttgccgccgagcgccctgtggttgagcgtggtggtcagttaattatggccgacgatgagcgtatgaagcttgaagaaggcgaaaccatcaagcatgaggtggtgcgttttagaaccttaggttgttatccattgacggcggcgatgcattcgcaggcggataatctcgaaaaaatcatcgaagaaatgctgctaactcgctcgagcgaacgccaagggcgattgattgactcggatcagagtgcatcgatggagcagaagaaacgccaaggttatttctaaa

SEQ ID NO: 254302 - DNA, 901 bp, Unknown
  Bacterial polypeptide expressing nucleotide sequence isolated from the Sargasso Sea
atgaaattatcacatatagataaactagagtctgaaagtatacatataataagagaggttgcgtcggcatttgacaatcctgtaatgctctattcaattggtaaagactcatcagtaatgcttcatttggcccaaaaagcattttatccaagcaaaattcctttcaagttaatgcatattgacacaacttggaaatttaaggaaatgataaactttagagatgaaactgctaagaagtataatttagacttattagttcatattaacaaagaaggagttgcaaacaatataaatcctatttctagtggctcaaaaatccatacagatgtaatgaaaacacagtcattaattcaagcattagataaatataaatttgatgctgcatttggtggtgcgagaagggacgaagaaaaatcacgagctaaagaaagaattttttcattcagagataaaaaacatcgttgggatccaaaaaatcaaaaaccagagctttggaatttgttcaatactaatatagataaaggtgaaagtgttagagtttttccattatccaattggacagaaatagatatttggcaatacatttatcaggaaaacattcaacttgtcccgttatatttttccaaaataagatcaattattagaagaaatgatatgatgattatggttgatgatgatcgtttaaaaattaaagaaaatgaaaaaatagaacaaaaaaaagtaagatttagaacattgggttgttatccattaactgccgctgtggagtctgatgcaactactgttgaagaaatcatcattgaattactagagtcaaaatattcagaaagacaaggaagactaattgataatgatcaaattggatctatggagaaaaaaaaacaagaaggttatttttaat

SEQ ID NO: 254303 - DNA, 1033 bp, Unknown
  Bacterial polypeptide expressing nucleotide sequence isolated from the Sargasso Sea
atgaacaatgaaaacgaattactaagacaggacattctgtcttacctagaacaacacgaaaagaaagacatgctacgtttccttacctgcggtagcgtagacgacggtaaaagtaccctaattggtcgcttgcttcacgattctaaaatgatttatgaagaccaacttgcagctatcactaaagacagcaaaaaagtgggcactaccggcgagaaagttgaccttgctcttcttgtagacggtcttcagtctgagcgtgagcaagggattactatcgacgtagcataccgctacttttctactgacaagcgtaagtttattatcgcagatactccggggcacgagcagtacacccgtaacatggtaaccggtgcgtcaacgtgcgaccttgctattattcttgttgatgctcgcggcggcgttaaggtacaaacgaaacgtcactcgttcctggtttctcttctaggtataaaacacgttattgttgctatcaacaaaatggacttgatggactattcagaagaagtgtacaagcaaattcaggaagactacctgaagtttgctgagcagcttgatattcctgacattcagttcgtacctatttcagcacttgaaggcgacaacgtagtaggcaagagcgaaaagaccccttggtttgacggcacgccacttatggaaatgttggaaaacattgaaattggtgaagacgacaacctagaagattttcgcttccctgtacaatacgttaaccgccctaacctagatttccgcggctttgcgggtaccgtggtatctggccaagttgcacccggtgatgaggtgacggcgcttccttctggtaagaaatcaaaggtgaagcaagtcgttacgtttgaaggcgaccaagagcgcgcttatgtaccacaagcggtaacgctaacgctagaagatgaaattgacatctctcggggcgatatgattgtaaaatcagacaacttgccactgcttaacacgcaatttaaaactcaccttgtgtggatgtctgaaggatgag

SEQ ID NO: 254304 - DNA, 631 bp, Unknown
  Bacterial polypeptide expressing nucleotide sequence isolated from the Sargasso Sea
atgactgctagtatcccgtctgtaacgcatttgaaacaactcgaagccgagagtatccagattttccgtgaggttgctgctgagtttgaaaacccagttatgctttactctgtaggaaaagactcttctgtactgcttcaccttgcccgtaaagcgttcgcgcccggcaaaattcctttcccattattacacgtagataccacgtggaagtttggtgaaatgattaagttccgtgacgaacaagctaagaagcacggttttgatttgcttgttcacatcaatgaagaaggtgttgaagctggtgttggcccatttagccacggttcagcaaaacatactgacatcatgaaaacccaagcacttaagcaagcgcttaacaaatataagttcgatgcggcatttggtggcgctcgacgcgacgaggaaaaatcacgtgccaaagaacgtgtttactctttccgcgacagcaaccaccgctgggacccaaaaaaccagcgtccagagctttggaatatttataactctcaggttaataaaggcgaaagcattcgtgtattcccaatgtctaactggactgagctagatatctggcaatacatctacctagaaaacatcgatattccgcaacttt

SEQ ID NO: 254305 - DNA, 711 bp, Unknown
  Bacterial polypeptide expressing nucleotide sequence isolated from the Sargasso Sea
ggaaattccaggccatgtacgattttagagattatatggctgcggaaagcaagatggatttaattgtccttgttaatcctgagggcgtcgaaaagaacatcaatccatttgatcatggtagcgcactgcatactgacatcatgaaaacacaaggtcttaagcaggcgttggacatgcataaatttgacgcggcatttggtggtgctcgacaagacgaaaagaagagccgtgctaaggagagaatcttctctttcagaaatcctcaacatagatgggacccaaaaaatcaacggcctgaattgtggagcttatataacggctacaaaaatccaggtgagagtataagagtcttccctctctctaattggactgaattggatgtttggcaatacatcaatagagaggggatcgaaattgtgcctttgtactttgctgcagaaaggccggtgatagagcgtgatggcatgttgctcatggtggacgatgatcggatgagaatgagcgaaggagaagagattcgaacacgcctggtgcgatttagaactctgggctgttatccactaactggagcgattgattcgtcggcgacgtctctccctgagattgttcttgagctactgcagagtaagaccagtgaaagacagggcagggcaattgattctgattcatcggcctcgatggagaagaagaagcaagaaggttatttttgat

SEQ ID NO: 254306 - DNA, 901 bp, Unknown
  Bacterial polypeptide expressing nucleotide sequence isolated from the Sargasso Sea
atgacttttaatcatttaaaaaaacttgaatctgagagcatttatataattagagaagtagcggctgaatttacaaatccggtcatgctttattcaattggaaaagactcttcagttatgttgcatttagcaattaaagcttttgctccaaataaaattccttttaaacttttacatgtagacacgacttggaaatttaaagaaatgataaaatttagagatcaaactattaaagagaacaacttagatttaatagtacatataaatcaggaaggagtgaataataaagttggaccaataactcacggctccaaaacacatactgacattatgaagactcaatcattaaaacaagcattaaacaaatataaatttgatgctgcattcggaggagcaagaagagatgaagaaaaatctagagccaaggaaagaattttttcttttagagatacaaatcatcgatgggatccaaaaaatcaaaaacctgaattatggaatttatttaatacaaaaatatcaactaatgaaagtgtaagaatatttccattatcaaattggacagaagttgatgtgtggcaatatatatatcaagaaaatattcccattgttcccttatattttgcagcaaaaagacctgtaataaagagagatgatatgttgattatgttggatgacaatagattagaaataaaaaaaggtgagaagatagaagaaaaattaattagatttagaactcttggttgctatcccctaactggagcagtagaatctaaagcatcaagtattgaagaaataattatagaattattagaatcaaagcattctgagagacaaggaagattaatagattcagatcaaataggatcaatggaaataaaaaaacaagatggttatttctaat

SEQ ID NO: 254307 - DNA, 841 bp, Unknown
  Bacterial polypeptide expressing nucleotide sequence isolated from the Sargasso Sea
atggatttaaaaaaattttttattaatcaaaattccaaaaagcaacttaaaatcttaacttgtggttccgtagatgatggtaaatcaactttaattggaagacttctatttgattctaaaagtatttacagtgatcagatttcacagaccaaatttgaaagtgagaaatatggtactcaaggtaaagaaatagatctcgcattactaatagatggtttacaagctgaaagagaacaaggtataacaatcgatgtagcttatagatattttgaaacagaaaaatgtaagtttataattgcagatacaccaggtcatcaagaatatacaagaaatatggctaccggtgcatctaattcagacattggtattgttctaattgatgcaactaagggcatattagatcaaactaggcgacatactttcattttatcactgttaggagtaaatcacattgtaatagctgtaaacaaaatggaccttttgaattatgataaaaaaaattttgaaaatattgttcattcatttgaaaaactatctaaaaattttaattttttatctaaaagatatattccaatgtcagcacttattggtgataatgttttttcaaaatcaaaaaaaatgccttggtatgctgaagaaacattaattagtacattggaaagttttgatattgataaatcttctatagatgaagaattttctatgcctattcaatgggttaaccgatcaagttcagattttagaggatatagtggaacaatctcttcaggaaaaattaatattaacgatgaaatcacagtagtatcatcaggagagaaagcgaaggttcgtaaaatattac

SEQ ID NO: 254308 - DNA, 910 bp, Unknown
  Bacterial polypeptide expressing nucleotide sequence isolated from the Sargasso Sea
catggaccgtgaaagactgacccacttgcagcagctggaagccgagagcatccacatcatccgcgaggtggctgccgaatttgaaaacccggtgatgatgtactccatcggcaaggactcctccgtcatgctgcacctggcccgcaaggccttctatccgggcaagatcccgttccccttgctgcacgtcgacaccgactggaagttcaaggagatgatcaagttccgcgacgagacagccaagaagtacggactggatctgatcgtccacaagaacccggacggtctcgccatgggcatcaaccccttcgtgcacggcagcggcaagcacaccgacatcatgaagaccgaggggctcaagcaggcgctcaacaaatacggcttcgacgccgccttcggtggtgcccgccgcgacgaagagaagtcccgtgccaaggagcgggtctactccttccgcgacaagtctcaccgctgggatccgaaaaaccagcgccccgagctgtggcgcgtctacaacagccaggtcaacaagggggagagcatccgggtgttcccgctctccaactggaccgagctcgacatctggcaatacatctacctcgagaacatcgacatagtgccgctctactttgcggcccatcgcccggtggtggaacgcaatggcatcaagatcatggtggatgacgagcgcatgcccatcggccctgaagatgaggtgaagcaggagctggtgcgcttccgcaccctcggctgctacccgctgaccggtgccatcgaatccgctgccaccaccctgccggagatcatcgaagagatgctgctcaccacctcgagcgagcggcaagggcggctcatcgaccacgatcaggccggctccatggagcagaagaagcgtcagggctatttctaa

SEQ ID NO: 254309 - DNA, 517 bp, Unknown
  Bacterial polypeptide expressing nucleotide sequence isolated from the Sargasso Sea
catgaacaaccacattcagatcgccatcagcgaacagggcattgaagcctacctgcacgcccagcagcacaagagcctgctgcgctttctcacttgcggcagcgtggacgacggcaagagcaccctcatcggccgcctgctgcacgactcccagcagatctatgaagatcagctcaaagcgctggagtccgacagccagaagctcggcaccaccggtgagaagctggacctggcgctgctggtagacggtctgcaggcggagcgcgagcagggcatcaccatcgacgtggcctaccgctatttctccaccgccaagcgcaaatttatcatctcggacaccccgggccacgagcagtacacccgcaacatggcgaccggcgcctccacctgcgatctcgccatcattctgatcgacgcccgcaaaggtgtgctggatcagacccgtcgccacagctttatcgcgagcctgcttggcatcaagcagttcgtggtggcggtcaacaagatggacttgtga

SEQ ID NO: 254310 - DNA, 901 bp, Unknown
  Bacterial polypeptide expressing nucleotide sequence isolated from the Sargasso Sea
aatggctttaactcatcttcagcaacttgaagctgaaagtatcaaaatcatgcgcgaagtcgccgctgagtttgagaacccagtaatgctttactcaattggtaaagattcgtcggtacttctgcacttagcgcgtaaagcgttttaccctgcaaaaattccgtttccgttattacacgtagacaccgactggaagtttcgtgaaatgattgaatttcgcgaccgcatagcaaaagagtacgactttgacctactggtacacaaaaacccagaaggcttagcaatgggcgttggcccctttacgcatggctcgggtaagcataccgacataatgaaaacccaagggttaaagcaagctcttaacaaatacggttttgatgcagcctttggtggcgctcgccgcgacgaagaaaaatcacgtgcaaaagaacgtgtgtactcgttccgcgacaagcaccatcgttgggatccaaaaaaccaacgtccagagctttggaatacttataacagtcaagtaaacccaggcgaaagcattcgtgtattcccgttatctaactggactgagcttgatatttggcaatacatttatcaagaaaacatcgaaatggttccgctttacctagctaaagagcgccctgtagttgaacgtgacggcacacttatcatggttgatgacgaacgtatgccacttgaggaaggcgaagtaccacaaatgaaatcggtccgttttcgtacattaggctgttacccactaaccggcgccgttgaatctacagccagtacactaaccgaaattattgaagaaatgctgctatctacatcatcagaacgcgaaggccgcgttattgaccatgactcagcaggctcaatggagaagaaaaaacgtgaggggtatttctaa

SEQ ID NO: 254311 - DNA, 512 bp, Unknown
  Bacterial polypeptide expressing nucleotide sequence isolated from the Sargasso Sea
aatgtctagccaaaataacgatacatttaacgaagtaaaagaaataggcatagacgcctacctagcacgccaacaagacaaaagcttattacgtatgcttacctgtggcagcgtagacgatggtaaatcaacactgattggccgcctattacacgacagccaccaaatttatgaagatcagctagcagcgcttcacaaagacaacgaaaaagtaggtaatgcaggcgaagatcttgaccttgcattactagtagatggcctacaagctgaacgcgaacaaggtattaccattgacgtagcgtaccgatacttttcaacggctaagcgtaaatttattattgccgacacaccagggcacgagcaatatacacgcaacatggtaacgggtgcatcaacaagcgacgttgccattattttggttgatgcgcgttacggcgtgcaagtacaaactaaacgccatagctttatttgtgactcgctaggtattaaacagtttgttgtagccattaata

SEQ ID NO: 254312 - DNA, 901 bp, Unknown
  Bacterial polypeptide expressing nucleotide sequence isolated from the Sargasso Sea
atgaacttaacgcatttagaaaaattagagtctgagagcattcacatcattagagaagtagcatcagaatttgaaaatcctgttatgctttattcaataggcaaggactctgcggtcatgcttcacttagcattaaaagcttttgcaccaagtaaacttccatttaaattactacatgtagatacaacttggaaatttagagaaatgattaaatttcgtgatgatatagcaaacgaatataacttagatttgctggtacatattaacgaagaaggtgtaaaaaataatattggtccaatttcccatggttctaaacttcatacggatgtaatgaagacgcaagcactgaaacaagcattagataaatataagtttgatgctgcttttggaggagcacgaagagatgaagaaaaatcaagagcaaaggaaagagtattttcttttagagatcagcaacatcattgggatccaaaaaatcaacgacccgaattatggaatttatataatacaaaaatagcaaagggagaaaacgtaagagtttttcctctatcaaattggactgagattgacgtatggcaatacatttaccaagaaaagataaatattgttcctctatattttgcaaaagaacgtcccgtaattaaacgtgatgatttactgttaatggtcgatgacaaaagactggatgtaaaagattatgaaaaaatagaaaatagaatggtgcgttttagaacattgggttgctatcctttaactggtgcaattgagtcaacagcaacatcagtggaagagattatcattgaattattagagagcaaaaattctgaaagagagggaagagcaatagataaagatcaaattggatcaatggaaaaaaagaagcaagaaggatatttttgat

SEQ ID NO: 254313 - DNA, 901 bp, Unknown
  Bacterial polypeptide expressing nucleotide sequence isolated from the Sargasso Sea
atgaaactatcacatattgaaaaattagaatctgaaagtattcatataattagagaagttgcagctgaatttgaaaatcctgtaatgctctattcaataggcaaagattcatcagtaatgcttcatttagctcaaaaagcttttgcgccaaataaaatccccttcaaattaatgcatatagatacaacttggaaatttaaagaaatgattctttttagggatgaaactgtaaataatcataatttagatttattggttcatattaatgaggagggattacgtgacaaaataagccctttttctcatggctcaaaaatacatactgacataatgaaaacacaggccttgaaacaagcacttgataaatatcaatttgatgctgcatttggaggagcgagaagagatgaagaaaaatcacgagctaaagaaagaattttttcatttcgtgataaaaatcatcgttgggatccaaaaaatcaaaagcccgagctttggaatttatttaataccaaaattaataaagatgaaagtgttcgagtatttccattgtctaactggactgaaattgatgtatggcaatatatttatcaggaaaaaataactattgtacctttgtactttgccaagactagaccaattatcaaacgtgataatatgatgataatggttgatgatgatcgtctagaagtaaaacaaaatgaaaaaatagaacaaataaaagttcgatttagaactcttggctgttacccattaacagctgctgttgagtcttcagcatcaagtgtagaagaaataattattgaacttctacaaactaaatattcagaaagacagggaagattgatagataatgatcaaattggatctatggagaaaaaaaaacaagagggatatttttaat

SEQ ID NO: 254314 - DNA, 601 bp, Unknown
  Bacterial polypeptide expressing nucleotide sequence isolated from the Sargasso Sea
aatgagtgcgaattcctatctaaaagaactagaaagtgaagcaatatttatattaagagaggtagtagctgaatttactaaccctgtgatgctttattctgtcggaaaagactctagtgttatgctccatttggctagaaaagctttttatccatctagaataccgtttcctcttctacatgtagatacggggtacaagtttaaagagatgtatgaattccgggactcgtttactaaagaaatcggagcaaagctcattgttcatcgtaatgaagaagctattaaaaaaggttttcatccagcaaaaaacggaatagctaagtgttgtggtgctttaaaaactcaggctctattggatgcactcagtaagtataatttcaatgctgctataggtggagccagaagggatgaagaaaaatcaagagcaaaagaaagagtattttctttcagagattcttttggacaatggaatcctaaatctcaaaaacctgaattatggaatattttcaatgcagaaatagatgaaaacgaatcggtaaggatttttcctttatcgagttggacagaatctgatatttggaattacattaaacatgaaaaa

SEQ ID NO: 254315 - DNA, 1017 bp, Unknown
  Bacterial polypeptide expressing nucleotide sequence isolated from the Sargasso Sea
tatgtctcaccaatcatcgcttattgcaactgacattgatgaatacctgacgcaacacgagcaaaaagaactcctgcggttcattacgtgtggcagcgtcgatgacggcaaaagcacactcatcggccgactcttttatgagtccaaaatgatttatgaggatcagcttaccgctataaaaaaggatacgacgcgttacggaacaactggtgaagaagttgacctggcgctctttactgatggacttgaagatgagcgacaacagggaataacgatcgatgtcgcctatcgttatttctcaaccgaaaaacgaaaattcatcatagctgacacaccaggccatgagcagtacacgcgaaacatggccacgggagcatcgactgctgatcttgccattattctaatcgatgcgcgacacggggtgcttccgcaaaccaaacgtcactcttttattgtgtcgctcctcggcatcaaacacatcattgtggcaatcaacaagatggacattgttgactacagtcaggacgtatttgaatccattcgtcgtgactatattgactttgctgcgcgacttgaattgcctgatgtacacttcatgccaatctctgcgctcaagggcgacaatgtcgttacaaacagtgaaaagatgacatggcatgagggtccgccgctcatgcacctcctcgaaacagtctatatcggttctgaccgcaacatggaggactttcgattccccgttcaatacgtcacacgacctaacctcgactttcgtggctttgccgggacagttgcatcaggaattatccgtaagggtgatgaaattattaccttaccgtctcgtaagaagagtcgtattcaatcgattgtgactttcgatggagaacgtgatgaggcatttgctccccagtcagtaacgctcacacttgaagatgaaatcgactccagtcgtggcgatatgattgtccgagttgggaatcttccaaaggttgatcagaagttcgaagcaatgcttgtctg

SEQ ID NO: 254316 - DNA, 913 bp, Unknown
  Bacterial polypeptide expressing nucleotide sequence isolated from the Sargasso Sea
gatgaccgcctactcgcttacccatttgcgacagcttgaagctgaaagcattcacatcattcgcgaagttgctgctgagttcgacaaccctgtcatgctttactcaatcggcaaggattcggccgttatggttcgattagccgagaaagcgttctatccagccaagccaccatttccgcttatgcatgtcgacaccacctggaagttccaggagatgtatcagttgcgagacaattacattgcgaaagaattgggattcaaactcattgttcatgtcaatgaagaaggtcgggcacagggagtgaacccttttacgcacggcagtaaagtccatactgacatcatgaagacgcaggctttacggcaagcacttgatacccatcgttttgatgcagccttcggtggagctcggcgtgatgaagaaaaaagccgtgccaaggaaagagtcttttctttccgtgatgatttccatcgctgggatcccaaaaaccaacgacctgaattatggaatctttacaacacaaaggtaaagaagaacgaaagtattcgagtcttcccaatttcaaactggactgaactcgatgtatggcagtacatccatcttgagcagataccgatagtaccgctttattttgcaaaagaacgacccattgtctggcgagaaggtgtcatgatcatggtcgatgacgatcgaatgcaattggaaccaaatgaaaaaccagaaatgcgaagagttcgctttcgtacccttggctgctacccactgtctggcgccgttgactcaacagccactacacttcctgagatcattcaggagatgctactgaccacattctcagagcgacaaggcaggcttatcgatagcgatgaagctggctcaatggagaagaaaaagagagagggatacttttaa

SEQ ID NO: 254317 - DNA, 1054 bp, Unknown
  Bacterial polypeptide expressing nucleotide sequence isolated from the Sargasso Sea
cctgcgatctcgccatcattctgatcgacgcccgcaaaggtgtgctggatcagacccgtcgccacagctttatcgcgagcctgcttggcatcaagcagttcgtggtggcggtcaacaagatggacttgtgaaattcagccaggaggtgttcgagcgcatcagcttggagtaccgcgaattcgccaagaagctcagcgtcgacaccatccacatcgtgccggtctcggcgctggacggtgacaacgtggtcaacccaagcgacaagctggcctggtaccagggcgagaccctgcttgctctgctggagtctgccgatgtgatacaaaatgcagagcgcgagctggagcgtcacccggtgcgcctgccggtgcagtacgtcaaccgccccaacctcgattttcgcggcttcgcaggcactttggcctccggcatcctgcgggtcggcgacaagctggcggtgctgccctccggcaaggagagcacggtcacccgcatcgtcaccttcgacggcgatctcgactacgccctgccgggtcaggccatcacggtcacctttgccgacgagatcgacatcagccgtggcgacctgctggtggatgccgccagaaagccgctggtgacccagaacctgctggctcacatcgtctggatgggggaagagtccctgcaaccgggccgggtctatgacgtcaagctggccaccaagaagagccgcggccaggtggaggccatccgtcaccgcatcgagatcaacaagctcgatgagctggatgcgagcgaactcaagctcaacgagatcggcctgtgcgagctgagcctgaccgacccggtggcgttcgacccgtatcaggagatccgcgataccggcagcttcatcctcattgaccggctgaccaacgtcaccgtcggtgccggcatgatagtggaaggcttggccgcgacagtggcaactgggcactatagcgagttcgaagtggagctcaacgccctggtgcgcaagcacttcccccactggcaggcgctgaccatcagcaacgacgcaagcaaggaataa

SEQ ID NO: 254318 - DNA, 1288 bp, Unknown
  Bacterial polypeptide expressing nucleotide sequence isolated from the Sargasso Sea
actgcatgacagccaacagatttatgaacatcaactggctgctttgcacaaagacagcaaaacccacggcaccacaggtgaaaccatagatttggctttgctggtcgatggtttacaggctgagcgcgagcaaggcattaccatagatgtggcttaccgctatttctccaccgataaacgtaagtttattattgccgacaccccgggccatgagcagtacacccgcaatatggcgacaggtgcctcgaactgtgatctggctattattctggtcgatgcccgttatggcgtgcaaacccagactcgtcgtcacagctttatctgttcattgctcggcattaagcagtttgtggtggctatcaataaaatggacttattaggctttgatcaacagcgttttgagcaaattaaacaggattacctgcaatttgccgcgcagctgaatgtgccttctattcagtttgtaccactgtcagccctgaatggcgacaacgtagtgcatagctccagccaaacgccatggtacaacgatggccctttactgtgcttattagaaaaggcgcctgtcacaggctttaactggcaagctgaagcccgtttgcctgtgcagtatgtcagccgccctaacctggatttccgtggttttgccggtactatcgccagcggtagttttaaagtaggcgatgctattgtggctttaccttcaggcaaaggttccactattaaatcgatcgtcacttttgatggcgaatggcaggaagcagttgctggccaggccgtcacgctgacgctgaaagacgaaatcgatatcagccgtggtgatgtgatagtgcctgcgactcatcacgctgcggtatcgaaccgtattctggccaaagtggtctggatgcatgaagagccactgttgattggcaaaagctacaacatcaaactggcgacaaaaaaagtaagcggtaaagttacagctatagctcacagcatagatgtaaataccctggcagaacatcaggctgataagctcgagctgaacacaatagcgctggtcgagctggaactgaccgaagctgtggtgtttgacccttatgcacaaaaccgcgacacaggtggctttatctttatcgaccgcatcagcaacatcactgtgggtgctggaatggtcgacagtgctttggccagcgtcagcagtaaagcagagttctcagaatttgagctggaactgaatgccttagtgcgtaaacatttcccgcactggcaggcactggatttaagccagctgacaaaaggctaa

SEQ ID NO: 254319 - DNA, 1414 bp, Unknown
  Bacterial polypeptide expressing nucleotide sequence isolated from the Sargasso Sea
atggcggcagaaattagccagcacggggtaaaggaatatctagcccagcaacaacataaaggtttgttgcgctttttaacctgcggcagcgtagacgatggcaagagcactctgattggccgtttactgcatgacagcgcgcagatttatgaagaccaactcgccagcttaaaaaatgatagcgctaagatgggcacaacgggcgaagccatagacttggctttgttggtcgatggtctgcaagccgagcgcgagcagggcattactatcgatgtggcttatcgttatttttcaagcgacaagcgtaagtttatcatcgccgataccccaggccatgagcagtacacccgtaatatggcgactggcgcctcaacctgtgatttagcagtgatcttagtggatgcgcgttacggcgtgcagacccaaaccaagcgtcatgcctttattgcctctttgctcggtattcgtcactttgtggtcgcggtcaataagatggatttactcgggttcgatgagcaagtgtttaatcgtatccgtaatgatttcagtgagttcgtaaaagattttggcgacttagatatccactttgtgcccttatctgcactcaatggtgataacgtggttgagccgagtctgcatacgccttggtatcagggcggcacactgctggaattgctcgaaaccattgatacccaacgtgaactcagcgccttgcctgtacgcttcccagtgcaatatgtgtcgcgtccaaatctcgattttcgtggttttgccggtactttagcctctggtgtcatcaaggtgggtgacgaggtggttgcgctgccttcgggtaagcgtagcagggttgaacgcattgtgaccttcgatggcgatctcgccgaagcgacggctgggcaagccgtcactatcaccttagaagatgaaatcgatatttcccgcggtgacttactggcactgccagagagtgcgccacaggttgccaatcagatcgtggctgacctagtgtggatggatgaaaaaccattacaactcggccagttatacgacattaaagtcgcgggtaaaaagacccaagcctctgttacggccatagactatgtggttgatgtgaacacgcttgcacgcagcagcgccgacactttagggctcaatgccatcgcccgcgtgaccttagagctgaccgaagatatcgtcttcgacgcctattctctggtgcgtgatactggcggcatgatcctgattgaccgtttatccaatgctactgttgcggctgtgatggtggtatcgggacagcatgtgaacaagcaagcgtcctcacaatttagcgcctttgaaatcgagtttaatgcgctggtgcgtaagcacttcccgcattggcaagcgatcgatatttcaaagcttggagcctaat

SEQ ID NO: 254320 - DNA, 910 bp, Unknown
  Bacterial polypeptide expressing nucleotide sequence isolated from the Sargasso Sea
atggccgggcgtgaattaagccacttacaacaactggaagccgaaagcattcagatcattcgtgaagtcgctgccgaattcgacaatccagtaatgttgtattccatcggaaaagattcttcggtgatgttacaccttgcgcgtaaagctttttatcccggcaagatcccattccccttgctgcacgtggatacgggctggaaattcaaagagatgattgcctttcgtgatgcgcaggcgaaaaagtttggctttgaattattaacccacaccaaccccgaaggcgttgcccaagggattaatcccttcgaccatggcagtgccaagcacactgacatcatgaaaacccaaggcttaaaacaagccttaaaccaatatggtttcgatgccgcattcggtggtgcgcgccgcgatgaagaaaaatcccgcgcgaaggagcgggtgtattcgttccgcgatcgtcaccacagatgggatcccaagaatcagcgtcccgagctgtggcgcacctataacggcgcggttaataagggcgaaagtattcgtgtcttcccgttatctaactggaccgaactcgatatttggcaatatatctatcaagaaaacattgagttagtaccactgtattttgccgccgagcgccctgtggttgagcgtggcggtcagttaattatggccgacgatgagcgtatgaagctcgaggaaggcgaaaccatcaagcatgaggtggtacgttttagaaccttaggttgttatccattgacggcggcgatgcattcgcaggcggataatctcgaaaaaatcatcgaagaaatgctgctaactcgctcgagcgaacgccaagggcgattgattgactcggatcagagtgcatcgatggagcagaagaaacgccaaggttatttctaaa

SEQ ID NO: 254321 - DNA, 905 bp, Unknown
  Bacterial polypeptide expressing nucleotide sequence isolated from the Sargasso Sea
gatggatttagaaaaattttttcaaaatcaaaacaataagaggcaagttaaaattttaacatgtggttcagtagatgatggcaagtcaactttattaggtagattattatacgactctcaaaatgtatttgttgatcaaatagatcaagctaagattgaaagtgaaaaatatggaacccaaggtaaagaaatagatctagctttattagttgatggcttacaagcggagcgcgaacaaggcattacaattgatgttgcttaccgtttttttgaaacaccaaaatgtaaatttattgttgccgatactccagggcatgaacaatatacacgtaatatggcaacaggcgcttctaattctgatgttgctattattttaattgatgcccaaaaaggtgttttagagcaaacaaaaagacatagttttattgttaatctcctaggtattcagcatgttgttgtggcaatcaacaaaatggatttagtagattatgatgaaagtttttttaataaaattgtcactgaatataacgaattaataaaaaattttaattttatctctataaattatattccattatcagctctaaaaggagacaatgtcttttcaacttttgaaaatactaaatggtattcaggttctactcttattgaaaccttagaaaacattcaaattatagatgaaggtatgagaaatgcatttagcatgccagtgcagtgggtgaatagatcaagttcagattttagaggatattctggcaccataacttctggaaaaatatcaaaaggagatttgattacaactgcattatccaattctcaaacctccattaagaatatttatggacctaatggtgagttgaatgaggcttttgttaatcaggcttataacattaacgcttcaagat

SEQ ID NO: 254322 - DNA, 886 bp, Unknown
  Bacterial polypeptide expressing nucleotide sequence isolated from the Sargasso Sea
tctgtcagatctagaagcggaaagtattcatattatcagagaagtagttagtgaaacaaaaaatcctgtcatgctttactcaataggaaaagatagttcagtgatgttaaggcttgctcaaaaagctttttaccctagtcttcccccattcccactactacatgttgatactcgatggaagttccgagaaatgtatttatttagaaattgggtagaaaaaaatagtggtatgaagctaataacacatattaatcctgatggtattaaatcaaatattaatccctttgatcatggctctgctctccacactgatataatgaaaactcagagtctaaaacaagccttggacaagtataaatacgatgctgcttttggtggagcaagaagagatgaagagaaatcaagagccaaagaaagggttatttcattccgaaacccctctcatcaatgggaccccaaaaatcagcgcccagagctttggtctttatataactctaaagtcaataagggtgaaagcacaagggtttttcccttatctaattggacagaattagatatttggcaatatatctaccaagaacaaataccaatagttcccttatattttgcaaaagttagacctgtagtcgtgagagatggaatgattattatggtcgatgatgatcgatttaatattcaatctaaagagagaattgaattaaaaagtattaggttcagaacacttggctgttatcccttaactggtgctattgaatcaaatgcaaattcacttgaagacattgttcttgaacttcttcaatccaaaacatccgaaagacaaggaagagctatcgatacagactcaagtagctcaatggaaatcaaaaagattgatggttatttttaa

SEQ ID NO: 254323 - DNA, 814 bp, Unknown
  Bacterial polypeptide expressing nucleotide sequence isolated from the Sargasso Sea
aaaaataaaattacatttcttctcggaagtgcagaaatggaaggcgttatttcctatgaagattcaagaagtggattaactatgcttgccgaaataatattaaacgaggctttcaaactatctcttaattggatgaaaaaaagatacggagatgttaaaaattccgaagggagactaggaaaatttgcaatcattggactaggcaaactaggtggatatgaaatgacatactactctgatctagaccttatatttattcattctggtaatggaatttcagacggatttgataaattaagttctcaagaatattggataaaattaataaaacgtctaatttcatgtcttacaactataactaagaaaggctatgcatataaacttgatacgcgacttaggccatctggtaatgctggcgttctcgttacacctttgaatatctatttaaaatatcaccaatcatctcaaccttgggaacatcaggctttaattaaagctagagttattggaggtattggaggagagaaatggtttaaaaaagtagaagaacaaataaaaaaaactgtgtatgaatggaaatctcctaacaacattgactctcaaataaatcactttagatttcgcaaagaagaagaactagcgcaagaaaataattttaaaagaaatataaaagagggtaaaggaggtttattggatattgaatatcttacacaatctatacaacttaaacatggaaaagaattccctcaattacaatcttctagaactttcagtactcttaaaaacattggtcatcttgatttaataaaaaaaa

SEQ ID NO: 254324 - DNA, 931 bp, Unknown
  Bacterial polypeptide expressing nucleotide sequence isolated from the Sargasso Sea
attattttatttttcaattttaattatactaatattaaggatcattttgaaacaaaacaatttataattaataaattcaaaaaacttgtaaaaatcttaactaatttttctgaaggtgattttctttacagagtagatttgaggttaagaccggacccatcctctacgcctatagctatcgatacaaaatttgctgaaaattattatcaaaaattgggccgaacatgggaaagaatggcttttataaaagcaagaccagtttgtggggatataaaaaaaggtaaggaatttttaaataaattggattcatttatatggagaaatcattttgattatgcagctattgatgaggtaaaaaacttaagggaaaagatgaaattaaattcatcttacttaaaattttatgatttaagtggttataatattaaaactggtctaggtgggataagagatattgaactttttacacaaacttatcaattaatagtagctggaagaaatagggaattaagaggtgcaaaaactgtaaaaacattaaataaactaaaagaattaggttggctagatcatgagccttttgaaaaattagtaggagcttataatctttttagaacaatagaaaatagacttcagatcgttaataatactcaaaatcaaaatattccaaacgaaaattcactacaatttaaccacttagcaactttagctggctttgcaagttattcaaaatttaaggatctagttttacaaaatttaaataatgtaaaattaataacagatgattttttttccaactttaagtttagaaacgtacaaaagaaaaattttttagatactgaaattattaaatcaaatcaaggaaaattaggcttcaaattaagtaatgaaaaccatttttacagtaaaataagtcaattaaaacatttatcaa

SEQ ID NO: 254325 - DNA, 559 bp, Unknown
  Bacterial polypeptide expressing nucleotide sequence isolated from the Sargasso Sea
cgagcaggcgtggacgtgggagcacatggcgttgtgccgcgcccgcccgctctatggctcgcccgaaggccgcgcggcgctggccgcagtcgtgcacgccgtcctcaccgccccgcgcgaggccgaaaagctgcgcgccgacgtgctggaaatgcgcgagaagatggcccgccacaagccgccgggcggcccgctcgacgtcaagctgatgcgcggcgggctggtcgatctggagttcatcgtccacttcatccagctgcgtgaacgcggacccggcctcgatcccgatctcggcgaggcggtgcgcggactggccgcagcgggactcgtcgatgccgcgctggtcgaggcgcacgacgcgcttacccgcctgctggtcgccgggcggctgctcgcgcccgatgcgcaagtgcccggccctgcagcacgcttggcactcgtgcgcgcatgcggctatggggactgggaagcgctcgaaacgggcctcgcaacggcgcgccgccacatcgcggacgcctggcgcgcggccttcgacgaaaccctggagatagacgcatga

SEQ ID NO: 254326 - DNA, 671 bp, Unknown
  Bacterial polypeptide expressing nucleotide sequence isolated from the Sargasso Sea
aatgacatttgagttgaagcctaaacgaggtcccaaggtttttgatcaacgaatagcccaggagatttataacttatttcctgagagcgaagaaaaattgagaattttttttgcttcggtggcatcttgcagtccctacttatattctcaaatacaaaaagaaaaaacttggttgttgaataccgtacgtaataacgattttcacattttatctctgttggagtccttaaaatcagaaacttatgactcgctatatttaaaattaaggatagccaaaagaagagcagctctctggatcgcactgaacgatttagctgatacttggtctcttgaggtagttacaaaaaatctgtcagaatttgcagataaagccataaatttatcctggcgtgcgagctttttaaaggaattgaaaaaaggcaaattccctaaagaatacgatggagatccaaataaagtaggtttttttatattagccatgggcaagttaggtgcgtttgagcttaattattcgtcagacattgatttaatttgtttttttgatgaggaagtatttcaccctgaggagtttcagaatgtgaggcgcatttttataaacgcaactaaaaatatgtatcggattttgaatgaaaatgggaaagatggttatgtttttagaacagatttacgct

SEQ ID NO: 254327 - DNA, 913 bp, Unknown
  Bacterial polypeptide expressing nucleotide sequence isolated from the Sargasso Sea
gccgaaattgtgcttgaagaagcctttcggatggcgatgaaaaaactggatctccgctttggaaattcgctcaaacaactcgaggatccgctttattttgctatcatcggccttggaaaactgggtggacgggagttgacctatcattccgacctggatctgatcatcgtgcattcaggaaaatccaaggcttcccaaaacgatagactgctgatccaggaatatggtgtcaaattgatccagcgtaccatttttctggtgaccaccatcacccgttccgggtttgcatacacactggatacccgtcttcgtccttcaggaaatgctggtgtgctggtcaccccttgggaggtctattttaaatatcatcgaaattcacaagcctgggagcatcaggctttggtgaaggggcgaatcgtagtaggtgcatcaactcagttagagagcgatggtttgatagaaacgattggtgaattttcaaagccaggctggcttcaagaagttgaatcaggaatcgagcaagcagcttacgagtgggaaacccctagggaccttgcatcccagattcatcatttgcgatctcgcaaggaaaaagaactttctgcggaaacagataaaaaacgaaacctcaaagaaggacgcggggggttgcttgatgttgaattcctgactcagtatcttcagttggttcatggtcgggacattcccgagatgaggaccaccgagactttggaagccctggaaaatgcgggtaagcacggattgttaaatcaggaccaagtcagcatcctgtctgaaggttataggcacctgaggttaattgaaaacggattgaggctgctttatgatgatgccacaaacatgttggattttgacaggatccatcagccattgatcctgatgctgctcaaga

SEQ ID NO: 254328 - DNA, 511 bp, Unknown
  Bacterial polypeptide expressing nucleotide sequence isolated from the Sargasso Sea
attaacatttaaaaatttaaacaggtttcttgttctatcttttgcagcaatcattctagctgcatgtaccacaacaccacaagatactgcatctacatcatcatcaagttcgacttctaaagttgaagtcgtggacggagtttatgttggtactgatacagtagaaatgcttgctgttgatgtgccggacagagtgttctttgcatatgatagttattcactaacaagcgcagctcaggcaactttagctaaacaagcaaaatggttaaaggcaaatggatcagtaactattgctattgaaggtcatgctgacgaaaggggtacaagagaatataacttagccctaggtgatagaagagcaaatgcagctaaagattatttaatgacgcagggcataagtgctagtcgaattactactattagttttggtaaggaaagaccagttaacagtgcatctaataataaagcatgggctcaaaatagacgttctgtaacagtaagaaccaactaa

SEQ ID NO: 254329 - DNA, 820 bp, Unknown
  Bacterial polypeptide expressing nucleotide sequence isolated from the Sargasso Sea
gatgaaaaagaaaaagagggaattttatgaagtatttggctcacttaagaatattaaatcctctgacctaggctttgtcgtaattgcaatggggaagatgggtgcatttgagctaaattactcctctgatatcgacttcaacgtattttatgactcgaaaatattcagcaaggaccaattgttaatttttcagcccatattaattaaaattacgagggatgtaataaagttaatgtctgaaattaatgaggagggttatatttttagatgtgatttaagattacgacctgagccatcagttaatcccgtttgtatgtccgtaaaatttgcattgcaatattatagggaaaaggggcgcacttgggaaagatctgcctatataaaagctcgcgcagttgctggagacattagcaaaggaaattgttttctggcagatttggagccctttatctggagaaaaaaacttaactattttgcgatacaagacacgcaggaaattcggaaaaagattgctcgaaaagaaagcaaaggtcagaaggctggtgtcctaggttttaatgtgaaagtcggatctggaggcattagggatatagaactttacacccaaactcttcagttaatttacggaggaagagataaaaatgtaaggtgtttaggcacatgtcaatctttgcaggttctcaaagaagaaggtagaattacagaaaatactttaagagaatttagtgaagcctatgagttctatcgtaatcttgaacataggattcagatgttgaatgattcccaaactcatgaaattccaaaaactgaagagggataa

SEQ ID NO: 254330 - DNA, 910 bp, Unknown
  Bacterial polypeptide expressing nucleotide sequence isolated from the Sargasso Sea
aatgggtagggtgcgtgcaatcttcaatggactttttagtcttaaacatcttgaaattgaagcttctataagaaaatgttctaggattaagcattttacgactgttgaagagcgctttatagaatcattctctcaacaaattgtcccgcacataagccagtatacaaagaatcattttcaacgtttgtttgaatcaataaacgtacaaatagattattataggaaattatctcagtatccttctgctctatcacgccttacaaggattgctgaaaccagtgaaatgttatggaattatctgcttaataatcttgaattactggaaaaattggataatcccgttcctgatatttctgtagaaaatttaacgaaaattctcgaagatcagctaagtacatgcaaaggcaacgaggaagaagaaattgacaggctgagacaattcaagcatacaataacttttctactcggcagtgcagaaatggagggtttagtttcctatgagaatgcaagatttggaatgacagttctggctgaaattattgtaagagcggcttttgcaatgtcacaaaaatcgcttgcgtcccgttacggtgaagttaaagacgttgaaggagaactcagcagttttgcaattttaggtttgggtaaacttggtggtgaagaaatgacctatcactctgatctcgacctgatatttcttcattctggtgatggcgtcacgacgggtccatctgtgataggggcacaggaatattggatcaaaataatacagcgtctaatttcttgcctttccaccattaccaggacaggattcgcctacaaacttgacactagacttcgaccatcagggaatgcaggagtattggtatctcctcttgacacatatcttaattatcataacagttcagaa

SEQ ID NO: 254331 - DNA, 889 bp, Unknown
  Bacterial polypeptide expressing nucleotide sequence isolated from the Sargasso Sea
aataatcctgaatctggaggtatttcgaagagcatagaaggcaaatctagagatgagatgcgcgaaaaaatgcgaacacttgaagtaccaaatggaatgggagtaatcttaagaacagctggtgaaggtgtttcttttgaagagctaaaatgggatttagattttcttctaaatttatgggatgccatacaagaagctaaccagttaaggaaagctccttttttgatatatagggaaaatgatcttgtatctagatcgttaagagattttttaagagaagatattaccgaagtcttaattgatactgatgatgcttatgagaaggcctacgattttacttcaaaattaatgcctgattttgaagataaaataaaacgttatgacgaagcaatacctttatttaccagatatcaaattgagagtcagatagaaacggcctatcaaagagacgtagagctgcaaagtggcggttctatagtaatcgatcaaacggaggcactggttgctatagatataaattctgctaaagcaactagcggtagtgatattgaagaaacagctttaaatactaacctggaagctgctacagaaattggaaaacagttaaggctacgagatattggaggattaatagttatagacttcattgacatgctatcccttaaaaataaaagagcagttgaagataagctctggaaagctttatcaattgatagagctaaagtccaagtaggaaggatatcaagatttggattattagagatgtctaggcaaagattaagaccgtcacttcaagaaagatggactcaagatgtagctagtctttctactgcagttcttagattaattgaagaagaagcaagtaaaaagaaaagcggtgaagttagag

SEQ ID NO: 254332 - DNA, 440 bp, Unknown
  Bacterial polypeptide expressing nucleotide sequence isolated from the Sargasso Sea
tgatgctgaagaagcttttgctacaccagaatctaattctgcaaaagttttaggagcaacaatagatggtattgtccaaaatagattgaataaagcattacaaggacaaagaacagaaaatcaaaggttagctaaagaagcatcatttcgtcaaaaacataaattaaatgatgatgaatgggcagaatttgttgattttgcgaaatcaaaatctcttgaattagatgatatatattatttaatgaatcgtaagaatcgtgacaataaaatagcttctagtactagagatgaaatgcgtgaaaaaatgagacaaactcaagaaatacctaattcattagctacacaaggtagtacacaagtagaacaatctccagacgataaaatatttgatgcccttttgggttctgaaagtgaaatagaaaaggcttttagtatttaaa

SEQ ID NO: 254333 - DNA, 1372 bp, Unknown
  Bacterial polypeptide expressing nucleotide sequence isolated from the Sargasso Sea
acattgcctcaaacggatgatggatttttacggttggctaactttttgatgttggatcatactgtattcaaagaaaaaattataaattcagtaaaatctgttcatgatcttacggagtcatttttcaatcctgaagaagctaccatcccccaaacagtttttcctcagggtaaaacatatagacatgatcttatcagcaggtggccatcttatcctgcgctcaggacagcgcgagctgaagcattatttttaaagatacaaccaatcatattggaaaaattatcaaatgcagttgatgctgatcgcgcattaatatcgtttgataagtttttatccttactcccagctggagttcagctattttcattatttaatacaaacagacaacttattgatctttttatcgatataatatcttcatcggatgctttatctgaatatctatctggtaatgttcaagttttagatgctttgattggaggttctttctggagtcaatggccaggagaaaaatttcttggcaaagatttagcaaatacaactgcacgggaacaggactatgaaagccaattgaatgcgtcccgaagatggggaagggaatggcatttcaggattggtgtgcatttactcaggggtgtaataactcctgaaatggccacacgccagtatggcgaattggccctagccacactgaaagaattgtggtttttggttaacaagcagtttgcgaaaaagtatggtccatcgcctggtcgaggagcagtattacttggattaggatctttaggaaggaaacggcttcactctaaatcggatcttgatttgatactcatttatgatgctgctggtgtagaaatctcatcaggagaaaagtcaatagcttcaaaaagctattatgctagattaacaaagtctatggtggccgcgattggtgcaccaatgactgaaataagtttgtttcaggtcgatatgagattaaggccatctggaaatcaagggccagttgcaacatcgtgggaagcatttaagcattaccaaatctcagaggcatgggtgtgggagcatcttgcattggtcaatgccacgataattgctgggcctgaaagtttgcaaaaagatgtttgtaagttttgtgaaagtttaaaaaccttacgacaagatgaaaaagtgatgtctggtctttccattatgagaaagagattatacgccttgcaatctgtgaatgaaaactggagtttgaaattgggtcagggcaaacttcaagatatcgagctagtttctcaaatgggcattattttgagtaatgagagagtttctggtgttcatagcggattgaatgcgttgtttgaattgaaaaaaatttgtgctgatg

SEQ ID NO: 254334 - DNA, 367 bp, Unknown
  Bacterial polypeptide expressing nucleotide sequence isolated from the Sargasso Sea
ttgagtgaatttagattacaagaattaaatgtttcatctgataagtttaataaaaaagaatttatattttgtcaccctgatggctcatctgttggatcatataaaaaaggatttcaaaagttattagatgaatgtgatttacgattagacaatgatggaaattatagaactctttattctttaagacatacatatgcaactatgagaattaacgaagttccaatatatcaactagcagtaaacatggggacaagtgtaaaaatgattgaggaatattattctcatgcacaaactaaagaccctaagtttgctgaatcaatgacaaaaggtaatcaaaaaggtaactcaaaagttttacctttttaac

SEQ ID NO: 254335 - DNA, 1990 bp, Unknown
  Bacterial polypeptide expressing nucleotide sequence isolated from the Sargasso Sea
gctgttttccgcagtagagctaatcggagaagataactttgcaaatactgaaaatgcgaatattgatattatatattctgaagatttcctaaaagaaggcgatgaactaattcttgggttgagatttaagttaactccagggtggcatatatattggaaaaatccaggcgactctggacttccacctgaattagaatggaatttaccagttggcatagaatttcaagaaatattatggccctctccagagcttgcgccattggatccattaactagttatggatattatgacgaagttgtattgccaattaaatttaaaataaattcaaattataactatagtgaaaaattctctgcgtttttaagcttcttaatttgtgaagaaatatgtattccagaggatacaaatatttcaattgatttaacaaaattttcgcagtcacaactcgaaaatggaaagaatatattaaatgactggataaatagattaccttctaagtcctcatttattaccgaagcattcttgtcggataatacatttaaaatttcttggagatcaggggaaatatatgaaaaggcatatttttatcctgaacagaacggtttaataaattatagctcaaatcaaatattaggaaaaaataatgaaagcgcttatttaactattgatagaccagaaaattttagggaggagctacaatttgtttctggggtattagagttacaaaatgcagatcaaaaaacattttttcaaattgaaaatagcattgagcgagtttcctttatagaagtcaacaaaacacaaggattgagctttttactcgcaatcttcttggcttttattggaggaataattttaaatgcaatgccttgtgtatttcctgtaattgctttgaaagtgatgtctcttgtaaacgaatctggaaaaagtaatagctggaaacatggtcttgttttcacattaggcattgagatatcaatgctaattcttttgattgctaccatggcagtaaaaaatcttggacaatttgttggttggggatggcaactacaatctagtttaatgtctagcttacttgctattttattttttgcgttaggtgtaattcttgtctcaagagtagaactaggaagttttttcacaaggcttggtaatttaaatgtaaataaaacaggttattctaattcttttttacttgggcttttaacagttattgttgcaaccccatgcactggaccttatatgggagcagctattggctggggcatatctcaaccaattttaatatcatctataatttttctatctctaggttttggtatagctttcccaacattgatattatctattttacctaaaggaataaatattcttcctaagccagggaattggatgggtatagtaagcagaataatgggaataccaatgttcttaacagcgctatggttagcttgggttgtgtttagacaatctggttatgagggtcttataatacttatctcttcactaatgatattattagttgcatttttaatattaaggctttcatcagttattgctaaaagaagttcagtggctttaatatcagccagcatcctttttcttatatttttcattccagctgaaaataaaaatacaaaatcatatatcgatattggtgaaaaatggtcaacagaaagagtaaaccagttaagagatgaaaagagaaatatactattaaattttacagcagattggtgcttaacctgtaaagtcaatgaaaggttagttttaaattcaaaagagtttatttcgttgattgagagtgatgaaatagtatatctggtcgcagattggacaaaatatgatcccaagatcactgaagaacttgaaaaatacaaaagagctggtgttcctctttatttatattggagtcagggctcagatgaagtaaaaattctacctgcggtcttaacaaaaagcattttatatgatcatcttaaattatag

SEQ ID NO: 254336 - DNA, 1897 bp, Unknown
  Bacterial polypeptide expressing nucleotide sequence isolated from the Sargasso Sea
ttgcgacctgatccatcagtcactccggtttgtatgggtgttgatgctgcagaaagatactacgcgagcctcggcagaacttgggagagggcggcttttataaaagctagagtctgtgctggtgactattcagccgggattaaatttttaaaaaatatggagccatttgtttggcgcaaataccttgattacgctgcaatttccgatgcgcatgacatccgattgagaatccgcgatcatttcaaaaccaaaattggagatataactttacctcagcataatatgaaacttgggcgaggaggaattagagatatagaattctttacgcaaacccatcaaattatttttggcggtagagataaaggtttgcgatcgaaagcaactatcacttcccttcgggcaatcgctgataaaaaatggttaccaaaagctttagtaaaagatttgattgaaaattatcggtttaaccgaacaattgagcatcgtttgcaaatggtaaatgatgcacagacccatgaacttcctaactctgatcaagggttcgtccgccttgcctctttaatgggaatagaaaaagacgatttgcagaaagagttagttgaaagattaagtaaaactaatagtgcaattgaaggtttttttgagccacaaaatactggtcagaatattcaaagatcaagcttttcaaaagaacttgaggacctaatgaaaaattggggaagttttccagctttgcgaacagcgagagcgatgtctatatttgaacgaataaagcctgtgatattagaaaagataaattcaacttctagacctcaagaaactttaaaggcatttggtaattttctttcaaagctacctgcgggtatccaaatattctcgctatttgaaaataataagcagattttagatttgcttattgatattttgggtacttccggagctctgtcagaatatttggtcaaaaatacagatgttctagattctgtgattgcaccggaattttgggaaatttggccgagtagagaattcctctcaagtgaattggagataatacttaaaagtgaaatggattatgaagccaagttggatttaacgcgtcgatggtgcaaagaatggcaatttaagattggcgtacattacttgagatctcagataagtgcgaaaagagcaggggctcaatacgcggaattagctgaaattactttaagcattatttggaaggaagttctttttgaatttgctaaaaaatttggtcctgaaccaggaaatggagcagctgttataagtatgggtagtttaggctctggtgtattacatgcgaattcagacctcgatttaataataatttatgatgcggacggtaatgatcaatctgaaggtcacaggtcgctttcggctcgccaatactattctcgcctaacaaaagcttttattacggcaatatcagcaccaatgacggaagggcggttgtatgaaattgacatgcgacttaggccttcaggtttccaaggtccagtagcaacttcatggagttcttatcagaattatcaaaaaaatgaagcttgggtttgggagcatctagcattgacaagggctcgtgcggtggcgggaaaagtatttttgttgaacgaatttgaaaatttcagaaattctgtattaaaatcttatcatcgagaaaacatttttaacgaactagtcaatatgagagctaggatatttcaagcaaagtctttaaatccttgggatgctaaggttgggccaggacggttacaagacatagatttactttctcaggctggatgtctggttaaccgatctgtttctcgctccacggctgatggcctggaggctcttttttcaggtaaattcatatctcacgaagaattttttgagataa

SEQ ID NO: 254337 - DNA, 682 bp, Unknown
  Bacterial polypeptide expressing nucleotide sequence isolated from the Sargasso Sea
aatggaatttgagttgaggcctaaacgagttcccaaggtttttgatcaacgaatagcccaggagatttacaacttattccccgagagctcagaaaaattgagaatgttttttgcttcggtagcctcttgtagcccctacttatattctcagatagtaaaagagaaaagttggttgttgaatgctgtaggtgataaagattttaacattttatctctgttggagccattagaatcagaaacttatgactcgctatatttaaaattaaggatagctaaaagaagagcagctctctggatcgcgctgaacgatttagctgatatttggtctcttgaagtagttacaaaaaatctttcagaatttgcagataaggccataaacttatcttggcgtgtgagctttttaaaggaaatgaaaaaaggcaaattccccaaacaatacgatggagatccagataaagcaggcttttttatattagccatgggcaagttaggtgcgtttgagcttaattattcgtcagatattgatttgatttgtttttttgatgaggaagtatttcaccctgaggaatttcaggatgtgaggcgcatttttataaatgcaacaaaaaatatgtatcggattttgaatgaaaatggaatagatggttatgtttttaggacaggatttacgcttgcggcctga

SEQ ID NO: 254338 - DNA, 649 bp, Unknown
  Bacterial polypeptide expressing nucleotide sequence isolated from the Sargasso Sea
catgacaaacgcagaacttgctgaaaagttttggcagcagttgttaacagcaccggcaatgagtgaaaatgacaaagtgattgttgaagcccatagtgaaacgctaaaacaagcgttttcccgttcagcattcttagcagaaacactgattcaaaagccctcgtttgtttctcgaatcgttgaacattatcgccccttagaaaacagtgaagaactccagtccgttggcactgccatatcttctgactaccacacagccctcgacgataaattacaaggcgttgttagcgaagatgatctaatgcaagtattgagggagttcagaaacaaagagatggcacgaattgctttcctcgacgttctcaacaagcaacccatagaaacatcacttatacatgtttctgcattagccgatgtactcattagcggtgcataccactggctttatcaacacttagcagcgcgctatggaaaaccacaaagtcacggcaaagatatgcacatgtatatcctgggaatggggaaattaggagggaaagaactcaacttttcttctgatatcgatttaatctttgcgtaccctgaaaaaggcgaaacccaaggagggcgaaaaagcttagagcaccagcagttttttaccaaggtcgcg

SEQ ID NO: 254339 - DNA, 994 bp, Unknown
  Bacterial polypeptide expressing nucleotide sequence isolated from the Sargasso Sea
agttttttacaagcttgcgcaacgactcattgccgccctgaataaaaccacaccgttaggccaggtcttcagagtagacatgcgtttacgccccttcggcgacagcggtccgctggtggcgcatttcggagcgctggaagattactaccaggatcagggccgccagtgggaacgctatgccatggttaaggcgcgtatcctcaaccctgaatcctgttatgccagtcagttggaagccatactggctcccttcatctaccgccgttatctggatttcactaccatcgacgccatccgcgatatgaaacggttgatcggcaaggagcttcgccggcgccgcttaaccggcaatatcaagctgggtgccggaggaattcgtgaggtggaatttttcgcccagagctttcagcttatccatggcggtcgggagacaacgctacaatcacgggaattgcacccggtattaacccgcctggcagaactacaaattatcgaaccccaggccatcaaccagctgttggaagattactattttctgcgcaaggcagagcataccctgcagcaatttaatgacgagcagacccagctgttacccgaaaatagctggacgcaggcagtcatagcaaaggtcatggcgttccctgattaccaaaccttcatatccgccctgacagtagtgatggagcgggttcatgagcagtttaatcagttagtatccgaacccggtgaggagcaacaggagcaggactcactgttcagccgatgcaaagatgcctggttgctggaagtatccgaaaacgaattttgtgacttgctaagcgacactctcgatgagagctccgccatggtgctgtttgaacaactcagagatttcagagggcagctgagccggcatcgcatcggtcagcgcggcgaagacacgctgggcaaactaatgccggagatgatttactacatgctcccgccatgccccaccaacatcatccagctactg

SEQ ID NO: 254340 - DNA, 883 bp, Unknown
  Bacterial polypeptide expressing nucleotide sequence isolated from the Sargasso Sea
tccttttataaaggatttattgatcaaagagcatcttggttaaaaaagactttcgatttagatcttacaagtacactttcgggtcttttaaaaaaatgcaagaaatcagacagaatggacttataccggtcgttaagagtagcgaaacgtagagcaattttactgctagctttggctgatttaggtgggttgtggagattgtctgatgtcaccgaagcgttgtcagaatttgctagctcagttcttgaggtaagcttagatcatttaacctatcatgaattcaattgggagcttcatagttcttattttaaaactacaaatgattttcctatatccatgtttgggtcggccaagaaagttggacttgtagggatcgcaatgggtaagcttggagggaaggaattgaattattcctccgatattgatctaatttttttctttgatgagttccaatttaagccatatttttacagtgaagttcggctcatatttattaaaattattcgcaatttagtgaaattattatcagaagtaactctagatggctatgtctttagagtcgatttacgattacggccagacccaagttcaaacccgatctgtataggtattgcatccgctgaacgctattatgagagtttcggtaggaattgggagagggctgctttaattaaagctagacctgttgctggagcaacaaaaaaaggattcaaatttttgcttagattggaaccatttatttggaggaaaaatctagatttttcagcaattgaggatactgagcaaatgttagacaaaataagggatcgcgatactgtgaaatcacaaccaaagattcttggatatgatattaagaataattttggggggatacgtgaaatag

SEQ ID NO: 254341 - DNA, 487 bp, Unknown
  Bacterial polypeptide expressing nucleotide sequence isolated from the Sargasso Sea
atgaagcagctctcttcaccgttacagcagtactggccgaccgttgttgagcggctgccagcagcaatatctgagtcctcgcttagcgttcaggcgaagtcagtacttacattcagtgattttgtccgtgacagcattattgcccatcccgaatggctggctgagctggaaagcactccacccctggcggatgaatggcaacactatgccaactggttgcagcaagcattggctgacgttagtgacgaaaacacactgatgcgtgagttacgcctgtttcgccgtcgcattatggtgcgtatcgcctgggcacagacgctgtcgctggtgaccgaagagagtattttgcagcagctaagtcatctggctgaaacgttgatcgtcgccgcgcgcgactggttgtacgcagcctgctgtcgagcaaagaggaaattcatggatgttaatgattgcttcaactggttttgtattttctacattaccagtt

SEQ ID NO: 254342 - DNA, 962 bp, Unknown
  Bacterial polypeptide expressing nucleotide sequence isolated from the Sargasso Sea
aagctcggcgccggtggcattcgcgagatcgagttcatcgcccaggccttccagctgattcacggcgggcgcgacctcagcctgcagcaacggccgctgctcaaggtgctgaccacgctggaggggcagggttatctgccgcctgccgtggttgcggagatgaaggaaggctacgagttcctccgttatgccgagcatgcgttgcagggtatcggtgatcggcagacgcagatgctgccggccgacccgcaggatcaggcgcgtgtggcggcgatcatgggcttcgctgactggacgagttttcatgagcgcctgatgcactggcgtggccgcatcgaatggcatttccagcaggtgatcgccgatcctgacgaagatgagtcggatgctggcgaggcctgcgttggcgccgagtggctgcctttgtggcagggtgcactggacgatgaggccgccgtgttgcagctgcaggaggcgggcttcatcgagccagacgcagcctgtcggcgtctgggggatctgcgcaacggtccgcaggtgcgcgccatgcagcgcctcggtcgtgagcgtctggatgctttcattccaaggctgctggcgcaggccgtcgagcacgacaagccggatctggtgctggagcgggttttgccgttggtggaaaaggtcgcacggcgttcggcctacctggtgcttttgagcgaaaacccaggcgcgctggagcgtctgattactctctgtgccgccagtccctggattgccgagcagatcgcccgctatccgctgttgctcgatgagctgctcaacgaagggcggctgtattcaccgccgctggcgccggagctggccgctgagctgcgcgaacggctgatccgtattcccgaggaggatctggagcagcagatggaggcgctgcgccacttcaagctggcccacagtctgcgcgtggcagcgtcggaaatcgc

SEQ ID NO: 254343 - DNA, 568 bp, Unknown
  Bacterial polypeptide expressing nucleotide sequence isolated from the Sargasso Sea
gcgggattgttatgttgccatatcgatggtttcgagaaataccagaccgaagaagcatggacttgggaacatcaagcgctggttcgtgcaagagccatttgcggagacccacgccttttgaatgacttcacgcaggtaagaaattccatactaactcgctctagaaacgctaaaacgttggctgacgatgtgtgcaaaatgcgtttgaaaatgcgggagcacttgctttcaaaggccaacgacaaggtagacttaaagcagtgtgtaggtggtattaccgatatcgagttcatggctcaatatcttgtactcgctaatgcaaagtcacaagctgctatgacagaatatcctgacaatcttcgcatttttgacgccgcagccaagaccaacattattgatgtcgccactgcgcacaaactgcaaaaggcgtatttaaagctgcgagagcaataccaccatttaacgttagcagataccaagtacgcagatcagagcgaagaactagatgccatacgagagcaagtaaccattcactggaatacactatttggaacgtgtagcggctagg

SEQ ID NO: 254344 - DNA, 721 bp, Unknown
  Bacterial polypeptide expressing nucleotide sequence isolated from the Sargasso Sea
attctgggaatgggcaaactgggcggaaaagaactgaaccattcctctgatgtggatcttatcttcatccatgatgatttggctcctgttgaacagcaggatcagtcaaatcgacaccggatcaaagtcgccaggagcctcattgatgttatgagtgatataacagaggagggtttcctggctagggtcgacatgcgacttcgccccggaggagaccgtgcccccctcgtccagtctctggatgaagtggaggtttattattcagccaaaggagaattgtgggaacggcaggctttgatcaaaggcagaaccgttgcaggctgtgagaggacaaaaaaatcctttgaatcgatgatcactccatttgtatacagcagacttctggaagaaaggctttcacgggatattcagcacatgaaagagagaatcgaagaggaacaccttcgagaaaatcagttgaatgttaaattgggagtgggaggaattcgtgagatcgagttttttgtgcagacgtttcagttactttatggcggtcgaagaaagtccctgaggcaaactaatactttgaaagctttggaggcaattgaggaggttgatcttattcctgctttggatggtgcccacctaaagcgggcctatatatttctccgtcgcgttgaacaccgcttgcagatgcgtgaggaacagcaaacccataccattccttccaatgctgaatcta

SEQ ID NO: 254345 - DNA, 953 bp, Unknown
  Bacterial polypeptide expressing nucleotide sequence isolated from the Sargasso Sea
catgggaaagttgggagctcgagagctaaattattcatctgatattgaccttgtatgcttctttgatgatgaaaaattggccgaaaaagatttctttgaaacacggaaagctgcaattgctgttataaagggagtgactaagattttatctgagacaacagaacatggatatgttttccgtactgatctaagattacgcccggacccatctgtaaaccctgtttgtattggatttgaggcagcagagaagtactatgaggccttaggtcgaacatgggagcgggcggcttatataaaagcaagatattgcgcaggatctaaatcactagcggttaagttcctagcagcattgtatccatttgtatggcgcaaatatcttgattttgctgcaatagaggatgcacatagcattcgtataagataccaaagaaaaatcgagttaaaaacaatttcaagcattcttggtcatgacgttaagcttggtttgggtgggattcgcgatattgaattttttacacaaactcgtcagttaattgtaggtggaagagatcccgatttacaggtccctgaaactctcgttgcgctcgtgaaactggctgaaaagggttgggtttctacagatacttcaaaaagattagctgagcactaccgatttcttcgtaaggttgagcatttgttacaaatggtcaatgatgcgcaaacccacacattgcctcaaacggatgatggatttttgcggttggcaaactttctgatgttagatcgtactgtattcaaagagaaaattataaatgcattaaaatctgttcatgatcttacggagtcatttttcaatcctgaagaaggctccatccccaaaacagtttttccggaaggtaaaacatatagacaagatcttatcagcaggtggccatcttatcctgcgctcaggacagcgcgagctgaagcattat

SEQ ID NO: 254346 - DNA, 743 bp, Unknown
  Bacterial polypeptide expressing nucleotide sequence isolated from the Sargasso Sea
agagcagctctctgggtcgcgctgaacgatttagctgatacttggtctcttgaagtagttacaaaaaatctttcagaatttgcagataaagccataaatttatcctggcgtgcgagctttttaaaggaattgaaaaaaggcaaattccccaaacaacacgatggagatccagataaagttggcttttttatattagccatgggcaagttaggtgctttggagcttaattattcgtcagacattgatttaatttgtttttttgatgaggaagtattccaccctgaggaatttcaggatgtgaggcgcatttttataaatgcaacgaaaaatatgtatcggattttgagtgaaaatggaacagatggttatgtttttagaacagatttgcgcttgcggcctgatccatcagtcacgccggtctgtatgggggttgatgctgcggaaagatactacgctagccttggcagaacttgggagagagcagcttttataaaagctagagtttgtgcaggtgaccattcggctggaattaaatttttaaaaaatatggagccatttgtttggcgcaaataccttgattacgctgcaatttctgatgcgcatgacattcgattacggatcagagatcattacaaaaccaaaaaaggggatataactttacctaagcataatatgaagcttggacggggaggaattagagatatagaattctttacaccaaactcatcaaattatttttggtg

SEQ ID NO: 254347 - DNA, 949 bp, Unknown
  Bacterial polypeptide expressing nucleotide sequence isolated from the Sargasso Sea
actttttttgcttcggtggcatcttgcagtccctacttatattctcagatactaaaagagaaaatttggttggtgaatactgtacgttgtaacgattttaacattttatctctgttggggcccttagattcagaaacttatgactcgctatatctaaaactaaggatagctaaaagaagagcagctctctgggtcgcgctgaacgatttagctgatacttggtctcttgaagtagttacaaaaaatctttcagaatttgcagataaagccattaatttatcatggcgtgcgagctttttaaaggaattgaaaaaaggcaaattccccaaacaatacgatggagatccagataaagttggcttttttatattagccatgggcaagttaggtgcttttgagcttaattattcgtcagacattgatttaatttgtttttttgatgaggaagtattccaccctgaggaatttcaggatgtgaggcgcatttttataaatgcaacgaaaaatatgtatcggattttgagtgaaaatggaacagatggttatgtttttagaacagatttgcgcttgcggcctgatccatcagtcacacccgtctgtatgggggttgatgctgcagaaagatactacgctagccttggcagaacttgggagagagcagcttttataaaagctagagtttgtgcgggtgaccattcggctgggattaaatttttaaaaaatatggaaccatttgtttggcgcaaataccttgattacgctgcaatttccgatgcgcatgacattcgattgcggatcagagatcattacaaaaccaaaaaaggggatataaccttacctaagcataatatgaagcttgggcggggaggaattagagatatagaattctttacacaaactcatcaaattatttttggtggtcgagataaaagtattcgatcgagagcaa

SEQ ID NO: 254348 - DNA, 1210 bp, Unknown
  Bacterial polypeptide expressing nucleotide sequence isolated from the Sargasso Sea
aacttaatttctcagagattatcatataatgttgagttacttgatttgttagtatccaaaaaatttctggattatcttttttcaaaagacatattggctaaggagctgaaattaagatttaaatataacaatgattttgaatttattataaatgagttaagaaggtttgttaaagaaagaaaattccagattagtatacatttaattttaggcaaaattaattgttttcatgcttcaaaatatttttcggatactgcagaaatttgtatagaaatcttattacctgtagttaagaaaaatttaaaaacacgttatggatatcctgtgaatcatttaccatgcgttttaggtatgggaaaattaggttctagtgaaatgaattttttttctgatcttgatctcatattaatttataatccatttgtgaaatataaaataaaaaatcaaaattataattctttagagaaatattttgctagatttactcaagctcttgtatctgcattcacttctttaacccaagaaggaaaattatataatgttgatatgagacttcggccatcaggcagaaaaggacctgttgctacatcaataagttcatttttaaattatcaaataaataaagcatgggtttgggaacatatggcactatcaagagctaggataattacgggtgatactaagacaaaaagtaaattaaataaaatattgtttcaaatttttgataataaaactttttccaaaaatgagataaaaaaacaaactctaaatatgcgtctgactttacaaaaaaattatagtaaagaatttaatccaccagatataaaatatggtagaggaggatttcaagagttagaacttcttgtacagatggggatgctcttaatgaatattggttataaaaaaaatcatcaatctccaaaaaaattaattgtgttattgttcagagctagctttttaaatgaagatgagtttaaagaagtatctctaatttatgatttattttttaactatcagcaagtaatttgtattatgtctgataagatagataataaagaaattttatcaaatcatggtttacaatatttggttgaaaacttttgtaaatcaattaactatgaaaaagttaaaaatttaaatgatctatatctgttacttaagcagaaatctaaatatattggaaatttatttgataaaaaattaaaatagt

SEQ ID NO: 254349 - DNA, 1087 bp, Unknown
  Bacterial polypeptide expressing nucleotide sequence isolated from the Sargasso Sea
ttggtatacgttttcggacgaagtaatttcctggttactagacttaaaaggaatccggagcttgcgcttaaattattagaatcttcattcctttttcaaaagaaaaaccttttagaaatggagaaagaattacgtcaaagacttgaaaatcagccaaatcaatcacttttagaattcaagacagcattaaggtgtttcaaatatgaggaatttttaagaattacagttcgtgatcttgcagaactttgtccatttgaagaaactctagaagaactttcatcagtagcaatttgctgtctgcgggaatcactttattttgttacatctcatgaattggttaatttagaaaaatctaaaaaagaactaatagaagataatttcataactgcaaaaggagaaaccttgcagtcaatgtcttttagctcacatcattatttgccattcagcattttagccttgggtaagcttggcgggaatgagcttaatttttcatcagacgttgatttgatctttatacacgacaatgaatctatcaccggtaatttaaattttgatcacaagtttaggataaaagcagcaaaacttttgattgaagttatgtctgaagtaaccgaagaaggatttttggcacgggttgatatgcgcttgagaccaggaggtgaaaaagctcctttggttctttccctggatgaaactgaattttattatactgctagcagggaaatgtgggaacgtcagtcccttataaaagcagttcctgtagcaggttctgaactacttaccaaagatattatgaatatggtaacaccattagtttacaagagtctgcttgatgaagaagttctgaacgatattgaaaaagttaagaaacgtattgaagaagaacatcttcgtgaagatcatttgaacgtaaaactaggggtaggtggaatccgtgaaatagagttttttgtacagacttttcagctcctttacggtggcgttaataagcagcttcaaacaactggaactttaagagttctacaggctttaagtaaaattgggatgattcctggacaggatgctgcgttgcttaaggaggcatatt

SEQ ID NO: 254350 - DNA, 926 bp, Unknown
  Bacterial polypeptide expressing nucleotide sequence isolated from the Sargasso Sea
cttgtcggctcggtctcataatgcagatttgggattacataacctggaacgctttgttgtaaattttaaagaaaaagaacatctttttacacaactctcagaatcaaaacatctgttggaatcattgatttgtttattttcaggtagccaaattttaacagactctcttctaagtgaaccatcccatataaactggttaagcgaacctaatatacttaatgaaccaaaatctaaagatattttaatgagagatttttatgaaatggccggtaacgattttcataaaaatacaacttcaaagttactaagaaaatttaagaaaagggagtacatacgaataggattaagagatttacttggaaccgtagagctaatggagacagtaggagatatttcaaatctagcagatgtttgtttgcaaattgcctatgaaaaagcagatagagatttgaaaaaaaaacacggaattccttcatataaagattcggatgaaaattggcaagtatccgagtttgctgttattggaatgggaaaattgggaggacaagagctaaactacagctcagatatcgaccttatttatatttatacttccagtcatggagaaacacgccccgaaccatctaacaagagcgaagttattacattaaccaatcacgaatatttttccaagctagcacagcaaattacaaattatatcaatgaaattactgatgaaggtaacgttttccgggttgacttggaccttaggcctgatggccccagcggagaaatagctagttctttagccagttgcgaaacatattatcaatcgtggggaaaaacttgggaaagacaggccatgattaaggcccgagtttcagctgggagcgactcgttgggtagagaattttttggaatgatggagccgtttatttaccggcgca

SEQ ID NO: 254351 - DNA, 1699 bp, Unknown
  Bacterial polypeptide expressing nucleotide sequence isolated from the Sargasso Sea
aatgaactcctgcaaagttacgcaatttcttgaagaccgatccggtcttgaccggtgggcgcgagatattggcctcagtgatggtgaaaatgcgagtcaggttttcaagaaactggtatcgcaggacgtagacgtcgatttactcgggcgtctcatcaaaatcctggagcgtctccttccgctgtacggtgaggcagatcgacttcttgttacgttgggtcgatttcttcaagctgtgggaagtccactctcgacaattgcattatttgaacgcgagcccgagtctctggaagcacttctggctattcttgctacgagcccatttcttggtgagattgtgattgctgagcccgatgtctgggaacgtattcggagtggtggtggcagaccagaaaagcgagagtctcttcgggatattttgaggtctgaggttggcgactcgctggactctgcttttgttatgcaagttcttcgacggtttaaacgccgagagattctccgtgttgcgtatggtgatatcgttaagcatcaacgactggaaacagttgtcgatcagatttcagcgattgcggactgcattattgatgaagctcttcgcgtggcacttttacagcagcaacagcgtcgcggtagtcccatcacaggagacggtcgacctgcaacaattacagtgatagctcttgggaaattaggtggaaatgaactaaattattcgagtgatatcgaccttgttttctgttattccgaagacggtgatattgcaggatcaaagacatatacaaccagtgaattttttgagcgtgttgtccagcaagtaacgcgtctgattgccgaccaaacagaattaggggctgcgtatcgcgttgatttgcgattgcgaccgtatggaggccaaggcccacttgtattaccacgtgtagcgctcgagagatactacgacaggcaggggagaacatgggaaaggcaggcctgggtaaaggctcggtgtgttgcgggtgacctgcagttgggggaagatctgcttgccaatctacgtccttgggtctacagccgttggttgccacggaccgaaatcagtggcatccgagctctaaaacgccagattgagcggcggtctatacgtgaaggtatcgattctgctgacctgaagacaggccggggtggaattcgtgatattgaatttactattcaatttctgcagttactcagtggtggtgatgagaccgaagttcgagtgggaaacacaattgaagctattcgacgccttgcagcaaatggaagcctgaatgatcaagaaagagaaattctcgaacggaactaccggcttctcagaacagcagaacaccgactccaaattctttatgacagacagacacatcgtttgccagaaaatgaggatgaatatgctcggttagcaggtcgtcttgggtatggcaggcaggcgaatgccgcaactaaacttcgtgaagatcttgaagaagctactcggctgaatagaaggattcttgaacatctcctccatgatgcttttccgggtgagaccacaccagaagcagaagtcgatctgattcttgatccaaaaccacaaaaagaacttattgatagcgtattggctcctcgcggatttcatgacgtgacgcgagcgtatcgaatggtaaatgcattgagtgaagagtcatctcattttctttcaaatcgc

SEQ ID NO: 254352 - DNA, 1413 bp, Unknown
  Bacterial polypeptide expressing nucleotide sequence isolated from the Sargasso Sea
gaaatttctattttcaaaaatagaaaagagtttatatgaaatgatttcaaatacttatagtccagcggaaacattggcaaatattgataaatatttttcccaattatcgtctggcgttgaaatattttcgctccttaattccaataagagcttcttaaacatttttgtagatattgcctcaaaggtccctcaagtacttgaggaaataggtcaaaatactgatattttggcttctgttgttaataaggacttttttcatagcttcccaactttagaaggtgtattatttgagctagaccgcatcttaaacgttaaaccttttgactatgaggacaagttaagcttgatccggcagtttgttaaggaattaaaatttaaggttgcggttcatcttattcaaagaaaatctaatattgaggaagctagtttttcatattctataatagctgaagcagtattgcaaattctagcacccattgtcacggagaatttttctaagcgatatgggccacttaagagcaaaggttttgcgattattggcatgggtaaacttggctctcgagaaatgacccttacttcggaccttgatttaataatagtgtatgatcctgtatctttagaaaacttggagaaatcgtccaaaatacatccgtcaacttatttttcaaagttaacgaaggaactagtatcggcactcacttcaacgatgaaagatggctacctttacaaggtcgatatgcgattaaggccctcagggagtaaaggtcctgtagcagtatccttttcaagcttttcaaattatcagaaaactgaagcctggacatgggagcacttggcattaatcagagggagggtagtttacggtgaaaaaagtttttctttacgcattgaagacgttatcaaggaatctttgagaggtcccagagatgtatctaaggtattttcagatgttaaagatatgagggggaaattatttgaaaatcttaaattggagaataagaagcttaaatcattgaatataaaggtgggtcaagggatgatgcttgatctagagcttctaattaagatgggagctctaattacaaagcaaggaaatggaaaaaatatatcttatttaatcgataaattagagggtataaaatatttttctaatgaagaagttgatttaataaggaaagcatggagaattttttatacaagtgattttttgagtaggtattttaattttgatatatcaaaatcaactgactttgaaagttatcgctggtctgaactttttcagaaagactctttttttatttttcttaaagattttctttctgaagatttaactaaggataccttaaaaaaacatttagaatctttggtaggcctattgtctaatgaaataaattctgtattcaatagtaagct

SEQ ID NO: 254353 - DNA, 1153 bp, Unknown
  Bacterial polypeptide expressing nucleotide sequence isolated from the Sargasso Sea
actgctcagtatttttggacgaagtgactacctttcccggagactgatcagggatccaaagttcgcctcggagttttgctccctcgaaaactggaaggaagcaagatcttccgagttgatgttaagggaactcaggaaaaaggttcgcagtgtgaatccggaaactccagagggcctgaaaaatatcctcagacgctggaagtatcgagagttcctgagaatcagcatccgtgatttttgccttcctgaagcttttgtggagacccttgaggaatgggcttctgttgctgaaagcctgcttcaggttgccctggaaacaatccatgaaatactccaaaaaaaagacggggttcatttcccggaacctccgttcatgattctgggaatgggcaaactgggcggaaaagaactgaaccattcctctgatgtggatcttatcttcatccatgatgatttggctcctgttgaacagcaggatcagtcaaatcgacaccggatcaaagtcgccaggagcctcattgatgtcatgagtgatctgacagaggagggtttcctggccagggtcgacatgcggcttcgccccggaggagaccgtgcccccctcgtccagtctctggatgaagtggagctttattattcagccaaaggagaattgtgggaacggcaggctttgatcaaaggcagaaccgttgctggctgcgagaggacaaaaaaatcctttgaatcgatgatcactccatttgtttacagcagacttctggatgaaaggctttcacgggatattcagcacatgaaggagagaatcgaagaggaacaccttcgtgaaaatcagttgaatgttaaattgggagtgggaggaattcgtgagatcgagttttttgtgcagacgtttcagttgctttatggcggacgaagaaagtccctaaggaagaccaacactttggaagctttggaggcaattgaggaggttgatctcattcctgctttggatggtacccacctgaagcgggcctatatttttctccgtcgcgttgaacaccgcttgcagatgcgtgaagaacagcaaacccataccattccttccaatgcggaatcccaaagacatcttgcacgatgcatggggtatgatgaccttgacccggaaaaagccagg

SEQ ID NO: 254354 - DNA, 610 bp, Unknown
  Bacterial polypeptide expressing nucleotide sequence isolated from the Sargasso Sea
ctcggctctggtattgcagcgggtgctgggggtgtttcggcagattgttagccgcacggcgtaccttgagctgctctctgagaatccacctgcgctgcagcaactggtgatgttatgccataaaagtggctggttggctgaacatctggcgcgttacccgttgttgctggacgaactgatagacccatcccagttgtatcaggtaccggattcaacggattaccgggataaattacgtcaaagcatgctaagggtgcctaccgatgatttagagctgcaaatggaagtgttgcgccagtttaaacaggcgcagcaactgcgcatcgcggcggccgatatcacgggtattttgccgttgatgaaagtcagcgaccatctgacctttttagccgaagccattattgccgcagtagtggagttatcctggcagcaaatggccgaaaagtacggtttacctgctggtttaaaaccagaagatgccaaagcttttgctgtgcttgcttatggcaaactgggtgggtctggaactgggttatggttcggatctggacttggtttttgtgcaccagtgcgacaatcttgcgccgactcaaggcgacaaagccattga

SEQ ID NO: 254355 - DNA, 619 bp, Unknown
  Bacterial polypeptide expressing nucleotide sequence isolated from the Sargasso Sea
ttgtttggacaattatacgaaaccgacttgcgtctacgcccttctggcaatgcgggattgttatgttgccatatcgatggtttcgagaaataccagaccgaagaagcatggacttgggaacatcaagcgctggttcgtgcaagagccatttgcggagacccacgccttttgaatgacttcacgcaggtaagaaattccatactaactcgctctagaaacgctaaaacgttggctgacgatgtgtgcaaaatgcgtttgaaaatgcgggagcacttgctttcaaaggccaacgacaaggtagacttaaagcagtgtgtaggtggtattaccgatatcgagttcatggctcaatatcttgtactcgctaatgcaaagtcacaagctgctatgacagaatatcctgacaatcttcgcatttttgacgccgcagccaagaccaacattattgatgtcgccactgcgcacaaactgcaaaaggcgtatttaaagctgcgagagcaataccaccatttaacgttagcagataccaagtacgcagatcagagcgaagaactagatgccatacgagagcaagtaaccattcactggaatacactatttggaacgtgtagcggctagg

SEQ ID NO: 254356 - DNA, 736 bp, Unknown
  Bacterial polypeptide expressing nucleotide sequence isolated from the Sargasso Sea
ttggtggtgggcatgggcaagctgggcgggcgcgagttgaacgtctcgtccgacatcgatctgatcttcctctacgacgacgatggcgacacccagggcggcccgcgcccgctctccaatcatgaatacttcacgaagctcggccggcggctgatcaacgcgctggccgatgtgacggaggacggctacgtcttccgcgtcgacatgcgtcttcgcccgaatggcgatgcggggccgctggcgtgcagtctgggcatgctggaggagtacttcgtcgtgcagggccgggagtgggagcgctacgcctggatcaagggtcgcgtcatcactgacccgaccagtccgcatgcagcacgcgtgatccaacagttggatcgcgtgacgggcccgtttgtgttccgtcgctatctcgattacggcgtgatctccgccattcgcgcgctgcatgcgcagatccgcaacgaggcagccaagcgcagcaacggtgccaaccagcagcgcgacgacatgggccatctgcaggcgcgctcgcccaacatcaagctcgggcgcggcggcatccgcgagatcgaattcgtcgcgcaggtgtttcagctcattcgcggcgggcaggatttcgggttgcgcgtgcgccccacgctggaggtgctgcgggcggcggcggagcgcggcctgatcgacgccgacgccgtggcgcggctgaccgaggcttaccgcttcctgcgccagttggaac

SEQ ID NO: 254357 - DNA, 1003 bp, Unknown
  Bacterial polypeptide expressing nucleotide sequence isolated from the Sargasso Sea
tgcagagaaccatcgcgaagcacttttagtcgcttttgctcgctctgctttcctagccgaaacactggtacaaaagcctgcgtttatctccagagttgttgagcttgtgtctgactcaaacgctacttgcttcagcactgaattaaaagcaaagcttgaatcactaaagagcgaagacgagtttttgaaggtacttcgcgaataccgcaatcaagaaatggcacgtatcaccttcttagatgtgctaaataaacaaaatattgaagattcacttgcacaagtttcagcattggcggatgcgcttataaatagcgcttaccattggatttacaaacacttagctctccgctacggaacgccaaaaagcaacagccaagatatgaacatgtacattcttggtatgggcaagctgggtgggcgagaactcaacttttcgtcagacattgacttgatattcgcttacccagaaaaaggcgaaactagcggcggcaagaaagccttggagcatcaacagttttttaccaaactggctcaaaagcttattcaagcactaaataaagttactaacgatgggcaagtatatcgcgttgatatgcgcttacgtccgtttggagattccggtccccttgtaatgcatttcgctgccttagaggactattaccaagaccaaggcaggcactgggaacgcttcgccatgatcaaagcgcgggttatcaatgatgaccactcagacgatgcaaaatggctgaacagtattttgcagccattcacgtttagacgttacctagatttcactactcttgatgcgctgcgcaatatgaaaaagctcatagctaccgaaattcgcaggcgacgcttaagcaacaatatcaaactgggtgctggcggtattcgagaagtcgagttttttgcgcagagttttcaactaatccacggcggtcgtgagcctgcattacaaagtaagtctttacttcgcactttagatgctttgagcgaattggat

SEQ ID NO: 254358 - DNA, 816 bp, Unknown
  Bacterial polypeptide expressing nucleotide sequence isolated from the Sargasso Sea
atggagggttactacgaaacccagggccgcgaatgggagcgctatgcgctgatcaagatgcgcccgatggcgggcgatttggaggccggcggccgcttgatcaaacgcttaaatccctttgtctatcgtcgttatatcgactacggcgcgttccagtccctgcgagaaatgaaatccctgatcgagagggaagtgaatcgtaaggggatgcaggcggatgtgaagctgggtgcaggcggcattcgtgaagtggaatttattgttcaggcattccagctgattcgcggtggccagttgcctgatctacgtgagccgaatttaatcaaagtgctgccacagctggtggcgctggagctgttgcccgaagatgtggccgacgagttgactgaggcgtatctgtttctgcgcgatgtggagcatcgtttacaggcggtggcggataagcagactcagcggctgcccgatgatgagctgggctggcagcgcttgacctatgccatgggcttttccgctcgggcagcgtttgagcgcaagctgcgtcgctaccgggaaagtgtgcgccatcattttagccaagtgattgccgacccggaacaggaaaccgatgctgcccaaggtgctgatcaagagctgctcgatttgtggttgggggcgttggatgaagatgcagcgcaggctcaactcagtgctatcggggtgctggatgctcaggctgtgtacgctaggctgagcgacttccgcgatagccgagcggtggagaatatgcaggccatcagccggcagcggctggatcggttgatgccattaatgctcgaa

SEQ ID NO: 254359 - DNA, 723 bp, Unknown
  Bacterial polypeptide expressing nucleotide sequence isolated from the Sargasso Sea
gttgtatcgctctgcgctcgatataacgcttgaaactgtaaaaactgaagatgaccttttaaaagcattacgtgaatacagaaatcaagaaatggcccgcgttacctttcttgatgtgttaaacaaacaggatatcagcacatcattagaacgggtttcagcgttggcagatgtgttacttacgggcgcataccactggatttatcaacatttggccattcgctatggcacgccacaaaacaacggcgaagatatgcacatgtatattttaggcatgggcaaactaggcggaaaggaactgaatttctcatcagacatcgacttaatttttagctaccctgaaaaaggtgaaacccaaggcggtcgaaagagcatagagcaccaacagtttttcactaaactagcgcaaaagcttattcaagcgctgaacaaaattactaacgatggacaggtttaccgggttgatatgcgccttcgcccgtttggagattcaggcccactggtaatgcacttcgctgcacttgaagactactaccaggaccaagggcgccactgggaacgctttgctatggtaaaggcccgggtgatcaacgacgacaactctgaagatgtaaaatggctaaatagtattttacaccccttcaccttcaggcgttacctcgacttcaccacccttgatgcccttcgcaatatgaaaaagttgatagcgaccgagattcgccg

SEQ ID NO: 254360 - DNA, 832 bp, Unknown
  Bacterial polypeptide expressing nucleotide sequence isolated from the Sargasso Sea
agcttctaaaggcagcgttttacatcattatcgcgccgaggtttcaaaacgcttagaaggcgtcaaaactgaagatgagctgttgtcagcgttaagggagtgcagaaatactgagatggcccgaataacctatgctgatgtgctaaataaacaagctattttaacctctctcgctcaagtctccgcccttgccgatacactaatagttgccgcctataattggctatataaagatgcagtagcgcgatacggcacacccgtatcaactcatagcactgggcttttttcaaaagacggctctaaccaaaatacaaactcagaccaaagtacaaactcagaccaaagtacaaactcagaccaaagcacagcaccctgccccgcacacatgtatattttaggtatgggcaaactaggtggtagagagcttaacttttcttccgacattgaccttatttttgcctaccctgaaaaaggcgaaactcaagggggtcgaaaaagtattgaaaaccagcaatttttcaccaagctagcgcaaaagctaattcaatcactgaataaaataacaaccgatggacaggtgtaccgcgtagatatgcgattgcgaccctttggcgactcggggccgctggttatgcactttgctgctatggaagattattatcaagaccaaggccgccattgggaaaggtttgcaatggtgaaagcccgcattatcaatgatgataattctgacgatgcacaggcacttaaagatatcctcaaaccctttacctttcgccgttacctcgacttcacgacgcttgatgccttgcgcaacatgaaaaagttaata

SEQ ID NO: 254361 - DNA, 847 bp, Unknown
  Bacterial polypeptide expressing nucleotide sequence isolated from the Sargasso Sea
ggatggtcaggtatttagggttgatatgcgccttaggccatttggtgaaagtggcccgttggtcatgagttttaacgctattgaagattattaccaagagcaagggcgtgattgggagcgttacgccatgcttaaaagtcgtttaattggtaagcccaatcattattgggatgaatttaatcaattgcttaaacctttcgtatacagacgctatattgatttttcagttattgaatcgcttcgtaaaatgaaactcatgattgcgcaagaagttcgccgtaaacgtttaaccaataatataaagctgggagctggcggaatacgagaagttgaatttattgttcaggcactacaaatggtacgcggcgggcgagaggctaatttacagacacaatcattacttaatgcgttaaaacagttagcactaaaccaagttattgatgacgacgaagcaaaagagctgaaaggtaattatctttatttacgaaaagtagagcaatacctgcaaatattcgacgaccagcaaacgcaaactttgcctgatgatgaaataaaccaacaacgattaaattacctattatcgcaatcagactttgcagggtcagtaaatgaaattgagcaggtaatggcgcaggtgcacaatgagtttattcaggtaataggggaagaaacagagcctctagacacgtgtgaaggtgcatttataagtgcgtgggatcattgtgatgtcagttttttaaatgaacctaaagacgaatggcaagagccactgcaagactttaaattacgtttatctaaagtaaaagttgaaatcgagggcgtgagattcttgataaactcatgccag

SEQ ID NO: 254362 - DNA, 835 bp, Unknown
  Bacterial polypeptide expressing nucleotide sequence isolated from the Sargasso Sea
gatgttctttcacagataataattgaatgtgaaaaaaagatacagactaatacactctcctcccttcggacggcaaaacggcgtgccatacttttaatttgtttagcggattttggtgctttgatagaccttcgtgatgttacaaggtcattatcagtttttgccgaaaatatattaaaattagtcatggatctcttcgtttacaatgagtttcaaagatccgattgtaaattattttttagaaattctgagaactatccaatcgcaattcattcctcagcttgttctgttgggtttacttgcttgggaatgggtaaattgggatcgaatgagttaaattactcctcagatattgatctaatttttgtgtttgatgaggaaagatttaaacctgagtgctattctagaattagaagtgtttttgttaccatcgtgagacaagttataaaagccttatcggaggtcacctctgatggatacgtattcagagtagatcttagattacgaccagatccctctacaaatcctgtttgtatcggagcaatggcagcccaacgatattatgaaaactttggtagaaactgggagcgggcagcccttgtaaaggctcggtcgattgctggtgatatttcgaccgggagaaagtttttagactcactacaaccgttcatatggagaaaatttttagatttcgctgcaattgaagatattaatttcattcggacaaaagttcgcaaaagaaatccaagagttattaagtccaatcttctaggttataatgttaaaacgggcaggggtgggataagagaaatcgaattttttgttcagactcaac

SEQ ID NO: 254363 - DNA, 928 bp, Unknown
  Bacterial polypeptide expressing nucleotide sequence isolated from the Sargasso Sea
ttccttgctttccgaaatcctgggacacgtgaacggatgctggacatcctgtaccactcctcgtgggttactgaccgtctgattgaaatgccggtcctactagatgagttgcttacgcttgaggtaagtgaggccatcttatcgcgtgagatgattacccaagaattgaatatgcgaatgctcagagttgatccggatgacacggagcgtttgacagaggtcatggtgcagtttgccaggggccttgcgttccgagtggcggtgtttgaggtacgagccgaaatccccctgatgcaagtttccgatcaactgacctggatcgcagaagcgatcgttagcgaggttttgcggtatgcgtatagcgaaattgcaaccaagcacgggcaacctgttcgcattggagccgatcgtgaggatgctttgggattgtcgatactcggatatgggaagcttggcggcctcgagatgagttatgagtcagatctggatttggtctttgtgcatggtatagaccctgatcagttaacagatggtgcaacgccagtcgagggcggtttattcgtaaatagggtcgtacgtcgagtgattgcgttgcttgagaccaatacacgatttggtcgactatacgatatcgatacacgattacgaccctcggggcgctcagggttgatggttgttggcatcgatgcgttaaagaaatattttgacgaatcggcctggacatgggagttacaagcatttgtgcgggcaaggcctgtcgctggagacacattacttggtaacaagctagaattgttaaggatggagattcttcgtcaaccgaggatgcttgactcattattacgcgatgttgtcgacatgcgtgagaaaatgcgtggccactttggttccggtgttaacgaaacagattttgatctaaagcatggcc

SEQ ID NO: 254364 - DNA, 932 bp, Unknown
  Bacterial polypeptide expressing nucleotide sequence isolated from the Sargasso Sea
tccgaataccctgtatcaacctaccgcgacggacgcctaccgtgatgagctgcgccagtatttgctgcgtgtgccggaagatgacgaagagcagcaactggaggcactgcgccagtttaagcaaacgcagctactgcgtattgccgcggctgatatcgccggtacgctgccggtgatgaaggtgagcgaccatttaacctggctggcggaagcgattattgatgcggtagtccagcaggcgtggacgcagatggttgctcgctacggccaacctacccatcttggcgaacgtgaggggcgcggttttgccgtcgtcggctatggcaaactgggtggctgggaactgggttacagttcggatcttgatttgatcttcctgcatgattgcccgatggacgtgatgacggacggtgagcgtgagattgacgggcgacagttctatctgcgtctgtcgcagcgcattatgcaccttttcagcacccgcacctcgtccggtattttgtacgaagtggatgcgcgtctgcgtccatccggcgcggcgggaatgctggtgacatcaaccgacgctttcgccgattaccagcgcaacgaagcctggacatgggagcatcaggcgctggtgcgtgctcgtgtggtatatggtgacccgcagttgacctctcagtttgatgcgattcgtcgcgatatcatgaccctcgtccgtgatggaaaaaccttgcagaccgacgtgcgtgaaatgcgtgagaaaatgcgcgcccatttgggcaataagcatcgggatcgttttgatattaaagcggatgagggtggcatcacagacattgagtttattacacagtatctggtgttgcgctatgcgcatgaaaaaccgaagctgacgcgctggtcggataatgtgcgcattctggaattactggcgcaaaacgacatta

SEQ ID NO: 254365 - DNA, 717 bp, Unknown
  Bacterial polypeptide expressing nucleotide sequence isolated from the Sargasso Sea
cgcagttcttcacccgtctgggccagcgcatcattcacctgctgaccacccagaccacctccggcgcgctctacgaggtggacatgcgcctgcgaccatcgggcgcagccgggcttctggtcagctcgctcggcgccttccagcgctatcaggaaaacgaggcttggacctgggagcaccaggcgctggtgcgcgcacgggtgctggtgggatgttcacgcctggccggcgaattcgctcgcgtgcgcgccgaggtgctcggtcgtcagcgcgatatcgcggcactgcgcgtcgaggtcagcgagatgcgcgcgaagatgcgcgacaaccttggcaacaaaaataccgcagccggaacggcgccgaatgccttcgaggccacgtcctccttcgatctgaagcaggacgccggtggtatcgtcgatatcgaatttatggtgcaatacgcggctctggcctggtcgtggcaacacccgcagctactcgagttcaccgataacatccgcattctggaaggtctggagcgggtcggtctgatgagcgccgaggatgccgcattgctgcgcgaggtctacaagatctatcgctcggctgcccatcgccaggcgctgcagaagcagcctggggtggtgccgggtgatcagttccaggatgagcgccgcgccgtgatgcgcctgtggcgtgaactggggcttgagttgaacaatggggcctgag

SEQ ID NO: 254366 - DNA, 869 bp, Unknown
  Bacterial polypeptide expressing nucleotide sequence isolated from the Sargasso Sea
gcccgtcgcgtgcgtcagtgaccagctgacctggaccgcagaggcctgcgtgaacagtgcgctcgatctggcctggtcggaactgacgactcgctacggcaccccctgctgtgatgacggcggcaacaggcgcgagaccggctttgcggtcattgcctacggcaagatgggcgggattgaactcggttacgggtcggatctggatctcgtttttctgaatgattccaccggcagctcgcaacagaccaatggtgagaaatcggtcgaaaacaacgttttttatacccgcctcgcccagcgtttcatccacatcctgagtaccacgacgccgtctggcacggcctatgaagtcgatacacgtttaaggccgagcggtaatgcgggcatgatggtttgcccaacgccggcgtttcaaagctacctgacagagcaagcctgggtatgggagcaccaggcgctggtgcgcgcgcgcggcattgccggccagtgcgaagtcattgccgagttcgatcgcatccgcaacgaagtgctgcgccggccccgggtcgaggcagacctcaaacaagcaatcgtcgagatgcgcaagcgcatgctgggcgaggtcgaccgcggtgacgactcacatttcgatctcaagcacggtgtcggtggtattactgatattgaatttatggtgcaatacgccgtcctgcgttgggcggcgcagcacgacgcactgctcgactggaccgacaacctccgtttactcgaaaccatcgctgaactcgagctgttaccagcagccgcttgcgacgagctacgcgacgcctatttcgcttaccgggcgcagattcatcgttcggcgcttcaacaatcgacgccctggtgcc

SEQ ID NO: 254367 - DNA, 880 bp, Unknown
  Bacterial polypeptide expressing nucleotide sequence isolated from the Sargasso Sea
gtaagcgatcacttaaccgcattggcagaagctatagtcgagcaggccgtaaacattgcatggcataacacggtaaagcgctttggcatgccgccaaacactgacaatgaacacaagggttttgccgttattgcctatggtaaaacgggtggttttgaagtgggctacgactcagatttagatcttgtgtttgttcacaatcacgatggctcgagtcagaccaatggcgataaagcgattgattctcgccagttttatttaaaacttgcccaacgtttaatgcacttatttaatacgcgaacggcgtcgggtattttatacgagttagatacacgtcttcgcccagagggggcttcgggtttacttgctatcaatttagagagctttaatcactatcaacaaacacaagcgtggacatgggagcatcaagcgctggttcgtgctcgtattattttgggtcaaaatgagttagaaaaacgcttttcgcaaatacgtaaaaatatactttgccaagcgcgtgaaacggctgtgttaaaagatgatgtcattaaaatgcgagagaaaatgcgtggccaccttgcaaaaggtaacacgcagttatttgacctaaaacaagatgctggtggcatggccgacattgaatttattacgcaataccttgttcttaaaaatgcacacgatagcgagcaactaagcttattttcagataatgtaagaatacttactgatgctgctaaaataggctgtattacaaaagagcaaaagcagcagttaattaaagcgtatattgactaccgttcgtgttaccacgtactcagcttagatcagaaaggaaagttagttgaacgcgagcagtttttacaagacatcactaatgtga

SEQ ID NO: 254368 - DNA, 750 bp, Unknown
  Bacterial polypeptide expressing nucleotide sequence isolated from the Sargasso Sea
ggctggagcttggttatggctcagatttagatttggtatttttacatcagtgcgacgcaaataccgaaacatcgggtgacaaagccattgattcacgtcagttttatttaaagctggtgcaacgcattctgcatttgtgtaccacccgcaccgccagtggtgtgctttatgatgtcgacaccaggcttcgaccgtctggcaatgccggtttgttaacagtccacatcgaaacttaccgtgattatctgttgcaggatgcctggacctgggagcatcaggcattggtgcgcaccagactgatttatggtgacagcgccattgcagctcgttttgaacaggtgcgcgcagaagttctgggtaaaacccgtgatatcagcaaactcaaagatgaagtgttgtcgatgcgccaaaagctcagggagcatcatggggtggataataccgaagtaaaacacaccgctggtggtgtggtggacctggagtttatcagtcagtacctggtactggcttatggcagccaatatccggcgctttacaagtacagtgacaatatccgtattctggatgccgccgctgcctgtggcattttaccgcccgaacaaacggcggcgctgcaacaggcgtatcaggatttgaggggcgttagccaccggctgacattggagccggcagatctgaccgatctaccggatcttagtttggcgttggcgcaggtgcaggtgcggtggcaacaggtttttgcaacctgat

SEQ ID NO: 254369 - DNA, 888 bp, Unknown
  Bacterial polypeptide expressing nucleotide sequence isolated from the Sargasso Sea
cgtatccgatcagttgacatggattgccgaagcagtggtttccgaagtgctgcattacgcctatcgggaagttgccaacaagcatggccatccgagggccaatgcaactaaaggtgacaattggctcggtttatcggttcttgggtacggcaaattaggtggcttggaaatgagctacggttcagaccttgacctggtgtttgtccatggcatcgattccgagcagatgacagatggcgatgtcgcgattgagggtggtcttttcgttaatcgtgtcgtgcgtcgtgtcatcgcgctgatcgggacgaatacgcgatttggacgcttatatgaaatcgatacgcgactcagaccatccggtcgctctggcttgatggttgtcggccttgatgcgctgaagaaatatctcgatgagtcggcttggacctgggagttgcaggcgtttgtcagggcacgaccggttgccggagatcgattcctgaatacaaaactagagacacttcgcttcgagattttacgaaatgctcgtgagccaaccgaagtgttaaacgatgttgttgaaatgcgtgaaaaaatgcgtgcgcaccttgggagtaaagcgggcgatgtcggttttgatttaaaacacgatcggggaggtatcgttgatatcgaatttatggtgcaatatcaagttctagcacatgcggaaacacacccagggcttgcgacttatacggataatattcggcagctcgatggactttcggattcagggtgtatttccacagtagatgcagatgcgctgaaaacagcttatgtccgctatcggacgttgaaccatgaggcaatcttagccggtcgcaatggccgtgttgaatttgcagaggttgagaacgaacggcagtt

SEQ ID NO: 254370 - DNA, 1120 bp, Unknown
  Bacterial polypeptide expressing nucleotide sequence isolated from the Sargasso Sea
tttggtatggcccactttagtcagaccggatttaacttcggagcagcatcaggatctgcaattactgctggcggttagtccttttttaagccgggtgatgcagcagcaaccagagctgattgctgtgctgctgaataaagatctattggctcagcctttaatacatctgaacccattgtctgagcttgctgagcaatccgaagctactgtatttaaagctttgcgccgttgccgaaacgcacaactggcgcaaattctggcggccgatattctcgctgtgaaatcgacagagcagtgcttgctggatatttcagctatggcagataacctgattaacagtgcttatcagtgggcttatcaggatgtagctactcagtggggccagcctttggatcagcaaggcaagcctatgcctttgctgatcttaggtatgggaaaattgggtggtggtgagctgaatttctcatccgatatcgacctgatttttacctatccgcacaacggtgaaaccagtggtggcagcaggtcggttgaaaaccagcagttttttaccaagttaggtcagaagctgatatccgctttgcatcaggtcacagctgatggttttgtcttcagagtggatatgcgcttgcggccttttggcgattctggtccgctggtgctgagttttgctgcgatggaagattattatcaggcgcagggcagggagtgggaacgctacgctatgctcaaggcgcgtattctgaaccctgactctgtgcatgcgcctgagctgaatcagctgctaaaaccttttgtttatcgccgctatatcgacttctccgctttggaatcgctacgccggatgaaacagctgatcgagcaggagaaccgccgtcgtaatcgcgtggacaatattaagcttggcgctggcggtatacgcgaagtggagtttgtggtgcaaactctgcagttaattcgaggcgggcgtctgcctgagttacagcaagtctctattttcaaagccttagaggctttgcaaagtcagcagctgttagagccacaacagtatcagcaattgcgacaggattatttgtggttacgtaaagtggagcagctgctacaaggtttggacgatcaa

SEQ ID NO: 254371 - DNA, 2794 bp, Unknown
  Bacterial polypeptide expressing nucleotide sequence isolated from the Sargasso Sea
gatgactgacgccacactcctgagttccagctattcacattatgcggcgcgtgccgcggcggcccgtccgcaaatcgtggcacaggtcgcggcgctcgcgtccgcgcctctcacgcgcgagcggatcgacgcgcgctttgacgcgctgtgcgccgagggcgccgacgcgggcggcggcccgttgagcgaggatgcactcaaacgggccttgcgccggttgcgcaccgaagtattttgcgccgtgatggagcgcgacctggcgggcgaggcggacgtcgccgaagtcaccggcgcgatgaccgatctggcggagacgacgatccagcgcgccctggcggttgtgtcggccgaactcgaagcgctttacggcgaaccgcgcggaccgcagggcgagcgccttgcgctcggcgtggtcggaatgggcaagctgggcgggcgtgagttgaatgtgtcgtcggatatcgacctgatcttcgtctatgaagaagacggcgagaccgccggcggtcagcgttcgccaatcgcgacgcaggacttttttacacggctcggtaagcgcctgatcggcgcgctggccgaagtgactgccgacggttacgtattccgggtcgatatgcgtttgcggccgaacggcgattcagggccgctcgtgtgcagcctcggcatgctcgaagaatatttctacgtgcagggccgcgagtgggagcgctatgcgtggatcaagggccggctcgtatccgaaggcgcgagcgaggccgccgtgcggctgcagaagcagctcgacgcgatcgtcacgccgtttgtctatcggcgttatctcgacttcggcgtgatcagcgcgattcgcgcgctgcatttgcagattcgccaggaagcgcagcggcgcgcctcgatgcggcccgacaaggccgacgacatcaagctgggccgtggcggcatccgcgaaatcgaatttagcgcgcaggtatttcagctgattcggggcggccaggatgccggcttccgggtgcgtccgacgctcgccgtcttgcggcatgcagcaacgcaggggctgatcgatacgtcggtttgcgtgaaactgtcgcaggcgtatcgcttcctgcgcgaactcgagcaccgcctgcaataccgcaacgacgcgcaaacccatgcgatgccggtcgatcccgaggagcgcgtggcgctcgcgcacgccatgggctgcgacgattatgctgcgctgatgctcaagctcgacgcgcaccgcgagttcgtcgagcagcagttcgaccagattttcgccgacaaggtgagcggccgcgacggttgcggcgcacgggaagacggcgcggcgacctgggtctggagcagcgcgctcgccgacgacagcgccgacgaagcgctgcgcgcgcgcctgattgaactgggcgtgcccgagccgggcgaactgctggcgcgtttgcgcgcggtgtggcagtcgtcgcgttacgcggggcttgccgaacgcagccggcagcgcttcgacatcgtcgcgcagcgtgcgctggaagccgcgcagacgctggagccgcccgaacggcgcggcgatacattggcgcgcctgttcgacctgctcgaagccgtgagccggcgcggtgcgtaccttgcgctgctaacggaatatccacaggcgctgcatcgggtgctgtcggtgctgggcggctcgcgctgggctgccggttacctgatccgccatccgcaattgctcgacgaacttctcgacgacgaggcaatggacagtccgttcgactggcccgaattcaagcgcacgctgcgtttgcgtctggccgcggcggacggtgtcgagcaacagatggacctgctgcgccacgcgcaccaagccgaggtgttccgcatcctgttgatcgatctggccggccggctgagcgtcgagcatgtgagcgaccgtttgtccgaactcgccgacgcggtgctcgacgtcacgctcgaagcggtctggaagcaactggccaaacgccatcgcgaggtgcctaagttcgcggtgattgcctacggcaagctaggcggcaaggaactgggttacgcgtccgacctcgacgtcatcttcctctacgacgatccggacgatgccgccgccgacgtctatgccacctacacccgccgcctcatcacctggctgacgacggccaccggcgcgggtaccttgttcgatgtcgacttgcggttgcggccgaacggcgagtcgggtctgctcgtcaccgatctggatgcgttccgccgctatcaattacgcgaaggcgacgccgccaataccgcctgggtgtgggagcatcaggcgctgacccgcgcgcgctactgcgcgggcgacgctgaaatcggcgcgaaattcgaactgatccgcgagcaggtgctgaccacgccgcgcgaagccgcgccgcttgcgaaggaaatcgtcgaaatgcgcgagcgcgtcgaggcgggccacccgaaccagacggcgctgttcgacctgaagcacgatcgtggcggcatggtcgatatcgaattcaccgtgcagtactgggtgctgctgcacgcggcgagcgatccggaactgatccgcaataccggcaacattgcgttgctgcgcgaagtgtcgcgcttcggcttgatgagcgaggaggaagcggaaacggtcggcgcggcttaccggacctaccggaagttgcagcacaagctgcgtctcgacgggatggagaaggctcgggtcgatccggccttggtggtgactgagcgtgaagcggtgctggggctttggaagcgggtgttcggctga

SEQ ID NO: 254372 - DNA, 2905 bp, Unknown
  Bacterial polypeptide expressing nucleotide sequence isolated from the Sargasso Sea
cctgccccgcgacgccgcgccgagtccatggagccggtcgggagcggggcgcgtgtgcgtttcccgtgccggccggccgttccgccaggcccgcttctcgatgaccgacgcttccgccctgatctgcacgtcctattcccgttacctggcccgagcggccgccgcgcggcccgcgctggccgaacagatcgccgtgtgggccgccgcaccgctcgcccgcgcgcagcaggatgcgcgcctcaccgaactgctcggcacgccggccgccggcgcggctgcgccgaccgaggagcaactgaagcgcgcgctgcggcaactgcgcgccgaggtgtttggcgcggtcgcggagcgcgacctgcgcgggctcgccgacgtcgccgaagtgacgggcgcgatgaccgatctcgccgaggtgtcggtgcagcgctcgctcgcgctgctgtcggccgagctcgaggcgctgtacggcgagccgcgcggcgccgacggccagcgcgtcgtgctcggcgtggtcgggatgggcaagctcggcggccgcgagctgaacgtgtcgtcggacatcgacctgatcttcgtctacgaggacgacggcgagacgaccggcggcacgcgttcgccattgtccacgcaggaatacttcacgcggctcggccggcggctgatcggcgtgttgtcggaagtcacggccgacggctacgtgtttcgcgtcgacatgcggctgcgtccgaacggcgattcggggccgctcgtctgcagcctcggcatgctcgaggaatatttctacgtgcagggccgcgagtgggaacgctacgcgtggatcaaggggcggctcgtgtcggagggcgaaagcgacgcggcgcaacggctggcgtcgcaactcgagtcgctcgtcaagccgttcgtataccgccgctacctcgacttcggcgtgatcggcgcgatccgctcgctgcaccagcagatccggcaggaagccgcgcgccgcgcgtcgatgcggcccgacaaggccgacgacatcaagctcgggcgcggcgggatccgcgagatcgaattcagtgcgcaggtgttccagctgatccgcggcggccaggatgcggagttccgcgtgcggccgacgctcgcggtgctgcgccatgcgcaggcgcgcgggctgatcggcgaggatgtgcgtgcgcgcctgaccgatgcctacaattttctgcgcacgctcgagcaccggctgcagtaccgcaacgacgcgcagacgcacgcgatgccggtcgagcccgacgaacgcgcggcgctggccgcgtcgctgggctttgccgactacgcggcgctgatgacggtgctggacggccaccgcacgttcgtcgaagcgcagttcgaccagatttttgccgacaaggcgagcggcgcgccctgcgcggccggcgacgacacggcagccgcgtggatctggagcggcgcgctggccgacgacggcgaggacgacgcgctggtcgcgcgtctcgacggcctcggtttcaaggatccggccaccgtgctcgcccggctgcgcgcgatctggcagtcgtcgcgctacacgggcctgccggaaaagagccggcagcgcttcgacagcgtcgcgcagcgggcgctcgacgccgcgccgaacatcgacgccgcgcgccgcgacgacacgatcgtgcgcctgttcgacctgctcgagacggtcagccggcgcggtgtctatctcgcattgctgaccgaatatccggccgcgctcgaccgcgtgctgtcggtgctcggtgcgacgcgctggggcggcggctacctgatccgccatccgcagctgctcgacgaactgctcgacgacgaggcgatcgcgagcccgttcgactggcccgcgttcaaggacgcactgcgcgcgcgactcgccgcggccgacggccccgagcaacagatggacctgctgcggcacgcccagcacgcggaggtgttccggatcctgctgatcgatctggccgggcaactgtcggtcgagcacgtgagcgaccggctgtccgagctggccgacgcggtgctcgacgtgacgatcgaagtcgtctggtcgcagctcgcgaagcgccatcgcgacgtgccgaagttcgcggtgatcgcgtacggcaagctcggcggcaaggagctcggctacgcatcggatctcgacctgatcttcctgtacgacgacgccgacgagcgctcggcggacgtctacacgaccttcacgcggcgcctgatcacgtggctcaccacggcgaccggggcgggcgcgctgttcgacatcgacctgcggctgcggccgaacggcgaggccggcctgctcgtcaccgatctcgacgcgttccgccgctaccagctgcgcgagggcgacgccgcgaataccgcgtgggtctgggagcaccaggcgctgacgcgtgcccgctacagcgcgggcgacgcgcagatcggcgcggacttcgaggcgatccgccagcaggtgctgacgacgccgcgcgacggcggcgtgcttgcgaaggaaatcgtcgacatgcgcggcaaggtgttcgccggccacccgaaccagaccgagctgttcgacctgaagcacgatcgcggcgggatggtcgacatcgagttcatcgtccagtactgggtgctgctgcacgcgtcgagcgatgccgagctgatccgcaacacgggcaacatcgcgctgctgcgcgaggtcgcgcgcttcgggttgatgggcgaggacgaggccgagcgggtgggtgcggcgtaccggaagtaccggaagctgcagcacaagctgcggctcgatggcatggaaaaggcgcgggtcgatccggcggtggtggccgacgagcgggccgctgtcacggcgctgtgggagcgcgtgttcggggcggttgaaacggatagttga

SEQ ID NO: 254373 - DNA, 2911 bp, Unknown
  Bacterial polypeptide expressing nucleotide sequence isolated from the Sargasso Sea
catgacaaacgtaaaacttgccgaaaaattttggcagcagttgttaacagcgccagcaattagcgatagtgacagagccgttattgaggctcattgtgaaaaactaatgctctccttcacgcgctcctccttcttggctgagacattgattcaaaacccttcatttgtttctcgcatcgttgagcattatcaaccccttgagaaaagtgaaacgcttcaatctcttggcaataccatgtcatctgactatctcgcaaacctagacaatgaattgcacaccgtcgctagcgaagatgacttactgcaagtgttgaggaaatttagaaataaagagatggcgcggattactttcctcgacgttttgaacaaacaacccatcgaaatatcacttattcaggtttcagcattagctgatgtacttattaacggtgcgtaccactggctttatcaacatttagctgcgcgctatggaaaaccacaaagccataaccaagacatgcacatgtatatcttgggtatggggaaattaggaggaaaggaactcaacttttcttctgatatcgatttaatttttacgtacccggaaaaaggcgaaacccaaggtggtcgaaaaagcgttgagcatcagcagttttttaccaaactcgcgcaaaaacttatccaagcattgaacaaagtgactaatgacggtcaagtctaccgcgttgacatgcgtttacgcccattcggcgattctggcccccttgtgatgcatttcgcggcacttgaagattattatcaagaccaggggcgacactgggagcgctttgccatggtaaaagcgcgggtgattaacgatgataattcgcaagatgtgaaatggttaaagagcattttgcacccgtttactttccgtcgttacttagatttcaccacattagatgcccttcgtaacatgaaaaagctgatcgccacagaaatacgcaggcgcagactgagtaacaatataaaactcggcgcaggtggcattcgtgaagtggagttttttgcccaaagttttcagctgattcacggaggacgagagccagcattacaaagtaagtcattacttcgcacgttagacgcattaactgaactcgatatagtcgaacgcgacgtaacgcaacagctaaaaagtgactatctattcctaagaaaagtagaacacacgcttcaacaagcacaagatcgccagacccagactcttcctgagttaccttggcaacaagctgcgcttattgaagtcatgggttttgattcttacagtgaatttttagtgcatttagatactgtaatggcgcgtattcatgcccatttcaacgagttagtagaagagtctcatgacacgcactcagaagaagaccagcttttcactgcctgccaagatgcgtggcgtcttgcattgcaagaggatgagtttactgaaacctttggcgaatacctgtctgccagcgatattaaaggcatatattctattcttgtcgccttcaaggataagcaacgcaattatcgcataggccaaaaaggtgaagacacgttaaataaattgcttcccgaaattttgtatgtgctcatcaaccaacatccaaactacatcccacaagtactcgaccgtttactcggtgttatagaagcgattactggccgaaccacttacctcgacttactacttgaaaatccggatgtactaaaacagttagtaaggctatgtgaacgaagcgactggattgctcaagaaattaagcgcttcccgttactattagacgaattactcacgccgttatacctcggtcagcaaaataccgatatccataccagcaagcaggaatatcagctggaactgcgtgaaatcatgcttcgtattgaacaagacgatgttgaaatgcttatggatggatggaggcagttcaaactttgccaacagcttcgcatagccgccagcgacatcagtgaatcactacctataaacaacgtgagcgataagcttacggtgctagctgaagtgatattggagaacgtagtagatgctgcctggatgcaaatgcaacagcgctatggcgttccagcacacctagagggaactgacaaaggatttgccgttatcggctatggaaaactaggcgggtatgaattaggttacggctcagacttagatttagtgtttttgcataatgctcctcgcggcataagtacagacggcaagaagtctattgaagcgcaacagttttacattaagttggcgcagcgcatcatgcatcttctcaatacgaagacgttgtttggacaattatacgaaaccgacttgcgtctacgcccttctggaaatgcgggattgttatgctgccatatcgatggtttcgagaaataccagaccgaagaagcatggacttgggaacatcaagcgctggttcgtgcaagagccatttgcggagcccctcgccttttgaatgacttcacgcaggtaagaagttccatactaactcgctctagaaacgctaaaacgttggctgacgatgtgtgcaaaatgcgtttaaaaatgcgggaacacttgctttcaaaggagaacgacaaggtagacttaaagcagtgtgtaggtggtattaccgatattgagttcatggctcaatatcttgtactcgctaatgcaaagtcacaggctgccatgacagaatatcctgacaatcttcgcatttttgacgccgcagctaagagcaacattattgatgtcgccactgcgcacaaactgcaaaaggcgtatttaaagctgcgagagcaataccaccatttaacgttagctgataccaagtacgcagatcagagcgaagaactagatgccatacgagaacaagtaaccattcactggaatacactatttggcacgtgtagcggctag

SEQ ID NO: 254374 - DNA, 2824 bp, Unknown
  Bacterial polypeptide expressing nucleotide sequence isolated from the Sargasso Sea
gctggcccagcgccattggcaacggctgattgaactggcccccgactacggcacgcagcccgagccggtgcaccagaccctgctgaccctgctcggcctctccgattttgtcgccgactccctcttcaaacagcctgagttgctgaccgagctgctcgcctccggggagctggagcgctccgagcgctggcccgcctaccagagcgatctgaccgcattgctcgccgaggtgagtgatgaagaggcgctcaagcgcatcctgcgccagttccgtcgcagccgcatgctggtgatcgcctggcgcgagctgctgggtcacgcggcggtggaagagagctttgtccacctcaccagactggcggatgccctgatctgcgccgcccgcgactggctctacgccaagcagtgcggcgagctgggcacacccatggatggcgacggcaacccgcagccgctgctcattctcggcatgggcaagctggggggcggcgagctcaacttctcctcggacatcgaccttatcttcaccttccccgagaacggctacacggtcggcgggcggcgcgagctcgccaaccagcaattcttcatcaagctgggccagcgcatcatcaacgccctgcaccagagcacggtcgacggccaggtgtttcgggtcgacatgcggctgcgcccctttggcgacgcggggccgctcgccatctcgtttgccgccatggaggattactaccagcaccacggccgcaactgggaacgctacgccatggtcaaggcgcgggtgctggggccccagtgcgagcacgcgttcgagctggccgagatgctgcgccccttcgtgtttcgccgctatatcgacttcggcgtcatcgacggcctgcgccagatgaaggcgatgatcgccgccgaggtgcgtcgcaaggggctggagggcaacatcaagctgggggccggcggcattcgcgaggtggagtttatcgcccaggcgctgcagctgatccgcggcggtcgtgaacctgccctgcgggtgcgccatctgccggaggcgctggccgccatcgcccagtgcggcgccctcgagtccgcccattgcgagcgcctgctgacggcctaccgcttcctgcgccgggtcgaaaacatcttgcaggagatcggcgatcagcagacccagaccctgcccaccgaggagcgggatcgccagcggctcgtcgccgccctcggctttgctgactggggcgccttcatggctcatctggacgaggagatggcggccgtccatcaggagtttgccgccgtggtgggggaagagaaagaggcccccgcccatctggagcagctctggctcgatctatggcgcaccgagctcgacgccgccgaattggagcagctgctgaccgcgcagggggtggccgagcccgttccgctctgcggtgccctgctgcgtttcaaggaggagtacaagcgccgccaggtggggccgcaggggcgcatcgcgctggactggctgatgccggaactgctgcgactggtggtcgccagcgagcaacccgcccgcctgttcgagcgggtgtgcgagctgctgacccgcatcttcacccgcagcgcctatttgcagctgctggcggagaacccgggcgccctgcgccagctggtgcggctgtgtgacgccagccatctggtgagcgagcagctggcccgctaccccatcctgctggacgagctgctcgatccccagcacctctatcaccccaccccgctcgatcagtacaagccccaactgcgccagttcctgctgcgcatccccgaagaggacgtggagcagcagatggaggcgctgcgccagttcaagcaggtgcaactgctgcgcatcgtggcggccgacatcgccggcgccctgccgctgatgaaggtgagcgaccacctcacctggctggcggaggcgatcaccgaagaggtggtcaatcaggcctgggcccagatgagcgaacgctacggggtgccgcccgaggtggcggtgagcggccagcgcggctttgcggtggtggcctacggcaagctgggcggcatcgagctcggctacggctcggatctggatctggtgttcctgcacggcggcgaccccaacagctacaccgacgggcgcaagcccatcgatagccgccagttctacctgcgtctcgcccagcggatcctgcacctgttcagtacccgcaccccctccggcattctctacgagatcgatatgcggctgcgtccctccggcgactccggcctgctggtgtcgtcgctgtcggcctacgagctgtatcagcaaaacgaggcctggacctgggagcatcaggcactggtacgggcccgtccgatttatggcgatgaagcggtgatcgccgagtttgcctgcattcgccgcgccgtgctggccaaggagcgggatctgccgaccctggcccgcgaggtgcgcgagatgcgccacaagatgcgggatcacctgctgaaagccggcgccagcgagttcgacctcaagcagtcccccggcggcatggtggacatcgagttcatcgctcaatacctggtgctggcccatgcctgcggcgaacccgaggcgctcactcgctggtccgataacgtgcgcatcttcgatgagtgtgtgctggcgggggtgctgaccctggagcaggcggaggggctcaagcacgcctatctggagatccgcaacctcggccatcgcctcaacctctccgaggtctcccgcaaggtgggggacgacaggctgctgccggagcgcggccatgtgctggcggtctggcaacagctgctgggggaataa

SEQ ID NO: 254375 - DNA, 2959 bp, Unknown
  Bacterial polypeptide expressing nucleotide sequence isolated from the Sargasso Sea
cttgaggcatggcaatggtatcaaacctgatgtggcttcattctatatcatttatgacataatatgtcgacgtttaaatttgttagggattattatggccgtacaaaaagacagtaataagtcattgtctcccctcatcaatcaagccgcagagcggcattgggcacgcctcgccgaagtatggtcagaaggactggcaaatttaacgcctgcgcagcagcaggaactgaaaaacgttttaggattaagcgattatatcgcagcgcagttaactcggtcacccgagtggataaacactttattcgcgggcgatttgcagcaagtggagcggcagacctttgatgcccagttacacgaacagttaagtagtgcgacgactgaagacctcgcaaaacgtcaattacgccgattccgtaactatcaaatggtgcgtttagcctggcgagattttttagattacgccagcttagaagagtcactgttagacctctcggcactcgccgaagcgttggtgataggggcaagggattggctctataaggaaatgtgtgcccaatatggcacgccaatggataaggcgggcaatccgcagcctttgcttattttgggcatgggcaagctaggtgggcgtgagcttaacttctcctccgatatcgacctgatttttaccttccccgaacatggcgaaaccgtgggtgggcgccgaagcctcgataaccaacagtttttcatccgtatggggcagcggttagttaatttactcgaccaaattaccgtcgatgggtttgtgttccgcgtcgacatgcgcctgcgtccctacggcgagagtggcccattggtggtgagcttcagcggccttgaggattattaccaagagcaagggcgcgactgggaacgttatgccatggtcaaagcccgctcgcttgggccgtggaaccatttttccgacgaattacacagcttactgcgcccctttgtctatcgccgttatatcgacttctcggcgattgaatccctgcgcaaaatgaaacaactcattgcccaagaagtgcgtcgccgtcagttaaccgacaatattaaactcggtgccggcgggatacgtgaagtggagttcgtggtgcaaagcttccagctgatccgcggcggtcgtgaacccgccctgcgccagcagagcctatttggggccatggataccctttacagtctagggcaattcgaatacttagcggtcgatgagttaaaacacagttacttattactgcgccgagtcgagaacctgttacaggcaattgatgataagcaaacccagactctgccaaataaccccctagattgggcaagattgtgcgcagtgcttgatatgaccaacgaaaccgatcttcgtacccatattgaggcggcgatggcgaaaattcatcgccattttaaagccacagttggcggtgaagaaggtgaggaaaaagccgagcattggactgcgcagctgtggaatgtgcagcaggacgaccacgcagttaatctcctagccgagcagcagattgatgacgataaactttggccgctgctcagcagctggcgcgacacagtgacgaaacgctcgattggcccccgtggccgtgagaccctcgataaattaatgccaagattgctcgacgagttactcaatcagccgagtccttcagcggccttcgagccagtctcaaaggtgctggagcaaattctgacgcgcacgacttatctcgaattgctatgcgaaaatcccggcgcccgtcagcagctcgtgagtctgtgctgcgctagcccttggattgcggcgcagcttgctaaattcccgatgttgctcgatgagcttatcgaccctgcgcatctgtacgatacgacatcgctcgatgattatcccagtgaattgcgccagtatctgctgcgagtacctgaggatgatatggagcagcaaatggaggcactgcgccagtttaagttgtcacaacagctgaaaattgccgccgccgatgtgactggcgttttgcctgtgatgcaggtgagtgaccacttaaccttcttggccgaagccattatcgagcaagtggtgatgcaggcatggcagcaagtggcggtgcgccatggtgtgcccagttatcttgaggaaggcaacgacaccggctttgcggtcataggttatggtaagttaggcggtatcgaactgggttacggttcggatctggatttagtcttcctctacgaagcgcccgaaaacatggccaatagcctcaccaatggcgatcgaccgatagaggtgggtcatttttatttgaaactggctcaacgtattctgcacttattctcgacccgaaccacctcgggtgaattgtatgaagtggatatgcgcctgcgtccgtctggctcatcgggcttaatggtgagtgagattgcgcgctttggcgagtatcaaacgcaggaggcctggacttgggagcatcaagccttagtgcgttcacgttttgtgtttggcgataatagtttagccgctaaatttagccagatccgcgcctctgtgcttgagcaaccaagggaaaaggacgagctgaaaaaggccgtgcgtgagatgcgccaaaagatgcgcgaccatttactcaaggtcagtgaaggtgaattcgatctgaaacagagccccggcgggatcacggatattgagtttatcgcccaatatttagtgctcgctcatgcccatgagtatcccgagttgtcgatttggtctgataacgtgcgtatttttggggtgttggccgagcttgagcttttgccgctaatgagcgcgcagcacttaacccagagttattgctggctaagggatgaaaatcatcgcctcaccctgcaacaaaaagccggtaagttagcctacgccgatgtggaagaacatgctgaaagggtgatgaatatttatcgaaatatactcgaatag

SEQ ID NO: 254376 - DNA, 1186 bp, Unknown
  Bacterial polypeptide expressing nucleotide sequence isolated from the Sargasso Sea
ctctgagaatccgcctgcactacagcaactgctgatgttatgtcataaaagtggctggttggcagaacatctggcgcgttaccccttgttgctggacgagctaatcgacccatctcagctgtatcaggtaccggattcaacggattaccgggataaactacgccaaagtatgctgagggtgccaaccgatgatttagagctgcaaatggaggtgttgcgtcagtttaaacaggcacaacaactgcgtattgcagcggccgatatcacgggtattttgcctttgatgaaagtcagcgaccatctgacctttttagccgaagccattattgccgcagtagtggagttatcctggcagcaaatggcagaaaagtacggcttacctgcaggtttaaaaccagaagatgccaaagcttttgctgtgcttgcttatggcaaattgggtgggctggaactggggtatggctcggatttagatttggtttttgtccatcagtgcgacaatcttgcgccgactcaaggtgataaagctattgattcacgtcagttttatatcaagatggtgcagcgcatagtgcatatgtttaccaccagaactccaagtggtgtgttatacgatattgatacccgcttgcgccctgctggtaatgccggtttattggctgtgcatattgatacctatgctgattacctggaaaaagaagcctggacctgggagcatcaggctttagtgcgcagccgtctggtctatggtgatgataaaattgcacagcgctttaaccaaatacgcagtgaagtgttagccaaaccgcgagacttagctgtgcttaaagctgaagtcactgaaatgcggcaaaagctgcggcagcatcatggcgagcagtcgactgaagtaaaacatgcgtcaggtggcatagtggatctggaatttattagccagtacctggtgttggcttatggcagtcagtatgcggatttgtatttctacagtgacaatattcgtattctggatgcagccgctgccgctggtttgttgcagccggaacaaacccaggcgctacagcaggcgtatcagcaattaagaggggttagtcacagacaaaccctggatcctgctatcgaaaccgctcagcaattagaacaggcgatggagcaagtgcgcaaagtctgggagcagttatttagctaa

SEQ ID NO: 254377 - DNA, 337 bp, Unknown
  Bacterial polypeptide expressing nucleotide sequence isolated from the Sargasso Sea
ggatctgggtcgcggtggggggtgtctaatcgctgaaaccactacaggtgtagctccagagcgttttttgttccgtcgcgatccggctcgatttcggatcgattctttgatcgtttttggaccgccccaggagtggccaagagcagcccaagaccgccccaagaccccccaaaacccccaagagcagcccaagactcgccccaagacccccgaagaccgccccaagacgccccaagacctcccaaagaccaccccaagaccacccaagatcgccccaagatcgcccaagaccaccccaagacctcccaagatcgctccaagtccaagttttcattga

SEQ ID NO: 254378 - DNA, 291 bp, Unknown
  Bacterial polypeptide expressing nucleotide sequence isolated from the Sargasso Sea
attgctttctactcatcccagaagtccactagttaataaatctatatcaggacaatatccacccggttcaacctttaaaatgatagtggctttagcagctttggaagcgggaattattagtatgaaaactaaatttgtttgtaaaggacatttagaaattggagatatgaaatttcattgttggcgacataagtatggacatggttcagttaatgtttttaaggctattgcagagtcatgcgatgtgtatttttatcaattagctttaaaaactggaataaatagaattgc

SEQ ID NO: 254379 - DNA, 847 bp, Unknown
  Bacterial polypeptide expressing nucleotide sequence isolated from the Sargasso Sea
ctggcatggctaaagaaacgtttaagcgaactgcaagaaatccaacaaactgttgagctgcaacaagataagcaactgtctttaaccgatcctgactcacggttaatgaaaacaaataacttgaaccggcaagtctgttacaacgtgcaaactgcagtggacacgaagaatcatcttattgttgctcacgaagtcaccaacaccacagaccgtggccaactttactcggtcactaaattggctcaggaagctcttggcaaagtagacataaccgtactagccgacaaaggttattacagccgcaacgatattaaagcagtgctggataccggagctgtagccctggttccaaaaggtgatacctctggggctgatcgcaaaggtctttttaaccgttcattgtttaagtatgaccacgaaaaagatgtctatatctgcccagcaggtaacgaacttcaaaatcggtttacatccgttgaagatggcttggagcaacagatgtattttaactgtatcgcatgtcgcgattgcagtcagcgttcgaaatgcaccacatccaaagtggcagcgagacgcatgagacgctgggttcatgaagataaaatggaagttatgcaggcaaggctggatgcatcaccgcaaactgctcttgttcgcaagcaaacggtagagcatccgtttggaacgattaaaatgtggatgggggctactcatttcctgatgcggcgatttaaaaacgtcagtacagaaattagtttgcatattctggcttataacctgaaaaggatgatatccatctggggtgcggcaggattggtcagtaggctacaagaactctatggctagc

SEQ ID NO: 254380 - DNA, 640 bp, Unknown
  Bacterial polypeptide expressing nucleotide sequence isolated from the Sargasso Sea
ttggcccgcgtatgtgcggggtgcggtcaccctgggtcgatgatgtgcgatgagtgcgcggctctcctccagccgcgccctcgcttccgacgctctctcgatgtcggtgatctcgtcacgggtctgcgagttccactcgtctgctccctggactatcgcggaccggttcggcaaatgttgaacgccttcaaagatgacggccaacgaagcctcgcatcgtggctcgcgccagcacttctcgcttgtatcgatcacgctctcgtcgcatgcccacgcaccaatcaggtaccagcccttattcccgtacctacgcgccggtcaagtcggcgtcgccgggcatccgatcatgtggaacttctcggtacggccgtcgctcgaaccgatagccagtatcgaacacgtcgagtgcttcgtgacacgcgcagcgatccgggcagcaagtacttgaatgcggaagaccgttacgcgcgcgttcgagaggcttttgccgtgaagcgaattatcccttcaccaggaactctcgctatcctgatcgacgacatagtcacgaccggggcaaccgctcgcgaggcaacagcaaccctcgtgcttgcaggaatggacgtcgttgccgtcgcaaccatcgccggtactccctaaa

SEQ ID NO: 254381 - DNA, 400 bp, Unknown
  Bacterial polypeptide expressing nucleotide sequence isolated from the Sargasso Sea
atggcttttaatgattctttatcagatatgttggcaagaataaaaaatgctcatagagcaagaaaatctattacttcatgttataaatcaaatcttaatatgaatgtattgtcagtactaaaagatgagggctatataagagattttaaagatttagaaattagaaaaggaattaacacaatacaaattgatcttaaatattttaatggtaatcctgttataaaaaatattaaaagagtttcaaaaccaggtattagagtttattcaaaaatttcagatttacctaaaacatatggtggtctgggcatatcaattctctcaacaccaatgggtgttatgtcagacaataaagcaaggcaaaaaaatgttggtggtgaagtattgtgtgaggttttttaaa

SEQ ID NO: 254382 - DNA, 643 bp, Unknown
  Bacterial polypeptide expressing nucleotide sequence isolated from the Sargasso Sea
atgagcaagcataacaagcaagaaatggtagtgcgtcacaaactgttcgaccgcatctgtcattggttcattgtggccgtggggctagtcacgtttctgacgggcttttccttcttctatccctccttccaatggttgggcgcgatagcgggcacgccgcaattggcgaagtttattcacccaattgccggcctgatgatgtgtttaccgctgatgttgatgttggtgcgttattaccaccacaacaaatgggaaaaacacgatctggcttggatgcttgccatcaaggacgtgatgttcgagaacgaggaaaaaatcccgcctatcggccattacaaccctggtcaaaaagtgctgttccgtgccttcgtgctgacgtctatcaccttaaccgtgacgggattcatcatgtggcaaccctactttgcgccttacttctcggccactgtagtgggctgggcgatcgtgctgcatgccattagcgccttgatcatgctgatgtttgtgatggtgcacttttggatggcgacctgggtggaaggttctatcacaggcatgctttacggcaaggtctctaaggcttggtgccgtaaacaccatccgctgatgttggatgaacattcggacgtggagaaacattaat

SEQ ID NO: 254383 - DNA, 391 bp, Unknown
  Bacterial polypeptide expressing nucleotide sequence isolated from the Sargasso Sea
atgtcagatccgatagcagattttctaacccgaattagaaacgcccagatggcttctatggcaaatgtcgccagcccatcatcaaaaatcaaagttgagataagtaaggtactgcaggaagagggttatattagtggatttgctgttagtgaaatcgatgggaaaccagtaattaatattgatttgaaatacttcaacggtaaacctgttatcgaagaaattaagcgggtaagtaggcctggacttcgtaattatcaaggaaaagatgatttacctgaaaatcgagcggggttagggatagtaatcgtaacaacgaataagggtttgatgactgaaaaacaggctcgcgcagcagggattggtggcgaagttttgtgcacggtcttttgat

SEQ ID NO: 254384 - DNA, 397 bp, Unknown
  Bacterial polypeptide expressing nucleotide sequence isolated from the Sargasso Sea
ggcttttaatgattctttatcagatatgttggcaagaataaaaaatgcacatagagcaagaaaatcgattacttcttgttataaatcaaatcttaatatgaatgtattatcagtgctaaaagatgagggttatataagagattttcgtgatttagaagttagaaagggaattaactcaatacaaattgatcttaaatattttaatggtaatcctgttataaaaaatattaaaagagtttcaaaaccaggcattagggtttattcaaaaatttcagatttacctaaaacatatggcggtcttggcatatcaattctctcaacttcaatgggtgttatgtcagacaataaagcaaggcaaaaaaatgttggtggtgaagtcttgtgtgaggttttttaa

SEQ ID NO: 254385 - DNA, 715 bp, Unknown
  Bacterial polypeptide expressing nucleotide sequence isolated from the Sargasso Sea
gtctgttacaacgtgcaaactgcagtggacacgaagaatcatctgattgttgctcacgaagtcaccaacaccacagaccgtggccaacttcactcggtcactaagttggctcaggaagcactggttaaaaaagatataactgtacttgccgacaaaggctattacagccgcagcgatattaaagcagtgcttgataccggtgctgtagctctggttcctaaaggtgatacctctggcgctgatcgcaaaggtctttttaacctctcattgtttaagtatgaccaggaaaaagatgtctatatttgcccgacaggtaacgaactacagaatagatttatatcaattgaagacggcttggaactgcaaatgtattttaactgtatcgcatgtcgcgattgcagtcagcgctcaaaatgcactacatccaaagtggccgcgagacgcataagacgctgggttcatgaagataaaatggaagttatgcaggcaaggctggatgcatcaccgcaaacagctcttgttcgcaagcaaacggtagagcatccatatggaacgattaaaatgtggatgggagccacacattttctgatgcggcgatttaaaaacgtcagtacagaaattagtttgcatattctggcttataacctgaaaaggatgatatctatctggggaacggcaggattggccagtaggctacaagaactctacggctagc

SEQ ID NO: 254386 - DNA, 1060 bp, Unknown
  Bacterial polypeptide expressing nucleotide sequence isolated from the Sargasso Sea
atggaaacgcatcgttcgtggttcaggacacaggcggacgaatcgcccgccgcggacggcgctgacgcagcctcgtcgaggcgcgatctggtcgggcagttgctgatcgaatgcagcgcgatggcgcgctacgcgttgcagcacgggattgccgtcgcccccgacctgatcgcgcaattgtcgatgctgatggccggggtgccgcatgccgcggccgataccgcggtggccgatgcgtcgtcggtgcacggcgcatcgtacgcgcttgccgcgattcatcgccggcttgccgttgcgatcgcaccggccacgccgcaggccgtcacgctgctcgaccgcgaactgcgcgtccgctcgcgccttgcgtggttggggcccgtgccgctgattcgcgcgctgacgctgtccgccgcgacgttcctggtcgccgtgatcgcgacgtcgctgtcgccggaagtgtccgtcgcgaatatcgaccaggggtttctcgattcgcacggcacccaactgctgtggaatgcgctgttcctgctgttctgcgcggggctcggcgcatcgtttgccacgctgttccaggcgcatcgctacgtcgcgaattcgacctacgacccgaagtacgacgcgtcgtacggcgcgcggctgattctcggcgtgatcgccggcctgatcctggtcgagctgctgccgccgcacctgtacgacggcggcagcatgcgcagtttcggcaagccggcgcttgcgatgctcggcgggttttcggcgacggccgtgcatcggctgctgcaccggctcgtggagacgctcgagacgctcgtgcgcggcgataccgctgccgccgcgcaggcgacgttcgaagcgcatcgcgcccatgcggcgaccgagcgcgtgcaatggcaaagcgaactcgcggcggatctgctgcggctccagcaatcgcttgaagcgggcatgccgcccgatgcaatcaagcagcggctcgccgacttcacgcgcgcgatgctgtcggcggacgtgccgcaggcagggcgtcgcgacggcgcaagcgcaatcggggaatgac

SEQ ID NO: 254387 - DNA, 118 bp, Unknown
  Bacterial polypeptide expressing nucleotide sequence isolated from the Sargasso Sea
cagcgtcatcggcatcggggcaggagctcactacaccctctatgacgccggcagtgatcgcgttgatttcctcaaggctggcaccaaggctctggccaaaggccgtggctttgcctga

SEQ ID NO: 254388 - DNA, 421 bp, Unknown
  Bacterial polypeptide expressing nucleotide sequence isolated from the Sargasso Sea
cgttgaggccttgctacgcgctgtggatccttcccatctgcgctggctggtatcgctgcaatttggatttattgaattggattgcggcttaatccacggcagctctgccgacattggcgatgagctcacaccagagacgtcgccgttaatcctgattgatcggctcacaaggctcgacgtcaaccgtttgttcacggcacgaagtgcccaacaattccgccttgagctcaccggaggtggcatcgactcccgtgtcaaaggattgagcggagaacaacaacagcagcagcaggttcccaaccgcagcgtcatcggcatcggggcaggagctcactacaccctctatgacgccggcagtgatcgcgttgatttcctcaaggctggcaccaaggctctggccaaaggccgtggctttgcctga

SEQ ID NO: 254389 - DNA, 9649 bp, Unknown
  Bacterial polypeptide expressing nucleotide sequence isolated from the Sargasso Sea
atgaatggctatgcagcctcaattccttccaatgtcactatagactttaattcttctggttttattgagggtgctgatcatggatcaaatgtttttacacagggtgactttaaaataacttacagcgccgttaactggtttcaggatacggatgatggtcagagtaattctgccgggttatttgcaggtatgtattctggagttgaaacaattactgtcgaaaccacctcgggcaatgaatttgacttcgttagtttttacatcaatgcatttggtggtggttttgcctcggttgagggctttagagatggatcatctgtggggactcaaagttctgggtcaggctttggtcaggctaatggctcatttactgtaacgttaaacaacaatccctttgataatgttgacaaggtagttattacttcaaatagcagcggttattatgatgtatttgatagcttcgtatttaatacggttcctgatatcacccctcccactgtcagctctgttaattccagtactgcaaatggcacctacaaattaggtgatgttataactgttcaagtcaatttcagtgaaaatgtgaatgtgactggcactccacagttgacattggagacaggctcgacagaccgcacaatcaattacactagtggcacgggtacaagcacattaaactttaactatactgtgcaagcgggtgataccagtgctgatctggactacgtagctaccacctcccttacgctcaatggcggcaccatcatggatgccgcaagtaataatgcaaccctgactcttgcctcacccggtgcggccaactctctgggagcaaataaagccctggtgattgatggtgttgtgcccacagtgacctcggtcaattccagtacagccaatggcacttataaagtgggcgataacatcagtattcaagttaactttagtgaagtggtgaatgtcactggtacgccgcaattaacccttgaaacaggcacaacagatcgaacgattaattatgcgagcggtagcggttcaagcacacttacgtttagctacacaatccagtctggtgataactcttccgatctggattatgtcgcaaccacctcattgtcgttaaatggcggtaccattcgcgatgctgccaccaacaacgcaaccctgaccctggcctcacccggcgcagccaattccctcggagcaaacaaagctctagtggttgatggtgttgtgcccagtgtaacctcggtcaactccagcaccgcggatggggcctacaaagccggtgacgtcattagtattcaggtcaactttagtgaaaccgttacagtagacactggcggaggcacaccgcaactaaccctcgaaacgggggcgactgatcgtgcgattgattatgcaagtggcagtaatagcagcacgctgactttcaactatacgattcaggcgggcgacaactctgccgatctggattacgttggaataaactcacttgtgctcaatagcggcactatcagagacgctgcaaacaataatgcgaccttaacactggcgccccccggtgcggccaactccttgggcgcaaataaagcgctggtggtggatggggttgcgcccagcgtcatcagcattgcccctacaggctctccgattgctaatgccgcgagcatggattttgctgtgacctttgatgaatcggtcggtaatatttccaccgacgactttaccttggtcacgactgggactgcggctggttctataggcagtgtctctgcaacatcaggctccaatattaatgtcgccattaataccatctccggtaccggaactctcaagctgaatctcaatggctcaaccaatattgctgatgcggctggtaatggcattgcagcttatgtcgcaggcactgtccacaatgtcgaccgcgatgcccctgcggcgccgagtacaccggatcttgatgatgcctctgatacgggtgcatctaatactgacaatatcaccagcgacaataccccgactttcactggcactgccgaggccaatgccactgttacggtaatttcatccatcagcggtacgctaggcacaacggttgccgatggttcgggcaactggagttataccgcaagtgcgatggttaatggtatccacaacataaccgcaactgcaaccgatgctgcaaacaatgtcagcagtgtatcagcggccttggcggttactatcgatggtccagttacagtaacgaccaattccgatgcaggggcggatgcgactattgatggcagtctggcaactgatattgccgacggtggtggcttatctctgcgtgaagcattggcatatgtcgctgctagcggtagggtcgattttgcggcgggattgagcggaaccactatcaccttgggggctcccttatcggtaccttccaacattactctagatgccgatgcgctgggcaccgcaactatcactggcagtactttcaccccgttaggcagtctaacgataaccaatggcagcggcgacagcttgacactggagagtgaattgacaggtgtaggtgcgttaactaaaaccggtgcaggtcgtttaaccttaacgaacaccaataactccactagctacagtggtggcgttactgtaatggcgggtgagttatcgataggcagtgacgatgttttttcctctggaagcctcacgctaaatggcggcaccttaacgaataatacggcaagctttacgtttgataactccatagtactgggcgccagtggcgggactgttcaagtagtcggcgcagggcaaaccctcaccttgtctggcagtatcagtggcagcggtgctttgagcaaaaccagtggtggtaatttaaccctgagtggaagcaatggcttttccggcggattgtcgatttctggcaccaatggcgtgaccgtagcagattctaccaacttgggctcggggactgtcacgatcaatgcttctagtctgctaacccttacaggcacagcgcagacaatcactaatgccatcaatcttgcgggtgatgcaactattagcaacgccaatgcgatgaccatcagcggcattgttagcggtgcgagcgctttgaccaaagcaggggcaggaactttgacgctaagcgcggccaacacggcaactggcgctgtgagtgtcactgctggtggtttagtgctggctaacggtagtgcattgacagactctgtggcggtgtctgtcagcgcgggtgcgagtgtgatcttacccagtggcagtgaaaccgttgggtctcttacgggtgcaggtagtttggtgctgaccagcggcactctcaccactggatctaacaatagcagtaccactttctctggtgtggtaagtggagcgggttcacttgttaaagcgggcactggtaccttcatactcagcggtaccagcaccttcagtggtgcaactcaagtatctgctggtactttactggttactggcaacatagctcccagctctggtgtgacggttgcctctggtgcaactttggggggaacaggtactgtcgctgctgtcagtgttgcgaatggcggtaatctttcccccggtaatgctggcccaggtttgataaatattgccggtaatttattgcttaattcgggcgcaaacttgctgctggatattactggcaccagcgctgcgactcaatatgaccaattaaatgtgactggtacggtcacccttactggcgcggctatttctgcaacccacagctatgtggcagctaatggcgatagctatgaggtcatcatcaatgatggtgttgatgcaattaatggtactttttcgggtatcgctgaaggtgatgttttagttgccggaggtaactctagtaatttgcttgtgagttatatggctggctcaggcaacgatttgagtttaactaacaatttacttccaggcgcaccaactggtgtgagtgctgtggctggcgtttcttccgcaacgattacctttagtagccctaccgttaccggtgggtctgcaatcactgaatattccgttacatcatcaccaggtgggatagttcaagcaggcgcaagctcgccgattactgtgacaggtttaacgaatggcacacaatacactttcactgtaacagcgaccaatagttcaggcacaggtatggcgtctagtccatctaatcctgtgacgccgaggggaattcaaactattacctttagcaacccgggtgcacaaaactttggtactactccaaccttgacggcaatctctgattccggtttgacgccaacctttacatcatccacaactggtgtttgtactattaccagtggtggaaacctgacatttgttactgcgggtacttgtactatcaatgcagaccagtctggtgacgccagttatttacctgcgacccaagttagtcgttcctttacagtgaatgctgttgttcctggggctcctgtaattggcactgcgacagcgggtgatgctcaagcctcagtgagttttaccgctccaggatttagtggtggcgcgcccattagtggatataccttagtgtctactcctggcggcattaccgcatcgggaggctcttcgcccattgttatctctggattaaccaatgggacttcctattcatttactgtagcagcgacaaattcggctggtttaggtagtgcatcatcggcgagtaacacggtaaaacccaatggcgcaccagttattaatggcacaccaacgttaaccgttaaccagggggcgctatataacttcgcgccagtagcgactgactcccctggcgatagtctaacgtttagcattaatcagactatttcatggttgacctttaatagcgcaacgggagctttatctggcacgccttctaatcaagatgtgggtgtgattaatggtattgtgatcagcgtgtcagatggttcgctgtctgcgagccttcccccctttaatttgagtgtaattaacgtcaacgatgcgccgactatcagttcaacggtgttaacgagtgcgacccaagatgcggcctatagctacaccttggtagcgacggacagcgatgtgggcgacagtctcaccttaagcgcagtgaccttgccaagttggctgaacttcaatgcggcgacaggcgtactgagtggtaccccaaataacgctaatgtgggcagtcatgcggtactgttacgcgccacggacggggatggtttaaccgcagaccagagctttacgattgtggtggcgaacgttaacgatgcgccgactatcagttcaagcgcactcaccagtgcgactcaggatgcggcctacagctacatcttagtggcgacggacagcgatgtgggcgacagtctcactttaagcgcgatgaccttaccgagctggctcagctttaatgtggccacgggcgtgctgagtggtaccccaactaacgcgaacgtgggtagctatgcggtggtgttacgcgccacggatgttgatggcttaacagcagaccagagctttacgattgtggtgacgaacgttaacgacgcaccgaccatcagttcaacggcagtcacgagtgcaacccaggatgcggcctacagctacaccttggtcgcgacggacagcgatgtgggcgacagtctgaccttaagcgccgtcacacttccaagctggctgagtttcaatgcggcgacaggcgtgctgagtggtaccccaactaacgcgaacgtgggcagtcatgcggtactgttacgcgccacggatgtggatggcttgacggcagaccaaagctttacgatagtggtggcgaacgttaacgacgcaccgaccatcagttcaacggcgttaaccagtgccacccaggatgcggcctatagctacaccttagtggtgacggacagtgatgtgggcgacagtgtcaccttaagcgcagtcacactcccaagttggcttaacttcaatgcggcgacaggcgtgctcagtggtacgccaactaacactaatgtgggaagtcatgtggtggtgctacgcgccacggatgtggatggcttaaccgcagaccagagctttacgattgtggtggcgaacgtcaacgatgcaccgaccatcagttcaacggcgttaaccagtgccacccaggatgcggcctatagctacactttagtggcgacggacagcgatgtgggcgacagtctcaccttaagtgccgtcacactgccaagctggctgaacttcaatgcggcgacaggcgtgctcagtggtaccccgactaacgctaacgtcggcagccatacggtggtgttacgcgccacggatgttgatggcttaaccgcagaccagagctttacgatagtggtggcaaacgttaatgatgcacccattgcgaccaatcagacagtgactcttgaggaagatagttcgctgatgatcacgcttgccgctgaggatgccgacaatgatcctctgacctatgagatcaccgcgcaaccagcctctggtaccttagagcaacacggtagtgtctggctttatacacctgagaaggattttaatggtaccgactctattggctttattgccaaagatgcggagttaagctcagagcctgcgactgtcaccattacggttacgccagtgaacgacgatcctcaagctgtcgatgacagctataccttaaccagtacccccaatgacacctatacactgaccgtattggcaaatgatgtggatgttgatggggacaccctaacgattgatggcgctgctgcagatattggcagtgtgcaaatcacctcagatgggctcagttttaccgcgcccgaggcttatgtggggcctgtggctctgcgttataccatcagcgatggtaacaaagggcgggcaaccgccgaagtgaatgtgctgattgaaggcactgactcagcgagtcaacctgtgatcactctacctgatgatgttgaggtgaatgcgactggcctgtttacgcgggtgaaactcggttttgccaaggcggttgaccgtaatggccatccattgcctgtgtcgctggtgaataagagcttgttcttcgcccctggcaactacttagcctattggcaggcagtggatggcgagggtaataaggcgattaaagcgcagaaagtcaaagtcaatccattgatttcactgagaaaagatcaagtggtagccgaaggtaaccaagtgactgtgagtgttcatctcaatggtgaggcgccgagttatccgctgagtattccattcacagtatccggttcagccgatagcagcgaccatgatttggttgatggtgttgtcgagataacctcgggacagatggcggaaatccactttactaccctgaatgatggtgtgaccgaaggggatgaagaggtgcttatcagcctagatccaagcttgaatcttggtagtaagcagcagacccaagttgtgattaccgaagctaatattgcaccacaggtcagtttggctgtgactcaagctggccagcagcaagtcattgtcgcgcaaaatggcggtgatgtgcatatccgtgccacagcatccgatgccaatgagcaagatacattgacgctgacgtgggcaagcggcgcgctaagtttgcaagcggatgcgacaggcatggcattctctccagccgcggtgtcaccggggatttatcctgtgagcctgacggtgaccgatgatggttcgcctgtgctgtcgagtactgaaacagtgtacatcgtagtgcgtccaagtttagccgcattgacgagtgccgatactgatggcgatttaattcccgataatcaagaaggctatagcgatagcgatagcgatggtattcctgattatttggacgcgaataacgactgtaatgtgatgcctgaaggtgaattacagccagtgtacttcttggccgaagggcaggcgggtgtctgtttacgtttggggaacattgccctaagacgtgggcagagcggcatgcagctacaacctgaagtcgtggctgaagatgctttagcagccaatgtgggggggattttcgactttatcgcgacgggcctaccacaacagggccaaagctatagtttggtattgccacaacgctcacccattcccgcgaatgccgtctatcgcaagttcaatgctcaagcgggctggcgagactttgtgattgatgcaaacaacactgttgccagtaccgagggggaacgtggtttctgcccgccaccgggggatagccgttggacgccgggattaactgaaggccattggtgtgtgcagttaaccatcgaagacggtggccctaacgatgatgatggtgtggctaaccgtactattgtcgacccaagtggcgtggctgtgatgctcaatggtaaccacttgcctgtcgccaatcctgactcggcagcaattgcctggaaccagagtgtcgatgtgaacgtgcttgccaacgatacggatagcgatggggatagtttgagcgtcactcaagtgattagtgagtttggcactgtcacagtgttagcggatcaacggctcagttacatgccggcggcagacttcatcggtaccgatgtgttggtgtatagcattaccgatggcaagggcggtacggcaagtagtgagttgacgatagtggtgaatggcaacacagcccctgtgactgtcgatgacagcgccgccaccgatgatcgcaccagcttgcttatcgacgtgctgagtaatgacacagatgtggatggtaatacgttgaccctgttaagtgcgacggctcaacaaggcgccgtgactatcgaagcgaataaactgcgctatatccctaaaacaggattcgatggagtggatactgtgacctataggattagcgacggccaaggtggtgaagcgacggggcaagtgcttatcacagtgaaagcctatcaagaggtcattatcgataataagtcaggaggaggcagtatgaccttatgggcgttggcattcatcttagcgtgcgccatgttgcgccgccgagagttacagcgatttgctttaggcagcctgttattgctcagcgtgacgcaacaggtgcaggcaacagactggtatgttgagggttttatcggccaagcgcaggccgataaaaccctgcctgagttgaacgtccaagttggagagggacaactcctcaatgtcgatgactcggataccgcatttggggtgagtctgggttatcagtggacgccgaccgtggcgttagaactgggctatgccgactttggtgaaggaagcgcgagaattaagggctcaactttaacgccggagcaataccatgagttggtgaaaaccgtcaccccagtgcttgccgatggggtcatgttgggcctgagatttaccctgctgcagcatcaaggttggcgctttgaagtacccgttggcttgttccattggcaagccgatatcagcagtaccatgggcaataccaggatcaagaccgatttggatggtactgattggtatgcgggagtgcgttttagttaccaattcagtgatgcttggtccgtgggtgtaggttatcaatacatagatatcgagccgaatgatctattgagttatcagctcaatttgcgctatcagttttaaa

SEQ ID NO: 254390 - DNA, 353 bp, Unknown
  Bacterial polypeptide expressing nucleotide sequence isolated from the Sargasso Sea
tatgagaaacataaaaattacaaaagactttataaattcaaaaaatacatctgtcctatatgagtcaggaaacacaaaagtattaataactgtttccatctctgataggctgcctggctggcttgaaaattcagactcaggatggctcactgcagaatataatatgttgccaggatcttctgggaatagagtatcaaggaaagcatatgaaggtggaaggtcaaaggaaatatctagattaattggaagatcgcttaggtcaatttgtaatcttaaattacttaatggttatatggtcacagttgattgtgatgttttggaagctgacgggggaacaaggaccgcttcaaatt

SEQ ID NO: 254391 - DNA, 505 bp, Unknown
  Bacterial polypeptide expressing nucleotide sequence isolated from the Sargasso Sea
tatgactttcgagttataccacacgcatcattcgacttgcagccaaaaggttagaattgcgctagctgaaaaaggtttacctaacaaggataaagattgggttgctcgcgaggtagatttaggaaaatttgagcatttgacccctgagtatctgcaattaaacccaaatggggtagttccaactttgattcatgaaggaagtgttctgatcgaatcttcagccatagtagagtatctagatgaagttttgccacaaaacgatttggttccaaagacctctctggagagggctaagttaagggcatggatgcgttacatcgatgaagtgcccacagtagcagttagagtaccaagttttgcaaacctgttagcgcctatgaggttctcagattacacagatagtgagtttgcacagcactcagcgaggttgccaattagaaaacggttttatcagcgaatgactcaaaatggttttggaaaagaggaaattgaatatgctaaagag

SEQ ID NO: 254392 - DNA, 313 bp, Unknown
  Bacterial polypeptide expressing nucleotide sequence isolated from the Sargasso Sea
gatgctatattctcatattctgaagaaaaaagtgctaaccgaatcaccattaaaacaattagtcgcttccgtatccgctggacttgttgatggacaaatagtacttgatctggactatctagaggattccagtgcagatacagatatgaattttgtgatgactgaatctggcaaatatattgaaattcaaggtaccggagaagaaggtgatttcagccaaagcgaactactagaaatgatgaatgttgctgacgcagggatcaaagaattgattgaaatgcagaaaaaagcgctggctttaaatattgactaa

SEQ ID NO: 254393 - DNA, 396 bp, Unknown
  Bacterial polypeptide expressing nucleotide sequence isolated from the Sargasso Sea
aacgcacgatatatatcgactgtgacgtacttcaagccgatggaggcacaagaactgcagcaatcacaggatcttatgtagcattacatcaagcttttgataaaatggttcttgaaaaaaccatagaacaaaatccactaaaatctcaattagctgctataagtgtaggaattgttgatggagatattttgctagacctgtgctatgaagaggatagtattgcagatgtggatatgaatataattatgacgaaaaatcatgatatcgtcgaaatacagggtacagcagaacaagctcccttttctatatctacagcaaatgaaatgatcaaaactgcatcaagtggtatagattatctagttgatgttcaaaacagagccctgacaattaattaaa

SEQ ID NO: 254394 - DNA, 151 bp, Unknown
  Bacterial polypeptide expressing nucleotide sequence isolated from the Sargasso Sea
atgtctagagataatagaaaaccaactcaagcaagagaaatttccattgagacaaatgtaaatcttcatgctgaaggttcagtactggtcaagtttggtaatacacatgtaatttgtactgcaagtattgataacaatgtcccaagatgga

SEQ ID NO: 254395 - DNA, 181 bp, Unknown
  Bacterial polypeptide expressing nucleotide sequence isolated from the Sargasso Sea
gaagaaggtgtgccacgctttatgaagggccaagcgaaaggttggattccagctgagtacagcatgcttccacgtgctaatcatacgcgaagcggccgtgaagcggcgcgcggtaaacaaggcggccgcacgttagagatccagcgtgtaattgcgcgttcactacgcgcagcggttgatt

SEQ ID NO: 254396 - DNA, 529 bp, Unknown
  Bacterial polypeptide expressing nucleotide sequence isolated from the Sargasso Sea
atgtcgaacaaattaaccttgatgttcgattttttgttggcgcgtttgcatgtttggctggtgttgtccgcaagtctactcatctgcaccagtccgtggatttttatcggtcgaagcctgcgtgctaatgctagcatttgggattatctgcatgtttacctaggattggtgtgtgctgcgttagggattttatttttgttacgtaatagcctccaaggcaaatggcaccagtattttgcctggctggtgggcgattgggaacaattggtgcaggatattaaaggcctttttaaaggcaagctccccgtagccggtggcaaaggcttgtttagttgtatcgaagggattggcatgatactgctggtcgcgacaggattaactggcgttgtatggtttatttaccaaggaacaccactggcaatgacttggcgtggttatcatcaaatttgtgccgatgcttttattggctttttagtactgcatatcatattggccgcaacgcatattattgaatttattaggcaataac

SEQ ID NO: 254397 - DNA, 529 bp, Unknown
  Bacterial polypeptide expressing nucleotide sequence isolated from the Sargasso Sea
atgtcagaaaaattaacacaggcactcggttttttgttggctcgtttgcacgtttggattgtgctgtcttctactttactcgtctgtactagcccgtggatctttatcggcagaagcctgcgcgctaatgctagcgtttgggattatctgcatgtttatcttggattaatctgtgccgcactcgggatcttatttttactgcgcaataccctccaagggaaatggcatcagtattttgcctggttagtgggagattgggggcaattagcgcaggatattaaaggactgtttaagggcaaactgccggtcgcgggtggtaagggcttgttcagtactgtggaaggcataggcatgttgctgctggtggctactggcgtgactggcgcgatatggtttatttatcaaggcaccccgctcgcgatgacttggcgtggttatcatcaagtctgtgccgatttttttattggttttttagtcgttcacttggtcttggcagcaacacatattattgaatttattcgccaatagc

SEQ ID NO: 254398 - DNA, 88 bp, Unknown
  Bacterial polypeptide expressing nucleotide sequence isolated from the Sargasso Sea
atggtcacagttgattgtgatgttttggaagctgacggaggaacaaggaccgcttcaattaatggttccttggattgcattaaatgag

SEQ ID NO: 254399 - DNA, 398 bp, Unknown
  Bacterial polypeptide expressing nucleotide sequence isolated from the Sargasso Sea
aatgagaccaataaaaattacacccaatataattagtaatgcggatggatctatactgtatcaaagtggcaagacagaagtaatttgtacagctacttttgaaagtaaaacaccagaatggcttctcaatggaggatggataactgctgaatattcaatgttaccagctagtacctcttcaagagttgcaagagaaataagtagaggaaaaaaaagtccaagatctcaagaaatccaaagattgattggaaggtcattaagaggggcagtagatttaagtgaaatttctggaaattcaatttatattgattgtgatgttattaatgcagatggaggtacaagaacagcatctatcaatggcggatatctagctcttgcaatagcaataaagaaaaaat

SEQ ID NO: 254400 - DNA, 381 bp, Unknown
  Bacterial polypeptide expressing nucleotide sequence isolated from the Sargasso Sea
taaaggttgattgtgatgttcttcaagctgatggaggaacaagaacagcttctattaatggtggttttgttgctttatacatagctatagataaaattaaaaaaaattataatttacaaaaaccaattgtaaaaaattttattggagctatttctgctggaatagtagaaaataaatctttgttggatttaaattatgaagaagattctaaagctgaggtagatgcaaactttgtaattagtggtacaggagaaatagctgaaattcaagtgacaggtgaggaatttttttttactgaaagtcaatttggtgaattattttctttggcgaaaaatggtatcgcagaaataataaaaaaacaaaaagaaatcttaaattaaa

SEQ ID NO: 254401 - DNA, 403 bp, Unknown
  Bacterial polypeptide expressing nucleotide sequence isolated from the Sargasso Sea
actaggtgaaaacaccgtagtaatagattgtgacgtattacaagcagatggaggtactagaacagcatccataactggaggatatgttgcgctccatatggctgtactcaattcactaaatgaaaatttattaaaagaaaatcctttaattaataaaattgctgctactagtatagggctgataggtaatgaaatcttattagacttgtgctacaaagaagattcagaggcaggggcagattttaacttggtgatggctgacgatggtaatatcattgagatacaaggagctgcagaaaaacaaaattttgatattgatacagtaaataaagtactggcaatcgggtcattaggaataaaagaaatatttgaaatccaaaacaaaataatatctgaactataa

SEQ ID NO: 254402 - DNA, 658 bp, Unknown
  Bacterial polypeptide expressing nucleotide sequence isolated from the Sargasso Sea
tatgagagacataaaaattacaaaagactttataaattcaaaaaatacatctgttttatatgagtcaggaaatacaaaagtattaataactgtttccatctctgataggctacctggttggcttgaaaattcagattcaggttggcttactgcagaatataatatgttgccaggatcttctggaaatagagtatcaaggaaagcatatgaaggaggaaggtcaaaggaaatatctagattaattggaagatcgcttaggtcaatttgtaatcttaaattacttaatggctatatggtcacagttgattgtgatgttttggaagctgacgggggaacaaggaccgcttcaattaatggttcctggattgcattaaatgaaacatttaataaattagttgaaaatggggaattagttcaaaatcctttagagaatcagatagcagcagtttctgttggaatagttgatggagagtatattgttgatttagattatgaaaatgattcccaagcagaagttgacttaaatttagtcttaaatgacaagtatgaaattctagaaattcaaggtacagcagaaaagaaaccattttcaaaagaagatttagataaattatttgaattaacaaaagatcaaattgatgaaatatttgaagttcaa

SEQ ID NO: 254403 - DNA, 437 bp, Unknown
  Bacterial polypeptide expressing nucleotide sequence isolated from the Sargasso Sea
aattgggcgtagcttaagatctattgtagatctatcaaaccttggagagcgtcaaattaaaatagattgtgatgttattcaagctgatggaggaacaagaactgcttcaataagtggtggttttatttctttatatctagcaatagaaaaactgaagaacaattataatcttcaaaaaccaattataaaaaaatttattggtgcggtctcaactggaatagttgaaaacaaagcaatattagacttggattacaaggaagactcagacgctcaagtagatgcaaattttgttatctgtgattcagatgaaatatctgaaattcaagttacgggtgaagaattttttttcaatgataatcaatttgcagaaatgttttcactagcaaaaattggagttaaagaaataatttctaaacaaagagaggctttgaaataac

SEQ ID NO: 254404 - DNA, 679 bp, Unknown
  Bacterial polypeptide expressing nucleotide sequence isolated from the Sargasso Sea
atgaagtccggagacattggcacagatagggcagcagacaaactacgagatattgaggtcactctagacttcaccccgaatgcagatgcctcggttttgtatcgtcaaggagagactatggttctggcctgtgcaaccattgctccttcactgcctcgatggtttcctcgcgacgccaacagaggatgggtgcatgcagagtattccctactacctggttctacagattcacgcttccagcgtgagaggcgtggcgcgaagggccgaactcaagaaattgagagattggttgctagaagtcttcgtggagcaatcgacctagaggctctaggccccatcgcaattacagttgattgtgatgtattgaatgcggatggaggcactcgctgtgcttcgattacagccgcaagcatagcaatgcgtttgtgtgtaagaagactgattgcatcaggacgctgtttgcctgctgacaagaggctgacccacgaccaaatcaagtcaggaatggaagcacctacgctaagtgcggaggaagccgtagcacacgagaatgcagttattcctcacgatcttgcagcaattagcgtcggactaatcgatgggaatgtttacactgatttggattacattttggacagtaatgcagatgttgacatgaatgttgtaatgaccggctgat

SEQ ID NO: 254405 - DNA, 396 bp, Unknown
  Bacterial polypeptide expressing nucleotide sequence isolated from the Sargasso Sea
aatgaggccaataaaaataaccaaaaattttattaattctgctgaaaactcagttttatacgaatcaggcaatacaaaggtactagttacagtatctgtctccacaagaattccagactggctactaaattctgaaaagggctgggtaacagcagagtacaatatgttacctgggtcatctggaaatagaatatcaagaaaatcttttgagtctggcaggtctaaagaaatttctagattaattggaagatccctaagagctgtctgtaatttaggaattataaacgggtattcattcacagtagattgcgatgttttagaagccgatggcggaactagaacagcttctgtaaatggtgcttggatagctcttcacgatacatttgagaaaatggt

SEQ ID NO: 254406 - DNA, 376 bp, Unknown
  Bacterial polypeptide expressing nucleotide sequence isolated from the Sargasso Sea
gactgtgatgtcattcaagctgatggaggaacaagaacagcttcaatttctggagcatttatagccttaaaacattcagtaaatttcttaatggaatcaaacgaaattaaaaaagacccaataagagaataccttggtgcggtttcatgtggtatttacagaggtaaaccaatcctagatttagattataaagaagactcggaagctgaagcagatgcaaactttgttattacagaaaaaaataaaataattgaaattcaagctactgcagaacaatacccattttctgagaaaaagttttccgaattaatggacttggcaaaaagcggaatagaagagattataaaaaaacaaaaaggtgtcttagagaattagc

SEQ ID NO: 254407 - DNA, 667 bp, Unknown
  Bacterial polypeptide expressing nucleotide sequence isolated from the Sargasso Sea
atgagagacataaaaattacaaaagactttataaattcaaaaaatacatctgtcctatatgagtcaggaaatacaaaagtattaataactgtttccatctctgataggctacctggctggcttgaaaattcagactcaggatggctcactgcagaatataatatgttgccaggatcttctggaaatagagtatcaaggaaagcatatgaaggaggaaggtcaaaggaaatatctagattaattggaagatcgcttaggtcaatttgtaatcttaaattacttaatggctatatggtcacagttgattgtgatgttttggaagctgacgggggaacaaggaccgcttcaattaatggttcctggattgcattaaatgagacatttaataaattagtagaaaatggggaattagttcaaaatcctttagaaaatcagatagcagcagtttctgttggaatagttgatggagagtatattgttgatttggattatgaaaatgattcccaagcagaagttgatttaaatttagtcttaaatgacaagtatgaaattctagaaattcaaggtacggcagaaaagaaaccattttcaaaagaagatttagataaattatttgaattaacaaaagatcaaattgatgaaatatttgaagttcaaaaaaattaat

SEQ ID NO: 254408 - DNA, 367 bp, Unknown
  Bacterial polypeptide expressing nucleotide sequence isolated from the Sargasso Sea
tatgagagacataaaaattacaaaagactttataaattcaaaaaatacatctgtcctatatgagtcaggaaatacaaaagtattaataactgtttccatctctgataggctacctggatggcttgaaaattcagactcaggatggctcactgcagaatataatatgttgccaggatcttctggaaatagagtatcaaggaaagcatatgaaggaggaaggtcaaaggaaatatctagattaattggaagatcgcttaggtcaatttgtaatcttaaattacttaatggctatatggtcacagttgattgtgatgttttggaagctgacggaggaacaaggaccgcttcaattaatggttcctggatt

SEQ ID NO: 254409 - DNA, 175 bp, Unknown
  Bacterial polypeptide expressing nucleotide sequence isolated from the Sargasso Sea
atgcgtcctagcggcagaacagcgagtcaaattcgtcctattactttcacccgtcaatttacggctcatgctgaaggttcagtattggttgagtttggtaacaccaaagttatttgtactgccagcgtgattgaaggtgtgccaaggtttatgaaaggccagggcaaaggctgga

SEQ ID NO: 254410 - DNA, 265 bp, Unknown
  Bacterial polypeptide expressing nucleotide sequence isolated from the Sargasso Sea
gcccctgctgcaacccgtggcggcgatctcggtcggcatcgtgcagggcacaccgctgctggacctggaatatgtggaagacgtggattgcgacaccgacatgaacgtggtgatgaccggcgcgggccactatgtggaggtgcagggcacggccgagggcgtggcctttacccgcgccgagatggaccagctgctgggcctggccgaacagggcattgcccaactggtgcagctgcaacagcaggcgttgcaaaatactccctaa

SEQ ID NO: 254411 - DNA, 172 bp, Unknown
  Bacterial polypeptide expressing nucleotide sequence isolated from the Sargasso Sea
gttgacatgaatgttgtgatgaccgctgatgggaagttcgtcgaggttcaaggaaccggtgaagaattcacctatactcgagaagaactagatgcattactggatgctgcaaccgctggtgtgacttctctcaatgagatgcaagttagagttctcgacggaatcgaatgag

SEQ ID NO: 254412 - DNA, 627 bp, Unknown
  Bacterial polypeptide expressing nucleotide sequence isolated from the Sargasso Sea
tttatcaaagtggaaaaaccgaagtaatttgtacagcaacttttgagagtaaagtgcctgaatggttaaccaaaggcggttggatcacagctgaatattctatgcttcccgcaagtacatcttctagagttcaaagagaaataagtagaggtaaaaaaagtcctaggtctcaagaaattcaaagacttataggaagatctttgagaggggcaattgatttatcaaatattcctggaaattcaatttatgttgactgcgatgttattaatgcagatggtggcacaagaacagcatcaataaatggtggctttcttgctttagctatggctctaaaaaagagattacctgatttaataattgataaaaaaattacacctattgctgctattagcgtcggaaaagtaaatggacaaattgtagatgatcttgattatgagatggattcaaatgcagatgttgatcttaacttggtaatgaattcgtcatatgaaataatagaaattcaaggcacaggagaaaaaggcacattttcaacaagtgaacttaatcaaatgattgatttaggaaaaaaatgtatagagaaaatttttgatgaacaacaaaaaattttaaataattatgattgat

SEQ ID NO: 254413 - DNA, 178 bp, Unknown
  Bacterial polypeptide expressing nucleotide sequence isolated from the Sargasso Sea
tatggacacactacccgaccggcccagtggccgtgccccggacgccatgcgggccattcagtttgaccggggatacacctgtcacgctgagggctcggtgttggtgtcttttgggcagacaaaggtgatttgtacggcgaagtgtgagcgctggcgtacccggtttttctgcggggga

SEQ ID NO: 254414 - DNA, 445 bp, Unknown
  Bacterial polypeptide expressing nucleotide sequence isolated from the Sargasso Sea
atgagaaacataaaaattacaaaagactttataaattcaaaaaatacatctgtcttatatgagtcaggaaacacaaaagtattaataactgtttccatctctgatagactgcctggctggcttgaaaattcagactcaggatggctcactgcagaatataatatgttgccaggttcttctggaaatagagtatcaaggaaagcatatgaaggaggaaggtcaaaagaaatatctagattaattggaagatcgcttagagcaatttgtaatcttaaattacttaatggatatatggtcacagttgattgcgatgttttggaagctgatggaggaacaaggaccgcttcaattaatggttcctggattgcattaaatgagacatttaataaattagtagaaaatggggaattagttcaaaatcctttagaaaatcagatagcagcag

SEQ ID NO: 254415 - DNA, 452 bp, Unknown
  Bacterial polypeptide expressing nucleotide sequence isolated from the Sargasso Sea
aatgagaagtgatagaaagttaaatgaattaagaaatattaaagttgaaaaaaactttatgcagaacgcattttcctcttgtctcatagaatttgggctcacaaaagttatatgcagtgtgactatagaagaatatattcctaggtggttaaaaggatctgggcagggatggctaactgcagagtactctatgttacctacatctactaataccagaaatgatcgagagtctataagaggaaaattatcaggtagaacgcaagaaatacaaagactaataggaagaagcttaagaaattgtattgatttatcattgttatcagaaaaactaattaaaattgattgtgatgttttgtcagcagatggcggaacaagaacaacctctataaatggttcttgggtagcacttaaccttgcagtaaaaaagcttatgcaaaaaagaattattaaaa

SEQ ID NO: 254416 - DNA, 670 bp, Unknown
  Bacterial polypeptide expressing nucleotide sequence isolated from the Sargasso Sea
tatgcgagatataaaagtaaccaaagattttattaattcagaaaacacttcagtgctctatgagtctggtaacacaaaagttttgattacagtttccattgcggataaggtcccaagatggcttgaaaactcagataggggttggttaacagcagaatacaatatgttgcctggatcttcagatcagagaatatcaaggaaatcatttgaaggcggaagatcaaaagaaatctcaagattaattggtaggtcactcagatcagtttgcgacctagcaatactcaatggttatttagtaaccgttgattgtgatgtgttagatgctgatggaggtacaagaactgcctcaattaatggtgcttggatcgctcttaatgaaacattcaataatctcgttgaacaaaagaaattagtccagaatccactaacgaaccagattgcagctttgtcagtagggattgtcgatggagagttcatcgcagatctggattatgaaaaagattcaagtgctgaagtagatttaaacttggttcttaatgacaatttcgaaattctagaaattcaaggaactgctgaacagaaaccattctcaaaggaagacttagacaagctttttgagatgactaaagatgaggtaaataaaattttcgacgtacagaaaaatgtatga

SEQ ID NO: 254417 - DNA, 643 bp, Unknown
  Bacterial polypeptide expressing nucleotide sequence isolated from the Sargasso Sea
gactttataaattcaaaaaatacatctgtcttatatgagtcaggaaacacaaaagtattaataactgtttccatctctgataggttgcctggctggcttgaaaactctgattcaggatggctcactgcagaatacaatatgttgccaggatcttctggaaatagagtatcaaggaaagcatatgaaggaggaaggtcaaaggaaatatctagattaattggaagatcgcttaggtcaatttgtaatcttaagttacttaatggttatatggtcacagttgattgtgatgttttggaagctgacgggggaacaaggaccgcttcaattaatggttcttggattgcgttaaatgagacatttaataaattagtagaaaatggggaattagttcaaaatcctttagaaaatcagatagcagcagtttctgttggaatagttgatggagagtatattgttgatttggattatgaaaatgattcccaagcagaagttgacttaaatttagtcttaaatgacaagtatgaaattctagaaattcaaggtacggcagaaaagaaaccattttcaaaagaagatttagataaattatttgaattaacaaaagatcaaattgatgaaatatttgaagttcaaaaaaattaat

SEQ ID NO: 254418 - DNA, 388 bp, Unknown
  Bacterial polypeptide expressing nucleotide sequence isolated from the Sargasso Sea
atatcttaaaggaaaaacaataaatgttgattgtgatgttatacaagctgacggtggaacaagaacagcatcaattacaggtggttgcgtagcactttttttagctattaaaaatcatcatgatgatcaacgtgcaattaaatcgtttgttgcagcagtatcaatgggtattaaagaaaatcaagttctacttgatcttgactatgatgaagacagcactgcagatactgatttaaatattgttatgaacgataaagacgaattaattgaaattcaaggtaccgcagaagatgctcctttttcaaaaaaggaacttgatgatatgcttgtgatgggcagctcagcaatagctgatattattaaaaaacaaaaagcttgtattgaataa

SEQ ID NO: 254419 - DNA, 439 bp, Unknown
  Bacterial polypeptide expressing nucleotide sequence isolated from the Sargasso Sea
ccttattggaagaagtttaagatcaattgtagatcttaaaaaattagaagaaagacaaataaaaattgattgtgatgttatccaggctgatggaggaacaagaactgcatcaattagtgggggatttgtatctttatatttggcaatagaaaaacttaaacaaaattataacatttctgctcctataattaaaaattatattggagctgtttcaacaggaattgttgatggaaaagcaattcttgatttagattataatgaagattctgcagctgaagttgacgcaaattttgttatgtctgactctaatgaaatatcagaaatacaagttacaggtgaagaatatttttttaatgatcatcagttcaacagtttgtttgctttagccaaaaatggaattaaaaagatcattgaagcacaaaaagaggtcttaggttaa

SEQ ID NO: 254420 - DNA, 670 bp, Unknown
  Bacterial polypeptide expressing nucleotide sequence isolated from the Sargasso Sea
tatgcgagatataaaagtaactaaagattttattaattcagcaaacacctcagtgctctatgagtctggcaacacaaaagttttgattactgtttctattgctgataaggtcccaagatggcttgaaaactcagataagggttggttaacagcagaatacaatatgttgcctggatcttcagatcagagaatatcaaggaaatcatttgaaggtggaagatcaaaggaaatctctagattaattggtaggtcactcagatcagtttgtgacctcgcaatacttaatggttatttagttactgttgattgtgatgtgcttgatgctgatggaggtacaaggacggcctcaattaatggtgcctggatcgctcttaatgaaacattcaataaccttgttgagcaaaagaaattagtacagaatccactaacgaaccagattgcagctttgtcagtaggaattgtagatggagaatttatcgcagatctggattatgagaaggattcaagcgctgaagtagatttaaacttggttctcaatgacaaattcgaaatccttgaaattcaaggaactgctgaacagaaaccattctcaaaggaagacttagacaagctttttgagatgactaaagatgaggtaaataaagttttcgacgtacagaaaaatgtatga

SEQ ID NO: 254421 - DNA, 664 bp, Unknown
  Bacterial polypeptide expressing nucleotide sequence isolated from the Sargasso Sea
aatgagaccaataaaagtaaccaaaaattttattaattcagctgaaaactcagttttatacgaatcaggcaatacaaaggtattggttacagtatctgtctcaactaggctcccagactggttgctaaattctgataagggttgggtaactgcagagtacaatatgttacctgggtcatcaggcaatagaatatcaagaaaatcttatgagtctggcaggtctaaagaaatttcaagattaatcggaagatctttaagatctgtttgtaatttaggaattataaacgggtactcctttacagtagattgcgatgtgctagaagctgatggcggtacaagaacagcttctgttaatggtgcttggatagctctgaatgatacatttgaaaaaatgatccaggataacaaattaaatcaaaatccacttacaagtaaagttggtgctatttcagttgggattgttgctggcgaattggtagcagatcttgattatgaaaaagattccaatgcagaggttgatctaaatttagtattggatgaaaaatttgaaatactagagatacaaggcactgcagaaggaaagccatttccaaaagaacatcttgatcaactttttgaacttggaaaagagtgtataaaagaagtatttgaaatacaaaaataa

SEQ ID NO: 254422 - DNA, 104 bp, Unknown
  Bacterial polypeptide expressing nucleotide sequence isolated from the Sargasso Sea
catgaccaacgacacccaacgccccagcggccgccaggccaaccagctgcgcgacgtgcgcatcacgcgccactatacgaagcatgcggagggctcggtgctgg

SEQ ID NO: 254423 - DNA, 421 bp, Unknown
  Bacterial polypeptide expressing nucleotide sequence isolated from the Sargasso Sea
aagatcccttagacaatctgtaaatcttaaatatttaaaagataaaactattcaagttgactgcgatgttattcaagcagacggaggtacaagaactgcttcaattactggtggatgtgttgcacttttccttgcaataaagaatcaccatgatgatcaaagagcaattgaacaatatgtggctgcaatctctttaggtgttaaagatgacggaatactagttgatcttgactaccaagaagatagcactgctgatgcagacattaatattgtaatgacccaagatcttgatttaattgaaattcagggtaccgctgaagagcgtcctttttctcaagaacaactcactgaaattgtaagcaaggctagctcatctattaaggatatagttgctatccaaaaacaggctgtagaaggatag

SEQ ID NO: 254424 - DNA, 187 bp, Unknown
  Bacterial polypeptide expressing nucleotide sequence isolated from the Sargasso Sea
atgcaaagaaatctggatcggcctcttaatcaactcagagaagtctcactagaaattaataccaatattcatgctgaaggctcagtgttagtttcatttggaaatactaaagtaatttgtactgcatcaattgagaacaatgttcctagatggatgaaaaactcaaatgaaggatggattactgcag

SEQ ID NO: 254425 - DNA, 660 bp, Unknown
  Bacterial polypeptide expressing nucleotide sequence isolated from the Sargasso Sea
tatgagagatataaaagtaaccaaagattttattaattcagaaaacacttcagtgctctatgaatctggaaatacgaaagttttgattactgtttccattgctgacaaggtcccaagatggcttgaaaactcagataagggttggttaacagcagaatacaatatgttgcctggatcttcagatcagagaatatcaaggaaatcatttgaaggtggaagatcaaaagaaatctcaagattaataggtaggtcactcagatcagtttgtgacctcgcaatactcaatggttatttagtaaccgttgattgtgatgtgctagatgctgatggaggtacaagaacggcctcaattaatggtgcttggatcgctcttaatgaaacattcaataatcttgttgaacaaaagaaattagtacagaatccactaacgaaccagattgcagctttgtcagtaggaattgtcgatggagaatttatcgcagatctggattatgaaaaagattcaagtgctgaagtggatttaaacctagttctcaatgacaatttcgaaattctagaaattcaaggaactgctgaacagaaacctttctcaaaggaagacttagacaagctttttgaaaagactaaagatgaggtaaataaagttttcgacgtacagaa

SEQ ID NO: 254426 - DNA, 205 bp, Unknown
  Bacterial polypeptide expressing nucleotide sequence isolated from the Sargasso Sea
cctcgattacgacgaagactcgcaatgcgacaccgacatgaacgtggtgatgacggcgcggggcggcttcgtcgaaattcagggcaccgccgaaggcgcgccgttctcgcgcgacgaaatgaatgcgctgctcgatctggcaagcgacggcatcaacacgctgatcgcgaagcagaaagaagcattggagcagaagagtgagtga

SEQ ID NO: 254427 - DNA, 412 bp, Unknown
  Bacterial polypeptide expressing nucleotide sequence isolated from the Sargasso Sea
aatgagaccatctggccgccaacacaacgagaaacgagctgtttctgttgagatcggaacctcaaaatatgcagaaggatctagtttaataagatttggcgatacacatgtgctttgtacggcgagtgttgaagagcgtgttcccccatttttgagaggccagggtataggttgggttaccgctgagtatggcatgcttccaaggtctacgcacactcgaacagatcgggaggcggcaagagggaagcaaagtgggcgaacacttgagatacagcgactaatcggaagatctctgagagctgtgacagatacaaaagctctgggagagcggcaagtacgtattgattgtgacgtaatacaagccgacggaggaacgaggaccgctgctatcacgggaggttacatagccctt

SEQ ID NO: 254428 - DNA, 427 bp, Unknown
  Bacterial polypeptide expressing nucleotide sequence isolated from the Sargasso Sea
attggagcaggcaatcgttcgcccctcgggtcgcgaaaccgaccagatgcgtgaagtctccttcaaggcaggaatcgcccctcatgcaaacggttccgtcctttgctcctttggcaacacccaagtcatctgcgccgccatgatcgaggataggattcccggctggatgagacagcagaagatcgaggggggatggctcaccgccgagtacagcatgcttccctactccacccttacacgcaaagaccgccctataagcaggggcaagcaagatggccgcaacatcgagattcagaggctcattggtcgctcgctgcgagccgtactggacctcaagaaactacccgagaaaaccctctggatcgactgcgacgtcctgcgtgcggatggagggaccaggacggcttccatcaccggcgcttggctg

SEQ ID NO: 254429 - DNA, 628 bp, Unknown
  Bacterial polypeptide expressing nucleotide sequence isolated from the Sargasso Sea
ggttgagtttggtaacaccaaagttatttgtactgccagcgtgattgaaggtgtgccacgttttatgaaaggccagggcaaaggctggatcacagctgaatatggcatgttgccacgcgccactcatacccgtaacgaccgcgaagcggctcgtggtaagcagggcggccgtactatggaaattcagcgcttgatcggccgtgctttgcgtactgctgtggatttaaagctgttgggtgaaaacactattactatcgactgtgacgtgatccaggccgatggtggcacccgcactgcctctatcactggtgcttgtgtggctttagtggatgcgctgaattttatgcgcgctaaaggtttgatcaaaaccaacccgttgaattttatggtcgctgcggtttctgtgggtgtttataaaggtactgctgttgccgatttagactacgccgaagattctaacgctgaaaccgatatgaacatcgtgatgacagaaaccggcaaaatcatcgaaattcagggcacggctgaagaagcgccatttagctttgaagaaatgcagcagatgatggaattaggcaaacacgccatccgcgaaattatcgacgaacaaaaacgcgttttagcttaa

SEQ ID NO: 254430 - DNA, 442 bp, Unknown
  Bacterial polypeptide expressing nucleotide sequence isolated from the Sargasso Sea
ggaaatacagaggttaataggcagatctttacgtccagctgtagatctagataaattaactggttatacgattacaattgattgtgatgtaattcaagcagacggaggaacaagaacagcatccataacaggtggaactgtagcactatataaggcgctacaaaaaatagagaaagaggatgctattaaaaatcttgtagctgctatcagtgtaggaatttgtaaagatgaacttcttttagatttagattatgaagaagatagtaatgctcaatgtgacgttaatatagtaatgaatgaagcactagaattaatagaagtccaaggtacaggagaagaaaaagctttcagcaaagagcaattcaaagatctagttgatttagcagagaatggactgaaagacttattcacattacaaaaagaagtaattaaaaacgggtga

SEQ ID NO: 254431 - DNA, 403 bp, Unknown
  Bacterial polypeptide expressing nucleotide sequence isolated from the Sargasso Sea
aatgcgcccatctggtcgaaaacttgacgaactaagaaacgtttcaatagaaactaatatcactatgcatgctgagggaagttgcataataaaaatgggtgatactcatattatatgtaccgcaacaatagaagatagagttccaccatttatcaaaggatctggtctagggtgggttactgctgaatatggtatgttaccaagatcaaccggttccagaatgcgaagggaagcagcttctggtaagcaaggcggccgaacagttgagatacaaagacttatcggaagatctttaagagccggtgttgataggctcgcattaggtgaacgacaaataacaatcgattgtgatgtaatacaagcagatggcggtacgcgctgtgcttctatcactgggggttgg

SEQ ID NO: 254432 - DNA, 614 bp, Unknown
  Bacterial polypeptide expressing nucleotide sequence isolated from the Sargasso Sea
gtttggtaatacacatgtaatttgtactgcaagtattgataataatgtcccaagatggatgaagggatcagataagggttgggtaacagctgaatatggaatgcttccaagatcgaccaatgagagaatgggcagagaagcagcaagaggaaaacagtcagggagaactcaggaaatacaaagacttatcggaagatcccttagacaatctgtaaatcttaaatatttaaaagataaaacaatccaagttgactgcgatgttattcaagcagacggaggtacaagaactgcttcaattactggtggatgcgttgcacttttccttgcaataaagaatcaccatgatgatcaaagagcaattgaacaatatgtggctgcaatctctttaggtgttaaagatgacgaaatactagttgatcttgactaccaagaagatagcactgctgatgcagacattaatattgtaatgacccaggaccttgatttaattgaaattcagggtaccgctgaagagcgtcctttttcgcaagaacaactcactgaaattgtaagcaaggctagttcatctattaaggatatagttgctatccaaaaacaggctgtagaaggatagt

SEQ ID NO: 254433 - DNA, 563 bp, Unknown
  Bacterial polypeptide expressing nucleotide sequence isolated from the Sargasso Sea
aagatggatgaagggatcagataagggctgggtaacagctgaatatggaatgcttccaagatcaactaatgagagaatgggcagagaagctgcaagaggaaaacaatcaggcagaactcaagaaatacaaagacttattggaagatcccttagacaatctgtaaatctcaaatatttaaaagataaaactattcaagttgactgcgatgttattcaagcagacggaggtacaagaactgcttcaattactggtggatgtgttgcacttttccttgcaataaagaatcaccatgatgatcaaagagcaattgaacaatttgtagctgcaatctctttaggtcttaaagatgacgaaatcctagttgatcttgattaccatgaggatagcactgctgatgcagatattaatattgtaatgacccaggatcttgatttaattgaaattcagggtaccgctgaagagcatcctttttcacaagaacaactcactgaaattgtaagcaaagctagctcatctattaaggatatagttgcgatccaaaaacaggctgtagaaggataat

SEQ ID NO: 254434 - DNA, 568 bp, Unknown
  Bacterial polypeptide expressing nucleotide sequence isolated from the Sargasso Sea
atgtctagagataatagaaaaccaactcaagcaagagaaatttccattgaggcaaatgtaaatcttcatgccgaaggttcagtactggtcaagtttggcaatacacatgtaatttgtactgcaagtattgataacaatgtcccaagatggatgaagggatcagataagggctgggtaacagctgaatatggaatgcttccaagatcaaccaatgagagaatgggcagagaagcagcaagaggaaaacagtcagggagaactcaggaaatacaaagacttattggaagatcccttagacaatctgtaaatcttaaatatttaaaagataaaactattcaagttgactgcgatgttattcaagcagacggaggtacaagaactgcttcaattactggtggatgtgttgcacttttccttgcaataaagaatcaccatgatgatcaaagagcaattgaacaatatgtggctgcaatctctttaggtgttaaagatgacgaaatactagttgatcttgactaccaagaagatagcactgctgatgcagacattaatattgtaatgacccagg

SEQ ID NO: 254435 - DNA, 661 bp, Unknown
  Bacterial polypeptide expressing nucleotide sequence isolated from the Sargasso Sea
catgagggcaaatgtaaatcttcatgctgaaggttcagtactggtcaagtttggcaatacgcatgtaatttgtactgcaagtattgataacaatgtcccaagatggatgaagggatcagataagggctgggtaacagctgaatatggaatgcttccaagatcaaccaatgagagaatgggcagagaagcagcaagaggaaaacagtcagggagaactcaggaaatacaaagacttattggaagatcccttagacaatctgtaaatcttaaatatttaaaagataaaactattcaagttgactgcgatgttattcaagcagacggaggtacaagaactgcttcaattactggtggatgtgttgcacttttccttgcaataaagaatcaccatgatgatcaaagagcaattgaacaatatgtggctgcaatctctttaggtgttaaagatgacgaaatactagttgatcttgactaccaagaagatagcactgctgatgcagacattaatattgtaatgacccaagatcttgatttaattgaaattcagggtaccgctgaagagcgtcctttttctcaagaacaactcactgaaattgtaagcaaggctagctcatctattaaggatatagttgctatccaaaaacaggctgtagaaggatag

SEQ ID NO: 254436 - DNA, 537 bp, Unknown
  Bacterial polypeptide expressing nucleotide sequence isolated from the Sargasso Sea
gctgggtaacagctgaatatggaatgcttccaagatcaaccaatgagagaatgggcagagaagcagcaagaggaaaacagtcagggagaactcaggaaatacaaagacttatcggaagatcccttagacaatctgtaaatcttaaatatttaaaggataaaactattcaagttgactgcgatgttattcaagcagacggaggtacaagaactgcttcaattactggcggatgtgttgcacttttccttgcaataaagaatcaccatgatgatcaaagagcaattgaacaatatgtggctgcaatctctttaggcgttaaagatgacgaaatactagttgatcttgattaccaagaagatagcactgctgatgcagacattaatattgtaatgacccaggatcttgatttaattgaaattcagggtaccgcggaagagcgtcctttttcgcaagaacaactcactgaaattgtaaacaaagctagttcatctataaaagatataattgctatccaaaaacaggctgtagaaggataat

SEQ ID NO: 254437 - DNA, 673 bp, Unknown
  Bacterial polypeptide expressing nucleotide sequence isolated from the Sargasso Sea
catgtcacgtcccagcgatcgcactgccgcgcagcttcgtccggtcaccattacccgccacttcaccaagcatgctgaagggtccgtgctggtggaattcggcaacacccgcgtgctctgcaccgccagcgttgacaccagcgtgccgcgcttcctgaaagggaagaatcagggctgggtgaccgccgagtacggcatgctgccgcgctccacccactcccggatgaaccgcgaagcggcctccggcaagcagagtggccgcactctggagatctcccggctgatcgcccgctccctgcgcgccgcggtagacctgaccgcgctgggcgagcactccatcacagttgactgcgacgtgctgcaggccgacggcggcacccgtaccgccgccatcacaggtgcctgcgtggcgctggtggatgcgctgaactggatggtcgagaagggcatgctcaagcagagcccgctcaaacagatgatcgccgccgtctccgtcggcatgtatgaaggggaagccatctgcgatctggagtacatcgaagactccgccgccgagaccgacatgaacgtggtgatgaccgaggatggtcgcatcatcgaggtgcagggcaccgcggaggccgaacccttcacccacgaagagctgctggagatgctggcgctcgcgaagggc

SEQ ID NO: 254438 - DNA, 487 bp, Unknown
  Bacterial polypeptide expressing nucleotide sequence isolated from the Sargasso Sea
aatgggcagagaagcagcaagaggaaagcagtcagggagaactcaggaaatacaaagacttatcggaagatcccttagacaatctgtaaatcttaaatatttaaaagataaaacaatccaggttgactgcgatgttattcaagcagacggaggtacaagaactgcttcaattactggtggatgcgttgcacttttccttgcaataaagaatcaccatgatgatcaaagagcaattgaacaatatgtggctgcaatctctttaggtgttaaagatgacgaaatactagttgatcttgactaccaagaagatagcactgctgatgcagacattaatattgtaatgacccaggaccttgatttaattgaaattcagggtaccgctgaagagcgtcctttttcgcaagaacaactcactgaaattgtaagcaaggctagttcatctattaaggatatagttgctatccaaaaacaggctgtagaaggatag

SEQ ID NO: 254439 - DNA, 706 bp, Unknown
  Bacterial polypeptide expressing nucleotide sequence isolated from the Sargasso Sea
atgacaagaaaaaataatagatcaaacaatgaaatgaggtctgtggagatcgcagttggtgtaaacaaacatgcagagggctcagtcctgattaaatttggagatacccatgtgatttgcaccgcaagcattgaaaatcacgtccctagatggatgaggggttcaaacgaaggctggattactgctgaatatggcatgctacctcgctcaactcatgaaagaatgaatagagaatccgctagaggcaagcaaagtggcagaaccatggaaatacagagattaattggtagatcattaaggcaagctgtcgatttaaaatatttaaaagataagacaatcaatatagattgtgatgttattcaagcagatggaggaacaagaactgcatccatcacaggggcatgtgtagctttatttgaagctatcaaaaattctcatgatgaccaacgagcaataaaggaatacgttgctgctgtctccatagggttgaaagatggtcgcccccttttagatttagactacgaggaagatagttctgcagatacggacttaaatgtagtaatgaccgaaagtggaggaataattgaaatccaaggaacagcagaaaaatatcctttcacaaaagatcaacttgatgaaatgattgtatcagcttcaatggggatcaaagatatagtaagttttcaaaaatcatgtctgaattaaa

SEQ ID NO: 254440 - DNA, 697 bp, Unknown
  Bacterial polypeptide expressing nucleotide sequence isolated from the Sargasso Sea
aatgagagaaagcagaacatttgatcaaatgagggaaatatcttttgaaatcaacgtcaatttgcatgctgagggttcctgcttagtaaaatttggaaatacgcacgtattatgtactgcttcaattgatgaaaaaacgccccactggctcaaaaactctggaaaaggttgggttacagcagaatatggtatgctacctcgctcaaccaacacaaggattgatagagaggcatcaagaggaagacaaactggtagaacacaagaaatacaaaggcttgttggtaggagtttaagatcaattatcaatcttgaaaatataggagaaagacaaattaaaattgattgtgatgtaatccaagctgacggtggaacaagaactgcttcaataagtggtggttttgtggctttgtatcaagcgataagttttttaaaaaaaaactacaatttaacaaaaccaataattaaagattttattggcgcagtttcagcaggcataattaaaaatcaagctaatttggatcttgattattttgaagactctaatgcagatgttgacgcaaattttgtaatctgtgaaagtgggaaaattgcagaaatacaagttactggagaggaatatttctttagtaccgagcaatttgaagagttatttaatttggccaagtatggtgtatcgacaataataaaaaaacaaaaa

SEQ ID NO: 254441 - DNA, 691 bp, Unknown
  Bacterial polypeptide expressing nucleotide sequence isolated from the Sargasso Sea
aatcagatgcgtaaaatttcatttgagaaaaacgtaaatattcatgctgatggttcttgtttagtaaaatttggaaatacgcacgtcctttgtcttgcaacaattgatgaaaaagttcctcattggttaaagaatactggcaaaggttggattacagcagaatatggcatgctaccaaggtcaacaaatactagaatggacagagaggctgcaaaaggaaagcaatcaggtagaactcaagaaatacaaaggttaattgggcgcagcttaagatctattgtgaatctttcaaatcttggagagcgtcaaataaaaatagactgtgatgttattcaagcagatggtggaacaagaactgcttctatcagtggtggttttatttctttatatctggcaatagaaaagttgaagaataattataatcttcaaaaaccaattatcaaaaactttataggagcagtatcaactggaatagttgaaaataaagcattattggatctagattataaggaagattccgaagctcaagtagatgcaaattttgtaatttgtgattcagatgaaatatctgaaattcaagtaactggtgaagaatttttttttaatgatgctcagtttacagaaatgttttcgctagcaaaaattggagttaaagagataatttcaaaacaaaaagaggctttggaataaa

SEQ ID NO: 254442 - DNA, 715 bp, Unknown
  Bacterial polypeptide expressing nucleotide sequence isolated from the Sargasso Sea
atgcgtccaagtaacagaacgccagcacaaactcgtcccatcactatcactcgccagtttacgacccatgccgaaggttctgtgttagtggaatttggcgaaacgaaagtgctttgtaccgccagttttactgaaggtgtgccacgtttccttaaaggtcagggtcaaggctgggtgactgcggaatacggcatgttgccacgttcgacccatagccgtatggaccgtgaagccgctcgcggtaagcaatctggtcgtacacaagaaattcaacgtcttatcggtcgtgcgctgcgcgcatgcgtggatatgaaagccctaggcgaaaacactatcgttatcgattgtgatgtgatccaagctgacggtggcacgcgcactgcctcaatcactggcgcctgtgtggccttagtggatgcattgaactgggcacgaggtaaagggatcattaaatctaaccctttgaaattccttatcgctgccgttagcgtaggtatttacaagggtgaagcgataagcgatctcgaatatatcgaagacagcgccgctgaaactgatatgaatgtggtgatgacagaaacgggtaaaattattgaaatccaaggtacagctgaaggtgagccgtttactcacgaagagttgattgagctactcggattggcgaagaacagtattcgtgaaatcgtcgatgtgcaaaaagccgctttaaactaat

SEQ ID NO: 254443 - DNA, 622 bp, Unknown
  Bacterial polypeptide expressing nucleotide sequence isolated from the Sargasso Sea
caaggtgctggtgaccgcctcgatcgaggacaaggtgccgggctggatgcgcaactcgggccagggatgggtgaccgccgaatacggcatgctgccccgcgccacccacacgcgtgggcgtcgtgaagccgccgccggcaaacagtcgggccgtacgcaagagatccagcggttgatcggccgctcgctgcgcgccgtggtggacctgaaggcgctcggcgaacgtcaggtgctgatcgactgcgacgtcatccaggccgacggcggcacccgcaccgcatccatcaccggcgcctgggtcgccatgagcctggccctgaactatctgcgcgacgagggcgtgctgaaggccgatccgatcacggatcaggtggcggccgtgtcgtgcggcgtctgtgacggcgtgccggtgctggacctggattacgaagaggattccgaggccgaggcggattcaaacttcgtcctgaccggctcgggccagatcgtcgaagtccaggccaccggcgagaagcgcggcttctcgcgagccgagttcgaccggctcttctcgctggccgagaccggctgcaccgaactgttcgccctgcagaaggcggccttggcggcggtgaagcgatag

SEQ ID NO: 254444 - DNA, 316 bp, Unknown
  Bacterial polypeptide expressing nucleotide sequence isolated from the Sargasso Sea
atgagaccatctggaagaaaattagatgaaattaggaaaatttctctgagtactaacgttaacaaacatgctgaaggctcctgccttgtgaaatatggtgatacacatgttatttgtactgccagtgtggatgaaaggctgccggcatgggtgaaagaccttggacacggatggataactgcagagtatggcatgttgcctagatccaccggagagaggtcgagccgcgaggcctcaagaggcaaacagggcggcaggacaatggagatacaaaggctaataggaaggtctttaagggctgcaactaatcttagcc

SEQ ID NO: 254445 - DNA, 253 bp, Unknown
  Bacterial polypeptide expressing nucleotide sequence isolated from the Sargasso Sea
aatgtctagagataatagaaaaccaactcaagcaagagaaatttccattgagacaaatgtaaatcttcatgctgaaggttcagtactggtcaagtttggtaatacacatgtaatttgtactgcaagtattgataacaatgtcccaagatggatgaagggatcagacaagggctgggtaactgctgaatatggaatgcttccaagatcaaccaatgagagaatgggcagagaagcagcaagaggaaaacagtca

SEQ ID NO: 254446 - DNA, 407 bp, Unknown
  Bacterial polypeptide expressing nucleotide sequence isolated from the Sargasso Sea
gaagacgctgggtgaaaacaccctgtatatcgactgtgacgtcattcaggccgatggcggcacccgcaccgcctccatcaccggcgcttgtgtcgcgctggtcgacgctctgcgtgccatgaagcagcgcggtgcgctgaaaaaggtgcccgaggtgcagatgattgcggccatctcggtgggtatctataaaggcgtgcccgtgctggatctggactaccctgaggattcgtccgccgataccgacctgaacgtcgtcatgactgacaagggcggctttatcgaggtacagggcacggccgaggcggcgccgttcagcgccgacgacctgaacgccatgctcgcgctggcacgtcagggctgtgagcagctgttcagcctgcagcaggcggccttggcagactgag

SEQ ID NO: 254447 - DNA, 624 bp, Unknown
  Bacterial polypeptide expressing nucleotide sequence isolated from the Sargasso Sea
ctttaataagctttgggctaacgcaagtaatatgtaccgcgtcgattgaaaaaggagtgccttcatttttgagagggaaaggacgtggatggatcacctcggagtatggaatgttgcctcgatccactggcgcacgaatggaccgcgaggctgtcaaagggaaacaaagcggacgaactcaagaaattcagcgtttgattgggcgatctcttcgtgcagcagttgatcttcaaactgtaggggaaaatacgataaagattgactgtgatgtaattcaagctgatggtgggactcgcacagcggctatcaccggtggttgcgtagcactaatggatgcgctttctcttttaggggagagtgtttcaactaaatttgtttcagcggtttcggttggtatagtggatggcgaaccggttttagatttagagtatgtcgaggattccagagctgacacagatatgaacttcgtattgagtgaagacgggagctttatcgaaatccaaggaacagcagaaggcaatactttcactgatcgtgaactcttcaagatgatcgaattagctcagaagggaggtgccgagttgatatcactgcagaagcgagtgctattggagaacgcgtaaa

SEQ ID NO: 254448 - DNA, 599 bp, Unknown
  Bacterial polypeptide expressing nucleotide sequence isolated from the Sargasso Sea
gatgataagacaagacggtagatcaaaaaaccaggtcagaccccttcgtataaccccccattactccaaatatgctgatgggagtgttctcattgaaacaggagagacaagggttctttgtaatgcaacagtagaagaaagccttcctcattggctaagacagcagcgtttgtcaagaggctggctgacagctgagtattcaatgcttcctcgctcaaccaacacaagagtcagaagagagagacagcaccctagtggacgatctcaagaaattcaaaggcttattggtcgaagcttgcgtggtgttcttgatttttcaaagcttcctgaaagaacgattattatcgactgtgatgttcttcaagctgatggaggaacaaggacagcttcgattacaggaggttatatagctcttaagatggctgtcgataagcttttaagagagaataagatcaaacaaaacccactgatcgatggtgttgcagctgtttctcttggcattcataatgatagcattcttcttgatctaaactacgaagaagacagtacagctgatattgatatgaatcttgtcatgacacacagtgaaaaaattcttg

SEQ ID NO: 254449 - DNA, 663 bp, Unknown
  Bacterial polypeptide expressing nucleotide sequence isolated from the Sargasso Sea
aatgagacaagatagaaactttgaggaattaaggcctatttcattcgaaatagatgtaaatattcatgctgaaggttcatgtcttgtgcggtttggaaatactcaggttttgtgtacagcttcaattgatgagaaggccccacattggctaaaaaatactggaaagggttgggttactgcagaatacggaatgcttcctaggtctaccaacacccgaatagatcgagaggctgctagaggtaaacagactggaagaacacaggaaattcaaagattgattggcagaagtttaagatcagttattaatctggaaaatattggtgaaaggcaaataaaaattgactgtgatgtaattcaagctgacggaggtacaagaactgcttcaataagtggcggatttattgctctttaccaggccgttcttaatttaaaaaaaaactataatattcaaaaaccaataattaaccaatttgttgcggcggtatctgcaggcataatacaaaatcacccaatcttagatttagattataaagaggactcacaagcacaagttgatgccaatttcattatttgcgaaaatggtaaaatagcagaaatacaagttactggagaagaaatatttcttagtgaaaatcaatttcaatcctttattcgatcttgcaa

SEQ ID NO: 254450 - DNA, 709 bp, Unknown
  Bacterial polypeptide expressing nucleotide sequence isolated from the Sargasso Sea
tatgagaaaagatagaacctttgatcaaatgcgtgatgtttcatttgaaaaaaatgtaaatattcatgctgatggttcatgtttggtaaaatttggaaacacacatgtgttgtgtcttgcaacaatagatgaaaaaattcctcattggttaaaaaatactggtaaaggctgggtgacagctgaatatgggatgttaccaagatctacaaattcgaggatggatagagaagcagctaaaggtaaacaatctggcaggacacaggaaatacagcgtttgattggaagaagtttaaggtctgtagttaatttagaaaatttaggtgaaagacaaataaaaatcgattgtgatgttattcaggcagatggtggtactagaacagctgcgattagcggtgggtttgtctcgctatatctagctattaacaaattgaaagaaaattataatatccaaaaaactattattaaaaactatataggtgcagtttctgcaggcattataaatgataagcctttgttagatctaaattatattgaggactctgaagcacaagtagatgcaaattttgtaatttgtggaactggtgaaatatctgaaatccaggtaacaggtgaagaatttttttttaaagactatcagttcaatgaattatttgaacttgcaaaaaaaggtattaaagaaattattgagcttcaaagaaaagtgttagat

SEQ ID NO: 254451 - DNA, 706 bp, Unknown
  Bacterial polypeptide expressing nucleotide sequence isolated from the Sargasso Sea
atgacagaaaaaaataatagatcaaatgatgaaatgagacctctagaaattgaggttggcgtgaataaacatgctgaaggttctgctctaataaagtttggagacactcatgttatatgtacagcaagcattgaaaatcatgtgcctagatggatgagaggctcaaatgaaggttggattactgcagaatatggaatgttgcctcggtcaacccacgaacgcatgaatagagaagctgccagaggtaaacaaagtggcaggaccatggaaattcaacgactgataggtaggtcattaaggcaagctgttgatcttaaatatttaaaagataaaacaatcaatatagattgtgatgttattcaagcagatggcggcacaagaacggcatctatttcaggggcttgtgttgctttatttgaagccattaaaaattctcatgatgatcacagggcaatcaaagaacatgttgcagctgtctcaataggattaaaagatggctgcccccttttagatttagattatgatgaagatagctctgctgatacagatttgaacgtggtaatgaccgaaagcggcggaattatagaaatccaaggaacagctgaaaaatatcctttctctaaaaatgagcttgatgaaatgattgaatctgcttcaaacggtattgcagatatagtaagttttcaaaaatcatgtctgagctaaa

SEQ ID NO: 254452 - DNA, 523 bp, Unknown
  Bacterial polypeptide expressing nucleotide sequence isolated from the Sargasso Sea
gaatatggaatgcttccaagatcaaccaatgagagaatgggcagagaagcagcaagaggaaaacagtcagggagaactcaggaaatacaaagacttattggaagatcccttagacaatctgtaaatcttaaatatttaaaagataaaactattcaagttgactgcgatgttattcaagcagacggaggtacaagaactgcttcaattactggtggatgtgttgcacttttccttgcaataaagaatcaccatgatgatcaaagagcaattgaacaatacgtggctgcaatctctttaggtgttaaagatgacgaaatactagttgatcttgactaccaagaagatagcactgctgatgcagacattaatattgtaatgacccaggatcttgatttaattgaaattcagggtaccgctgaagagcgtcctttttcgcaagaacaactcactgaaattgtaagcaaggctagctcatctattaaggatatagttgctatccaaaaacaggctgtagaaagatagt

SEQ ID NO: 254453 - DNA, 577 bp, Unknown
  Bacterial polypeptide expressing nucleotide sequence isolated from the Sargasso Sea
atggacacgttaagtaaagagatgagaaatgtttcaatatcttttgatttattaacgaacgttgaaaattcctgtctaataaaatttggcaacactatcgtcatttgtaaagcaactattgaagaatctgttcctcctttcctaagaaaaagcggtatggggtgggtgacagccgagtacggaatgttaccaggttctacaaatgaaaggatgagaagggaagctaaacaggctggccaaagtggtagaacacaagagattcaacgattgattggaagaagtttaagggtggctgttgacagagttgcgctaggtgagagacaaatagttgttgattgtgacgttatccaagctgacgggggcactagatgtgcctcaatctgtggaggttgggttgcactaaaactagccaccaacaccttgaaaagaagtggacagataaagtttgaccctattatccggcatgttgcagcgatatcatgtgggattgtcgatggagaaaaaaaactggaccttaattatcaagaagacagtgcagcggagacagatgctaattttgttatggacgataaaggag

SEQ ID NO: 254454 - DNA, 400 bp, Unknown
  Bacterial polypeptide expressing nucleotide sequence isolated from the Sargasso Sea
atgagaaaagatagagactttgacgaaattagagaaattgtttttgaaaccaatataaatatgcatgctgaaggttcttgtttggttaaatttggtaatactcaagtaatctgtacagcttctattgatgaaaaaacccctccttggcttcgaggatcaggaaagggttgggttactgcagaatatggaatgctacccagatcaacaaacacaagaatagacagggagtcatcaagaggaaaacaaagtggcagaactcaagaaattcagaggttgattggaagaagtctaaggtcagttgtaaacttagaaaaccttggtgaaagacaaattaaaatagattgtgatgttgtacaggcagatgggggcactagaactgcagcaattagtggaagttttg

SEQ ID NO: 254455 - DNA, 574 bp, Unknown
  Bacterial polypeptide expressing nucleotide sequence isolated from the Sargasso Sea
ttttggctaagaggatccgggaaaggttgggtgaccgcagagtatggcatgctaccgagatcaacacacataagaatggaccgagaaattagtaaaggaaaaatttcagggagaactcaagaaatacaaagattaattggtagatcattaaggtctataatagacctagaatctttaggagaaatacaaataaaaattgattgtgatgttatccaagcagatggcggaactagaacagcatcaataactggagcttgggtggctcttcacgatgcagtaaaatttctgatgtctaaaggaaaagtgtctcgaaatcctattacagaacaagttgcagccatatcatgcgggattgtgtcaggagaatcattaattgatttagattatagcgaagattcaacagctgatgttgatgcaaactttgtattaacagatagcaaaaatatagtagaagtgcagacaacttctgaaaaacaaactctaaccaaaacagagtttatgacattatatgagcttgctgaaagtcaaatagacatattatttaaaaaacaattaaatgttatatcaaaatgat

SEQ ID NO: 254456 - DNA, 451 bp, Unknown
  Bacterial polypeptide expressing nucleotide sequence isolated from the Sargasso Sea
tatgagaaatacaagaaaaattggcgatcttcgtaaatttgaaattattccaaatttctcttcatatccagaaggttcttgtatgataaaatttggcgaaactcaggtattatgtaacgcttctcttgatcaaaatgttccaaggtggcttaagaattctcagcaaggctgggtaaccgccgaatatggaatgcttcctagatcaacatctgaaagaatgtcccgagaagctgtcagaggcaaacaatcaggaagaactcaagaaatacaacgtttgattggcagatcgttgagagcggtaacagatcttagtttgttaaaagatatgcaaattttaattgattgcgatgttatccaagctgatggtggaacacgaacagcttcaatttcaggtgcctttgtagcattgcggttatgtattcagaacattattgagaaaaagattataaaa

SEQ ID NO: 254457 - DNA, 288 bp, Unknown
  Bacterial polypeptide expressing nucleotide sequence isolated from the Sargasso Sea
aatgagcgcacaaactatcagaccatctggtcgtaaatatgatgaagcaagaattgtctcggtagaaatcggaaaatccaagtatgcagagggttcttgtttgataaagtttggcgatactcacgtcttttgcactgcaagcgttgaggaacgtgttcctccatttcttacaggaaaaggaatagggtgggttaccgcagagtacgggatgcttccaaggtctacacacactcggacggatcgtgaggctgcaagaggaaaacaaagtgggcggacgcttgagataca

SEQ ID NO: 254458 - DNA, 394 bp, Unknown
  Bacterial polypeptide expressing nucleotide sequence isolated from the Sargasso Sea
catgtccgatccccgtcccagcggccgccaggccgaccagctgcgcgaagtgcgcatcgaacgcgccttcacccgccacgccgaaggttcggtgctggtcagcttcggtgaaacccgcgtgctgtgcaccgccagcgtggaaaaccgcgtgccgggcttcctgcggggcaagggcgaaggctgggtcaccgccgagtacggcatgctgccgcgctccacccatacccgcaacgaccgcgaagcggcgcgtggcaagcagggcggccgcaccctggagatccagcgcctgatcggccgcaccctgcgcgcctgcatcgaccgcggcgccctgggcgaacgcaccatcaccctggactgcgacgtcctgcaggccgacggcggcacccgcaccgcg

SEQ ID NO: 254459 - DNA, 433 bp, Unknown
  Bacterial polypeptide expressing nucleotide sequence isolated from the Sargasso Sea
ttctgcagtaaatctatattcacttgaaaaacatacagtttggatcgactgcgacgtaatacaggctgatggtggcacccgaactgcttcaatcactggaggatttgtggctttaatttttgctttgaggaaaatttacgataaaggagatatcaaagagttcccagtaaaagaatttctagcagccataagtgttggtatagttaaccagaagcctattttagatttgaattatgaagaagacaaagatgcagaagttgatatgaatgttgtcatgctaggttcaaaaaaattagtcgaagttcagggcactgcagaaggaagaacctattcacgtaagcaattaagtataatgcttgatttggcagagatgggaattcattcacatattagttcacaaaaaaaagtgcttggaaacaatcttgctggataa

SEQ ID NO: 254460 - DNA, 520 bp, Unknown
  Bacterial polypeptide expressing nucleotide sequence isolated from the Sargasso Sea
atgagaaaagaaagattgttcaaccaaatgagagaggtttcgtttgaaaaaaatgtaaatattcatgcagatggctcatgtcttgtaaaatttggaaatactcacgtactttgcatggcatcaattgatgaaaaggtcccacattggttaaaaaatactggtaagggttggattactgcagaatacggtatgttgccaagatcaacaaacacacgtatggatagagaggcaactaaaggtaagcagtctggtaggactcaagaaatacaaagattaattggtagaagtttgagatcagtaattgatcttggtaatttaggagaaagacaaatcaaggttgactgtgatgttatacaagcagatggtggaacaagaactgcatccattagcggtggctttgttgccttatacatggccattgaaaaaattaaaaaaaattacaatatgcagaaacctataattaaaaactttataggtgctatttcagctggaataattgataacaaacctcttttagatt

SEQ ID NO: 254461 - DNA, 544 bp, Unknown
  Bacterial polypeptide expressing nucleotide sequence isolated from the Sargasso Sea
ttgggttacagcagaatatggcatgctaccaaggtcaacaaatactagaatggatagagaggctgcaaaaggaaagcagtcgggtagaacgcaagaaattcaaaggttaattgggcgtagtttaagatcaattatagatctttcaaatctaggagagcgtcaaataaaaatagactgtgacgtaattcaagcagatggtgggacaagaaccgcttctatcagtggtggttttatttctttatatctggcaatagaaaagttgaaaaataactataatctccaaaaaccaattattaaaaactttataggagcagtatcagctgggatagttgaaaataaagcaatattggatctagattataaggaagactccgaagctcaagtagatgcaaattttgtaatttgtgattcagatgaaatatctgaaatacaagttactggggaggaattttttttcaatcatactcagtttacagaaatgttttcattagcaaaaattggagttaaggagataatttctaaacaaaaagaggctttgaaataa

SEQ ID NO: 254462 - DNA, 654 bp, Unknown
  Bacterial polypeptide expressing nucleotide sequence isolated from the Sargasso Sea
tatgagaaaagatagggcgtttgacgaattaagagaaattgcttttgaaactaatacaaatattcatgctgagggatcttgtttggtaaagtttggcaatacccatgtaatatgcacagcttctattgatgaaaagacccctccttggttgaggggctctggtaagggctgggtaacggctgagtatgggatgcttcccagatcgacaaatactagaatagatagagagtctgcaaaaggcaaacagagtgggagaacccaagaaattcagcgattaataggaagaagccttaggtctgttattaatttaaataatcttggtgaaagacaagtaaaagtagactgtgatgttattcaggcagatggggggactagaacagcttcgataagcggggggtttgtagcattatatttggcaattgataaactgaagaaaaactacaacatagaaaaaccaattattaaaaactttgttgcagctatttctgctggaattattgataacaaggcacgtgttgatttggattataatgaagactctgctgcagaggtagatgctaattttgtaatttgtgacaacggaaaaatttctgaaattcaggcgacaggcgaggagtatttctttagtgaagaacagtaccaagagatgtttaa

SEQ ID NO: 254463 - DNA, 721 bp, Unknown
  Bacterial polypeptide expressing nucleotide sequence isolated from the Sargasso Sea
tatgcgtatagataagagaaaacctgaccaactgagaaatattgactttaaattagactttattagatcttcagaggctagtgtgctcgcttcatttggagatacaagagtattatgtaccgcgacaattgaacacaatgtaccgaggtggatgaaaaataagggacatggctgggtaacggctgaatatggcatgctgccaggatccacaagccagagaaatatgagagagtctgtgaaaggaaagcaaagtggcaggactcttgaaatacagaggctgattgggagatcactcagagccgcagttgatctcgaagctcttggtgagagaaccataatattagattgtgacgtaattcaggcagatggaggaaccagaactactgcaataaacggagcatttatcgctctgagcagagcagtaaatagtttgtttgatgacagaaaaatagattctgacccaataaaaaaatttcttggggctatttctgtaggaatttataagaatgaagtaattatggatctaaactacaatgaggatagccaggctgatacagatatgaatattgttatgactgaagattctgagtttattgagattcagggtacagcagaaagcggatctttcagcagtgatcagttggcattgatgctgaattatgcagagaaaggcataaaagaaataactttgcatcaaaaaaaactattatcatcaaactaa

SEQ ID NO: 254464 - DNA, 756 bp, Unknown
  Bacterial polypeptide expressing nucleotide sequence isolated from the Sargasso Sea
tggacttcaccccgaatgcactgtcttctcttctctactcgcaggggaacacccaagtcctggtctgcgtcaccaaggcaccttctctccccaggtggttccctcgagactctgacagggggtgggtgcatgccgaatactcgttgcttccaggctcgaccgacaccagattcaggagagagaggagcggtgccaagggtaggacgatggagatagagaggctagtcgctcgatcgctgaggggagccgtagacctggagcaactgggcccagtggcgctgactgtggactgcgacatcctgaatgctgacggaggaaccagatgcgcttcaataacggcagcaaacatcgcactgaggctcgctgttaggagactcatctcctccggggagtgcctgccgaaggacaggaggctcaccagggagcagatcaggaaaggcgcgaagcaggagactcttagcaaggaacagatggcttcccacgaagactccgtgatgcccaatgacgttgcagcgcttagtgtgggaatggtcgagggacaggtctggacagacttggattacgttctcgacagcaatgccgacgtcgacatgaacgtcgtgatgactagctctggggacttcgtagaggttcagggaaccggcgaggaggcaacctattccagagaagagctcgactctctgatcgacgctgccgaggcaggaatagcgaagttgcacaagctacagaccgaagtcctctctaatgcgagttgat

SEQ ID NO: 254465 - DNA, 312 bp, Unknown
  Bacterial polypeptide expressing nucleotide sequence isolated from the Sargasso Sea
tatgacaaggaaagatagggctttagatgaaatgagggatatctcatttgaaactaatataaatttgcatgcagaaggctcatgcttggttaaatttggaaacactcaggttttgtgtactgcttctgttgatgaaaaaacacctcactggttaaaaaacactggtaaaggctgggttacggcagaatatgggatgttgcctaggtctacaaatacgagaattgatagggaagcagcaaaaggaaaacaaagcggcagaactcaggaaattcaaagattaattggtagaagtttgagatcgattattaattt

SEQ ID NO: 254466 - DNA, 262 bp, Unknown
  Bacterial polypeptide expressing nucleotide sequence isolated from the Sargasso Sea
aatgagaccatctggccgccaacacaacgagaaacgagctgtttctgttgagatcggaacctcaaaatatgcagaaggatctagtttaataagatttggcgatacacatgtgctttgtacggcgagtgttgaagagcgtgttcccccatttttgagaggccagggtataggttgggttaccgctgagtatggcatgcttccaaggtctacgcacactcgaacagatcgggaggcggcaagagggaagcaaagtgggcgaaca

SEQ ID NO: 254467 - DNA, 698 bp, Unknown
  Bacterial polypeptide expressing nucleotide sequence isolated from the Sargasso Sea
catgaaaagaaatcaagatcgaagtaataatcaactaagagatattactattgaaccaaatataaatattcatgcagaaggttctgtattaatttcatttggtaatacaaaagtcatttgtaatgcatcaatagaaaataatgttcctagatggatgaaaaattctgatgaaggttgggtgactggtgagtatggaatgcttccaaggtctactaatgaaagaatgagcagagaggctgcaagaggcaaacaaagtggcagaacacaagaaattcagagactcattggaagatcattaaggcaggcagttaatcttaaatatcttaaaggaaaaactataaatgttgattgtgatgttatacaagctgatggtggaacaagaacggcatcaattacaggtggttgcgtagcactttttttagctattaaaaatcatcatgacgatcaacgtgcaattaaatcttttgttgcagcagtatcaatgggtattaaagaaaatcaagttctacttgatctggactatgatgaagatagcactgcagatacagatttaaatattgttatgaacgataaagacgaattaattgaaattcaaggtaccgcagaagacgctcctttttcaaaaaaggaacttgatgatatgcttgtgatgggcagccaagcaatagctgatattattaaaaaacaaaaagcttgta

SEQ ID NO: 254468 - DNA, 364 bp, Unknown
  Bacterial polypeptide expressing nucleotide sequence isolated from the Sargasso Sea
atgaattcgcgctttgatggtagacaaacggggcagatgcgctccatttcatttgaacgaaactttacaagacatgcggcaggatctgtattgatgtgttttggagatacaaaagtattatgtacggcaagtgtagaagaaaaagtgccacgatttttgaaagatcaagggcgagggtgggttacagcagagtatgccatgttacccagttcaacacatacccgaatatcgcgtgaggtatctagaggaaaaccgtctggtcgaaccagtgaaattcaacgattaattggccgagcattacgttctattatcgattttgaacgtttaggagaacgtaccatttatattgatgcagatgtaattc

SEQ ID NO: 254469 - DNA, 595 bp, Unknown
  Bacterial polypeptide expressing nucleotide sequence isolated from the Sargasso Sea
cctcaaacttcctgaaaactgttacaagcatggctgggtcactgcggaatatggaatgcttccaggttcaaccggaaaaaggaaacggcgggaaagaccccaggttgatggacggactcaggaaatacaacgcttgattggccgatcgttaagatccgtagttgatttgaaggccctcggcaggcataccgtatggatcgattgtgatgtcattcaggcagacggaggcacccgcactgcctcgatcacaggtggatttgtcgccctgattctggcactaaggcagatgcaggctgaaggaagattcaaaacatttccggtcagtcgattccttgcttccataagcgtcggtatttttgaaggacgtccgcttcttgatctcaaatatgatgaagacgtaaaagcagaagtcgatatgaacgttgtcatgctggacaatggtgattatgttgaagttcaagggactgccgagggtcagactttcccaaggaatcaactcaatcagctgctggattttgcggaaaagggaatccgatcccacttgcagaatcaaaagaaactccttggtgagcatctggaatcaggtgtcttctaa

SEQ ID NO: 254470 - DNA, 544 bp, Unknown
  Bacterial polypeptide expressing nucleotide sequence isolated from the Sargasso Sea
aatgagtgcacaaactatcagaccatctggtcgtaaatatgatgaagcaagaattgtctctgtagaaatcggaaaatccaagtatgcagagggttcttgtttgataaagtttggcgatactcacgtcttttgcactgcaagcgttgaggaacgtgttcctccatttcttagagggaaaggaatagggtgggttaccgcagagtacgggatgcttccaaggtctacacacactcggacggatcgcgaagctgcaagaggaaaacaaagcgggcggacgcttgagatacaaagattgattggtagatctctaagagccgtgacggatgaaaaatccctcggggagagacaaatccggatagattgtgatgttatacaagcagacggaggaacaagaaccgcagcaattacaggtggctatatcgcgctccatttggcgcttagaaatttggtttctaaaaaagtcctgcctagcatcccccttcatggtgaggttgccgctatttcctgcggggtttatcaaggacaagctgtttttggaccttga

SEQ ID NO: 254471 - DNA, 629 bp, Unknown
  Bacterial polypeptide expressing nucleotide sequence isolated from the Sargasso Sea
ggagtttggcgacaccaaagtcatctgtactgccagtgcggaaaccaaagtaccacctttcctgcgtggtcagggccagggttgggtcaccgctgaatacggtatgctgccacgctctaccggttcgcgcatgatccgtgaagccgccaaaggtaagcagcaggggcgtactgttgagatttcccgcctgattggccgtagcctgcgcgcagcagtcgaccttgaagctctgggtgaaaacaccatcactatcgactgtgatgtgattcaggcggatggcggtacccgcactgcatcgatcacgggcgcctgtgttgctcttgccgatgccattaactggctgaaagaaaacggcaaggtaaaaggtgagccgctgaagcagatgatcgctgccgtatcggttggtatctataacggtgaggccgtgttagatctggattacgccgaagactcaacggctgaaacggacctgaacgtcgtcatgaccgagaaaggcggttacgtagagattcagggcactgcggaaggggaagctttctctgcggaagagctgaatgccatgctggcacatgctcagaaggctatcggtgaattgtccgagctacagaaggcggctctgtcatcctgat

SEQ ID NO: 254472 - DNA, 360 bp, Unknown
  Bacterial polypeptide expressing nucleotide sequence isolated from the Sargasso Sea
catgcgtcctagcggcagaacagcgagtcaaattcgtcctattactttcacccgtcaatttacggctcatgctgaaggttcagtattggttgagtttggtaacactaaagttatttgtactgccagcgtgattgaaggtgtgccacgttttatgaaaggccagggcaaaggctggatcacagctgaatatggcatgttgccacgtgcaactcatacccgtaacgaccgtgaagcggctcgtggtaagcagggtggccgtactatggaaattcagcgtctgattggccgcgctttacgtactgctgtggatttaaagctgttgggtgaaaacactattactatcgactgtgacgtgatcca

SEQ ID NO: 254473 - DNA, 283 bp, Unknown
  Bacterial polypeptide expressing nucleotide sequence isolated from the Sargasso Sea
aatgaaaagaaatcaggaccgccctctaaataaactcagagaaatctcactagaaattaatattaatattcatgctgaaggttcagtattggtttcatttggtaacactaaagtgatttgtactgcatcaattgagcataacgttcctaggtggatgaagaactctgatgaaggatgggttactgcggaatatggtatgttaccaagatctacaaatgaaagaatgggtagagaagccgcaagaggaaagcagagtggcagaactcaagaaattcaaagatta

SEQ ID NO: 254474 - DNA, 497 bp, Unknown
  Bacterial polypeptide expressing nucleotide sequence isolated from the Sargasso Sea
tatgagaaaagatagatccttcaatcaaatgcgtgaaatttcatttgagaaaaacgtaaatattcacgctgatggttcatgtttagttaaatttggaaatacacatgtcctttgtcttgcaacaattgatgaaaaagttcctcactggttaaagaacactggtaagggttgggttacagcggaatatggcatgctaccaagatcaacaaatacaagaatggacagagaggctgcaaaaggaaagcagtcgggtagaacgcaagaaatacaaagattaattgggcgtagcttaagatcaattgtggatctttcaaatcttggagagcgccagataaaaatagattgtgatgttatccaggctgatgggggaacaaggactgcctcaataagcggaggttttatttctttatatttagcaatagagaaattaaaaaataattacaatctgcaaaaaccaattataaaaaattttattggagcagtatcaacagggatag

SEQ ID NO: 254475 - DNA, 611 bp, Unknown
  Bacterial polypeptide expressing nucleotide sequence isolated from the Sargasso Sea
tatgagaaaagatagatccttcaatcaaatgcgtgaaatttcatttgagaaaaatgtaaatattcatgcagatggttcgtgtttagtaaaatttggaaatactcatgtgctttgtcttgcaacaattgatgaaaaagttcctcactggttaaaaaatactggcaaaggttgggttactgcagaatatggaatgcttccaagatcgacaaatactagaatggatagagaggctgcaaaagggaagcaatcaggtagaacgcaagaaattcaaaggttaattggacgtagtttaagatcaattgtagatctttcaaatcttggagagcgtcaaataaaaatagactgtgacgtaattcaagcagatggtggaacaagaactgcttctataagtggtggttttatttctttatatttagcaatagaaaagttgaagaataattataatctccaaaaaccaattatcaaaaactttataggagcagtatcaactggaatagttgaaaataaagcaatattggatctagattataaagaagactcccgagctcaagtagatgcaaattttgtaatttgtgattcagatgaaatctctgaaaattcagttactggtg

SEQ ID NO: 254476 - DNA, 490 bp, Unknown
  Bacterial polypeptide expressing nucleotide sequence isolated from the Sargasso Sea
aaagagaacaagagttggaaaacagtcaggaagaacaattgagattcaaaggcttataggaaggtctttgagatcagtagtggaacttgaaaaactaaatggttttcaggtaatcctagattgcgatgtcattcaagctgatggaggcacaagaaccgcaagtatttctggatcatttgtagcattgaatttagccttaaaaaaatttattaaaaaagattttataaaaagtaatcctgtcaaagactatgttgcagcaatctcatgtggaatagtaaatgggaaagttttagtagatctagactatgatgaagattcatcggccgatgtggatgcaaattttataatgacgaaaaaatcagggttctcagaaatacaaatatccggggaaaacagtactttcaattaccaatctgttactcagatggtagatataacaaagaaaatagtaaatcaaatttttgatattcaaaaaaatgcaattaaataa

SEQ ID NO: 254477 - DNA, 703 bp, Unknown
  Bacterial polypeptide expressing nucleotide sequence isolated from the Sargasso Sea
agagaactttctaaaattagaaatttagaaataattccaggctttcaaccaaataatcaatcatcatgtttagttaaattaggaaatactcatgtttgttgctcagcgattatcgaagatagagttcctggatttttaagaaattctggaaaaggttggttaactgcagaatatggtatgttaccttcttctacatctgaaagaatggacagagaggcggccaaaggtaggcaatctggaagaacacaagaaattcagagacttattggaagaagtttaagatgtgctgtaaatttagatgtacttggggaaaaaactatcaaggttgattgtgatgtgattagtgctgatggaggaacaaggacagcatctatcattggtgggtacgttagtctcgttcgatcagttaatgatttcaaaaataaatttaatttatcaaaagcaattatagtaaatcaagttgcagcaatatcggttggtgttgttaagggaacatcatgcatagatttaaactatattgaagactcaagtgctgaagtagattgcaatgtggtaatggcaaatgatggtcaatttattgagtttcaatcaactggtgaagaggctaaatttagcaaaaaaactattatgagttttatagaactagttgaaggatcgatgccagaaattttcaatattcaaaatttggcaattgaaaaataat

SEQ ID NO: 254478 - DNA, 718 bp, Unknown
  Bacterial polypeptide expressing nucleotide sequence isolated from the Sargasso Sea
atgcgtccttccggccgcgcgcccgaccagatgcgcgacatcaccatggagcctggcttcaccatccatgccgagggaagctgcctcatcagcttcggcgatactcgcgtgctgtgcaccgcatcggtcgaggagaaggtgccgcctttcctgcgcggcaaggggtcgggctgggtcacggccgaatatggcatgttgccccgcgccacccatacccgcggcagccgtgaagcggccaagggcaagcaatcgggccgcacgcaggaaatccagcgcctgatcggccggtcgctgcgcacggtcgtggacctcaagaagctcggcgagcgccagatcgtggtcgattgcgacgtgatccaggccgatggcggcacgcgcacggcggccatttcgggcagctgggtcgcgctgcgaatcgcggtcgacaagctgctggcgtcgggcgcgctcaaggaagacccgatcatccagaaggtcgcggcgatcagctgcggcattttcgaaggcacgccggtgctcgacctcgactatgccgaggacagcaatgccgaaacggacgccaacctgatcctgaccggcgacggcaagttcgccgaagtgcaggcgacggccgaaggcgccgcgtatgacgaggaagagctgctccgcctgctccgcctcgcccgcatcggctgcgccaagatcttcgccgcgcaggatgtcgcgacgggccggtaac

SEQ ID NO: 254479 - DNA, 586 bp, Unknown
  Bacterial polypeptide expressing nucleotide sequence isolated from the Sargasso Sea
tgtgccgaggtttttacgagattcggggcagggctgggtaacagcagaatactctatgatgccagcagcaacatcagaacgtaaccggcgcgaagtaagtaaaggaaagcaatccggacgaacaatggaaattcaacgattaatcggtcgatcattacgagccgcagtggacatggaaaagttgggagaagtaagcatcattatcgattgcgatgttattcaagcagatggtggaacacgtacaacgtccattactggtgggatgattgtgttatatgatgccatccaaaaattaatgaaagaaggaattgttaccgaagatcctattcgtcattttgtatcagccatcagtgttggcttggttgacaatcaagtggtattggatttagattatatcgaagattcaggcgcagacgtagatttaaatttagtgatgacggatgccggaacatttattgaaattcaaggaacagctgaaaaggatccattttcaaatgaacatttatcacagtttatcgagattggtaaaaagggaatcgatacaattatggagcaagttaaagaaaccgttgctgtttctgcttag

SEQ ID NO: 254480 - DNA, 448 bp, Unknown
  Bacterial polypeptide expressing nucleotide sequence isolated from the Sargasso Sea
tatgaccaaaaatacttcccggaccgatgggcgttttgatgatgaagtccgtaaacttgaactgatttcaggatacacccaaaatgctccgggttcggtgctggtttcaacaggcgatacacgaatcatctgcactgcaactttcgaggaagaggttccgggtttcctcaaacttcctgaaaacggttacaagcatggctgggtgactgcggaatatggaatgcttccaggttcaactggaaaaaggaaacggcgggaaaggccccaggttgacggacggactcaggaaatacaacgcttgattggccgatcattaagatccgtagtcgatttgaaggccctcggcaggcataccgtatggatcgattgtgatgtcattcaggcagacggaggcacccgcactgcctctatcacaggtggatttgtcgccctgattctggcactaagg

SEQ ID NO: 254481 - DNA, 660 bp, Unknown
  Bacterial polypeptide expressing nucleotide sequence isolated from the Sargasso Sea
tatgagaaaagataggctgtttaatgaaatgcgggaaatatctttcgaaaaagactttaatatacatgctgaagggtcttgcttagtcaaatttggaaaaacacatgttttgtgtacagcctctatagatgaaaaaactcctcattggctaaaaaattcaggcaaaggttgggttactgctgaatatggtatgcttcctagatcaacaaatactaggatagagagagaggcagcaaaaggaaaacaaagtgggagaactcaagaaattcaacgtttaattggtagaagtttaaggtcaataactaatttagataatttaggtgaaagacaaattaagattgactgtgatgttttgcaagctgatggaggaaccagaacagcttcaataagcggtgggtttgttgcgctttatctagctgttaaaaaacttaaagaaaattataatatacaaaaaccgattattaaagaatttattggtgctgtttcaactggcataattaatgggaaagctaatctggatttaaattataaagaggactctgaagcgaatgttgatgctaactttgtgttatgcgaaagtggaaaaatagctgaaatacaagttacaggtgaagaatacttttttagcgaagaacaatttaatgaaatatttatattagc

SEQ ID NO: 254482 - DNA, 506 bp, Unknown
  Bacterial polypeptide expressing nucleotide sequence isolated from the Sargasso Sea
aaatacacgtatggatagagaggccgcaaaaggtaaacaaactggaagaactcaagaaattcaacgtttgattggtagaagcctaagatctgttgttgacctaaaatctttaggtgaaagacaaataaaaatagattgtgatgttattcaagctgatggtggaactagaacagcatctatcagtggcggttttgtctcaatgttcttagcaataaataaaatcaaaaataattacaatttacaaaaaccaataataaaaaattatattggtgcaatatctgcaggcataattgatgacaaaccactattagatttagactacaaagaagactctgaagcacaagtagatgccaattttgtaatttctgatactggtgaaatatctgaaatacaggttacaggagaagagtttttctttagtgataatcagtttaatgaaatatttaatttagcaaaaaaaggaattaaagaaataattgatttacaaaaaaaggttctatcttaag

SEQ ID NO: 254483 - DNA, 550 bp, Unknown
  Bacterial polypeptide expressing nucleotide sequence isolated from the Sargasso Sea
aatgaggttaggtggtcgtaaaaacggggagctgagagaaatttcaattaccaggggatacactaagtatgctgagggttctgttcttattgaatttggtgataccaaggtcttgtgtaatgcgtctgtcgaagattctgttccccgatttcttaaggggaaggggcaaggttgggtgactgctgagtatggcatgattccgcgttcgactaacagtaggatggagcgcgaagcgacgagatcacaaagagcagctagaagtatagaaatacaaagactgatagggcgatctttgcgtgcagttgtcgacctgaagaagttgggtgaacgaacaatcaagattgattgtgatgtattgcaagcggatggcggtacacgcacagcttcaataactggagcatgcatagcggtagttgatgctatatctcatattctggaggaaaaagtgttaaccgaatcaccattaaagcaattagtcgcttccgtatccgctggacttgttaatgggcaaatagtacttgatctggactatctagaagattccaatgca

SEQ ID NO: 254484 - DNA, 721 bp, Unknown
  Bacterial polypeptide expressing nucleotide sequence isolated from the Sargasso Sea
atgtcagatcgccacgacggacgccggacggaccaaggacggaaggttcgaatcgaagtctcaacggccccgtacgcggaagggtcatgtctgatctcgaccgggaatacccgtgtgttatgcactgcgagtgtgtccgagggagtgccgccttggcgtgagagaagtggagccgggtgggtgacggcagaatacgcaatgcttccacgagcgactcacacgcggagtcggcgggaacgcagtggtccaaaaggccggacccaggagatccagcgcctgatcgggcgctctctgcgctccgtcgtagatatggaggcgatggggcagcatacgattacgattgattgcgatgtcatgcaggcagacgggggtacccgtactgcgtcgattacaggagcctgcgtagcgcttgaactcgcaacaaagtggatgacttccgagggcctgatcgaacggtcaccgattagggaacgagtagcggctgtgagtgtcggtattgtgagtgggttgccgtgtctggatctcgattaccgggaggattccagcgctcaagtagatatgaatttggtggggactgagagtggtgctctcgtcgagattcaggggacagccgaaggagacccatttcccagggctcatcttgatcaaatgatcgatcttgggatggctggtatagaaacgcttctggcagctcaggcgcgggcactgagtgggagctgat

SEQ ID NO: 254485 - DNA, 459 bp, Unknown
  Bacterial polypeptide expressing nucleotide sequence isolated from the Sargasso Sea
tggtgatacacatgttttgtgtactgcatcggttgaaaatagggttccaccatggttaagaaattcaggatctggttgggtaactgctgaatacggtatgcttccaagatcaaccggtgatagaatgcgaagagaggcatctgtgggcaaacaatctggaagaactcaagagattcaaaggctaataggaaggtctttaagatcagttattgacctagatcaactcggggaaaaccaaataagcattgactgtgatgtcattcaagctgatggaggcacaagaacggcttcaatttctggagcatttatagccttaaaacattcagtaaatttcttaatggaatcaaatgaaattaaaaaagacccaataagagaataccttggtgcggtttcatgtggtatttacagaggtaaaccaatcttagatttagattataaagaagactcggaagctgaagc

SEQ ID NO: 254486 - DNA, 406 bp, Unknown
  Bacterial polypeptide expressing nucleotide sequence isolated from the Sargasso Sea
tgcagcttgaaaaaacttggggaaaggaccattacagtggactgtgatgttttgcaggctgatggaggcactagaactgcctctatatccgggggtgcggttgctctaagccttgccctaaaaagtataggtaaggaagaagcgatgcaggggctggtaagcgctgtttcagttggcatgtatcgagggcagccagttctggatttagattatgcagaagattcaaatgctgaaacagatatgaatgtggtccaactcaatggaagcgggttcattgagattcaaggaacagctgaaggccaagcattttcagcaactgatttggaatccatgttgagtgttgctgagaaaggtatgaatgagatttatgaataccaaaaagcactactatcaacactaacgtaaa

SEQ ID NO: 254487 - DNA, 219 bp, Unknown
  Bacterial polypeptide expressing nucleotide sequence isolated from the Sargasso Sea
accagggcgaagcggtgctggacctcgactacctggaagactccgcagccgaaaccgacctgaatgtggtcatgaccagcgccggtggcttcatcgaagtgcagggtactgccgaaggcgcaccgttccagccggaagatttcaacgccatgctcgctctggcgcagaagggcatggacgagatcttcgagctgcagcaggcggcactggctgactgaa

SEQ ID NO: 254488 - DNA, 721 bp, Unknown
  Bacterial polypeptide expressing nucleotide sequence isolated from the Sargasso Sea
atgcgtatagatgagagaaaacctgatcaactgagaaacattgattttaaactagactttattaaatcttcggatgctagtgtgctcgcctcatttggtgataccagagtattatgtaccgccacaattgaaaacaatgtaccgaagtggatgaaaaataaggggcatggctgggtaacagctgaatatggcatgctaccaggatccacaagtcagaggaacatgagagaatctgtgaaaggaaagcaaggtggcagaactcttgaaatacagagactaatcgggagatctctcagagctgcagttgatctcgaagctcttggtgagagaaccatcatattagattgtgatgtaattcaggcagatggaggaaccagaactactgcaataaacggtgcgtttatcgctctgaaaagagcagtaaatactttgtttgatgatagaaatatagattctgacccaataaaaaaattcatcggagcaatttctgtaggaatttataggaatgaagtaattatggatctaaattacaatgaggatagtcaggctgacacagatatgaatattgtcatgaccgaagacaatgaatttattgagattcagggaacagcagaaagcggatcttttaacaatgatcaattggcattgatgttgaattatgcaaagaaaggcataaaagaaataactttgcatcaaaaaaaactattatcatcaaactaaa

SEQ ID NO: 254489 - DNA, 370 bp, Unknown
  Bacterial polypeptide expressing nucleotide sequence isolated from the Sargasso Sea
atgctgaaaagagagaatgacagaaaaaacaatcaattaagaaaaatttcaatgataagaaatttttcaccctatgctgaaggctcgtgttttataaagtttggtaaaacacatgttctttgcacggcatctattgatgaaaaagttcctttttggttgagaggaactggaaaaggttggataactgcagaatacggtatgctgccaagatctactcatacgagaatagaaagagagattaataaaggcaaaatttctggcagaacacaagaaatacaaagattaataggcagatcattgagagctgtcgttgacttaaacttacttggcgaaatgcaaattaaaattgattgcgatgttattcaagctg

SEQ ID NO: 254490 - DNA, 472 bp, Unknown
  Bacterial polypeptide expressing nucleotide sequence isolated from the Sargasso Sea
atcacaagagattcaaagactcataggcagaagcctacgctcagctcttgaccttacaaaatgcccagacatttcatttgtagtaaactgtgatgtactacaagcagatggaggcacccgtacagcttcaataactggaggatggattgcattaaaaatggccataaaccgacttctacatgatggacgtctactagaaaacccacttataggaactgttgctgcagtatctgtaggctacaaaaatggcgaaatctttgttgaccctgactacagtgaagacagcactgcagatctagatatgaatgttgttatgtctgactcaggtaaaattcaagaaattcagggtactggagaaaaagctggatttgacctagagcaactaaataatattacaacaacaagccaagaagttttaagcaccatattcgaacttcaacaagccgcagttgaaagccctattgagacttaa

SEQ ID NO: 254491 - DNA, 601 bp, Unknown
  Bacterial polypeptide expressing nucleotide sequence isolated from the Sargasso Sea
aatgcgcccatctggtcgaaaacttgacgaaatgagaaacgtttcaatagaaacaaatataactatgcatgctgagggaagctgcataattaaaatgggcgatactcatgttatatgtaccgcgacagtagaggacagagttccaccatttatcaaaggatctggtatggggtgggtcactgctgaatatggtatgttaccaagatcaaccggttccagaatgcgaagggaagcagcttcaggtaagcaaggtggtagaacagttgagatccaaaggcttatcggacgatctttacgagccggtgttgataggctctctttaggtgaaagacagataacaatcgattgtgacgtaatacaagcagatggtggaacgcgctgtgcttctattactggtggttggttagcactccgtctagcaatagataaattattagattctggcacaatatctacagatcctttgatttcaccagtttctgcaattagttgcggtatttacgcaggacaaccgatcttagatttagattattctgaagatagcgaagcgggtgtagacggaaacttcattatgcttgaaagtgggaatatgatgaaaccc

SEQ ID NO: 254492 - DNA, 516 bp, Unknown
  Bacterial polypeptide expressing nucleotide sequence isolated from the Sargasso Sea
aatgacaagaaaaaatagaaaaaattttgagataagacccctcgaaatagtaaaaaataacattaaaaatgcagacggttcgtgtttaatcaagttaggaaacacccaaattatttgcacagcttcttttgagggcaaactaccgaaatggctgaagggtagcggtaaaggatggattacggccgagtatggcatgttaccaagatcaacaaatgagagaatgagacgggaggcatctgttggaaaaatttcaggtcgaacttccgaaattcaaagattaataggtagggcattaagatcttcagttgatttaaatatgttaggagaaaatttgataacaattgattgtgatgtgatccaagcagacggaggaacaaggactgcatctataactggtggatatatcgcactagtagaatgtattaaaataatgcaaagtaaaaaaataattaatactaacccaatcaaaaatcaaattgctgcgataagtagtggctatgtaaaaggcgatcacct

SEQ ID NO: 254493 - DNA, 500 bp, Unknown
  Bacterial polypeptide expressing nucleotide sequence isolated from the Sargasso Sea
aatgcaaaatgaaaaattgcttactttaaggccatctggaaggaaatttaacgaattaagaaaaataactttagaaaaaaatgtagcaaaatacgccgaaggatcttgtttcatcaaatctggctttactcatgttttatgtactgcaagtattgaagaaagggtacctccttggcttagaaatacaggacaagggtgggttacagctgaatatggtatgatcccaagatcaactgaaactagaatgagaagagaatcatcaaaaggaaaacaaactggtagaactcaagaaattcaaagactgattgggcgctcattaaggtctatagttgaccttaaattattaggagaaagacaagtaacaatagactgtgatgtaattcaggccgatggaggaacaagaactgctgcaataacaggctcatatgttgcacttcatgaagcattaacagctttaataaaaaaaggagagttagattcacaacctattaataatcagc

SEQ ID NO: 254494 - DNA, 751 bp, Unknown
  Bacterial polypeptide expressing nucleotide sequence isolated from the Sargasso Sea
tacacccaaaatgctcttgcttctttggtttactcccaaggtgatacaatggtccttgtttgcgtcaccaaagcagattctcttccgcggtggtttccaagggatgctcagagaggttgggttcatgcagaatactcactcctcccaggctcaacgaacactaggtttcgaagagagcgaaatggtgccaagggaagaacaatggaaatagagagattggtagctcgctccctaagggctgcaatagaccttgaggagctcggtccagtggccctaaccattgactgtgatatcctgaatgccgacgggggtactagatgcgcctcaataacagccgctagtatagcacttaggcttgccattagaagactgatctcttcgggggagtcagtgcccaaatcaaaaaggctcacaaaggaagaaattaggaaaggagagacgcccgtggaactcaatgagcaagatcggaaagatcacgaaaggtcggttatgccgaatgatgttgcagccttaagtgtcggtgtggtagatggaaaagtatggaccgatctcgactactccttggatagcaatgcagacgttgacatgaacgttgtaatgaccagctccggtcaatttgtggaggttcaaggcacgggggaggaagcgacttactccagagatgagcttgatgagcttgtcgacgcagcagtcacgggcataacaaaaatacacaagattcaatctgagatactctctggctctgtctgat

SEQ ID NO: 254495 - DNA, 586 bp, Unknown
  Bacterial polypeptide expressing nucleotide sequence isolated from the Sargasso Sea
tatgttaaatagaccttcaaacagacaatctaatgaaatgagagaaatatcattagcatctaaagtctctccttatgctgagggttcgtgcatggctaaatttggtaatactcacgttctctgtacagcttcggtcgatactaaattaccaacatggttaagaaactcgggtaaaggttggattacggccgaatatggtatgctaccaagatctacgcattcaagaatggatagagaagttgttaaaggaaagccatctggtcgtacgcaagaaatacaaagactaatcggaagatcacttagatcaattgtagatttgaaaaaattgggcgaaaatcaaattaaaatagattgtgacgtaattcaagcagatggtggaactagaacagcgtctattactggggcttgggttgcgctttatgatgcagttaattttttacttaaaaccggaaaaatttcagaaaatccgatattggatcaagtaagtgcaatttcatgcggtatttggaaaagtaaggagataattgatcttgattatgaagaggactcatctgctgaaacagacggaaatttttgttatgactgc

SEQ ID NO: 254496 - DNA, 706 bp, Unknown
  Bacterial polypeptide expressing nucleotide sequence isolated from the Sargasso Sea
atgcctagagataatagaaaatcaactcaagcaagagaaatttccattgaaacaaatataaatcttcatgctgaaggctcggtactggtgaagtttggtaatactcatgttatttgtactgcaagtattgataataatgtcccaagatggatgaagggatcagataagggttgggtaacagctgaatatggaatgcttccaagatcgactaatgagagaatgggcagagaagcagcaagaggaaaacagtcagggagaactcaggaaatacaaagacttattgggagatcccttagacaatctgtaaatcttaaatatttaaaagataaaactattcaagttgattgcgatgttattcaagcagacggaggtacaagaactgcttcaattactggtggatgcgttgcacttttccttgcaataaagaatcaccatgatgatcaaagagcaattgaacaatatgtggctgcaatctctttaggtgttaaagatgacgaaatactagttgatcttgactaccaagaagatagtactgctgatgcagacattaatattgtaatgacccaggatcttgatttaattgaaattcagggtaccgctgaagagcgtcctttttcgcaagaacaactcactgaaattgtaagcaaggctagttcatctattaaggatatagttgatatccaaaaacaggctgtagaaggatagt

SEQ ID NO: 254497 - DNA, 390 bp, Unknown
  Bacterial polypeptide expressing nucleotide sequence isolated from the Sargasso Sea
tcagcgtcgactgcgacgtgatacaggccgatggcggcacccgcaccgcctcgatcaccggcgcatggatcgcgcttcacgattgcctgaaatggatggaagcccgcagcatggtcaagaccggcaaggtgctgaaagaccatgtcgcggcgatttcctgcggcatcttcgccgaccagccggtcatcgatctcgactatctcgaggactcctcggctgagaccgacgccaatttcgtgatgaccggcaccggcggtatcgttgaaatccagggcaccgccgagggtaagccgttcagccaggacgagttccttacgctgctggacctcgccagaaacggcatcgccgagcttgtcgacctccagaagaagaccgtcgagggcgcgtaac

SEQ ID NO: 254498 - DNA, 572 bp, Unknown
  Bacterial polypeptide expressing nucleotide sequence isolated from the Sargasso Sea
tattagaaaaacaggtcttggctgggtgactgcggaatatggtatgttaccaaggtcaactaacagccgaatgaaaagagaatcatctagaggaaaacaaggtgggagaaccttagaaatacaaaggcttattggaagatcactaagaacttgtgttgatcgtttattattaggagaaaggcaaataataattgattgtgatgttttacaagctgatggaggaactaggtgtgcagctataactggaggttggatagcgcttaaattagcttctgaccatttagttaagaaccaaataattgatgaaaaccctataataaatcaagtagctgcaatatcttgcggaatttataatgatgaacctattttagatttagattatgaagaagattcaaatgtaaaaacagatgcaaactttgttttaaatcaaaaaaatgagattattgaaatacaagtttcagcagaaaaagatcccttttcttataaagattttgaaaaactatttgaactttcaaaaggtggtattgagaaacttatagattttcaaagtaaggcaataaaaagtgaataat

SEQ ID NO: 254499 - DNA, 331 bp, Unknown
  Bacterial polypeptide expressing nucleotide sequence isolated from the Sargasso Sea
gatgaaacgtcccagtggccgcgccgccgatcagttgcgctcgattcgcatcacccgcaactacaccaagcacgccgagggctcggtgctggtggagttcggcgataccaaggtgatctgcaccgtcagcgtcgaatccggcgtgccgcgtttcctcaagggtcagggccagggctggctgactgccgaatacggcatgctgccgcgcgccaccggcgagcgtaaccagcgtgaggccagccgcggcaagcagggcgggcgtactttggaaatccagcgcctcatcggccgttcgctgcgcgcagcattggacatgaccaagctgggcgag

SEQ ID NO: 254500 - DNA, 322 bp, Unknown
  Bacterial polypeptide expressing nucleotide sequence isolated from the Sargasso Sea
atgcgaccttctgatagaaaaaacaatgaaatgcgaagtatctcttttgaaactggggtatcaaaacatgccgagggatcttgcttagttaaatttggtgatacacatgttttatgtactgcttctgttgagaatagggttccgccatggttaagaaattcaggatctggctgggtcacagctgaatatggaatgcttcccaggtcaactggcgaaagaatgcgtagagaggcatccgcaggtaagcaatctggaaggacccaagagattcaaagactgattgggagatcattaagatcagttattgacttagatcagttag

SEQ ID NO: 254501 - DNA, 328 bp, Unknown
  Bacterial polypeptide expressing nucleotide sequence isolated from the Sargasso Sea
aatgagaaaagataggccctttgacgaaattagagcaattatgtttgaaaccaatataaatattcatgctgaaggttcttgtttggttaaatttggaaacactcaggtaatctgtacggcttctattgatgaaaaaactcctccttggctacgaggatcaggaaagggttgggtcactgcagaatatggaatgcttcccagatcaacaaatacaaggatagatagggagtcagcaaggggaaaacaaagtggtagaactcaagaaattcaaaggttgattggcagaagtcttagatctgttataaatttagaaaacctcggggaaaga

SEQ ID NO: 254502 - DNA, 597 bp, Unknown
  Bacterial polypeptide expressing nucleotide sequence isolated from the Sargasso Sea
ttgctacaattgatgaaaaggttcctcattggttaaaaaatacaggcaaaggttgggttactgctgaatacggcatgttgccaagatctaccaatacaaggatggacagagaagcagcaaaaggtaagcagtcaggcagaactcaagagatacaacgtttaattggaaggagtcttagatcaatagttgatttatcaaatctaggtgagcgtcaaattaaggtggactgtgatgtaattcaggctgatggaggaacaagaactgcatcaattagtggaggatttgtggccttgtacatagcaataaataaaataaaaaataattataatatccaaaaacctatcattaaaaactatattggggcaatctcagcaggtattattgataacaaaccattattagatttagattataaagaagactctgaagcaaaagttgatgcaaattttgtaatatgtgaaacaggtgaaatttctgaaattcaggttactggcgaagaatatttttttagcgataatcagtttaatgaaattttcaatttagcaaaaaagggcattagagaaataatagaaatccagaaaaaaacattagcttaaa

SEQ ID NO: 254503 - DNA, 491 bp, Unknown
  Bacterial polypeptide expressing nucleotide sequence isolated from the Sargasso Sea
tgacggacggactcaggaaatacaacgcttgatcggccgatcgttaagatccgtagttgatttgaaggccctcggcaagcataccgtatggatcgattgtgatgtcattcaggcagacggaggcacccgcactgcctcgatcacgggtggatttgttgccctgattcttgcactaaggcagatgcaggctgaaggaagattcaaaacatttccggtcagtcgattccttgcttccgtcagtgtcggtatttttgagggacgtccgcttcttgatctcaaatatgatgaagacgtaatagcagaagtcgatatgaacgttgtcatgttggacaatggtgattatgttgaagttcaagggactgcagagggccagactttcccgagaaatcaactcaatcagcttctggattatgcggaaaatggaatccaatcccacttgcagaatcaaagaaaacttctcggtgagaaccttgaatcaggtggctcctaaa

SEQ ID NO: 254504 - DNA, 595 bp, Unknown
  Bacterial polypeptide expressing nucleotide sequence isolated from the Sargasso Sea
tatgagaaaagatagatccttcagtcaaatgcgtgaaatatcatttgagaaaaacgtgaatattcatgctgatggttcatgtttagtaaaatttggaaatacacatgtcctttgtcttgcaacaatagatgaaaaagttcctcactggttaaagaatacaggcaaaggttgggttacagcagaatacggtatgttgccaagatcaacaaatactagaatggacagagaggccgcaaaaggaaagcagtcaggtagaacacaagaaattcaaaggttgattgggcgtagcttaagatcaattgtggatctttcaaatcttggagagcgtcaaataaaaatagactgtgatgtaattcaagcagatggtgggacaagaactgcttctattagtggtggttttgtttctttatacttagcaatagaaaaattgaagaacaattataatctccaaaaaccaattattaaaaattttataggagcggtatcaactggcatagtggaaaataaagcattattggatctagattataaggaagactccgatgcacaagtagatgcaaattttgtaatttgtgattcagatgaaatatctgaa

SEQ ID NO: 254505 - DNA, 262 bp, Unknown
  Bacterial polypeptide expressing nucleotide sequence isolated from the Sargasso Sea
atgcccaatgacgttgcagcgcttagcgtgggaatggtcgagagacaggtctggacagacttggattacgttctagacagcaatgccgacgtcgacatgaacgtcgtgatgactagctctggggacttcgtagaggtccaggggaccggcgaggaggcaacctattccagagaagagctcgactctctgatcgacgctgcggaggcaggaatagcgaagttacacaagctccaggccgaagtcctctctaatgcgagttgat

SEQ ID NO: 254506 - DNA, 709 bp, Unknown
  Bacterial polypeptide expressing nucleotide sequence isolated from the Sargasso Sea
atgacaattactactagatcagacggcagagcagacaacgaattacgtcctcttataatcacaccggattacataaagtatgcagaaggatcagtgcttacctgttgcgggaatactaaagtaatttgcacagcttcagtagaaaacaaagttcctcattggcttttagatgagcataattatccaagacacggctggataacagcggaatacggcatgctgcctcgatcaacaggctctcgtcgaagcagagaaacagccactattcaaggacgcacacatgagattcaacgcctgataggacgatcactacgttctgtaacaaatctccattctcttgataatcacactatctggattgactgcgacgtaatacaggctgacggtggaacacgaactgcttcaatcactggcggatttgtggctttgatttatgcactaaggaaaatgcatgataagggagatatcaaagagttcccaataaaagaatttctggcagccaccagtgttggtattgttaaacaacaacctgttttagatttgaattatgatgaagacaaagatgcggaagttgatatgaatgttgtcatgcttagttcgggaaaatttgtagaagtacagggtactgcagaaagaaggacctattcacgacaacagttaaacataatgcttgatttagcagaacaaggaattctttcacaatattgat

SEQ ID NO: 254507 - DNA, 487 bp, Unknown
  Bacterial polypeptide expressing nucleotide sequence isolated from the Sargasso Sea
aatgagagaaattacatttgaaataaatgtaaacttgcatgctgaggggtcttgtcttgttaaatttggcaatacgcaggtgctctgcaccgctagtatagatgaaaaaactccgccgtggttaaagaattctaacaaaggctgggttacagcagaatatggaatgttgcccagatctacgaacacaagaatagatagagaggccgctaggggtaaacaaagcggcagaactcaagaaattcagagactgataggcagaagtctgcgatctataacaaatttatataatttaggggaaagacaaattaaaattgattgtgatgttctgcaagctgacggaggtaccaggacggctgcaataagtggggggtttgtagctttgtatttagctgtagaaaaactaagatcaagttacaatattgataaacctattattaaagaattcataggcgcaatctctgctggaataataaataatcaacctaac

SEQ ID NO: 254508 - DNA, 580 bp, Unknown
  Bacterial polypeptide expressing nucleotide sequence isolated from the Sargasso Sea
atgcgttacaacaaccgtgacaatgatcaattaagaagcatatcattttctcgacattataccaaacatgccgaaggctctgttttaaccgcatttggtgacacaaaagtgctttgcaatgtgtctgtagtggaaggcattccaaaatttttaaagggtaaacgccagggttggttaacggccgaatacggtatgctgcctagatcaacccatgaccgttgccgccgagaagccgcacatggaaaacaatcggggcgcacacaagaaattcaacgtttaattggcagagccttgcgtgctgcagtggatttaacattactaggcgaatataccttgcaaattgattgcgatgtcatccaagcagacggcggaacacgcacagccgccatcagcggaagttgtgttgcactgatagatgctatcgaatacatgcaacaacaaaaacttataaaaacaaaccctttaaaacatctagttgcaggcatctccgttggcgtactcgacaaaaatatcttactagatttagattaccaagaagattcaagtgcagaaaaagacatgaatatcgtaatggatgaca

SEQ ID NO: 254509 - DNA, 374 bp, Unknown
  Bacterial polypeptide expressing nucleotide sequence isolated from the Sargasso Sea
tatggcaagaaaaaataacagatcaaataatgaaatgaggcctcttgaaattgaggttggtgttaataaacatgctgaaggttcggcactaataaaatttggagatactcatgtaatttgtacagcaagcattgaaaaccatgtaccaagatggatgagaggctcaaatgaaggatggattactgcagaatatggaatgttgcctcgatcaacacatgagcgaatgaatagagaagctagcagaggtaaacaaagtggcaggaccatggaaattcaacgactgatcggcagatctttaagacaagctgttgatctaaaatatttaaaagatcgaacaataaatatagattgtgatgtcatacaagcagatggtg

SEQ ID NO: 254510 - DNA, 310 bp, Unknown
  Bacterial polypeptide expressing nucleotide sequence isolated from the Sargasso Sea
atgagacaagatagaaactttgaacaattaaggcctgtttcttttgaaacagatgtaaatattcatgctgaaggctcctgccttgtaaaatttggcaagactcatgttttgtgtactgcttctattgatgaaaaagctccacattggttaaaaaatacaggaaaaggctggattactgctgaatatggaatgcttccaagatcaacaaacagccgtattgatcgtgaagcagcaaaaggaaagcagagtggaagaactcaggagattcaaaggttaattggtagaagtttgagagctgtgttaatctaga

SEQ ID NO: 254511 - DNA, 342 bp, Unknown
  Bacterial polypeptide expressing nucleotide sequence isolated from the Sargasso Sea
aatgaaaagaaatcaggaccgccctctaaataaactcagagaaatctcactagaaattaatattaatattcatgctgaaggttcagtattggtttcatttggtaacactaaagtgatttgtactgcatcaattgagcataacgttcctaggtggatgaagaactctgatgaaggatgggttactgcggaatatggtatgttaccaagatctacaaatgaaagaatgggtagagaagccgcaagaggaaagcagagtggcagaactcaagaaattcaaagattaattggtaggtcgcttcgtcaagcagtaaatcttaaatatcttaaaggcaaaactataaa

SEQ ID NO: 254512 - DNA, 757 bp, Unknown
  Bacterial polypeptide expressing nucleotide sequence isolated from the Sargasso Sea
gctgcaaagcacaaagcacattaggagcaaaaacaaaatgaccagccgcccttctgatagagagcctgacgaaatgcgcgacatccttcttgagccagggattaacccctatgctgaaggctcttgcctcgcaaaattcggaaatacacatgttttatgcaccgcaacggtggaggaaagtgtaccgccttttttacgcaactctggtaaagggtgggtaaccgctgagtatggtatgttgccaaggtcaacgcatacccgaacagggcgcgaggcggcgcgcggcaagcaaagcggaagaacacaggagatccaaagactaattggacggtcgcttagggcggtgactgacctgtcccgtatgggagagcgtcaaatcaggctagactgtgatgtaattcaagcggatgggggcacccgaaccgcctctattactggggcctgggtcgctctgcatattgctttttctaaactagtgacggatggacatttaaaacaaattccaatgagcgactctgtaggcgcggtgtcgtgtggtatttacgggggagtgggcgttctcgacctagactaccctgaagattcaaatgctcaggctgatgctaattttgtgctcactggtagtggtggtattgtcgagatccaagggaccgcagaaaaggatccgtttagccgcgagttatttaatcaattacttgacctcgcctttaaaggggttagggagttaacggctctgcagcaaaaagctatcaaataa

SEQ ID NO: 254513 - DNA, 364 bp, Unknown
  Bacterial polypeptide expressing nucleotide sequence isolated from the Sargasso Sea
aatgacaagaaaaaataataggtcaaacgttgaaatgaggcctctagaaattaaggttggagtgaataaacatgctgaaggatctgccctaataaaatttggagatacacatgttatctgtaccgcaagtattgagaaccatgttcctagatggatgcgaggatcaaatgagggctggatcactgcagagtatggcatgctgccacgctcaactcatgaaagaatgaatcgagaggctgctagaggaaaacaaagtggcagaacaatggaaatttcaagactaataggcagatcattaaagcaggctgttgatttaaaatatttaaaagaaaaaacaattaatatagattgcgatgtaatacag

SEQ ID NO: 254514 - DNA, 502 bp, Unknown
  Bacterial polypeptide expressing nucleotide sequence isolated from the Sargasso Sea
aaggcctcaggttgacggacggactcaggaaatacaacgcttgattggccgatcgttaagatctgtagttgatttgaaggccctcggcagacataccatatggatcgattgtgatgtcattcaggcagatggcggtactcgcactgcctcgatcacaggtggatttgtcgccctgattctggcactaaggcagatgcaggctgaaggaagattcaaaacatttccggtcagtcgattccttgcttccatcagtgtcggtatttttgaaaggcgtccgcttcttgatctcaaatatgatgaagacgtaaaagcagaagtcgatatgaacgttgtcatgctggacaatggtgattatgttgaagttcaagggactgccgaggggcagactttcccgaggaatcaactcaatcaacttctggattatgcggaaaagggaatccgatcccacttgcagaatcaaaaaaatcttcttggtgagaatcttgaatcaggtgtctcctaa

SEQ ID NO: 254515 - DNA, 475 bp, Unknown
  Bacterial polypeptide expressing nucleotide sequence isolated from the Sargasso Sea
aatgagaaataatagaaatattaaccaattaagagatatagaaataattcctaatttttcatgcaatccggaaggctcatgcttaattaaatgtggcgatacgcatgtgatctgcagtgcatcgcttgatagaaatttaccaagatggttaaaaaattcagagaatgggtgggtaacagcagaatatgggatgttaccaagatcaacttctgagagaatgtctagagaggccaccaaaggtaaacaatctggtagaacacaggaaatacaaagactaattggaagatcattaagatctatagttaatttagaagatttaagagaattacaaataataatagattgtgatgttattcaagcagatggtggaaacagaaccgcttccatctcaggatcatttatcgcactttcattatgcattaatcatatgcttaataaaaaaattataaaaaaaatccaatttagtgatatgttg

SEQ ID NO: 254516 - DNA, 688 bp, Unknown
  Bacterial polypeptide expressing nucleotide sequence isolated from the Sargasso Sea
cgcaatcacaatcaactaagagatatctctatcgaaactaatatcaatattcatgctgaggtttcagcattattttcttttggtaatacaaaagttatttgcaatgcatcaattgaaaacaatgtaccaagatggatgaaaaactctgatgaaggttgggttactggtgaatatggaatgttgccaaggtctaccaatgaaagaatgggaagagaagcagccagaggcaagcaaagtggtagaactcaagaaattcaaaggttaattggaagatctttgaggcaagctgtcgatctgaaatatctcaaaggtaaaaccatcaatgtcgactgtgatgtaattcaagcagatggaggaacacgaacggcttctattacaggtggttgtgtagcgctttttttagctataagaaatcatcatgacgaccaaagagcgatcaagtcttttattgccgctgtatcaatgggtataaaagataataaaattttgttagatctcaattatgatgaagatagcactgcagacactgatctaaatatcgtaatgaacgataaagatgaattgattgagattcaaggaactgctgaagatgctcctttttcaaaaaatgaactaagtgatatgcttgaaatgggcagttcagcaattgctgaaataattaaaaaacaaaaagcttgcattgaataag

SEQ ID NO: 254517 - DNA, 490 bp, Unknown
  Bacterial polypeptide expressing nucleotide sequence isolated from the Sargasso Sea
atgagaaaagatagagcgtttggtgaattaagagagattgcttttgaaactaatacaaatattcatgctgagggatcttgtttagtaagatttgggaatactcatgtaatatgtactgcgtctattgatgaaaagacccctccttggttaaggggctctggtaaaggttgggtaactgctgagtacgggatgcttcctcgatcaacaaacaccagaatagacagagagtctgcaaaaggcaaacagagtgggcgaactcaagaaattcaacgattaataggaagaagccttagatcggttgttgatttaaataatcttggtgagagacaaataaaggtagactgtgatgtgattcaggcagatggaggcactagaacagcttctataagcggaggttttgttgcattgtatttggctattgataaacttaaaaaaaactacaacatagaaaagccaattattaaaaattttgttgcggctattctgcagg

SEQ ID NO: 254518 - DNA, 569 bp, Unknown
  Bacterial polypeptide expressing nucleotide sequence isolated from the Sargasso Sea
aatgagcatacaaactatcaggccgtctggtcgtcaatatgatgaagcaagaattgtctctgtggaaataggacaatccaagcatgcagagggatcttgtttaataaagtttggcgacactcatgtcttttgtaccgcaagcgttgaggaacgcgttcctccatttcttagaggaaagggaatagggtgggttaccgcagaatacggcatgcttccacgctctacacatactcggacggatcgcgaagctgcaagaggaaaacaaagtggccggacacttgaaatacaacgattgattggcagatcgctaagagccgtcacggatgaaaaatctctcggagagagacaaatacggatagattgtgatgttatacaagcagacggaggaacaagaacagcagctattacgggtggctacatcgcgctctatttggcgcttaataatttggtttctaaaaaagtcctgccttgcatccctctttatggtgaggttgccgctatttcctgcggggtttatcaaggacaagctgttttggaccttgactattcagaagactcttcagccgaag

SEQ ID NO: 254519 - DNA, 332 bp, Unknown
  Bacterial polypeptide expressing nucleotide sequence isolated from the Sargasso Sea
aatgagaaaagatagaaattttgaccaattaaggaaagtttcattagaaacaaacataagccttcacgctgaaggttcttgtttggtaaaatttggcaatacaaatgttatgtgtacagcatctattgatgataaaacccctccatggttaagaaattctggcaaaggctgggtaacagctgaatatggtatgctgccacgatcaacaaacacgagaattgatagagaagcagcaagaggaaaacaaactggaagaacacaggaaatacaaaggttaattggaagaagcttgcgctcagttactgatttggaaagtttaggagagcgtcaaa

SEQ ID NO: 254520 - DNA, 262 bp, Unknown
  Bacterial polypeptide expressing nucleotide sequence isolated from the Sargasso Sea
atggccaatgatgtttctgcaataagcatcgggatgctggacggcaaggtgtggacggatcttgattacgagctggacagcaatgcagatgtagacatgaacgtggtaatgacaagcgatggtggtttcgttgaggtccaaggaactggggaagagtcaacatatactagaggccaacttagtgaaatgttagatgcagcatgtaatgcaatcgaagagctgcattccattcagaaagaaatactctctgaggcaagatgat

SEQ ID NO: 254521 - DNA, 446 bp, Unknown
  Bacterial polypeptide expressing nucleotide sequence isolated from the Sargasso Sea
aatgagaccatctgacagaaaaaacaatgaaatgcgaactatctcttttgaaacaggggtatcaaaacatgctgaaggatcttgtttagttaaatttggtgatacacatgttttgtgtactgcatcgattgaaaatagggttccaccatggttaagaaattcaggatctggttgggtaactgctgaatacggtatgcttccaagatcaaccggcgatagaatgcgaagagaggcatctgtgggcaaacaatctggaagaacgcaagagattcaaaggctaataggaaggtctttaagatcagttattgacctagatcaactcggggaaaaccaaataagcattgactgtgatgtcattcaagctgatggaggcacaagaacggcttcaatttctggagcatttatagccttaaaacattcagtaaatttcttaatggaatcaacga

SEQ ID NO: 254522 - DNA, 526 bp, Unknown
  Bacterial polypeptide expressing nucleotide sequence isolated from the Sargasso Sea
catgaaacgtccatcaggccgcaattctgaccagctgaggttaatatcattagagccttcggtcgcattacatgctgaagggtcttgccttgccaaatttggtaatacccatgttttctgtacagcctcacttgatgcgagagtcccgacgtttttgcgcaatagcggacgcggatgggttactgccgaatatggcatgctgccgcgatcaactcatagccgcatagatcgtgaagcggcgcagggcaagcaatctggcagaacattggaaatccaacggctaattggccgttcactcagagctgttactgatctagaagcgctcggcgaacgccagattaaaatcgattgtgatgttattcaagcggatggcggaacacgcaccgcggccattagcggtgcgtgggttgcactgcgcattgcctttgaaaaattgcttcttgctggctcaataaccagatcaccggcaactggacaagtggcggcgattttcctgcgagtttttcgtggtaccccggttatttga

SEQ ID NO: 254523 - DNA, 469 bp, Unknown
  Bacterial polypeptide expressing nucleotide sequence isolated from the Sargasso Sea
tctgggtagaacacaggaaatacaaagactaattggaagatcattaagatctataattaatttagaagatttaagagaattacaaataataatagattgtgatgttattcaagcagatggtggaacaagaaccgcttcaatctcaggatcatttatcgcacttcaattatgtataaatcatatgcttaataaaaaaattataaaaaaaaacccaattagtgaatatgttgcggcaatcagctgtggaatgataaatggtgagccttatttagacttagattttgaagaagatcaaaatgctgaagtagatgcaaattttgtaataacagaaagtggtaaattggttgaagtacagatgacttcggaaaaaaagctttgtgaggagcggtcatttaatgcaatgctggaacttgcaaaatcagggatctctgagatcatccaattgcaaaaacaaatattaagtgattaa

SEQ ID NO: 254524 - DNA, 310 bp, Unknown
  Bacterial polypeptide expressing nucleotide sequence isolated from the Sargasso Sea
tatgagaaaaaacagaaaatttgatgaaattagggaagttaattttgaaaccaatataaatattcatgcagagggctcttgtttggtaaggtttggaaacactagcgttatttgcacagcctcaatggatgaaaaaactcctccatggctaaaaaactcaggaaaaggttgggtaaccgctgaatatgggatgcttcctcgttcaacaaattccaggatagaaagagaggctgctagaggaaaacaaaaaggtaggacacaagaaatacaaaggttgattggtagaagtttaagatctgtaacaaactta

SEQ ID NO: 254525 - DNA, 635 bp, Unknown
  Bacterial polypeptide expressing nucleotide sequence isolated from the Sargasso Sea
tgaaggttcagtactggtcaagtttggtaatacacatgtaatttgtactgcaagtattgataataatgtcccaagatggatgaagggatcagataggggttgggtaacagctgaatatggaatgcttccaagatcgaccaatgagagaatgggcagagaagcagcaagaggaaaacagtcagggagaactcaggaaatacaaagacttatcggaagatcccttagacaatctgtaaatcttaaatatttaaaagataaaacaatccaagttgactgcgatgttattcaagcagacggaggtacaagaactgcttcaattactggtggatgcgttgcacttttccttgcaataaagaatcaccatgatgatcaaagagcaattgaacaatatgtggctgcaatctctttaggtgttaaagatgacgaaatactagttgatcttgactaccaagaagatagcactgctgatgcagacattaatattgtaatgacccaggaccttgatttaattgaaattcagggtaccgctgaagagcgtcctttttcgcaagaacaactcactgaaattgtaagcaaggctagttcatctattaaggatatagttgctatccaaaaacaggctgtagaaggatagt

SEQ ID NO: 254526 - DNA, 745 bp, Unknown
  Bacterial polypeptide expressing nucleotide sequence isolated from the Sargasso Sea
tatgaccaaaaacacttcccggaccgatgggcgtttggatgatgaagtccgaaaacttgaactgatttcaggatatacccaaaatgctccgggttcggtgcttgtttcaacaggcgatacacgaatcatctgcactgcaacgttcgaggaagaggttccgggtttcctcaaacttcctgaaaacggttacaagcatggctgggtcactgcggaatatggaatgcttccaggttcaactgggaaaaggaaacggcgggaaagaccccaggttgacggacggactctggaaatacaacgcttgattggccgatcgttaagatccgtagttgatttgaaggccctcggcaggcataccgtatggatcgattgtgatgtcattcaggcagacggaggcacccgcactgcctcgatcacaggtggatttgtcgccctgattctggcactaaggcagatgcaggctgaaggaagattcaaaacatttccagtcagtcgattccttgcttccatcagtgtcggtatttttgaagggcgcccgcttcttgatctcaaatatgatgaagacgtaaaagcagaagtcgatatgaacgttgtcatgctggacaatggtgattatgttgaagttcaagggactgccgagggtcagactttcccgaggaatcaactcaatcagcttctggattatgcggaaaagggaatccgatcccacttgcagaatcaaaagaaactccttggtgagtatctgtaa

SEQ ID NO: 254527 - DNA, 695 bp, Unknown
  Bacterial polypeptide expressing nucleotide sequence isolated from the Sargasso Sea
gcttcgaccaatcacttttgttcgcgatttcacttcaatggcggatggatcagtcctcgctacctttggtaatacaacggttttatgtacagcatcagttgatgacgatgtgcctcgatggatgaaaggatccggcactggatgggttacggctgagtattccatgcttcccggttcatcccctgagcgcgttcgacgagaaactcgcggccctaaaggtcggacacaggagatacagagacttattggtaggtcactaagagcagtatgcgatatggaaaagctgggtgaaaggcaagtagttgtcgattgtgatgtattgcaagcagacggcggaacacgcgtagcgtcaatatgtggaggttacctagcgcttcacgatgcattatctaggcgagttcttcgaggtgatttagcgaatcaccctatttctgaagcttgcgccgctgtatctgttgggattattcatgggcagccaagattggaccttccatatagtgaagattcaatcgctgatacagatatgaacgtggttatgacagaatcaggagggtttattgaaattcaaggaaccgctgagcaggcttccttcaatcgaaatgagctcgatattttgctatcgctagctgagagagggattcggcaaattattgatctgcaaaatgaactgactggcaatcaaccgactatttaaa

SEQ ID NO: 254528 - DNA, 658 bp, Unknown
  Bacterial polypeptide expressing nucleotide sequence isolated from the Sargasso Sea
tttggaaaacgtagatcactcctgtttaatacagtttggaaaaacaaaagtcatttgcactgctacaattgaggagaatgtaccccctttcctcaggaagactggtttgggatgggtaacagctgaatacggaatgttaccaaaatccaccgcagaaagaatgagaagagaggcgaaatccgttagccaaagtgggagaacacaagaaattcagagactgatagggagaagtttacgtgcaggtgtcgatagagtagccctgggtgagagacaggtaataattgattgtgatgttattcaagcagatgggggaacacgttgcgctgctatttgtggtggctgggtttctcttaaactagccacaaattaccttttaaagtcaggtaccttaaaatttgaccctattataagtaatattgctgcagtttcttgtggtattgttgatggtgaacctctattggatttaaattacgaacaggatagtaatgctgaaacagatgcaaattttgtgatgaacgaaaaatctcaaatagttgaaatacaatgttcagctgagaagaaagcatttactaaacaagaattcgagcaattattcaatttggctagtgagggaattagaaaaataataagtattcaaaattctgtttttgatggttag

SEQ ID NO: 254529 - DNA, 484 bp, Unknown
  Bacterial polypeptide expressing nucleotide sequence isolated from the Sargasso Sea
gggcagagaagcagcaagaggaaaacaatcagggagaactcaggaaatacaaagacttattggaagatcccttagacaatctgtaaatcttaaatatttaaaagataagactattcaagttgactgcgatgttattcaagcagacggaggtacaagaactgcttcaattactggtggatgtgttgcacttttccttgcaataaagaatcaccatgatgatcaaagagcaattgaacaatatgtggctgcaatttctttaggtgttaaagataacgaaatcctagttgaccttgattaccaagaggatagcactgctgatgcagacattaatattgtaatgacccaggatcttgatttaattgaaattcagggtaccgctgaagagcgaccattttcgcaagaacaactcactgaaattgtaagcaaggctagctcatctattaaggatatagttgctatccaaaaacaggctgtagaaggatag

SEQ ID NO: 254530 - DNA, 715 bp, Unknown
  Bacterial polypeptide expressing nucleotide sequence isolated from the Sargasso Sea
atgagaaaaaaaagaacctatgaagaaatgagagaaatttcctttgaaaccggagtaaacatccatgcagaaggttcatgtttagtaagatttggcaatactcatgttttatgtactgcttcagttgaagaaaaaactccccattggttaaaaaactcaggaaagggttgggtaacagctgaatatggaatgcttccaagatcaacaaattcaagaatagacagagaagcagcaaaaggcaggcaaacagggcgtacacaagaaattcaaagattaataggaagaagccttagatcaatagtaaatttaaaaaacttaggtgaaagacaaataaaaatagattgtgatgttatacaagctgatgggggaacaagaaccgcatctattagtggtggatttgtagctctttatctagctgtagatgtattaaaaaaaaattttaatattgaaaaacctatcattaaagaatttatagctggtgtttcagttggaattattgatgataaacctaatttagacttagactatgaagaagattctaaagctcaggtagatggaaattttgttatctgtgaaagcggaaaaattgttgaaattcaaacaacaggtgaggagtatttttttagtagagaacaatacaacatactttttgacctagcctatgtaggagttgccaaaataatagaaaagcaaaaaaaatgtttgtcagtttaat

SEQ ID NO: 254531 - DNA, 250 bp, Unknown
  Bacterial polypeptide expressing nucleotide sequence isolated from the Sargasso Sea
atgtctagagataatagaaaaccaactcaagcaagagaaatttccattgaggcaaatgtaaatcttcatgccgaaggttcagtactggtcaagtttggcaatacacatgtaatttgtactgcaagtattgataacaatgtcccaagatggatgaagggatcagataagggctgggtaacagctgaatatggaatgcttccaagatcaaccaatgagagaatgggcagagaagcagcaagaggaaaacagt

SEQ ID NO: 254532 - DNA, 418 bp, Unknown
  Bacterial polypeptide expressing nucleotide sequence isolated from the Sargasso Sea
atgcgtgtcgatggcagagccaatgatgatttacgtcctatctcgttcgaacgtaacttcaccgaccagactccaggatctgtgcttgtgagctttggtcgcaccaaagttctgtgcacggtatctattgacgacgatgttccacgatggatgcgaggcaacggggaaggttgggttaccgcagagtatgcgatgcttcccggatctagtggagaacgtgttggacgcgaagcaaaaaaagggaaacaaaagggtcgaacacttgaaatcgagagacttatcggacgtgccctcagagccgtctgcgatatgaaggtgctcggcgaacgcgaagtaactgttgactgtgacgttctgcaagcagacgggggtacccgaacagcatcgatttgtggggggtacgtggctctaccatgac

SEQ ID NO: 254533 - DNA, 670 bp, Unknown
  Bacterial polypeptide expressing nucleotide sequence isolated from the Sargasso Sea
aagagaaatttctatagaaaccgatatcaatatccatgctgaaggatcagcgttgatttcatttggaaatacaaaggtaatttgtaacgcttcaattgaaaacaatgtgccaagatggatgaggaactctaatgagggttgggtaactggtgaatatggaatgttaccaagatctactaatgaaagaatgggtagagaagctgcacgaggcaagcaaagtggcagaactcaagaaatacaaagattaattggtagatccttacgacaagctgtaaatttgaaatatctcaagggaaaaaccattaatgtggactgtgatgtaatacaagcagatggtggaactagaactgcttccataactggtggctgcgttgcgctttttttagctataaaaaatcatcatgatgatcaaagagcaataaagtcatttgttgcagcagtatcgatgggtattaaagataataaaattctattagatcttgattatgatgaggacagtactgcggatactgatctaaatatcgttatgaatgatcaagatgaaataattgagattcaaggcaccgctgaagatgctcctttttcaaaaagtgagcttaatgatatgctagatatgggaagttcagcaatctctcaaattattaaaaaacaaaaagtttgtgttaaataa

SEQ ID NO: 254534 - DNA, 694 bp, Unknown
  Bacterial polypeptide expressing nucleotide sequence isolated from the Sargasso Sea
aatagaaaaccaactcaagcaagagaaatttccattcacacaaatgtaaatctgcatgctgaaggttcagtactggtcaagtttggtaatacacatgtaatttgtactgcaagtattgataataatgtcccaagatggatgaagggatcagataggggttgggtaacagctgaatatggaatgcttccaagatcgaccaatgagagaatgggcagagaagcagcaagaggaaaacagtcagggagaactcaggaaatacaaagacttatcggaagatcccttagacaatctgtaaatcttaaatatttaaaagataaaacaatccaagttgactgcgatgttattcaagcagacggaggtacaagaactgcttcaattactggtggatgcgttgcacttttccttgcaataaagaatcaccatgatgatcaaagagcaattgaacaatatgtggctgcaatctctttaggtgttaaagatgacgaaatactagttgatcttgactaccaagaagatagcactgctgatgcagacattaatattgtaatgacccaggaccttgatttaattgaaattcagggtaccgctgaagagcgtcctttttcgcaagaacaactcactgaaattgtaagcaaggctagttcatctattaaggatatagttgctatccaaaaacaggctgtagaaggatagt

SEQ ID NO: 254535 - DNA, 529 bp, Unknown
  Bacterial polypeptide expressing nucleotide sequence isolated from the Sargasso Sea
tacccataaaaggatggacagagaaattagtaaggggaagatttctggaagaactcaagaaattcaaagactcattggtagatctttgagagccgtagttgacttagaaatccttggtgaattacaaattaaaattgattgtgatgttattcaagctgatggtggaacaagaacagcctctattactggtgcatggatagcattacatgactcaatcaaatttttgctttcaaaaggtaaaataacgacaaatcctattacaaatcaagtagcagcaatttcttgtggtatagttgacggagaaattttattagatttagactacgatgaagattccaatgccgaagtagatgctaactttgttttaagtgaagataatggtatcattgaaatacaaactacatccgaaaaaaaaccaatagatattgttcaatttaatcaaatttttgaactagttttaaaacaaattaaacacttgtttaaaatccaatcaaatgttctgataattgatgaaaataatcaaaaataa

SEQ ID NO: 254536 - DNA, 712 bp, Unknown
  Bacterial polypeptide expressing nucleotide sequence isolated from the Sargasso Sea
atgagaaaagatagatccttcaatcaaatgcgtgaaatttcatttgagaaaaacgtgaatattcatgctgatggttcatgcttagttaaattcgggaacacacatgtcctttgtcttgcaacaattgatgaaaaagtccctcactggttaaagaatactggcaaaggttgggttacagcagaatatggcatgctaccaaggtcaacaaatactagaatggacagagaggctgctaaaggaaagcagtcaggcaggacacaagaaatacaaaggttaattgggcgaagcttaagatcaattgtgaatctttcaaatcttggagagcgtcagattaaaattgactgtgatgtaattcaagcagatggcgggacaagaactgcttctatcagtggtggttttatttctttatatctagcaatagaaaaattaaaaaataattataatctccaaaaaccaattatcaaaaactttatagggggagtatcaactggcatagtggaaaataaagcattattggatctagattatagggaagactccgaggctcaagtagatgcaaattttgtaatttgtgattctgatgaaatatctgaaattcaagttactggtgaagaatttttttttaatgatgctcagtttacagaaatgttttcactagcaaaaattggagtcaaagaaataatttctaaacaaaaagaggctttgaaataaa

SEQ ID NO: 254537 - DNA, 709 bp, Unknown
  Bacterial polypeptide expressing nucleotide sequence isolated from the Sargasso Sea
atgcctcgttcaagtagtagagggttggatgacctcagatcattatccattgaaacggatgtcaatcttcatgctgaagggtcggcactgatcaagtggggaaatactcatgtgctctgtaccgtatccattgaacatggtgtaccaagatggatgcgtaattctgagaaaggttggttgacagctgaatatggtatgttgcctcgatccactcatgaacgaatgggaagagaagcagctagaggtaagcaatcggggcgaacccaagaaatacaaagactgattggtcgatccttgcggcaagctgtaaatttaaaatacctttgtgaaaaaactattcaaattgactgtgatgtcattcaagcagatggaggaacaagaacagcatcaattaccggggcttgtgtagcattattttctgctatcaaaaatcatcacgatgaccaaagagcaatgcatcaattagtgagtgcagtctctttaggcattaaagatgatgaaattttagtcgatcttgattatgaggaggatagtgcagctgataccgatctaaacattgtgatgacagaagatcaaaatattatcgaaatccaaggtactgctgaacatgctccgtttagtgttgaccaattgcatactattgttagcaaagctaaagtagctacagataaaatcatacgtatccaaaaagaagcactaaaattatgaa

SEQ ID NO: 254538 - DNA, 712 bp, Unknown
  Bacterial polypeptide expressing nucleotide sequence isolated from the Sargasso Sea
tatgagaaaagatagatcgttcaatcaaatgagggaaatttcgtttgaaaaaaatgttaatattcatgctgatggttcatgtcttgttaaatttggcaatacgcatgttttatgtctagcaacaatagatgataaagttccacgatggttaaaaaatacgggtaaaggctgggtaactgcagaatatggaatgttgcctagatcaactaacactagaatggatagggaggcagcaaaaggtaaacagtcgggtagaactcaagaaattcagcgcttaattggaagaagtttgagatcaatagtagatttatcaaatttgggtgaaagacaaattaaaattgactgtgatgtaatacaagctgacggaggaactagaacagctgctataagtggtggttttgtttcattatacatagcaatagaaaaacttaaaaatagttacaacattcaaaaaccaataataaaaaattatatcggtgctgtctcagctggaattatagaccaaaaagcaatgttggatttaaactatgaagaagactctaaagcacaagttgacgcaaactttgttatttgtgacacaggagaaatatcagagatacaagtaactggtgaagagtattttttcagcaataatgaatttagtgaaatatttgaattagcaaaaaaaggaattaaagaaataattgaaattcaaaaaaaggcattagattaa

SEQ ID NO: 254539 - DNA, 820 bp, Unknown
  Bacterial polypeptide expressing nucleotide sequence isolated from the Sargasso Sea
atgaagacaggagttggaagcaccggaagggaaaacgacgagatcagggaaattgaggtcaagctggacttcaccccgaatgcactgtcttcccttctctactcgcagggggacacccaagtcctggtctgcgtcaccaaggcaccctctctccccagatggttccctcgagactctgacaggggttgggtgcatgccgaatactcgttgctcccaggctcgaccgacaccagattcaggagagagaggagcggtgccaagggtaggacgatggagatagagaggctagtcgctcgatcgctgaggggagccgtagacctggagcaactgggcccagtggcgctgactgtggactgcgacatcctgaatgccgatggaggaacaagatgcgcttcaataacggctgcaaacatcgcactgaggctcgctgttcggagactcatctcctccggggagtgcctgccgaaggacaggaggctcaccagggagcaaatcaggaaaggagcgaagcaggagactcttagtaaggaacagatggcttcccacgaagactccgtgatgcccaatgacgttgcagcgcttagtgtgggaatggtcgagggacagatctggacagacttggattacgttctcgacagcaatgccgacgtcgacatgaacgtcgtgatgactagctctggggacttcgtagaggttcagggaaccggcgaggaggcaacctattccagagaagagctcgactctctaatcgacgctgccgaggcaggaatagcgaagttgcacaagttccagaccgaagtcctctctaatgcgagttgat

SEQ ID NO: 254540 - DNA, 718 bp, Unknown
  Bacterial polypeptide expressing nucleotide sequence isolated from the Sargasso Sea
atgagaaaagatagagactttgacgaaattagagaaattgtttttgaaaccaatataaatatacatgctgaaggttcttgtttggttaaatttggtaatactcaagtaatttgtacggcttctattgatgaaaaaacccctccttggcttcgagggtcaggaaagggttgggtaactgcagaatatggaatgctgcccagatcaacaaatacaagaatagacagggagtcagcaagaggaaaacaaagtggcagaactcaagaaattcagaggttgattggaagaagccttaggtctgtggtaaacttagaaaaccttggtgaaagacaaattaaaatagattgtgatgttgtgcaggctgatggggggactagaactgcagcaataagtggaagttttgtagcattatatttggctattgataaattaaaaaaaaactacaacattgcaaaacctataattaaaaactttgtggcagcaatatcagttggcataatagcaaacaaagtgtttgttgatttagattacagtgaggattctaaggcagaagtagatgctaattttgtaatatgtgataatagcaaaatttctgaaattcaagcaacaggggaggaatacttctttagtgaagcgcaatatcaagaaatgtttaaactcgcaaaactaagtgttgaaaaaattataactaaacaaaaaaacatactgaatttaaattgaa

SEQ ID NO: 254541 - DNA, 706 bp, Unknown
  Bacterial polypeptide expressing nucleotide sequence isolated from the Sargasso Sea
atgaaaagatcaaatgacagagcttttgatcagcttagagacgtcaatgttgaaacaggcatcattagtaatgctgaaggatctgcattaattaagtttggaaatactcatgtgatttgcacggcatcaattgaaaattctgtacccagatggatgaaaaatagcaatgagggatggataacagctgagtatggcatgcttccaagatcaactcatgagagaatgggaagagaggctgcccgaggaaaacaaagcggcagaacacaagaaattcagagacttattggtaggtctctccgacaaagtgtgaacttggaatatttaaaagatcacaccatcacaatagactgtgacgtgattcaagctgatggaggaacccgcactgcctcaatcaccgggggctgtattgctttattttctgcaattcaaaataaattaaaggatcatagggctataaaaaaacatgtgtctgctatttccattggcctccttaacgaccagcctattttagatcttgactatacagaggactcttcagctgaaactgatcttaatctagttatggatgaagataatggaatcattgaaatacaaggcactgcagaagaaaaaccattctcaaatgagcaacttgagcagatgttggatattgggaaaaaaggcattagccatttgattgagcttcagaaaaaatgtctcaattaaa

SEQ ID NO: 254542 - DNA, 715 bp, Unknown
  Bacterial polypeptide expressing nucleotide sequence isolated from the Sargasso Sea
atgcgtccaagtaacagaacgccagcacaaacacgtcccatcactatcactcgccagtttacggcccacgccgaaggttctgtgttagtggagtttggcgaaaccaaagtactttgtaccgccagttttactgagggtgtgccacgtttcctaaaaggtcagggacaaggctgggtgacggcagaatacggtatgttgccacgttcaacccacagccgtatggaccgtgaagcggctcgcggcaagcaatctggccgtactcaagagatccaacgtctgattggtcgtgcattgcgtgcttgcgtcgatatgaaagctcttggcgaaaacactatcgtcatcgattgcgatgtgatccaagccgatggcggtactcgcaccgcgtctatcacaggtgcctgtgtggctcttgtggatgcgctaaactgggctcgcggtaagggtattattaagtctaacccactgaagtttttgattgctgcggtcagcgttggtatctataacggtgaagcgatcagcgatctcgaatatgtggaagacagcgcggccgaaaccgatatgaacgtagtgatgacggaaaccggtaagattattgaaattcaaggtacggccgaaggtgagccgtttagccatgaagaattgattgagctactcgggttggcgaagaatagtattcgtgaaatcgtcgatgtgcagaaagccgcattaaattaat

SEQ ID NO: 254543 - DNA, 658 bp, Unknown
  Bacterial polypeptide expressing nucleotide sequence isolated from the Sargasso Sea
tctcaacaggcgatacacgaatcatctgcactgcaactttcgaggaagaggttccggtgtttcctccaacttcctgaaaacgattacaagcatggctgggtgactgcggaatatggaatgcttccgggttcaaccggaaaaaggaaacggcgggaaaggccccaagttgacggacggactcaggaaattcaacgcttgattggccgatcgttaagatctgtagttgatttgaaggccctcggcaggcataccgtatggatcgattgtgatgtcattcaggcagatggcggcacccgcactgcatcgatcacaggtggatttgtcgccctgattctggctctgagacagatgcaggctgaaggaagattcaagacatttccggtcagtcgattccttgcttccatcagcgtcggtatttttgaaggacgtccgcttcttgatctcaaatatgatgaagacgtaaaagcagaagtcgatatgaacattgtcatgctggacaatggtgattatgttgaagttcaagggactgccgagggtcagactttcccgaggaaacaactcaatcagcttctggattatgcggaaaagggaatccaatcccacttgcagaatcaaaaaaaacttcttggtgagcatctggaatcaggtgtctcctaaa

SEQ ID NO: 254544 - DNA, 497 bp, Unknown
  Bacterial polypeptide expressing nucleotide sequence isolated from the Sargasso Sea
aatgtctagagataatagaaaaccaactcaagcaagagaaatttccattgatacaaatgtaaatcttcatgctgaaggttcagtactggtcaagtttggtaatacacatgtaatttgtactgcaagtattgataataatgtcccaagatggatgaagggatcagataagggttgggtaacagctgaatatggaatgcttccaagatcgactaatgagagaatgggcagagaagcagcaagaggaaaacagtcagggagaactcaggaaatacaaagacttatcggaagatcccttagacaatctgtaaatcttaaatatttaaaagataaaacaatccaagttgactgcgatgttattcaagcagacgggggtacaagaactgcttcaattactggtggatgcgttgcacttttccttgcaataaagaatcaccatgatgatcaaagagcaattgaacaatatgtggctgcaatctctttaggtgttaaagatgacg

SEQ ID NO: 254545 - DNA, 748 bp, Unknown
  Bacterial polypeptide expressing nucleotide sequence isolated from the Sargasso Sea
atgaaaattttatctgacaataaacttattcgaccatcaggaagatcttttgatgagttgagaaagattgagtttgtacctaattttataagtcatgctgaaggatcttgtttcgttaaatatggtgaaactcacgttctttgcactgcgagtgttgaagaaagggtaccagtttttctcaaaagctcaggaaagggttgggttacagctgaatatggtatgctgccccgatctactcatacaaggagtggacgtgaagcttcaaggggcaaacaaagtggaagaaccttagaaattcagagacttataggaagatctttaagatctataattgatcttaaagagctaggagagcgtcaaattattatagattgtgacgtcattcaagcagatggaggtacaagaacagcgtcaattacaggcggttggatagctctatcgtatgcagtaaaaaagctaatacaaataaataagcttaagtctaacccgataataggccaaatttgtgctgtttcttgcggaatctggaatggattttctgtattggacttggattactcagaagattcctctgctgaagtggatactaactttgtaattacctctgatcaaaaattggttgaaatacaaatctcatctgagtcagaaccctttgaaagaaaaaaaatgaatgagcttacagacttagcaattataggaacatcaaagataattgatttacaattaaaggctttgaatgactcttaat

SEQ ID NO: 254546 - DNA, 386 bp, Unknown
  Bacterial polypeptide expressing nucleotide sequence isolated from the Sargasso Sea
aatgagaaaagatagaaactttgacgaaattagagaaattgtttttgaaaccaatataaatatgcatgctgaaggttcttgtttggttaaatttggaaatactcaagtaatctgtacggcttctattgatgaaaaaactcctccttggcttcgaggttcaggaaagggttgggtcactgcagaatatggaatgcttcccagatcaacaaacacaagaatagacagggagtcagcaagggggaaacaaagtggcagaactcaagaaattcagaggttagttggaagaagtcttaggtccgttgtaaaattagaaaaccttggtgaaagacaaattaaaatagattgtgatgttatacaggcagatgggggcactagaactgcagcaa

SEQ ID NO: 254547 - DNA, 733 bp, Unknown
  Bacterial polypeptide expressing nucleotide sequence isolated from the Sargasso Sea
atgacgtcctccgtttcccgcccgagcggccgccgcgccgacgcactgcgcaaggtcgcccttacgcgccactacacgaaacatgccgaaggctcggtgctggtcgaattcggcgacaccaaggtgctctgcaccgcgagcgtctccgaacgcgtccccgacttcctgcgcgaccgcgggcaaggctggctgaccgccgaatacgggatgctgccgcgcgcgacgcacacgcgcagcgaccgcgaagccgcccgcggcaagcagaccggccgcacgcaggaaattcagcgcctgatcggccgtgcgctgcgcgcggtgttcgacctggaggcgctcggcccgcgcacgatccatatcgattgcgacgtgatccaggcggacggcggcacgcgcacggccagcatcaccggcgcattcgtcgccgcgcacgacgccgtgtcgaagctgatcgcggccggcaagctcacgcgctcgccgatcaccgaccacgtcgccgcgatctcggtcggcgtatatcagggcgcgccggtgctcgacctcgattacgcggaagattcgcagtgcgacaccgacatgaacgtcgtgatgacgggcgccggcggtttcgtcgaagtccagggcacggccgaaggcgtgccgttctcgcgtgccgagatgaacgcgctgctcgacctcgcgcaaggcgggatcgccgagctcgtgcagcttcaaaaagacgtgctgggcgcctgac

SEQ ID NO: 254548 - DNA, 712 bp, Unknown
  Bacterial polypeptide expressing nucleotide sequence isolated from the Sargasso Sea
atgagaaaagatagatcgttcaatcaaatgcgtgaaatttcatttgagaaaaacgtaaatattcatgccgatggttcatgtttagtaaaatttggaaatacacatgtcctttgtcttgcaacaattgatgaaaaagttcctcattggttaaagaatactggaaagggttgggttacagcagaatatggcatgctgccaaggtctacaaatacaagaatggatagagaagcagcaaaaggaaaacagtcaggtagaacgcaagaaatacaaaggttaattgggcgtagcttaagatcaattgtggatctttcaaatcttggagagcgtcaaataaaaatagactgtgatgtaattcaagcagatggcggaacaagaactgcttctatcagtggtggttttatttctttatatctggcaatagaaaaattaaagaataattataatcttcaaaaaccaattatcaaaaactttataggagcagtatcaactggcatagtggaaaataaagcattattggatctagattatagggaagactccgaagctcaagtagatgcaaattttgtaatttgtgattcaaatgaaatatctgaaattcaagttactggtgaagaatttttttttaatgatgctcagtttacagaaatgttttcactagcaaaaattggggttaaggaaataatttctaaacaaaaagaggctttgaaataaa

SEQ ID NO: 254549 - DNA, 436 bp, Unknown
  Bacterial polypeptide expressing nucleotide sequence isolated from the Sargasso Sea
aattgcgcgttcactacgcgcagcggtagatttaaaacttctgggcgaaaacaccattacgttagactgcgacgttattcaggccgacggcggtacgcgtacagcgtcaattaccggtgcgtgtgtagctcttgttgatgcacttacttacatgcgtgcaaaaggcattatcaaaactaacccgcttaagcatatgattgccgccctttcagtgggtatttacgaaggtacaccaatcgctgaccttgagtacaccgaagactctgaggcagagacagatatgaacatcgtaatgaccgaaaccggcaagctgattgaagttcaaggtactgcagagggcgaaccgttctcgtttgaagagcttgacgagatgctgaaaattggtaagcacggtttacgtgaattgttcgacattcaaaaagcggcgctagcgtaa

SEQ ID NO: 254550 - DNA, 709 bp, Unknown
  Bacterial polypeptide expressing nucleotide sequence isolated from the Sargasso Sea
tatgcatagattagacaaacgtaaatacgatcaattaagagaagtcagtatcattcctgactacaacaagcacgctgaaggttctgctcttatcaaatttggagatactcatgttatatgtaatgcaagcgtggaaaaagctgttccaaggtggatgcaagataaaaagactggatgggtaacagctgaatatggcatgctgccacgttcaactaatgaacgaatgaaccgtgaagctcaaagaggaaagcaatctggaagaaccatggaaatacaaagattaattggcagatcattaagacaggtagtgaatcttgatcaattaactggctacacgatcaccattgattgtgatgtgatacaagcagatggaggaactcgaacagcatcaattactggaggcgcaatagctttgtgcaaagcattgaaaaaaattggaaaagaaaattccattaataaccttgttgctgcaataagtgttggaatttataaagatgaattgatacttgacctaaattatgaagaagatagcaatgcacaatgtgatgtgaatattgttatgaacgataagttagattttattgaagtacaaggcacaggggaagaaaaggcatttagtaaggaacaattcaatggacttttagatttagctgaaagtggtataaaagacttgtttaaattacaacacgaaataattaactctaagtga

SEQ ID NO: 254551 - DNA, 715 bp, Unknown
  Bacterial polypeptide expressing nucleotide sequence isolated from the Sargasso Sea
aatgagaaataatagaaatattaaccaattaagagatatagaaataattcctaatttttcatacaatccggaaggctcatgcttaattaaatgtggtgatacgcatgtaatctgcagtgcatcgcttgatagaaatttaccaagatggttaaaaaattcagagactgggtgggtaacagcagaatacgggatgttaccaagatcaacttctgagagaatgtctagagaggccgccaaaggtaaacaatctggtagaacacaggaaatacaaagactaattggaagatcattaagatctatagttaatttagaagatttaagggaattacaaataataatagattgtgatgttattcaagcagatggtggaacaagaaccgcttcaatttcaggatcatttatcgcacttcaattatgcataaatcatatgcttaataaaaaaattataaaaaaaaatccaattagtgaatatgttgccgcaatcagctgtggaattataaatggtgaaccttatttagacttagattttgaggaagatcaaaatgctgaagtagatgcaaattttgtaataacagaaagtggtaaactagttgaagtacagatgacttcggaaaagaagctttgtgaggagaggtcatttaatgcaatgttggagcttgcaaaatcagggatctctgagatcatccaaatgcaaaaaaaaattctaagtgattaa

SEQ ID NO: 254552 - DNA, 381 bp, Unknown
  Bacterial polypeptide expressing nucleotide sequence isolated from the Sargasso Sea
ttattgttgattgtgatgtaatacaagcagatggtggcacacgaacagcatcaattacgggaggctatattgccttgtatgacgcggttaatagagctatggcagacggtttaataactagtaatccaattaaagctaaaatagcttctatctcagttggtatttatcagggtgaagtattattggatttaaactacaaagaggattcagcagctgatacagatatgaatgttgtgatggatgaaaatttttcttttatagaaattcaaggaacttcagaaaaacgaccattcacaaatcaagaactaaacggcatgttagatttagccagaaaaggtattagcaaattatttgaatatcaagagaaggttataggatagt

SEQ ID NO: 254553 - DNA, 688 bp, Unknown
  Bacterial polypeptide expressing nucleotide sequence isolated from the Sargasso Sea
aatgagagaaatttcctttgaaactggtgtaaacatacacgcagaggggtcatgtttggtaaaatttggcaatactcatgttttgtgtactgcgtcagttgatgaaaaaactccccattggttaaaaaactcggggaaaggctgggtaacagctgaatatggcatgctaccaagatcaacaaattcaagaatagatagagaggcaacaaaaggtaagcaaacagggagaacgcaggaaattcagagattaattggacgaagcctaagatcaataataaatttaaaaaacttaggtgaaagacaaataaaaatagattgcgatgttatacaggctgatggtggtacaagaactgcatctattagtggtgggtttgtagctctttatcaagcagtagatttagttaaaaaaaatttcaatattgaaaaaaccattattaaagaatttatagctggagtttcagttggagttattaatgacaaacctaatttagatctagattatgaagaagattctaaggcacaggtagatggaaattttgttatttgtgaaagtggtaaaattgctgaaattcaaacaacaggtgaggaatacttttttagtagagaacaatataatatgctttttgaccttgcatctgaaggagtctctaaaataatagagaagcaaaaaaaatgtttgtcagtataa

SEQ ID NO: 254554 - DNA, 586 bp, Unknown
  Bacterial polypeptide expressing nucleotide sequence isolated from the Sargasso Sea
gatgagaattgacaatagagataacaatgaacttagagatattgtgataaataaaaatattcagtttcagtcagatggatcgtgtattataagtttagggaatacacaggttgtttgtgctgtaagatacgaaaataaagtcccgccatttttaaaaggatttgggaaaggatgggttacagcagaatattcaatgatgccaggttccacaaatactagaactaatagaaacaatactaatagtggccgaagtaaagaaattcagaggttaattggtagaagcttgcgagccgtgctagatttaaatcaaattggagaaaattcgttaattgtcgattgtgatgtattgaatgcagacggaggtactaggacagcatcagttattgggagcgtgatcgctttacaaaatgctattgttaaattacagaaatctaaagcattgccaaataatattgattttaaccctattgctgcaataagtgttggaatagtaaataatgaagttatgctagatttaaattattctgaagattctcaagctatagcggattttaattttgtaatggatactaatggcaacattatt

SEQ ID NO: 254555 - DNA, 483 bp, Unknown
  Bacterial polypeptide expressing nucleotide sequence isolated from the Sargasso Sea
tatgagaaaaaacaatagaaaactagatcaagctagaaaactaacaatactcccaaactaccaaaaaaattcaattggatcagtgcttattaactttgaagatacaagagttatttgttcaacaaatatatctagaaatgtacctagatggttactaaatgagaatagaggttgggttacggcagagtatagtatgttgccaaattcatccgaagatagaatcagtagagataggggtggaagaataagtggtagaactcaagagattcaaagacttataggaagatcactcagacaagctataaatttagatttaatcccaggaatattaattactgttgattgcgatgttcttaatgctgacggtggaactagaactgcatcaattactggatcatttatagcaacatacatggcattgaagaattattataattcaagtcctaaaaaatttataaaaaatcaaattgcagctattagtgt

SEQ ID NO: 254556 - DNA, 715 bp, Unknown
  Bacterial polypeptide expressing nucleotide sequence isolated from the Sargasso Sea
catgcgtccaagtaacagaacgccagcacaaacacgccccattactatcactcgccaatttacggcccatgccgaaggttctgtgttagtcgaatttggcgaaactaaagtgctttgtaccgccagttttactgagggtgtaccgcgtttccttaaaggtcagggccaaggctgggtaacggcggaatacggcatgttgccacgctcaacccatagccgtatggatcgtgaagccgctcgtggtaaacaatctggccgcacgcaagaaattcaacgtcttatcggccgtgcgttgcgtgcctgtgtggatatgaaagcgctgggtgaaaacaccattgtcatcgattgtgatgtgatccaagctgatggcggtactcgcaccgcgtcaatcactggtgcttgtgtcgccttagtggatgcgcttaactgggctcgtggtaaaggcattattaaatctaacccgcttaagttcttaatcgctgcggtcagcgtgggtatctacaacggtgaagcgataagcgacctagagtatgttgaagacagcgcagccgaaaccgatatgaacgtggtaatgacagaaaccggtaagattatcgaaattcaaggtactgccgaaggtgaaccgtttactcacgaagagttgattgagctacttggtttagcgaagaacagtattcgcgaaatcgtcgatgtgcagaaagccgcattaaattaa

SEQ ID NO: 254557 - DNA, 715 bp, Unknown
  Bacterial polypeptide expressing nucleotide sequence isolated from the Sargasso Sea
catgcgtcctagcggcagaacagcgagtcaaattcgtcctattactttcacccgtcaatttacggctcatgctgaaggttcagtattggttgagtttggtaacaccaaagttatttgtactgccagcgtgattgaaggtgtgccacgttttatgaaaggccagggcaaaggctggatcacagctgaatacggcatgttgccacgcgcaactcatacccgtaacgaccgtgaagcggctcgtggtaagcagggtggccgtactatggaaattcagcgcctgattggccgcgctttacgtactgctgtggatttaaagctgttgggtgaaaacactattactatcgactgtgacgtgatccaggccgatggcggcacccgcacagcctctattaccggtgcttgtgtagctttagtggatgcgctgaattttatgcgcgctaaaggcatgatcaaaaccaacccattgaattttatggtggctgcggtttctgtgggtgtttataaaggcactgctgtggccgatttagactacgccgaagattcaaacgctgaaaccgatatgaatatcgtcatgactgaaaccggcaaaatcatcgaaattcagggcacggctgaagaagcgccatttagctttgaagaaatgcagcagatgatggaattaggcaaacacgccatccgtgaaattatcgacgaacaaaaacgcgttttagcttaa

SEQ ID NO: 254558 - DNA, 742 bp, Unknown
  Bacterial polypeptide expressing nucleotide sequence isolated from the Sargasso Sea
aatgaacaagactttattagaaaggcactctaaaagaaaaagcaatcaagcaagaaaaatacatataacaaaagattatattaataatgcagatgcttcttgtctcataaatgttgggaaaacgagcattatatgtacagcatctatagaaacaaaaattcctaattggttaaaagggtcaagaaaaggttggcttactgcagaatatagtatgcttcccgcatcaacacatacaagaaataatagagaatctgctcaagggaaacaaagcggcagaactttagaaatacagagattgattggaaggtcactcagagcttctctagatttagagaaacttcaagaattacaaattaaaatagactgtgatgttataaatgcagacggaggaacaagaacagcctctataacgggtggctgggttgttttaaaaatgttagtagaatctttgataaaaaataaaactcttaaaaataatccaataaaagatcagattgcggctatttcatgtggtatttttaaaggtgaagaaatacttgatttagattattttgaagatagtaatacggaaatagatgcaaattttgtagtttcaaaatctaaaaatttaatagaagtgcagacaacggctgaaaaggggggctttaccaaaactcagttaaatacattgatagatatggcttgtaaagaatgcggcaacctatttagtatacaatcagaagtcattaaaaatgaaaaataa

SEQ ID NO: 254559 - DNA, 787 bp, Unknown
  Bacterial polypeptide expressing nucleotide sequence isolated from the Sargasso Sea
ttaaatataaaagtaataaaaaaactttatttatacattatgaaaattttatctgacaataaacttattcgaccatcaggaagatcttttgatgaattaagaaaaattgaatttatacctaattatataagacatgctgaagggtcttgttttgtcaaatatggtgaaactcatgttctttgcactgcgagtattgaagaaagagtgccaatttttcttaaaaactcaggaaaaggatgggttacagctgaatatggcatgctaccccgatctacacatacaagaagtggacgtgaagcttcaaggggcaagcaaagtggaagaactttagaaattcagagacttataggaagatctttaagatctataattgatcttaaagcgctaggcgagcgacaaattatagtagattgtgacgttattcaagcagatggaggtacaagaacagcgtcaattactggcggttggatagcgctatcatatgcagtaaaaaagctaatacaaataaataaacttaattttaacccaataataagccaaatttgtgctgtttcgtgtggtatatggaagggattttctatcttggatttggattactcagaagactcctctgctgaggtagatactaactttgttataacctcagatcaaaagttagttgagatacaaatctcatcagagtcagagccctttgaaagagaaaaaatgaatgagcttacagacttagctattatgggaacatcaaagataattgatttacaattaaaggctttgaatgactcttgat

SEQ ID NO: 254560 - DNA, 706 bp, Unknown
  Bacterial polypeptide expressing nucleotide sequence isolated from the Sargasso Sea
atgacaagaaaaaataataggtcaaataatgaaatgaggcctctaaagattgaagttggggtcaataaacatgctgaaggttcagctcttataaaatttggagatacgcatgttatttgcactgcaagtatcgaaaatcatgttcccagatggatgcgtggttcaaatgaggggtggattactgcagaatatggaatgctgcctcgctcaactcatgaaagaatgaatagagaagctgcaagaggcaaacaaagcggaaggacaatggaaattcaaagattgataggcaggtcactaaggcaagctgttgatttaaaatatttaaaagataaaacaattaatatagattgcgatgtaatacaggcagatggtggaacaagaactgcatctatatcaggtgcttgcgttgcattatttgctgctattaaaaactcacatgatgatcaaagagcaatcaaagaacacgttgcggcgatttctattggattaaaagatggctttccacttttggatttagattatgaggaagatagctctgccgatacagatttaaatgtggttatgaccgaaagtgggggcatcatagaaatccaaggcacagctgaaaaaaatccttttgctaaagatcagcttgatgaaatgattgaatccgcctcagaaggcatttcagatataatagctctccaaaaatcatgtctggcttaaa

SEQ ID NO: 254561 - DNA, 736 bp, Unknown
  Bacterial polypeptide expressing nucleotide sequence isolated from the Sargasso Sea
atggtggatccctccgagacccgagccgacgggagacgtccagatgcccttcggccgtttgaagtgagctgggatccgatggggttcgctctcagttcattgatcgtgcgcaccggacgcacggcagttctgtgcagcgtctgcctcgaagagacggtgccgcgctggcggaaggggaatggactgggctggatcagcgctgaataccggctcctgcccggctccacacctcagaggcagtcgcgggaattgctcaagctctccggccgcacccaagagattcagcgattgatcggccgcagcctgcgcgccgcggtggacctggaagctctcggagaacgcagcctgctgatcgattgtgatgtgatccaggcggatgccggcacccgaaccgcgtcggtcaccggggcctggatggctctgcagctggcctgtgaccgtctgatcgcccaggggatcctggagcgccagccgatccggagccaggtggcagcggtgtccgtcggactcctggagggcaggccgctgctggatctggattacagcgaagacagccgagctgacgttgatctgaatgtggtggcctctggcgacgggagtctcctggagatccagggcacggccgaaggagctccgttcagccgcgggcagctgaacgtcctgctggatctggcgcagcccgggcttgacgcccttctggccgcccagagccatgccctgagcagccgcagctgat

SEQ ID NO: 254562 - DNA, 706 bp, Unknown
  Bacterial polypeptide expressing nucleotide sequence isolated from the Sargasso Sea
aatggttagaaacaaagatcgaaatcataatcaactcagagatatctctattgaaactaatatcaatatccatgctgaaggttcagcattaatctcttttggtaatacaaaagttatctgtaatgcatcaattgaaaacaatgtacctagatggatgaaaaactctgatgaaggttgggttactggtgaatatggaatgttaccaaggtctactaatgaaagaatggggagagaagctgctagaggtaagcaaagtggcagaactcaagaaattcaaagactaattgggagatctttgcgtcaagcagtgaatctaaaatatcttaagggtaaaactattaatgttgattgtgatgttattcaagcagatggaggaacaagaacagcttctattacaggtggttgtatagctctttttttagcaataaaaaaccaccatgatgatcaaagagcaataaaatcttttgttgcagctgtatcaatgggtataaaagataataaacttttattagatcttgattatgatgaagacagtactgcagatacagatctaaatattgtaatgaatgacaaagatgaattaattgaaatccaaggaactgctgaagatgctcctttttcaaaaaatgaacttagtgatatgcttaaattgggtagttcagcaattgctgaaattattaaaaaacaaaaagcttgtattgaataa

SEQ ID NO: 254563 - DNA, 706 bp, Unknown
  Bacterial polypeptide expressing nucleotide sequence isolated from the Sargasso Sea
atgaaaagaaatcaggaacgccctctaaataaactcagagaaatttcactagaaattaatattaatattcatgctgaaggctcagtattggtttcatttggtaacactaaagtgatttgtactgcatcaattgagcataaggttcctaggtggatgaagaactctgatgaaggctgggttactgcggaatatggtatgttaccaagatctacaaatgaaagaatgggtagagaagccgcaagaggaaagcagagtggaagaactcaagaaattcaaagattaattggtaggtcgcttcgtcaagcagtaaatcttaaatatcttaaaggcaaaactataaatatagattgtgatgtaatccaagcagatggtggtacaagaacggctgctataacaggtggatgtgtggcattatttttagctattaataattatcatgatgataaaagagcaattaaatcttatgttgcagcagtatcacttggagtaaaagataataatgttctgcttgatttagattactcagaagatagttcagcagatactgatttaaatattgtgatgaacgataaagacgagttaattgaaattcaaggaactgctgaagatgtgcctttttcaaaaaatgaacttaatgatatgcttaaattagggagttcagcaattgcagaattaattgaaaaacaaaaagcctgtatagaataag

SEQ ID NO: 254564 - DNA, 564 bp, Unknown
  Bacterial polypeptide expressing nucleotide sequence isolated from the Sargasso Sea
aatgagaccatctgaaagaaaaaataacgaaatgcgaactatctcttttgaaacaggagtatcaaaacatgctgaaggatcttgtttagttaaatttggtgatacacatgttttgtgtactgcctcggttgaaaatagggttccaccatggttaagaaattcaggatctggttgggtaactgctgaatatggtatgcttccaagatcaaccggcgatagaatgcgaagagaggcatcagtgggtaaacaatctggaagaactcaagagattcaaaggctaataggaaggtctttaagatcagttattgacctagatcaacttggggaaaaccaaataagcattgactgtgatgtcattcaagctgatggaggaacaagaacagcttcaatttctggagcatttatagccttaaaacattcagtaaatttcttaatggaatcaaacgaaattaaaaaagacccaataagagaataccttggtgcggtttcatgtggtatttacagaggtaaaccaatcctagatttagattataaagaagactcggaagctgaagcagatgcaaa

SEQ ID NO: 254565 - DNA, 607 bp, Unknown
  Bacterial polypeptide expressing nucleotide sequence isolated from the Sargasso Sea
ttggaataccaaagtaatctgcaatgcaactatagaaaataatgtcccaaggtggatgaaaaattctgatgaaggatgggttacaggtgaatacggcatgctaccaagatctacaaatgaaagaatgagtagagaggctgcaaggggaaaacaaagtggcagaactcttgaaatacaaagattgattggcaggtcgcttcgtcaagctgtaaatcttaagtatcttaaaggcaaaactataaatgtagattgcgatgttattcaagctgacggaggaacaagaactgcctctattacaggtggttgcgttgctctatttttagctataaagaatcatcatgatgatcagagagcaattaattcattagttgctgcagtttctcttggaattaaggataataaaatattattagatctggattacgatgaagacagtactgcggatactgacttaaatattgtcatgaatgaaaaggatgaactaattgaaatacagggaactgcagaggattcacctttttcaaaatctgaacttagtgatatgcttcatttaggtagttcagcaattgctgaaattgtaaaaaaacaaaaagcttgtattgaataa

SEQ ID NO: 254566 - DNA, 622 bp, Unknown
  Bacterial polypeptide expressing nucleotide sequence isolated from the Sargasso Sea
tctgactaaatttggaaatacacatgtgatttgtaatgcaactatagaaaaggcaattcctagatggatgacagatgtaaaaacaggatgggttactgctgaatacgggatgttaccaagatcaactaatgaaagaatgaatagagaagcacagagaggcaagcagtctggaaggactcttgaaatacaaagacttataggcagatctctgaggcaagtagtagatttaaaaaagcttacaggctacacaataactgtagattgtgacgtaattcaggcagatggtggcactagaactgcttctataactggtggtaccgttgcattatgtcttgctcttaaaaaaataaatatggaagacgcaataaataatttagttgcagcagtaagtgttggggtaaataacaaaacctgccttctagacttaaactatgaggaagatagtagtgcagattcagatataaatattgtaatgaatgaaaatcttgatttaatcgaagttcaaggaactgctgaagaaaaaccattctctaaagaagaatttagtactttgataaatttagctgaaaatgggataaaagatcttatttcccttcaaagggagatcatagaggataagtga

SEQ ID NO: 254567 - DNA, 706 bp, Unknown
  Bacterial polypeptide expressing nucleotide sequence isolated from the Sargasso Sea
atgaaaagaaatcaggatcgccctctaaataaactcagagaaatctcactagaaattaatatcaatattcatgctgagggttcagtattggtttcatttggtaacactaaagtaatttgtactgcatcaattgagcataacgttcctaggtggatgaaaaactctgatgatggctgggttactgcggaatatggtatgttaccaagatctacaaatgaaagaatgggtagagaagccgcaagaggaaagcagagcggcagaactcaagaaattcaaagattaattggtaggtcgcttcgtcaagcagtaaatcttaaatatcttaaaggcaaaactataaatatagattgtgatgtaatccaagcagacggtggcacaagaacagctgctataacaggtggatgtgtggcattatttttagctattaataatcatcatgatgataaaagagcaattaaatcttatgttgcagcagtatcacttggagtaaaagataataatgttctgcttgatttagattactcagaagatagttcagcagatactgatttaaatattgtgatgaacgataaagacgagttaattgagattcaaggaactgctgaagatgtgcctttttcaaaaaatgaacttaatgatatgcttaaattagggagttcagcaattgcagaattaattgaaaaacaaaaagcctgtatagaataag

SEQ ID NO: 254568 - DNA, 709 bp, Unknown
  Bacterial polypeptide expressing nucleotide sequence isolated from the Sargasso Sea
atgcaaagaaaagataaacgcagcaatgatcagctaagagagataagtatagtcccagactttaatatgcatgctgaaggttcagcgttagtaaaatttggcaatactcatgtgatctgtaatgcaagtgtagagaaagcaactccaagatggatgcagaacgacaaaacaggctgggtaacagctgaatatggcatgcttccaagatctacaaatgaaagaatgaatagagaagcaaatagaggcaaacaatctggtagaaccatggaaatacagagattaataggcagatctttacgtcaagctgtagatctagataaattaactggttatacgattacaattgattgtgatgtaattcaagcagacggaggaacaagaacagcatcaataacaggtggaactgtagcactatataaggcactacaaaaaatagagaaagaggatgccattaaaaatcttgtagctgctatcagtgtaggaatttgtaaagatgaacttcttttagatttagattatgaagaagatagtaatgctcaatgtgacgttaatatagtaatgaatgaagcattagaattaatagaagtccaaggtacaggagaagaaaaagctttcagcaaagagcaattcaaagatctagttgatttagcagagaatggactgaaagacttattcacattacaaaaagaagtaattaaaaacgggtgaa

SEQ ID NO: 254569 - DNA, 248 bp, Unknown
  Bacterial polypeptide expressing nucleotide sequence isolated from the Sargasso Sea
aatgtctagagataatagaaaatcaactgaagcgagggaaatttccattgagacaaatgtaaatcttcatgctgaaggttcagtgctggtaaagttcggcaatactcatgttatttgtactgcaagtattgataacagtgtcccaagatggatgaagggatcaaataagggctgggttacagctgaatatggaatgcttccaagatcaactaatgaaagaatgggcagagaagcagcgagaggaaaac

SEQ ID NO: 254570 - DNA, 706 bp, Unknown
  Bacterial polypeptide expressing nucleotide sequence isolated from the Sargasso Sea
aatgtctagagataatagaaaaccaactcaagcaagagaaatttccattgagacaaatgtaaatcttcatgctgaaggttcagtactggtcaagtttggtaatacacatgtaatttgtactgcaagtattgataacaatgtcccaagatggatgaagggatcagacaagggctgggtaactgctgaatatggaatgcttccaagatcaaccaatgagagaatgggcagagaagcagcaagaggaaaacagtcagggagaactcaggaaatacaaagacttattggaagatcccttagacaatctgtaaatctcaaatatttaaaagataaaactattcaagttgactgcgatgtcattcaagcagacggaggtacaagaactgcttcaattactggtggatgtgttgcacttttccttgcaataaagaatcaccatgatgatcaaagagcaattgagcaatatgtggctgcaatctctttaggtgttaaagatgatgaaatcctagttgatcttgattatcaagaggatagcactgctgatgcagacattaatattgtaatgacccaggatcttgatttaattgaaattcagggtaccgctgaagagcgtcctttttcgcaagaacaactcactgaaattgtaagcaaggctagttcatctattaaggatatagttgctatccaaaaacaggctgtagaaggatag

SEQ ID NO: 254571 - DNA, 1312 bp, Unknown
  Bacterial polypeptide expressing nucleotide sequence isolated from the Sargasso Sea
aatggataacttatctgaaaaaataaaacaattaagaaacgaatatagcgattcagattttttaatcgaacatttagacaaaaatccagtaaagcaatttacaaactggctagatgatgcaattgaaacaaaaatttatgaaccaaatgctatggttttggctacatctgttgataatcaaccaagatctcgttatgtactctttaaaaatattgttgaggataaattaatttttcatactcattacgagagtcctaaagcacttgaaatgcttgaaaatccaaatatttcaggaatattctattgggcagaaattcacagacaagtgagatttcaaggcattgcaaaaaaagctgataaaacaatatctgatgaatatttttcaactagacctaggggaggtcagctaagtgcatgggcttcagatcaaagctcaattatcaaaaatagagaagaagtaacaaataaaatagctgagttagacaaaaaatttgaaaaccaagaagtaccaagaccagatttttggggaggttttgagattgaagtaaattattgggagttctggcaaggaagaagaaatagaactcatgataggttttgttatactcaaaacacccaaaggttggaatatcgaaaggatgtctccataatgagagaaatcaaagttaccaaaaatttcattaattcagcagaaaattctgtgttgtacgagtctggaaacacgaaagtattggttaccgtctcagttacagaccgagttcctgattggttatcaaattctgaaaaaggctgggttacagctgaatacaatatgcttccaggttcatctggcaatagaatttctagaaaatcattcgaaagtggaaggtcaaaagaaatttcaagattaatcggccgttctctcagagccgtttgtaatttaggaataattaatggttattcttttactatagattgtgatgttctagaagcagatggtggaactagaacagcatcaattaacggtgcttggatagctttaaatgatacttttacaaagatggtaaatgaaaacaagttagtacaaaacccattaacaagcaaagttggtgcaatttctgttggtattgtaaatggagagatagtagctgacttagattatgctaaggattcaaatgctgacgttgacctaaaccttgttttagatgaaaaatttgaaatcttggagattcaaggcacagctgaaggtaaaccattttcaaaagataatcttgatagcttatttaatattgcaaaagaatgtgttgaagaaatatttaagatacaaaattaa

SEQ ID NO: 254572 - DNA, 718 bp, Unknown
  Bacterial polypeptide expressing nucleotide sequence isolated from the Sargasso Sea
aatgagaccatctgacaggaaaaacaatgaaatgcgaactatctcttttgaaacaggtgtatcaaaacatgctgaaggatcttgtttggttaaatttggtgatacacatgttttatgtactgcctcagttgaaaatagggtcccaccatggttaagaaattcaggatctggttgggtaactgctgaatatggtatgcttccaagatcaaccggtgatagaatgcggagagaggcatctgtaggaaagcaatccggaagaacacaagagattcaaagattgataggaagatctttaagatcagttattgacctaaaccaacttggggaaaaccaaataagcattgattgtgatgtcattcaagctgatggaggtacaagaacggcctcaatttctggagcatttatagccttaaaacattcagtaaatttcttaatggaatcaaacgaaattaaaaaggacccaataagagaataccttggagctgtttcatgtggtatttacagaggtaaaccaattctagatttagattataaagaagattcggaagctgaagcagatgcaaactttgttattacagaaaaaaataaaataattgaaattcaagctactgcagaaaaatacccattttctgagaagatgttttccgaattaatggacttagcaaaaagcgggatagaagagattataaaaaaacaaaaaggtgtcttagagaattag

SEQ ID NO: 254573 - DNA, 601 bp, Unknown
  Bacterial polypeptide expressing nucleotide sequence isolated from the Sargasso Sea
atgagagaaaaaagaacctttaaagaaatgagagaaatttcctttgaaactggtgtaaacatccatgcagagggctcatgtttggtaaaatttggcaatactcatgttttgtgtacagcttcggttgatgaaaaaactcctcattggttaaaaaactcagggaaaggctgggtaacggctgaatatggtatgctgccacgatcaacaaattcaagaatagatagagaagcagcaaaaggtaagcaatcagggcggacccaggaaattcaaagattgattggacgaagtctaagatcaataataaatttaaaaaatttaggtgaaagacaaataaaaatagattgcgatgttttacaagctgatggtggtacaagaactgcatctattagtggtggatttgtagctctttatcaagcagtagatttagttaaaaaaaattttaatattgaaaaacccattattaaagaatttatagctggagtttcagtaggaattattgatgacaaacctaatttagacctagactatgaagaagaatctaaagctcaggtagatggaaattttgttatttgtgaaagtggaaaaattgctgaaattcaaa

SEQ ID NO: 254574 - DNA, 718 bp, Unknown
  Bacterial polypeptide expressing nucleotide sequence isolated from the Sargasso Sea
tatgagaaatacaagaaaaactagcgatcttcgtaaatttgaaattattccgaatttctcctcatatccagaaggctcttgtatgataaaatttggtgaaactcacgtattgtgtaacgcgtctttagatcaaaatgttccaaggtggcttaaaaattctcagcaaggctgggtaactgctgaatatggaatgcttcctagatcaacatctgaaagaatgtcccgagaagctgtcagaggcaaacaatcaggaagaacacaagaaatacaacgtttgattggcagatcgttgagagcggtaacagatcttagtttgttaaaagatatgcaaattttaattgattgtgatgttattcaagctgatggcggaacacgaaccgcttcaatatcaggtgcgtttgtagcactgcagttatgtatccagagcatgatagggaaaaagattataaaaactaacccaataaaggaaaatcttgcggctataagctgtggcatagtcgataatgttccgttgcttgatctagattttattgaggatcaaaatgctgaggtagatgctaattttgtcattacagaaacaaataaaatagttgagatacaaatgacatctgaaaaaaaactttgcacagaaaatgaatttaattccatgtttgaattggcgaaatcaggtattagtcaaataattcaatcccaaaaaatacttttagaaggtaaataa

SEQ ID NO: 254575 - DNA, 706 bp, Unknown
  Bacterial polypeptide expressing nucleotide sequence isolated from the Sargasso Sea
catgagtagaaatcaagatcgaaatcataatcaattaagagaagttacaattgagcctaatgtaaatattcattcagagggttctgttctagtttcatttggaaatacaaaagtaatctgtaatgcttcaattgaaaataatgtaccacgttggatgaaaaattctgatgagggatgggtgacaggtgaatatggtatgttaccaaggtctacaaatgaaagaatgagtcgtgaagctgccagaggaaagcaaagcggaagaacgcttgaaatacaaagattaattgggagatctttacgccaagctgtaaatctcaaataccttaaaggcaagactattaatgtagattgtgatgttattcaagcagatggtggaacaagaactgcctctattactggtggatgtgttgctctgtttcttgcaattaaaaatcaccatgatgatcaaagagctattaattcatttattgcagctgtatctcttggagttaaggataataagatattactagatttggattacgatgaagatagcactgctgatactgatctcaatattgttatgaatgaagatcttgatttaatagagattcaaggcactgcagaagacactcctttctcaaaaactgaacttaatgatatgcttgaaatagggagctcagcaattgctgaaattattaaaaaacaaaaagcttgtattggataa

SEQ ID NO: 254576 - DNA, 718 bp, Unknown
  Bacterial polypeptide expressing nucleotide sequence isolated from the Sargasso Sea
atgcgaccttctgatagaaaaaacaatgaaatgcgaagtatctcttttgaaactggggtatcaaaacatgccgagggatcttgcttagttaaatttggtgatacacatgttttatgtactgcttctgttgagaacagggttccgccatggttaagaaattcaggatctggctgggtcacagctgaatatggaatgcttcctaggtcaactggcgaaagaatgcgtagagaggcatccgtaggtaagcaatctggaaggacccaagagattcaaagactgattgggagatcattaagatcagttattgacttagatcagttaggagaaaaccaaataagcattgactgtgatgttattcaagctgacggaggtacacgtacagcttctatttctggagcatttatagctttaaagcagtcagttaatttcttattaacatctaaggaaattaaaaaggatcctataaaagaatatcttggggcagtttcatgcggcatttatagaggaaaaccaatattagatttagattataaagaggactccgcggctgaagcagacgcaaactttgtaattactgataaaaacaaaataattgaaattcaagctacagcagagcaatacccattctctgagaagatgtttttagaattaatgatgcttgcaaagagtgggatagaagagattataaaaaagcaaaaagatgtcttagagaattagt

SEQ ID NO: 254577 - DNA, 484 bp, Unknown
  Bacterial polypeptide expressing nucleotide sequence isolated from the Sargasso Sea
aatgagaaataatagaaatattaaccaattaagagatatagaaattattcctaatttttcatacaatccggaaggctcatgcttaattaaatgtggcgatacgcatgtgatctgcagtgcgtcgcttgatagaaatttaccaagatggttaaaaaattcagagactgggtgggtaacagcagaatacgggatgttaccaagatcaacttctgagagaatgtctagagaggccgccaaaggcaaacaatctggtagaacacaggaaatacaaagactaattggaagatcattaagatctatagttaatttagaagatttaagagaattacaaataataatagattgtgatgttattcaagcagatggtggaacaagaaccacttcaatttcaggatcatttatagcacttcaattatgcataaatcatatgcttaataaaaaaattataaaaaaaaatccaattagtgaatatgttgccgcaatc

SEQ ID NO: 254578 - DNA, 724 bp, Unknown
  Bacterial polypeptide expressing nucleotide sequence isolated from the Sargasso Sea
atggccagaacaaacaatcgacgtccggacgagttgcggtccgtgcatttcacccgtgcctacagccgtcacgccgagggttcggtactggtggagtttggagatacccgggtgctatgtacggcgagcgttgaagagcgcgtgcccagatttctcaaaggcagccagcaaggctggatcaccgcggaatacggcatgttgccccgggcgaccggagagcggatggcgcgcgaggcggcccggggcaagcagggcggccgaacccttgaaatccagagattgattggccgttcattgcgggccgccctcgatctgaaagcgctcggagaaagaaccgtcacactggattgtgatgtgattcaggcggatggcggtacgcggacggcatcgattacgggcgcctgggtggcactcgccgacgcgctggaccatcttcacgagcagggcctgcttgatgccactgtcccgctgcatcagattgcttcggtctctgtgggtctgcaacagggtgaggtgctgctggatctggattattctgaagacagcaccgctgatacggacatgaatttcgtcatgaacgatgagaaacgattcatcgaaatccaggggaccgccgaacacagcccattcagcgaagccgagatgcagaagatgactgccatcgctgtgaggggtatcgaggaactgatgcgtttgcagcgcctcgctcgagagacagactagt

SEQ ID NO: 254579 - DNA, 712 bp, Unknown
  Bacterial polypeptide expressing nucleotide sequence isolated from the Sargasso Sea
atgagaaaagatagatccttcaatcaaatgcgtgaaatttcatttgagaaaaacatgaatattcatgctgatggttcatgtttagtaaaatttggaaatacacatgttctttgtcttgcatcaatagatgaaaaagttcctcactggttaaaaaatactggcaaaggttgggttacagcagaatatggcatgctaccaaggtcaacaaatactagaatggacagagaggctgcaaaaggaaagcagtcaggtagaacgcaagaaattcaaaggttaattgggcgtagcttaagatcaattgtggatctttcaaaccttggagagcgtcaaataaaaatagattgtgatgtaattcaagcagatggtgggactagaactgcttctatcagtggtggttttatttctttatatctggcaatagaaaaattaaaaaataattataatcttcaaaaaccaattatcaaaaactttataggtgcagtatcaactggcatagtggaaaataaagcattattggatttagattatagggaagactccgaagctcaagtagatgcaaattttgtaatttgtgattcagatgaaatatctgaaattcaagttactggtgaagaattttttttcaatgatgctcagtttacagaaatgttttcactagcaaaaattggggttaaagaaataatttctaaacaaaaagaggctctgaaataaa

SEQ ID NO: 254580 - DNA, 706 bp, Unknown
  Bacterial polypeptide expressing nucleotide sequence isolated from the Sargasso Sea
atgagtagaaatcaagatcgaaaccataatcaattaagagaagttacaattgagcccaatgtaaatattcattcagagggttccgttctagtctcatttggaaatacaaaagtaatctgtaatgcttcaattgaaaataatgtaccacgttggatgaaaaattctgatgagggatgggtaacaggcgaatatggtatgttacctaggtctacaaatgaaagaatgagtcgtgaagctgcaagaggaaagcaaagcggtagaactcttgaaatacaaagattaatcgggagatctttacgtcaagctgtaaatcttaaataccttaagggcaagactattaatgtagattgtgatgttattcaagcagatggtggaacaagaactgcctctattacaggtggatgtgttgctctgtttcttgcaattaaaaatcatcatgatgatcaaagagctattaattcatttattgcagctgtatctcttggaattaaggataataagatattactagatttggattatgatgaagatagcactgctgatactgatcttaatattgttatgaatgaagatcttgatttaatagagattcaaggcactgcagaagatactcctttctcaaaaactgaacttaatgatatgcttgaaataggtagctcagcaattactgaaattattaaaaaacaaaaagcttgtattgaataag

SEQ ID NO: 254581 - DNA, 401 bp, Unknown
  Bacterial polypeptide expressing nucleotide sequence isolated from the Sargasso Sea
gctgggcgagaacaccctgtacgtcgattgcgacgtgatccaggctgacggtggtacccgcaccgcctccatcactggcgccatggtggcgctgatcgatgccctgaaagtgctgaaaaagcgtggttcgctcaagggcgagccactcaagcagatgatcgcagcggtgtcggtcggcatctaccaaggcgagccggtgctggatctggactacctggaagactccgccgccgagaccgacctcaacgtggtaatgaccaatgccggcggcttcatcgaagtgcagggtactgccgaaggcgcgccgttccagcctgacgaattcaacgccatgctggcactggcacagaagggcatgaacgagatctttgaactgcagaaggccgctctggtcgactgaa

SEQ ID NO: 254582 - DNA, 712 bp, Unknown
  Bacterial polypeptide expressing nucleotide sequence isolated from the Sargasso Sea
tatgagaaaagatagagcgtttgacgaattaagggaaattgcttttgaaaccaatataaatattcatgctgaaggatcttgtttggtaaggtttggtaacacccatgtaatatgtacagcttctattgatgaaaagactcctccttggttgagaggctctggcaagggctgggtaacggctgagtatggaatgcttcccagatcaacgaatactagaatagacagagagtctgcaaaaggcaaacagagtgggagaactcaagaaattcagcgattgattggaagaagccttagatctgttgttgatttaaatagtcttggtgaaagacaagtcaagatagattgtgatgttgttcaggcagatgggggcactagaacagcttcgataagcggtggttttgttgcattatatttggctattgataaacttaagaaaagctacaacatagaaaagcctattattaaaaattttgttgcagctatttctgctggaattattgataacaaggcacgtgttgatttggattataatgaagactctgctgcagaggtagatgctaattttgtaatttgtgacaacggaaaaatttctgaaattcaggcaacaggtgaggagtatttctttagcgaagagcagtatcaagatatgtttaagcttgcgaaaactggtatcgaaaaaatcatagcaaagcaaaaaaaatgcttaatttaa

SEQ ID NO: 254583 - DNA, 556 bp, Unknown
  Bacterial polypeptide expressing nucleotide sequence isolated from the Sargasso Sea
gatgaagggatcagacaagggctgggtaactgctgaatatggaatgcttccaagatcaaccaatgagagaatgggcagagaagcagcaagaggaaaacagtcagggagaactcaggaaatacaaagacttattggaagatcccttagacaatctgtaaatcttaaatatttaaaagataaaactattcaagttgactgcgatgttattcaagcagacggaggtacaagaactgcttcaattactggtggatgtgttgcgcttttccttgcaataaagaatcaccatgatgatcaaagagcaattgatcaatatgtggctgcaatctctttaggtattaaagatgatgaaatcctagttgatcttgattaccaagaggatagcactgctgatgcagacattaatattgtaatgacccaggatcttgatttaattgaaattcagggtaccgctgaagagcgtcctttttcgcaagaacaactcactgaaattgtaagcaaggctagttcatctattaaggatatagttgctatccaaaaacaggctgtagaaggatag

SEQ ID NO: 254584 - DNA, 286 bp, Unknown
  Bacterial polypeptide expressing nucleotide sequence isolated from the Sargasso Sea
atgagaagtatttcgtttgaaacaaacgtaaatatacatgctgagggctcttgtttggttaaatttggcaacacccatgttatgtgcaccgcaagtgtagaagacaaaacacctcattggctaaaaaatactggtaaaggctggataacagctgaatatggcatgctcccaagatcaacaaacactagaatagacagggaatcagcaaaaggaaagcaatctggaagaactcaagaaattcaacgattgattggtagaagtcttcgctcagttacaaatttagaaa

SEQ ID NO: 254585 - DNA, 709 bp, Unknown
  Bacterial polypeptide expressing nucleotide sequence isolated from the Sargasso Sea
atgcaaagaaaagaaaaacgcagcaataatcaattaagagaaataagcataattccaggttttaatatgcatgctgaaggttcagccttagtaaagtttggtaatactcatgtaatttgtaatgcaactgtagaaaaagctactccaagatggatgcaaaatgacaagacaggctgggtaacagctgaatatggaatgttaccaagatctacaaatgagaggatgaatagagaagcaaatagaggtaaacaatctggcagaacaatggaaatacagcgattaatcggtagatcattgcgtcaagctgtagatttagaaaaattaactggttatacagtcacagttgattgtgatgttattcaagcagatggaggaacaagaacagcatctataacaggtggaactgtagcactatacaaggctttgaaaaaaataaataaagctgaggctattaagagtctagtagctgctattagtgttggaattcgtaatgatgagcttcttcttgatttagattatgacgaagatagcaatgcccaatgtgacgttaatatagtaatgaatgaacagttagagttaattgaagtacaaggaacaggagaagagaaagcttttagtaaagaacaatttaaagatttagttgatctagcagaaagtggcttgaaagatctatttttactacaaaacgaaataattaagaacgggtgaa

SEQ ID NO: 254586 - DNA, 709 bp, Unknown
  Bacterial polypeptide expressing nucleotide sequence isolated from the Sargasso Sea
atgcaaagaaaagataaacgcagcaatgatcagctaagagagataagtatagtcccagactttaatatgcatgctgaaggttcagcgttagtaaaatttggtaatactcatgtgatctgtaatgcaagtgtagagaaagcaactccaagatggatgcagaacgacaaaacaggctgggtaacagctgaatatggcatgcttccaagatctacaaatgaaagaatgaatagagaagcaaatagaggcaaacaatctggtagaaccatggaaatacagaggttaataggcagatctttacgtcaagctgtagatctagataaattaactggttatacgattacaattgattgtgatgtaattcaagcagacggaggaacaagaacagcatcaataacaggtggaactgtagcactatataaggcgctacaaaaaatagagaaagaggatgctattaaaaatcttgtagctgctatcagtgtaggaatttgtaaagatgaacttcttttagatttagattatgaagaagatagtaatgctcaatgtgacgttaatatagtaatgaatgaagcactagaattaatagaagtccaaggtacaggagaagaaaaagctttcagcaaagagcaattcaaagatctagttgatttagcagagaatggactgaaagacttattcacattacaaaaagaagtaattaaaaacgggtgaa

SEQ ID NO: 254587 - DNA, 608 bp, Unknown
  Bacterial polypeptide expressing nucleotide sequence isolated from the Sargasso Sea
cccaggctcgaccgataccagattcaggagagaaaggagcggtgcaaagggtaggacgatggagatagagagactagtcgctcgatcgctgaggggagccgtagacctggagcaactgggtccagtggcgctgactgttgactgcgacatcctgaatgccgacggaggaaccagatgcgcttcaataacagcagcaaacatagctctgaggctcgctgttaggagactcatctcctccggagagtgcctgccgaaggaaaggaggcttaccagggatcagatcaggaaaggagtgaagcaggagacccttagcaaggaacagatggcatcccacgaagactccgtgatgcccaatgacgttgcagcgcttagcgtgggaatggtcgagggacaggtctggacagacttggattacgttctcgacagcaatgccgacgtcgacatgaacgtcgtgatgactagctctggggacttcgtagaggtacaggggaccggcgaggaggcaacctattccagagaagagctcgactctctgatcgacgctgcggaggcaggaatagcgaagttacacaagctccagactgaagtcctctctaatgcgagttgat

SEQ ID NO: 254588 - DNA, 706 bp, Unknown
  Bacterial polypeptide expressing nucleotide sequence isolated from the Sargasso Sea
atgaaaagaaatcaagatcgaagtcataatcaactaagagaagttaccattgagcctaatataaatattcactcagaaggttctgttctagtttcatttggaaatacaaaagttatctgcaatgcttcaattgaaaataatgtaccacgttggatgaaaaattcaaatgaaggatgggtaacaggcgagtatggtatgttgccaaggtctacaaatgaaagaatgagccgtgaggctgccagaggaaagcaaagcggaagaacgcttgaaatacaaagattaattggaagatctttacgccaagctgtaaatcttaaataccttaaaggcaagactattaatgtagattgtgatgttattcaagcagatggtggaacaagaactgcctctattactggtggatgtgttgctctgtttcttgcaattaaaaatcaccatgatgatcaaagagctattaattcatttattgcagctgtatctcttggaattaaggataataagatattactagatctggattacgatgaagatagcactgctgatactgatcttaatattgttatgaatgaagatcttgatttaatagagattcaaggcactgcagaagatactcctttctcaaaaactgaacttaatgatatgcttgaaataggtagctcagcaattgctgaaattattaaaaaacaaaaagcttgtattggataag

SEQ ID NO: 254589 - DNA, 706 bp, Unknown
  Bacterial polypeptide expressing nucleotide sequence isolated from the Sargasso Sea
atggaaagaatcgataatcgaaatcacaatcaacttcgagatatcactattgaacctaatgtaaatattcatgctgaagggtctgtattgatttcatttggaaacacaaaagtcatttgtaatgcttcaatagaaaataacgttcctagatggatgaaaaattcagatgaaggatgggtaacgggcgaatatggaatgctgccaagatcaacaaatgaaagaatgagcagagaggcagcaagaggaaaacagtcgggaagaactcaagaaatccaaaggttaattggaagatcattaagacaagcggttgatttaaaatacttaaagggtaagacgataaatgttgattgtgatgttatacaagcagatggaggaactagaacagcatcaataactggtggctgtgttgcattatttttagcaatcaaaaatcatcacgacgatcaaagagctatcaagtcatttgttgcagctgtttctcttgggattaaagaaaataaagtcttgcttgatttaaactatgaagaagatagcactgctgatactgatttaaatattgtcatgaatgacaaaaatcaaataattgagattcaaggaactgcagaggatgctcctttttcaaaaacagagctaagtgacatgcttgaattaggaagttcagcaatcaatgaaataatagaaagacaaaaagcttgcattgaataag

SEQ ID NO: 254590 - DNA, 682 bp, Unknown
  Bacterial polypeptide expressing nucleotide sequence isolated from the Sargasso Sea
catgaaaagaaatcaagatcgaagtaataatcaactaagagatattactattgaaccaaatataaatattcatgccgaaggttctgtattaatttcatttggtaatacaaaagtcatttgtaatgcatcaatagaaaataatgttcctagatggatgaaaaattcagatgaaggttgggtgactggtgagtatggaatgcttccaagatctactaatgaaagaatgagcagagaggctgcaagaggcaaacaaagtggcagaacacaagaaattcagagactcattggaagatcattaaggcaggcagttaatcttaaatatcttaaaggaaaaactataaatgttgattgtgatgttatacaagctgatggtggaacaagaacagcatcaattacaggtggttgcgtagcactttttttagctattaaaaatcatcatgacgatcaacgtgcaattaaatcttttgttgcagcagtatcaatgggtattaaagaaaatcaagttctacttgatctggactatgatgaagatagcactgcagatacagatttaaatattgttatgaacgataaagacgaattaattgaaattcaaggtaccgcagaagacgctcctttttcaaaaaaggaacttgatgatatgcttgtgatgggcagccaagcaatagctgatattattaaa

SEQ ID NO: 254591 - DNA, 676 bp, Unknown
  Bacterial polypeptide expressing nucleotide sequence isolated from the Sargasso Sea
aatgcgtccaagcggaagagaagtcgaccaaataaggaagttgaatattgaactttcgtatttagatcatgttcctgggtctgttctgataagtatggggactacaaaagtactatgtactgcgagtatcgaggcttcagtgcctggttttctcagaggaaccgggcaaggatggttaactgctgagtatggaatgttacctgctgccaccaatacaagaaacgatagagaagctgcgcgaggcaagcagactggtcggacaattgagattcaacgattgataggccgctccttgcgtgccatgttgcagctcgaaaaactcggggaaaaaacggttacagtcgactgtgatgttttacaggcagatggaggcactagaactgcctcgataactggtggtgcggttgctctatgcgttgcccttaagagcatgggtctggaagaagcgatgcagggtctggtgagcgctgtctcagtcggcatatatcaaggtcaggcagttctggatttagattatgcagaagactcaaatgctgaaacagatatgaatgtagtccaactcaatggaagcggattcattgagatccaaggaacagcagagggccgggcattttcagcagccgatttggattccatgctgagtgttgctcaaaaaaggtatggccgagatttttga

SEQ ID NO: 254592 - DNA, 718 bp, Unknown
  Bacterial polypeptide expressing nucleotide sequence isolated from the Sargasso Sea
atgagaccatctgacagaaaaaacaatgaaatgcgaactatctcttttgaaacaggggtatcaaaacatgctgaaggatcttgtttagttaaatttggtgatacacatgttttgtgtactgcatcggttgaaaatagggttccaccatggttaagaaattcaggatctggttgggtaactgctgaatacggtatgcttccaagatcaaccggtgatagaatgcgaagagaggcatctgtgggcaaacaatctggaagaacgcaagagattcaaaggctaataggaaggtctttaagatcagttattgacctagatcaactcggggaaaaccaaataagcattgactgtgatgtcattcaagctgatggaggcacaagaacggcttcaatttctggagcatttatagccttaaaacattcagtaaatttcttaatggaatcaaacgaaattaaaaaagacccaataagagaataccttggtgcggtttcatgtggtatttacagaggtaaaccaatcttagatttagattataaagaagactcggaagctgaagcagatgcaaactttgttattacagaaaaaaataaaataattgaaattcaagctactgcagaacaatacccattttctgagaagaagttttccgaattaatggacttagcaaaaagcggtatagaagagattataaaaaaacaaaaaagtgtcttagagaattagc

SEQ ID NO: 254593 - DNA, 460 bp, Unknown
  Bacterial polypeptide expressing nucleotide sequence isolated from the Sargasso Sea
aaagcaagtggtagaactcaagaaattcaaaggttaattggtagatcgcttcgacaagcagtaaatcttaagtacctaaaaggaaaaactattaatatagattgtgatgtgattcaagcagatggtggaacaagaactgccgcaataacgggaggttgtgtagctctatttttggcaattaataatcatcatgatgacaaaagagcaattaaatcttatgttgcagctgtatcgcttggagtaaaagataatttcataatgcttgatttagattactcagaagatagttcagcagatactgaccttaatattgttatgaacgatgaaaacaacttaattgaaattcaaggaactgctgaagatgtacctttttcaaaaaatgaacttgatgatatgcttgaattgggtagttcagcaattgcagaactaattaaaaaacaaaaagcctgtatagagtaag

SEQ ID NO: 254594 - DNA, 706 bp, Unknown
  Bacterial polypeptide expressing nucleotide sequence isolated from the Sargasso Sea
atgaaaagaaatcaagatcgaagtaataatcaactaagagatattactattgaaccaaatataaatattcatgccgaaggttctgtattaatttcatttggtaatacaaaagtcatttgtaatgcatcaatagaaaataatgttcctagatggatgaaaaattcagatgaaggttgggtgactggtgagtatggaatgcttccaaggtctactaatgaaagaatgagcagagaggctgcaagaggcaaacaaagtggcagaacacaagaaattcagagactcattggaagatcattaaggcaggcagttaatcttaaatatcttaaaggaaaaactataaatgttgattgtgatgttatacaagctgatggtggaacaagaacagcatcaattacaggtggttgcttagcactttttttagctattaaaaatcatcacgatgatcagcgtgcaattaaatcgtttgttgcagcagtatcaatgggtattaaagaaaatcaagttctgcttgatcttgactatgatgaagatagcactgcagatactgatttaaatattgttatgaatgataaggacgaattaattgaaattcaaggtaccgcagaagatgctcctttttcaaaaaaggaacttgatgatatgcttgttatgggcagccaagcaatagctgatattattaaaaaacaaaaagcttgtattgaataag

SEQ ID NO: 254595 - DNA, 590 bp, Unknown
  Bacterial polypeptide expressing nucleotide sequence isolated from the Sargasso Sea
taatgcaagtgtagagaaagcaactccaagatggatgcagaacgacaaaacaggctgggtaacagccgaatatggcatgcttccaagatctacaaatgaaagaatgaatagagaagcaaatagaggcaaacaatctggtagaaccatggaaatacaaagattaataggcagatctttacgtcaagctgtagatctagataaattaactggttatacgattacaattgattgtgatgtaattcaagcagacggaggaacaagaacagcatcaataacaggtggaactgtagcattgtataaggctctacaaaaaataggcaaagaagatgctattaacaatctagtggctgctattagtgtcggaatttgcaaagatgcgctgctattggatttagattatgcagaagatagtaatgctcaatgcgacgttaatatagtaatgaatgaacaattagaattaatagaagtacaaggaacaggagaagagagcgcttttagtaaagaacaatttaaagatcttattgatctagcagaaaatgggttgaaagatctatttgtgttacaaaacgaagtaattaagaacgggtgaa

SEQ ID NO: 254596 - DNA, 622 bp, Unknown
  Bacterial polypeptide expressing nucleotide sequence isolated from the Sargasso Sea
gtattaatttcatttggtaatacaaaagtcatttgtaatgcatcaatagaaaataatgttcctagatggatgaaaaattcagatgaaggttgggtgactggtgagtatggaatgcttccaaggtctactaatgaaagaatgagcagagaggctgcaagaggcaaacaaagtggcagaacacaagaaattcagagactcattggaagatcattaaggcaggcagttaatcttaaatatcttaaaggaaaaactataaatgttgattgtgatgttatacaagctgatggtggaacaagaacagcatcaattacaggcggctgtgtagcactttttttagctattaaaaatcatcatgacgatcaacgtgctattaagtcatttgtggcagcagtttcaatgggtattaaagaaaatcaagttctacttgatctggactatgatgaagatagcactgcagatactgatttaaatattgttatgaacgataaagacgaattaattgaaattcaaggtaccgcagaagatgctcctttttcaaaaaaggaacttgatgatatgcttgtgatgggcagccaagcaatagctgatattattaaaaaacaaaaagcttgtattgaataag

SEQ ID NO: 254597 - DNA, 875 bp, Unknown
  Bacterial polypeptide expressing nucleotide sequence isolated from the Sargasso Sea
ctattagaacagcgtcttgtagatggcgatcatgctactgcaaaagaattagaaaagagattgtggtcagagttattcaactcaactgcgaaagattatatatcagcgaaattgcaagaaagagaactgcgccataaaaaacaaggtggccaacgttatatggtggaacccaacgtcaaagagggcaaaggtggtctgagagacctacaatcattattttggattgcgaaatatttgtaccaagtaaaggaacaggcagatctggttaagcttggaatgttactaaaagacgagtttgcaaagtttcagcaggcggaaaatttcttgtgggcagtccgctgccatctccatattttcacacagcgaccaaccgatcagttatctttcgacctgcaagtcgaagtatcagaacgtatgggttacaaagacacaaaagctcgtcgagcggtagaattattcatgcaggattattttatccatgcaacaagagtaggggacataacacgcatatttttaactgctttggaggcaaaacatgttaaagaaatgccgctactccagagaattttcaggcgattgccacaaatcaagggtccatacatagtttcacaaaatagattgtcggttaagtcatttgatgagtttttaagagataaattaaatctgctgcgactatttgaagaggcacttaggacaggattattaattcatccggatgctatgcgagcagtatcggctaatattcatctttttgatgagcaaatgcgccaagacaaggaagcccaacgtattttcatggatttattgataaagcatgggaacccagaaagagcgctacgcagaatgaacgagttgggagcattagctgcgttcat

SEQ ID NO: 254598 - DNA, 763 bp, Unknown
  Bacterial polypeptide expressing nucleotide sequence isolated from the Sargasso Sea
aatgaaagatatctctcaaataaaaaagaagtatcaatcaaataaggttaaattatttcaaaaattagcatcaactaatgatggcttctattttaataaaaatcatacagatcttgttgatacagttgtaaaagaaatagttaaaggaatttataatatttatccaatagaagatttctctttaatcgctgtaggtggatacggaagacatgacttgtcaccaaaaagtgatgttgacttattatttatttataaaaaatctaataaaaatattagagattttattactcaattaaataatacactgtgggatattggattagaagttgggatatcttttttaacaattaaacaggcattaatcgactctaagaaagatataaagacgattaccaaatttgttgagactcgttttataattggtgatgaaattcaatacggtgagtttgttcggtccattaaaattttaattggaaaacaaaatccactaaaactcagcgaattaaagcttatagagttggttgatagacatgactatcgaataggaattaaaagtaatttagagccgaatatcaaagagggtattgggggtcttagagatattcataccatactgtgggtatcaatctttatgtttaatatttataaattagaagacttaacgtctgttaatatctataccaaagaggaaattaaagaattaaagaatgcttggaaatttctcttaaccattcgagcatttattcatttatttaacgaaagc

SEQ ID NO: 254599 - DNA, 796 bp, Unknown
  Bacterial polypeptide expressing nucleotide sequence isolated from the Sargasso Sea
ttgctttgggacgctgggttttctattgggcatgccactagatcagtaaatgaagttctgaaggattcaaaaaaggatattactataagaacttctatattagatcgaaggtttattgaaggtaacaggtttctttatgaagagttggaaaataaatttaagaattttcagaagaaatcaatacctatttttattaaatctaaactagcagaaagagaaaacaggcatttaaaaatgggtggttcaagatatatgcttgaacctaatataaaagaaggtaaaggtacgctaagagatctccacacattgttttggattgctaaatatgtatatggtttaaacaatttttttgacataaaaggaattaacatttctttaaaatcagaattaaagcgtttcataagggctcaaaaatttctttggtctataagatgccatttgcattacctgtcaaatagaaatgacaatattttaaattttgatgctcaaaataaaatcgctttatgttttggatataaaaacagaaaaaatatactagctgtggaaaggtttatgaagaaattttacctaacagttcgagatgtaggaagtttgactagattgatttgtacagaaatagatcatatttattcaagaaaaaaactatatccaaaccaaaacaaaggtgaagattttaaaagagataaccttgtaattgaagatggaaaggtttctatcgctggatttgttgaaataaaaaagaacccaggagtgatttttaaattgtttaaatttgcacaagaaagaaatctagaaa

SEQ ID NO: 254600 - DNA, 925 bp, Unknown
  Bacterial polypeptide expressing nucleotide sequence isolated from the Sargasso Sea
atttagatcaaaaaaacaaaatattaaacttttcttaaaacttcttaaatccaaaagactgttagtcacgcagttggaaaatatgaaaaatttagggatattgggaagataccttccagaatttggaaggattacgggacagatgcagtacgacttatttcacatatacacggtagatgctcacaccctgcaagtactgagaaatatgcgttggatgtcacttggaaaatctaaggaaaaattccctttagcatctcaactaattgataagcttcctaaactagaagtactttacatatctggtttatatcatgatattggtaaaggaagaggttcagatcattcagaactaggaaaaaccatcgtgaggaatttctgtaaaaaacattttttttctgaagaagacacaaaaaaaattgaatggttagtcgaaaatcatcttttaatgtctgttacttcacaaaaaaaggatcttgcagataatgaggttattaaggattttgcgaaaaagattaaagatcaagatactctcaattatatttattgccttactgcagctgatataagtgcaacaaatcccagattatggaattcttggaatgcctctcttttaaaacaactttatgaccgcactaaactttattttgaagacgagatcctgcttaatacatccataacagaggaaaaggcaaaagctatggagcttttgggagattttaggaaacaggatgtaaaaaaactgtggaataatttttatggagattacttcgaagcttcagatcatcaagaccttcagattcatgctaaaaatatcctcctttctaaaggaatgtcaaatataaaactttttcaaaaagatgctgattctttgactacgattttcataaatactcaagatagagctaaccttttgcgacaattatag

SEQ ID NO: 254601 - DNA, 616 bp, Unknown
  Bacterial polypeptide expressing nucleotide sequence isolated from the Sargasso Sea
tctgaattatgtcaatgagaaaactaaacttcatttacatcaaaaattatgtttcaaaaagttaaaaaccaaagttgataaacaaatccttttagctgacttaaaagctcaacttaatgaaaaaaaagaaagaattaaaagagatttttttaaaacgtcagatggaacattggcagtaggattgaattctttattgatagataatttattaaaatatctatttaatttaacttacaaaaatgactttaatcaaaaaaactcttctgtaactataatagctgtaggtggttatggtagaggcgagttagctcctcactctgatatagatatcttgttcttgttacctgataagcagaattttttagaaaaaaatatttctgaaaaaaatatagaagaaattttatattttctttgggatttaggcttaacaataggtcattctaccagaacaataaaggaaacattaaagaatttaaaaatagatctaacatttttaactagcctattagataatagatttgttgttggtgataaatcttcatatgcctcattaatatcaagtttttataaattaagaataaagtcaaaaacattggattttgtaagaaaaaaatta

SEQ ID NO: 254602 - DNA, 442 bp, Unknown
  Bacterial polypeptide expressing nucleotide sequence isolated from the Sargasso Sea
tatggaaccaataaagtatgcaaaagctaatgctaataaattacacgagattgatgatttcagaattgatgagattgacttaaatatttttaaaaaaaagctttttgacaaattaaaaaagcaaatcaatataaaaaaagatttaataaaagaaacatttcttaatacatcagatggttcacttaatgtgggtcttaatgtaattttaattgatagtttactgaaaatcttatttaaaaaattatattttcacacttttaatagtaaagactttattttttccataattgcagttggaggttatggacgaggggaacttgcgccacattcggacttagatttgttatttcttttaccaaacaatttaaaaaaaaatgagattaagaaaacagaggaagtaattcaacaaattctctatgttttatgggatttaggatataaa

SEQ ID NO: 254603 - DNA, 973 bp, Unknown
  Bacterial polypeptide expressing nucleotide sequence isolated from the Sargasso Sea
agaggtgagttctacccaaaatctgatactgacttacttattcttctcgataagaccacaaaaaatgatctaaaaaatattatttcaaaatcccttacatttctttgggatattggcattgaggcaagtcatagcactcgaacaattaacgaatgtatcaaagaatccaaaagagatatttctgtaggtacatcactgcttgaatctagatcagtttttgggtcaaaagagctctttttagagtttcaaaagaaagttcttcataagcaatcatggaaaagtgaaaaattttttagtgcaaaaattcaagaacagaatgatcgtcataacagctttaataatactgcgtataacctagagccaaatataaaagatggtccaggcggtttgagagatgctcatacaatcttttggatcgctaaaaaacttggctacacgagcattactgatctaaagcaagacaatgttctcaatattgatcaaattcaattgctacaagaatcatgggatttaatatcaaaaataagatacgcacttcatttattggctaaacgtccagaagataggcttctgttcgattaccaaagagtccttgcaaacaatttgggatacaaagactctgaacacctaatggctgttgaggttttcatgcaagactactataaggcagcaaaaactatttctagattcaatgagatatgcttgcaaatattcgaccagaaaattaatgccagaagattcatagggaaaaagaatattaataaaaattttcatataagaaataagcttattggattaagaaagggggtagagtttaagaatcatccgagcttactactcgagatatttcttcactttcaggaaaacaacatcattgggattgaatcaaaaacaattaatcaaatattagagaatttagatctcatcaacgatgcatttagagataatctaaataataaaaaactatcctcaa

SEQ ID NO: 254604 - DNA, 889 bp, Unknown
  Bacterial polypeptide expressing nucleotide sequence isolated from the Sargasso Sea
aattccttatttcttgaaattctagcttctaaaaaaaatccagaaaaaatattaagaaaaatgaatgaatctggttttctaggaaggtttattcctgagtttggtaaaattgttgctcagactcaacatgatatgtatcacctttataccgttgatgagcatactataagggctatagggataatgaataaaattgaatctggtgagttaaataatgagcataactttgcatctattatcgcaaaaaaaattaattctcgtcgtgttctatatttagctatctttctacatgatattgctaaagggcaaccaggagaccattcaaaaattggagaaaaaatagcattgaatctttgttatagacttggtttagatgaagaagaagtcaaagcagttgcatggcttgtaaggtggcatttgttaatgagtcatacggcctttaaaagagatttgggggatatgaaaactatacaagatttttctaaacttgtggttaataaagataggttagatatgctttttttacttacaatttcagatatatctgctgttggtcccaacacatggaatgcatggaaagggcaactgcttggcaacttatataactcagcaaatgcattaatagagggatcattcgataaaaccattgaggaaagaactattctatcaattaaaaaattagagaaaagtttgaaaacatggtcaaatgcagactttagtaattttatttccttacatcatgattcatattggttgtcaacagatttacaaagccaaataagacaagcagaagttgtaaaaagccagaatttttcgaataataaattaaaaattaaagcatacatagacacgataaatgctgttacagaaataattgtatattcaccag

SEQ ID NO: 254605 - DNA, 913 bp, Unknown
  Bacterial polypeptide expressing nucleotide sequence isolated from the Sargasso Sea
catgctcagaattgttaaacctcggctagtcattgatcggaaggctttgttggttgaattagactctttatttgagggtaaaaacccaaattcagaagatagcgcggaaatcctagagctcttcaaaaatgcaaaagcaaaaggctgggccgaaataaatagaaggttcgaaagagataatgttaattcaatagaaattattaaggctcatgcctatctgattgatcaactgactcgttcaatatgtgattttgctgtgagaaatgtctttccgtcccataaccctacgacgggggacaggatagcacttttagcaactggcggatacgggcgcggggaactagctcccttttcggatgtcgacttgatgtttttactgccatataagttaactccaaggtctgagcaattaattgaacatactctgtatatgctgtgggatttgggtttaaaagtggggcatgctactagatctctcagtgaggctctccgtttagcaaaggaagacctgactattagaaccagtctacttgaagcccgctggctatgggggaacaccagacttttttctgagtttcaggcacgttttagaaaagagattatcgaaccaacaaagcaggacttcgtgagcgcaaagctagcagagcgggatgatcgtcatatgaaaatggatgactctaggtacgttttagagccgaatgtcaaggaggggaaaggagctcttcgcgaccttcaaacattattttggattatcaaatatctatacgatacggtgtcaattgaaaacctcttaacaaaaaaaatcctcaccaaaatagatgctcgccttttcaaaaaagcaacgaagtttttttggacggtccgctgtcatctgcattatgtttcagggcgtcaagaagagaggctcaccttt

SEQ ID NO: 254606 - DNA, 244 bp, Unknown
  Bacterial polypeptide expressing nucleotide sequence isolated from the Sargasso Sea
cctgttacccgacgctcagctcacccgcgagaactgcaaggagtacctgagccgttttctcggctggctgcacgcccgcttcgatgccggtgacaacatcatcaaactggtggctacccgctccgaatacatggacgagctgctgacccggttgtggcaaaagttcggcttcgacaagacggagctcactctgatcgcggtgggtggttatggccgtggcgaactgcacccccactccgacatc

SEQ ID NO: 254607 - DNA, 722 bp, Unknown
  Bacterial polypeptide expressing nucleotide sequence isolated from the Sargasso Sea
tgatcccttttatattgaaagtggtcgtgtcaggttgtacgaaaatttgcggtttcgagatgacccattacgcattttcaggctgttcttcattgctcaggcctacaatgctgatgtgcatccagtgagtttgcaaagggtaacaagaggcctgccttcagttggaacaaagatccgccaagatccgcatgcaaacgcactatttcttgatattctgaccgccaacaaaaattctgaacgggtattgcgcttgatgaatgaatgcggcgtcttgggcaaattcttacctgattttgggcgtattgtcgcgatgatgcaatttgacatgtatcatagctacactgtcgatgaacatacattaaaggctatcggcattttacaagctattgaagctggtgatttaaaaacgacggcaccagtagcgacagacgccatgcctgaaattcaatcgcggcgagctttattcgtggccaccttgttgcatgatattggtaaaggtcgtggcgacgaccactcgattttgggtgcagaggttgcgttgtttgtctgcccacgtttgggtctgacgccggaagagactgaaactgttagttggttggtaagacatcatttgctgatgagcaaaactgcgtttcgctatgatttaaatgattcaaagaccattcaggattttgccgccattgtgcaatcgcccgagcgactaaaattattgctgattttga

SEQ ID NO: 254608 - DNA, 781 bp, Unknown
  Bacterial polypeptide expressing nucleotide sequence isolated from the Sargasso Sea
gacgaggccgcccgcgcggaagacccgcgcgcggcggtctctgtcgttttgcgcgagacctatgacgccgcccgcgcgcgggccgagcgcaagctggatggcggtatgaagggccgcgacgtggcgcgcctttacgccgcagccgccgacgagatgctggccggactgtggcgggtagcgacccagacgctgtggccgacctcgccggtcgaggccgaacggctggccctggtcgcggtcggggggtacggccggggcgtgctggcgccccattccgatctggacctgctgtttttgagatcgtccaaggcgacgccgcgcggcgagcaggtgatccagttcgtcctctatgtgctgtgggacctgggggccaaggtcgggtcggcggtgcgctcggtcgaggagtgtctgagcctgtcgcgcaccgacatgacggtgcggacgaccctgctggaggcgcgtccgctggcgggggacgaggcgctggcccagctgatgatcggccggttccgcgacatggtgtcgaaatccgatccgcgccccttcatcgccgccaagctggaggagcgggccgcccggcacgagaaggccggctcgacccgctacaaggtcgaacccaacgtcaaggacggcaaggggggcttgcgcgacctgaacaccctgtactggatcgcccggtccctggcgcccgaaagccggctgggcgccacggtgatggacgaactgttcaccccgcgcgagcgccgcacgtcggacgaggcgttcgacttcctgtggcggg

SEQ ID NO: 254609 - DNA, 818 bp, Unknown
  Bacterial polypeptide expressing nucleotide sequence isolated from the Sargasso Sea
tatgatgcattattgtggcagtcttagttctgacagacttactttcgatatacagattacaatagcaaataaattaggatacaaaaagcatattggctcatctccagtagagagattaatgaaacattattatctttatgcaaaagacgtaggatatttaactgctagcataatagaaagaatagaaaatgataaatttaaaaataaaaaaactaaaataaaaagttttttcactcagcttaataaaaataaaaatggtatatttaccttttatgacaaaaaagttcatttactgaaaaatatttctagtataagcgctttagatatatttagagcatataatttttcagctgaaaaaaattatgacttaagtgctgagttgactaatttgattaagttgaacttaaaaaaagttgattcttttagaaacaatattaaagccaacactttttttattaatattttaatgaatactactaatgctgaagccgtcttgagaaatatgaatgaaactggtgttttaggtcggtttattccagattttggtaaagttgtggctcaagtacagcatgatatgtatcatacctatactgttgatgagcatacaattaatgctataggaatattgagaaaaatttataatggagaattaagtgaaaaatttccacttgcttttaaggtagcacagaatgtagtttctaaaaaagttttgtatgtagccttatttttgcatgacatagcaaaaggtaggggcggcaatcactctattctaggaggagaagtggcaaacactttatgtcctagatttggattatcag

SEQ ID NO: 254610 - DNA, 513 bp, Unknown
  Bacterial polypeptide expressing nucleotide sequence isolated from the Sargasso Sea
aatgaaagatatctctcaaataaaaaagaagtatcaatcaaataaggttaaattatttcaaaaattagcatcaactaatgatggcttctattttaataaaaatcatacagatcttgtggatacagttgtaaaagaaatagttaaaggaatttataatatttatccaatagaagatttctctttaatcgctgtaggtgggtacggcagacatgacttgtcaccaaaaagtgatgttgacttactatttatttataaaaaatctaataaaaatataagagattttattactcaattaaataatacactgtgggatattggattagaagttggaatatctttcttaacaattaaacaggcattaatcgactctaagaaagatataaaaacaattacaaaatttgttgagagtcgatttatcattggtgatgaaattcaatacggtgagtttgttcggtccattaagattttaattggaaaacaaaatcccctaaagctcagcgaattaaagcttat

SEQ ID NO: 254611 - DNA, 808 bp, Unknown
  Bacterial polypeptide expressing nucleotide sequence isolated from the Sargasso Sea
aaactaataggcaatgagaaaatactcagcaattacacttcgttgttagcaacaaaaaacttatggaggaacaaaagcttttttgaagctaaattagaagaacaaattcatagacacaatcgctttaacaatacggaatacaatcttgaaccagatcttaaatcctctcctgggggattaagggatatacacacaattgattggattattaaaaactgtcaaagaaatatctctcgagacaaaattgagcttgagaaaataataactaatgatgaaaggagagatcttgaaaaagctaagtactggttgtggacaataagatatctacttcatcaagaagctagaagagaagaagatagattgttgtttgagtatcaaatatcaattggtaataaattatttccttcagttaaaaactcaagtacagctgctgaaaaattgatgcatcgatattatagatccgccctaagtatttctgaaattaactcaacagctctgcaagcatttgaagaaataacatccaaaaataagttatctcgtaaaaagataattgataaaaacttttatgaaagtaataaactcataaatctaagaaattcaaatggtttcaaaaaaaacccttcattattgttagagctattcattaggttaactgaaaaccctcatttaaaaggtatatcttcagagacacttagacttgtaaaaagagatagaggtttaatcaatgcagaatttagatctaagaataaaaacataaatttattcttaagattattaaaatctaatcggttaatagttacgcaattag

SEQ ID NO: 254612 - DNA, 688 bp, Unknown
  Bacterial polypeptide expressing nucleotide sequence isolated from the Sargasso Sea
ataaaaaattattataactatcttaatgctcatagttacatttcacaaaataagacagattttgaaaaaatggcgataattgctactggtggttatggaagaggtaaaatttctccaggttcagatattgatctgttatttttgatgcccttcaaaaaaactgcatgggccgaaagcatagctgaaaatctactttatttcctttgggatcttggtctaaaaattggtcatgcaacgagaaatattaatgaatgtctaactctttcttccaaagatcaaacaattacaacatctcttttagatgcaagatatatttgtggagataaagaagtcaaaaatgtctttgataagaaatttcgaaatacaatttccagaagatcgccaggagattttattgctgcaaaacttgaagagagagaaacacgccatattaaggagggacaatctagatatcttgttgagccaaatgtgaaaaatggtaaaggcggactgagagatctagaaagtttatcttggatgacaaatttttgttatgaagctcctaggccagagcaaatgcttataaatggagttcttactaaatctgaagcagaagcttttagaagatgtgaagatttcctttggcatattagatgccaattgcattttttagaaaaaaatccaaatgatgtaattaactttaatgttc

SEQ ID NO: 254613 - DNA, 757 bp, Unknown
  Bacterial polypeptide expressing nucleotide sequence isolated from the Sargasso Sea
ggaaaaactcgccgagcgcgatgcgcgacacgaaaagatgggtggctcccgttacgtgctggagcccaatatcaaagagggaaaaggagggctccgcgatctgcagaccctctactggatcgctaaatacctgtacaaggtcgacgaagtcgcgaacgtggtcgaccggggcgtgctgaccaaaaaggaagcccatcgctttgaccgggcccatcgctttctgttggacgtgcgctgtcgtctccactatctggccggccgcggtgaagaccgactgacattcgaccttcagtccgaaatcgccgcaatgcttgggtatcgggaccgggccggcgcgcgcggggtcgaacgcttcatgaagcattactatctgatcgcgaaggagatcggcgatctgacccgtattttctgcgctgcgctggaggcagagcaccagcggaagccccgtttccgcttgccgtcgatcggcatattccacaaatcggtggacgggttcgatgtcgaaggtggccggctgacggtcgcccgtagccgagatctgcgcgacgatcctgtcaggattctgcgtctgttccatgccgcccaggcggaagagctggacgttcatcccaaggctttgcgggcgattacccgaaacctgaatgtgatcgatacaatccgggatgatgaagaagcgaaccggctgttcgttgaaatgctgacgtccgaaaaagacccagaatcgactttgcggcggttgaatgaggcgggtgtgttc

SEQ ID NO: 254614 - DNA, 535 bp, Unknown
  Bacterial polypeptide expressing nucleotide sequence isolated from the Sargasso Sea
ctgcgtcaagctcttcatcacgctccccgtcgaaatgacgcgcgtcgtgccgctcatccgcaccatgctctcgcagcgatgctttccgaccatgacgccgcgcgaccgccgctcgggcatcttcgggccgcccgagctcctgttcggccacgtgtacccgcagattgtgctcgtcgtcgtcatcctctttgtgtacgcgccgatcgcgcccgtcatgtgcccgttcgcgttctgcttcttcgcggcggcgaacctcgtgtaccggcaccagtccctgtacgtgtacgtgcctcgattcgaatcgggcggcgagctctggttcgcggtgatccggcgcacgctcttcggcatggccctggcgaacgcgaccctgaccggccagctcctcctcaaggagaacttcgcggccatgggcatgtcgctccctctcatcgccgtcccgttcatcgtccaatacttttgcgacgtcgcgtacgcgcgaccgtgcgccaacctgaccctcgagcgcgcgatcgaaatcgaccacagcagcgga

SEQ ID NO: 254615 - DNA, 463 bp, Unknown
  Bacterial polypeptide expressing nucleotide sequence isolated from the Sargasso Sea
aatgaaagatatctctcaaataaaaaagaagtatcaatcaaataaggttaaattatttcaaaaattagcatcaactaatgatggcttctattttaataaaaatcatacagatcttgtggatacagttgtaaaagaaatagttaaaggaatttataatatttatccaatagaagatttctctttaatcgctgtaggtgggtacggcagacatgacttgtcaccaaaaagtgatgttgacttactatttatttataaaaaatctaataaaaatataagagattttattactcaattaaataatacactgtgggatattggattagaagttggaatatctttcttaacaattaaacaggcattaatcgactctaagaaagatataaaaacaattacaaaatttgttgagagtcgatttatcattggtgatgaaattcaatacggtgagtttgttcggtccattaaa

SEQ ID NO: 254616 - DNA, 874 bp, Unknown
  Bacterial polypeptide expressing nucleotide sequence isolated from the Sargasso Sea
gaattctccataaacactagttttcaggatatgactaaacatgattttaggatttttttattaaaaactttaaaaaatcattatgacaaatatagaaggatacttgaaaatatattggagtatgaacctcttttcgctccaaaagctattaaacactattccttactgatggacgaaatcctgaggaaaacactggacttagtcatagaacatattcatcctttgccaaatcccactagctcagagaaaatctgcgtgatagcagtaggtggatacggtagaatggaaatggctcccttttcagatatcgatttactattcttaactccctataaacagacagcttggggagaaagcgtcattgaaaccattttatacattctttgggatctcaaattaaaaattggttattcggtaagaaccgtagatgattgcattcgattaggtaaaaaagattttactataagaaccgctatgctggaacaaagatacctttccggggacaaaagcttacaattaagccttcataagagattatggcaagatctattccagaaatcaggatcggaatttatagaagctaaactcgaagagagggcaaaacgtcatgctcaacatggaggaacccgctatatgctggaaccaaacgttaaagaagggaaaggaggccttagagatttacagactctttattggataactaaatatctatataatacctcctccaccaatgaattggtcgcaataggagttttcagcaaagaggagttttcaatatttagcgaagctgaaaaattcctttggtcagtgcgttgttctttgcacctattatcgaaaagagccggtgagcaattgaattttaatagtcaggtag

SEQ ID NO: 254617 - DNA, 421 bp, Unknown
  Bacterial polypeptide expressing nucleotide sequence isolated from the Sargasso Sea
catggaacctgtaaactacgcaaaaaaaaattcaaacaaattctataaattcaaaaaaatacaaatttataatgaagataaaaaaacttttaaagaattacttttcaacaatctaaaaaaacaattagttcaatataaacaaaaaataagacaggagtttttaagaacatcagatggatcacttaatgttggtctaaatgtaattttaattgatagtatgttaagagaaattatatgcaacacttatcaacatgtatttggaaacaaagattataagttgtcaattatagctgttggtggatatggtagaggtgaactagcgcctcattctgatttagacttattgtttctaattccagataatttgaatcaaactgaaactaaggatatagaaggtcttattcaattaattttatactta

SEQ ID NO: 254618 - DNA, 882 bp, Unknown
  Bacterial polypeptide expressing nucleotide sequence isolated from the Sargasso Sea
gctactcccatatttatagatcttttactaaattacaataatccagaaagagcgctgcgacatatgaatgaagttggtttcttaggctcatttattcctgagtttggtcggatagtagccatgatgcagtttaatatgtatcattcatacacggtagacgagcatacaattcaatgcataagaaccctagctgaaattgagcacaaaaacttacttgaagatcttccgatagcgtctcaaatattaagtggtgatatcaatcggcgaattttgtatgtagcattactactgcatgatatcggaaaaggtttaccagaagatcattcaactgtcggagcagaaatagctaaaactctcgcacctcgtttaggtttaaagccggaagagtccgaaattgttgtttggctcattaaaaaccaccttctaatgtcagatatcgcccaaaaaagggatataacagatagtcgtaccgtccgtgattttgccactcaagtgacaagctccgcaaaattaaaactcttaactgttctcactgtgtgtgatatccgaggcgttggtccaaatgcatggaacaactggaaagcagttcttttaagggatctttactcacaaactttggcttttttaaaccagggctcaattgcatcatcaaggccagatcggctcatggcaattaaaagtaaaatgcgcgagtctttaaatgaattatcgaaccaagaagcaaactatcacttggacagacattatgataatttttggttcggtttggattttaatacgcaattcgaatttataaaacttcttcaaaaaagcgataacaaggatatcaaagtaaacatagttactgataaaaatagagatgctaatagaatttgttgtgta

SEQ ID NO: 254619 - DNA, 922 bp, Unknown
  Bacterial polypeptide expressing nucleotide sequence isolated from the Sargasso Sea
atttattccagagtttgagccaatcgtagccatgatgcaattcaacatgtaccacagctacactgttgatgagcatacgatccaatgtctaaaaacattagcacagattgagaaaggcgaattggttgaagaattaccaatcgcaagctcaattttgacaaatggcgtgaatcgtagggtaatttatgtggcgctgttacttcatgatatcggcaaaggacgttccgatgatcactcagtattaggagctaaaattgctagacgagtttcacccaggttaggccttaaaaaacatgaaacagaaactgttgagtggcttgttagatatcatttgctgatgtctgatatggcacagaaaagagatatatccgatcctcgaacggttcgtgattttgcaaaagcagttcagagcgtcaaaaggttagatcttttaactattttaacagtatgcgacattcgcagtgtcggggctgacacctggaataattggaaagctacccttattcgacaattatattctgaaacaaggcttactttggaacagggtggcgaagctctaaatagagaaaaccgtatggctgaggccaaaaaattattaagggaaaaattatttgattgggactctaaagacattaaattagaaactgggcggcattatccaccatattggcagggatttcagataggtgcacagtttgcttttgccaaattactgaaaaatcttgggtcggatgaaatcaaaattgacctgacacccgacacggacagagatgctactagaatttgctttgcactgtcggaccatcctggtattttttctcgcctctctggtgctcttgcgttggttggagcaaatgtagttgatgcccgatcttacacatcaaaggatgggtttgcgacagctgcgtttttgggttcaaga

SEQ ID NO: 254620 - DNA, 913 bp, Unknown
  Bacterial polypeptide expressing nucleotide sequence isolated from the Sargasso Sea
tcgttcgattgatatagccgcttgtgctagggataacaataattctaaaaatgatgtgaccggccacatgggcaccattactaaacagcgcgacatcattaatatcagcttcatgcatgctgctttagttgatcagcttgaagaagaagcgccacctaactccgttcgccaagcattgttggcaataatgcgggaggctttgaataatggtcgacaggaggtcagaaggcgttttgagaatgatagccgccttggtgaagcgactatccacgcaaatgcattcttaatcgatcaacttttgaggtttgcttttgaaattacaactacacgcgtttatccgacagctgagccaacggaatccgaacaaatttctatagctgctgtgggaggctatgggcgcggtgaaatggcaccatactccgacatcgatttgttatttttattgccttatcgcttaaccccgcgggttgagcaaattattgaatcgatactttatttgctttgggatctaggtttaaaagtaggacacgctacacgaaccattgatgactgtatccgactttcgaatggcgatattaccatacgaacatctattctggaggtaaggtttgtcgacggtaatcgtaagctatttaataatttacgccaaaaatttcgggaagagattatagcagacacatcgcttgcctttgtggaggctaagctgagtgagcgagacgcccggcatcacaggatgggtggctcacgttatgtgcttgagcctaatattaaagacggcaagggtggactgcgcgatctacaaacccttttctggatagcgaaatatttattccaagttgattccgtcaacgatcttattagagagggggttttgacgccgccagaggcgaaaagctttgcgcgtgcagaggtt

SEQ ID NO: 254621 - DNA, 855 bp, Unknown
  Bacterial polypeptide expressing nucleotide sequence isolated from the Sargasso Sea
aatgagtgaaactggagttttaggaaaactctttcctgattttcaaaaaattactgggcttatgcaattcaatatgtatcaccactacactgtcgacgagcatacactactagcaattgggtatttgaataagctagaaaaaggagagttaatagaattggcaccaatagcatcaacccttattaaaaaagctcaatctcgcaaaattttatttttagctgtttttcttcatgatattggaaaaggaaaaaataaagaccatacaattgtaggagagaacatagcaaatcaagtttgccaaaatttgaaattaaaagatcaagaaacagaaacaatcacatggttggttagaaaccatttattaatgagcaagtatgcttttaattatgatgtatcagatccaaaaacaatacttaatttcactaacttagttcaatctccagaaaagctaaaattattattaattattactgttgtggatattttagctgttggtcctggtatttggaacagttggaaagccgctttaatgagagagctattcaaatattctgaagaagttttatatggcgctgatgtctatcaattaatggaattaaaccctgaaaaatctaaaattaaattaatggaagctcttgatgattggaagagagaggattttgaggattttgcaaatttatacccagatcaatattggtcttcactagatatagatacacactcttggctagcaaaaattatttataaaacacacaagacaaaaaaaattacagtaaattttaaaaccttaaataaaacagactcagttttattagtagtaattgctccggataaccctggtttgtttagtgaaat

SEQ ID NO: 254622 - DNA, 572 bp, Unknown
  Bacterial polypeptide expressing nucleotide sequence isolated from the Sargasso Sea
aattaaaaagataaatggtatttttttacataacgcagaggatttactaggtaaaaataaaagaaaattatatatagcattacaagaggcaaaaaaaagaggattggtaaaaaaaattggagtttcaatatacagttttgaaactttagaaaaaattttaaaagaatttaaattagatattattcaaattccgttaaatattcttgatagaagattagaacattataaatttttaaataaaattaaaaagaaaaaagttaaaatatatgctcgatcgatttttttaaaaggaaccttacttttaaaagaaaaacaatttcctaaaaaatttcgtaaatggagttcaatttttaaactttggaattcatgggtcgcatataataagatatcaaatttacaggcttgtattaattacgttttcagctttaaagaagtagataaaattataattggtgtaaataatttaaaacaaactaaagaaatattcaatgcagtttcgaaaaaaacaaaaattttcccaaaaaatttattttgtaatgacgaaaatttaataaacccaaccaaatggtaaa

SEQ ID NO: 254623 - DNA, 795 bp, Unknown
  Bacterial polypeptide expressing nucleotide sequence isolated from the Sargasso Sea
gtgaagttgttggacaaatgcaaatttgatttatttcatgcttatacagttgatgagcatacatttaaattagtaagaaacatgaggcagatgaagctatatgaatcgaaagaatttaaattagaatatgaattaatcaataaattaccgaaaatagaaattctttatttggctggcttttttcatgatcttgggaaaggtaaaggaggtgatcattcaatcataggagctgaatcaagtataaaatttacaaaaagaatgggtttgtctttgtcagatggagaacttatatcatggttggtaaaaaatcatttattaatgtcgtcaatatcacaaaaaaaagatattcacgatcgcgaaattattaactactttgttgaattagttgaaaatacagaaaagttagattatttataccttctaacaattaatgatataaaagcaacaaatccggcactatggaatggatggaagcataaattactcaaagatttattccttttagctcgctctaaaattaacaaagagccaataaaaaaatcttttgaaatatcgcaagatagaaagagttctgttctaaaagattttgatgtcaaaaatgcagcagttataaataaattttggtctgtctttgatgaaggttattttaataaatataaatcagataaaataaaatggcacgcggaacttattcttaaaacaaaagaggattttatagtagattgtaaaaaatcatttgataatctaatagaagtattcataaaagttacaaatagagatggattgtttttaaaa

SEQ ID NO: 254624 - DNA, 835 bp, Unknown
  Bacterial polypeptide expressing nucleotide sequence isolated from the Sargasso Sea
ttgagattaataacaagtttaacaaagttaattaattctgaagtaaggtatgactttactgcaaaccaaatgtttttagatatattaacaagtcagagagattcaacaagaactttgaggttaatgaatgaatccaacctattaggtaaatttatacctgaatttcaaaaaattgtttgtttgatgcaatttgacatgtatcactcttatacagtagacgaacatacaatctttacaatttctaatcttcactctctaaaaaatggaaaatttaaagactttgcgccacttgcaagtaaagtaatacaagaaataagctcttatagatgtctttttgtagcaatgctacttcatgacattgcaaaaggaaagaaaggagaccactcagtcaatggcgccatagttgcatcaaccgtttgtcccaggcttggattaagtaacgatgaaactgaaattgttaaatggctagtattacaccatttattattaagcaagacggcttttagatatgaattaggagatccaaaaataattagagattttgcagaaaaagtaaaaactgttgaaaaattaaaattattattagttctaactgtagcagatataaaaggtgttggtccagaaatatggaacgactggaaaggctctcttatctctgacttgtatttaaaatgcttgaatgttcttcaagaaagaacatttactaaaaatgtttatgaatacgtcaaaacaacaaaggagttatttaaaagcgatttgttaaaaaatggtatcaagaataaatcaatagaacagtacagcaaaaattattatgacaattactgggaaatattca

SEQ ID NO: 254625 - DNA, 580 bp, Unknown
  Bacterial polypeptide expressing nucleotide sequence isolated from the Sargasso Sea
ctgcatccgctcgtcggcgacgaaaatgacaaggcgttccgtgccgccctcctcgcggcggcaaaggatatccacagcacgctgaaagacgaccttgccaccgagttcgaacagaggcgcgacggggctgtctatgtgggccgtcattcgctgggcatggaccagcttctggaagcgcttctttccgtcatcatggcgcggcatggcgatgccggacttgcgcttgttgctgtggggggctacggccgcggtgagctggcaccattgtcggacatcgatcttctggtgctgaccgtggcggacagcgaccccgccgccgacgtgattgtcgagcagctcctctatcttctctgggaccttggtctcaaggtgggacatgcgaaacgcaccgtgaccgacactatccggtcctcacgtgaggaccacaccattctgaccggcctgatcgagatgcgctttatcggcggtgacgcggcgctctacaggaagctcgagacgaccttccagaaagagctgggccggatcaggcccggtgacttcgccgagataaagctcgcagaacgcgatgcccgtcaccaga

SEQ ID NO: 254626 - DNA, 973 bp, Unknown
  Bacterial polypeptide expressing nucleotide sequence isolated from the Sargasso Sea
tcctatcgactaacgccgcgtgttgaacaaatcgttgaatcaatactctacctattatgggatctaggtttgaaggtagggcatgccactagaacaattgatgactgtattcgcttatcacaaaatgatatcacaatacggacatctattttggaggtgcggtttatatcaggaaacaggcccctttttaatactctaaaaaagaaatttcttgacgaggttatcaaagactccgcactagaatttgtcgaagaaaagctaaaagagcgcgattatcggcaccggagaatgggggattcgcggtatgttttggaaccaaatataaaagacgggaaaggtggattgcgcgacctacaaacgcttttttggatagctaagtatttgtatcaagtagataaggttgaagatcttataaaggaaggtgttctgaccacacgtgaagcaaaaaggtttcagcgcgcacaagtctttctttggactgttcgctgctatctccattatattgctggacgtgctgaagatcgtttgacctttgatctgcaaacggaaatttgccaaagactgggttataaggatcgtgctgggacgcggggtgttgaacgctttatgaaacactactacttaacagctaaagaagtaggagatctgaccaggatattttgtgcagcgctagagtccgaggagcgtcgaagtttgccgttagcctttgtaaatctagattggcttcggcgtgatatagagggatttccgattcagtcagggaggctttctgttttttctgaagaagattttgaggccaacccaacacgaattttgcagctgttttacgtggcacaaaaacggggaattgatattcatccgaacgcactgcggcttgttaccagaaatctcaaaaaagtggactcgattcggacggaacccgaagctaatgatttatttatcaaaaatttaaactgcatcctccggtgctgag

SEQ ID NO: 254627 - DNA, 944 bp, Unknown
  Bacterial polypeptide expressing nucleotide sequence isolated from the Sargasso Sea
atttcctatatctaatcctactaccgcagattatttatctatagttgccgtgggaggttatggaagaaataatttatctcctggctctgatatagatttactgattcttactccttataaaattacgcctagaattgaaaaaatatttgaaactttattgtatatgctttgggatttaaaaattaaagtgggctatgcagtaagaagccttgaagagtctatttctaagtctaagattgataatacaatttgtacatctttacttgatgctcgattaatagccggaaatcaatctttatggttaaaatttcaggatgcttttaaaaaagaaattattcttaaagaaaaacataatttttttacagaaaaattaaaagaaagaagagttaggcatttaaaaatgggagattccagttacttattagaaccaaatataaaagagggaaaaggaggaatcagagatttaaatacattgagatggataattcattttatataccaagttaaagatagtaacagttatttaaacaaaaatataatgagcaaagacgaagctttattatatgacagatcagaaaagtttttaagtaggttaagaactatgatgcattattgtagcaatcgtaattctgataggcttacttttgatttgcaggtcttaatagcaaataaattaggatataaaaatcatattggttcatctgaggtagagagattaatgaaacattattatctttttgcgagagatgtaggatacttaactgctagtattattgaaagaattgaaaatgataaatttaagaaaaataagcgcaagataaaagatttttttttacaacttaaaaaagacaaaaatgggatatttgctttttatgataaaaaaattcatttaattaaaaattattctaatatcagcgcacttaatatttttagagcatataatt

SEQ ID NO: 254628 - DNA, 631 bp, Unknown
  Bacterial polypeptide expressing nucleotide sequence isolated from the Sargasso Sea
tctggtattagcagtcggaacgtctctagacacagaaaaagagaaatatagttatgctattggggtgaattttgctcaaagtctaatgcgacagggtgcgccgttggatgcagatgccgtatatatgggcgtaaacgatgtcctgtctgactcggaactacggctcgatgcgaacacaataagtgctgtacttcgaaatcaagcccagaaagtgggagaaagaaaaaagcaatcagctgccgttaatctgctcagaggacgcgaatatatggagcggaatggaaaaaaagcctctgtaactacgctacccaacgggattcagtatgaagtgctaagacagggatcgggtaaacaaccatctgttagctcgacagtccgagtgcattacagcgggagcttagtcgatgggagagagtttgatagttcaaaacgacgcggggagccagcagaatttgctattagtgatgtgataaagggctggcaatatgctttgcccttaatgcgagaaggctcgcgctggtcagtgagcatcccgcccgagtttgcgtatggaattaaaggtgcggggagcacgatagggcccaatgaaacattagttttcgaaattgacttgcttaacataatcgagtga

SEQ ID NO: 254629 - DNA, 545 bp, Unknown
  Bacterial polypeptide expressing nucleotide sequence isolated from the Sargasso Sea
tatgtcaatcattgacgaaaggaagagacttctagctgaccgcgaacttcgaggttccgaattcaccttgcaactcagtgatgccactgatgaatggttatatggactgtttacatcagtagcagagaaccgagcagatttagctctgatagcagtgggcggctacgggcgcagagacctctcacctctatccgatctagatgtcttgctattacataacgatgctccggatattgaggaagttgccgaagcgctttggtatccgatttgggaccaaggagaaaagcttggacattcagtccggacactaaatgaaaccctaactctggcaagtgaagatctcgacacagcgactgcattattgtcaagcagacttattgctggatcccaaccgctagcaaatgaactttcaggaaaagcagtagatcaatggaaaagtaaagcaaaattttggttgcccaaattagcggaatcagttcattcacgtcatcgtgctaaaggcgaggttgccttcatgttagaacctgaattaaaagaaggacggg

SEQ ID NO: 254630 - DNA, 785 bp, Unknown
  Bacterial polypeptide expressing nucleotide sequence isolated from the Sargasso Sea
tatctacttcatcaagaagctagaagagaagaagataggttgttgtttgagtatcaaatatcaattggtaataaattatttccttccgttaaaaattcaagcacagcagccgaaaaattgatgcatagatattatagatccgccttaagcatttctgagattaactcgacagctcttcaagcattcgaagaaataacatccaaaaataagttatctcacaaaaaggtaattgataaaaatttttatgaaagaaataaattcatcaatttaagccatcctgatggcttcaaaaaaaatccttcattattgttagagctattcattagattaactgaaaaccctcatttaaaaggtatatcttcagaaacgcttagactggtaaaaagagatagagatttaataaatgctgaatttagatctaatcacaaaaacataaatttattcttaaaattactaaaatctaatcggttaatagttacgcaattagaaaacatgaaagatcttggaatcttgggaagatacttaccggagtttggaagagtcactgggcaaatgcaatacgatctctttcatatttatacagtcgatgctcacactcttcaggttttaaaaaacatgagaagaatgattctaaaaaaatcgacagaaatatatcctttggctacaaaattaattcaaaatcttccaaaaattgaaatcttatatattgctggtctataccatgatattggtaaaggtagaggatcagaccactctaatttaggtaaatcaatagcaggtaaatt

SEQ ID NO: 254631 - DNA, 841 bp, Unknown
  Bacterial polypeptide expressing nucleotide sequence isolated from the Sargasso Sea
tgatgaaaccttctggataatgggtagttattatttgagggagtggcacatgagatggtttcacgaccatttgcctggtggattaagagacctcaaaatcagtggtcatgtggaaattaaagatataagtgataatatttgcggctactcgatatcagggccaaatgccagaaaagttcttgaaaaacttacttcaagagacatctcaaatgaaaacttcaaatttatgagttgccaagagatagatgtaggattgataagagcaaaagttggacgactgtccgtagctggagagctaggatatgaaattaattgccacgccctagagttaagcgtcctaagagaacttttaatagaagcaggttcagaatatatgatcaaggaatacggatattatactcttaataccttaagattggaaaaaagctttggaatttggaatgcagaattcatgcaagcatatacaccaggggagacagggatggaccggtggatttcctggaagaaaaacgtgaattatgttggaaagattccagctactaaggaacgtgaagcagggaaggataaattaaaacaaagcctcgtaactctcgaaattgaaaatgctgaagctgaagctgccggctatgagcctttatggaatggaaataaaagagtcggcatgaccacatcaggcggatacggccattcaattgataaatcccttgcaatggcccttgtggaacctgaatttgccgagccagggacaagtctaaaaactcatattgtaggtgtagaaagaaattgtaaggtcgttagctcaagcccatgggatccgaagggagagcgaataagaatgtag

SEQ ID NO: 254632 - DNA, 857 bp, Unknown
  Bacterial polypeptide expressing nucleotide sequence isolated from the Sargasso Sea
gattgttaaacatcgcagtcaatttgttgattccttattaacccaagcatggcaagactttgcattaaataccgatgcacttgccttggttgcggtcggtggttacggccgcgcagaactgcacccctactctgacattgatttattatttttaattagcgatgaaccattatcagcagagcttgaaagtcaactaagtcaatttattacttacctttgggataccgggcttgaaattggccatagtgttcgaaccgttgctcaaacgattgagcaaggtaaattggacatcacgattgcaaccaatttaatcgaggcaaggctgttatccggaaatgagcatttatttgatttgctttacgataacattcgccagcacgatttttggccttcttttgagttttataatgccaaaaaagacgagcagattacccgccacagcaaagccagtgcctttgatttagaacctaacattaaaacgtgccctggtggcctgcgcgacattcaaaccattgcttgggtcgccatgcgccactttgatgccgccaccttagaagaactagtcgagcatgactttctagcgcctgcagagcttgaagagctactagagtgtcaaaactttttgtgggaaatccgttttgcactgcacatcacagccaatcgcaatgaaaaccggctgctgttcgatttacaacgacaaatagccagtttacttggctatgaagacgcgacacagctcgcggttgagcaaatgatgaaacgctactatcgcacggtacgccgagtgatggagctaaatcaaatgctattgcaactatttaaacgcgccacacttgggcacacgcaagcattagaaa

SEQ ID NO: 254633 - DNA, 915 bp, Unknown
  Bacterial polypeptide expressing nucleotide sequence isolated from the Sargasso Sea
tataaatattttaaagctatttatctgtgcccttgattctaagatactaattcacccacaagcattacttttagtttcacaaaatttaggtttggtagactcaaaactcaagaatagttttgaggctaatgaccttttcttaagcttattgatcgattatggtaaccctgagagggttctaagaagaatgaatgaggttggctttctgggggccttcatccctgaatttgggagaattgtagcgttaatgcagtttaacatgtatcactggttcacggtcgacgaacacacaattcaatgccttaaagttctatcggaaattgaaaaattacccgaaaactatgggacagcagtccaggaaatatttttgaggaaatctcttaatcgaaaaatcctgtatctttcgttactcttccacgatattggaaaaggccttgaaaacgaccattctattgagggtgagaaaattgctacaaagttatgcaaaagatttacattgcaagatagcgaacaaaacaaaatttcttggctggttggaaatcatttaatgatgtctgattttgctcagaaaagagatttatcagaccaaaaaacaatcattgattttcaagaacatgtccaggatagagaaacactagacctactatttatacttacagtttgcgatatcaaaggggtatcttcggatgcatggaataactggaaaagctctctactggagagcctttactttcaaacactccaattggtttcaaaagatgctaaagttaagacaagatcagaacgaatagatacagccaagacgaaacttaaggggtatctcaaagagtttaaatacgatgccatagagaaagaaacttctcgtcattttgatgcttactggttagttttagatactaaaacccaaatgcagat

SEQ ID NO: 254634 - DNA, 1144 bp, Unknown
  Bacterial polypeptide expressing nucleotide sequence isolated from the Sargasso Sea
aatgaaagatatctctcaaataaaaaagaagtatcaatcaaataaggttaaattatttcaaaaattagcatcaactaatgatggcttctattttaataaaaatcatacagatcttgttgatacagttgtaaaagaaatagttaaaggaatttataatatttatccaatagaagatttctctttaatcgctgtaggtgggtacggcagacatgacttgtcaccaaaaagtgatgttgacttactatttatttataaaaaatctaataaaaatataagagattttattactcaattaaataatacactgtgggatattggattagaagttggaatatctttcttaacaattaaacaggcattaattgattctaagaaagatacaaagacaattacaaaatttgttgagactcgttttattattggtgatgaaattcaatatggtgagtttgttcggtccattaagattttaattggaaaacaaaatcccctaaagctcagcgaattaaagcttatagagttggttgaaagacatgactatcgaataggaattaaaagtaatttagagccgaatatcaaagagggtattgggggtcttagagatattcataccatactgtgggtatcgatctttatgtttaacatttataaattagaagacttaacgtctattaatatctataccaaagaggaaattaaagaattaaagaatgcttggaaatttctcttaaccattcgagcatttattcatttatttaacgaaagtaaaggcgatgttttatctattgaaaatcaattaaaaatttcaaaaaaactctcttacaaagataaaaagaaggaaaaaggagtggagatttttatgaaagatttgtttgtgaatgttgcaaagattaattctctcttaagaaccttttattcaaagcttccagaggatttaataatcaaaacaatttataaaagaaaacccactaaaactaaatcattagaaaaagaatttataattgaaaaaggttttctgaatttaaaaaataataccgctaaaaaccttcaactaaaatgggcaaacgtctttgaaaaatccttggaacataatttactcattcatcctcgctttttaaagaccgtcgaggaaaaaagaaaagtttaa

SEQ ID NO: 254635 - DNA, 305 bp, Unknown
  Bacterial polypeptide expressing nucleotide sequence isolated from the Sargasso Sea
aatgcttaaagagctacagaagcaaaaaaataacgacattagctctctttcaaaacaatttgaaagctggttatacagagaaagaggtaggcaagtaagaggtattgaatattttctgaataaaagatctgagaatatcgataacctcataatggctgcatctgaaaagagtggtttaacttccattagcaagttaggaatctttgccgtgggaggatatggcaggggtgaattacatcctttctctgatatagacctgctcttgctaacaacgagcgagctatctccaactgaaaacaaaaaat

SEQ ID NO: 254636 - DNA, 1540 bp, Unknown
  Bacterial polypeptide expressing nucleotide sequence isolated from the Sargasso Sea
tttctccgttgcccaaaggagttgctggatgttcatccatatgccttaagattaatttctaacaacttgggtctgattgatgacgtcctaagaaaaaaccaagtggcaaatcagttgtttcttgagatgctaacctctccaacagacccggaaaccaccctaagacggttgaacgagtcaggggtttttggaaaatttgtcttagaatttggtaaaatagtcgcacagatggaattcagcatgtaccactcttatactgtagatgagcatactatccgggctattggcgtcttatcaaaaattgagtctggtgcatacaaaaatgatatgcctaatgtaacaagagctatgaatgagttgcaatctcgaaatgcattgtattttgccgttttccttcatgatatagctaaaggtcaacaaggggaccattccgttcttggttctgaattagcgataacattgtgccctcgtttcggcctaagtgaagaagaaacggatacggttgcctggttagtcagagaacatttaacaatgagtaacacagcattcaaaagagatttggaagacccagatactatcaaaatttttgcatcaatcgttaaaaccgttgaaagacttaagcttttgaccgtcctcacttgtgccgacatcaaagccgtggggccaaaaacttggacaagttggaagtctaggcttcttaggagcttatatactaagacgctagagcacctttccggggatatgcttgaagaaaatacggattttagagttcaacatgctaaagacattttggtttctaaactcaagagttggcaaaaggaagcggttgaaacacacatcacaacctgcccacctaaatattggctgaaatttgatcacgagactcacctcagacactttgaagcaattcgaagatcactcctcaaaaatgaccttgttcatattgaacatagtataaacgatgagtttgaatattcagaaatcaccgttattgcacctgataaaattggtttatttagtaaaattgccagtgtccttgccctatatggtgtgaatgttgttgacgctaaaataattacactgggaaatggtaaagttatagacagcctatcctttcttgatgggaatgataaagctgtgaccaacaaaaaagttgttaacaatataatctgtaaaatcgaagaggttctattagaaaacaccaacctaaatgatgatgtgaccaggatcaaaaagaacaaaagatcaaagaggaaagaagcgttttctgttgcttctcgagttatcttagacaacattaccagtagtgaggatacaattattgaggttacgggtcatgatagagttggcttgttatatgacataacctccgcactaacttctttaaacctgaaaatatcaagtgctcatgtgacaacttttggtgttgaagctgttgacaacttctatgttaaagatcgaaacaacgaaaaacttagtgcgccggaagaaattgccatagtcaagaaggtggtgttagaggctgtcaacaaaacttagg

SEQ ID NO: 254637 - DNA, 606 bp, Unknown
  Bacterial polypeptide expressing nucleotide sequence isolated from the Sargasso Sea
aatgagtagtgttccagccgtcacccagtcccacgccacgtcgctcaaggcagactataaagtggccaaagcccagttgctggaacgcttcaagaccgcctccaacgtcgactcgctgatggccgcgctctcgcgcgccaccgacgaatcgctacgcgccgcctggaacacctgcgaactgccgcccgaactggcgctgctggccgtgggcggttacgggcgcggcgaactcgcgccccactccgacatcgacattctggtcctgctgcccgacgcgccgatcgaacatctcgcggcgcgcatcgaacgctttatcagtctcgcgtgggatttggggctcgaactcggcagcagcgtgcgcagcgtggcgcaatgtatcgaagaagcggccaacgacgtcaccgtgcgcacctcgctgctggaagcgcggcgcattacgggcagcgccacgctcttcgacgactttgcgaagcgctaccgcgaagcgctcgacccgcgcgcgttcttccaggccaaagtgctggaaatgcggcagcggcacgccaagtttcaggacacgccgtattccctcgaaccgaacatcaaggaaagtccgggcggcctgcg

SEQ ID NO: 254638 - DNA, 551 bp, Unknown
  Bacterial polypeptide expressing nucleotide sequence isolated from the Sargasso Sea
tatggacatagacacagacatattaatgaatccaaagtctcttgctttatctatcagcaagattttgtcaaaaaataaaggtaatgtctcaaaaacccgtgaaggtctagtcgccgtattatccaatacaatagaatcagctagaaaaaaagctgaaagctcactaaagaggcatgggaatggtattcgaacagcgcgaagtatatcagagttccaagatacgctcataaaaacaatgtatgaatttatagtccaaaacgtatattcaccaaaggaccaaaagaatattgataaaatatgcctagtcgctgttggtggctacggtagaggaacacttgctcctttttcagatattgatctgcttttcttgcactcgaataaacttaataactggacagaatccgttattgaatacatgctgtatattctttgggacttaggctttaaggttggtcatgcgacaagaaatttagatcattgtcttgaactctcaaaatctgacctcaccataagaacatcaattttagaagcaagatatatacatggggcac

SEQ ID NO: 254639 - DNA, 1160 bp, Unknown
  Bacterial polypeptide expressing nucleotide sequence isolated from the Sargasso Sea
tatgcagttatttagacacccatactcaacattagtgattattgggggctgtatacttttgcttgtctcgtttggtataagacattcttccgggctttatttaatcccaatttctgagcatatacaaactggaagagaagtatttgggtttgctattgcaatacaatttctaatgattggaattggatcgccaatttttggcgcgatagcagataaatatagttcatcagctgctggcctattaggagtaattttctttttaattggtctttacttaatgtcacttgttgaagggtcaatccttctaatcatatcacaagtaatttttggatttggatgcgctggatgtggtacagctgtaatattaggggctgttggaaaagctgtaacaggtaaatatcaaacattatctttaggtgttgtaatggctgcaggttcgctgggtcaatttttaattgttcctcttacaggcttcttaattgaaatgagtgattggcaaagatcaatcttatatctttgttttatttcacttatcatgattttattctcactagtattaacaaagcattcatccaaaagtgaaataaatgatgaagttaatagatctttagcatcagttttaaacgaagcctttgcaaataagagctatgtcttgctgacaattggtttttttgtttgtggttttcatatttcttttatagcgactcatctacccgcataccttgatgatttatctttacccatgtggatcggttcatggtccttagcattaattggtttatttaatgtaataggcacacttgtttttggtcacttaggggacctaaggtctaaaaaaaatctgttggtaatcttgtatactctacgtgccctactatttttaatttttatctttttgccaaaaactgaaattacagttttaatttttgcatcacttcttggaattctatggctgtctacagtgcctcttaccagtggaataatatcagttatttttggatccaaatatatgtctatgctgtatggtttcactttcttatctcaccaagttggttcgtttgttgggtcatggtttggaggcaggttttatgattattatggttcttatgatattatgtggtgggcttgtgtgattttagggtttgcttctgcagtagttc

SEQ ID NO: 254640 - DNA, 916 bp, Unknown
  Bacterial polypeptide expressing nucleotide sequence isolated from the Sargasso Sea
atgaacgctatcgttaaccaaagagcgattctcgatagaaggactctgttatccaaaattaaaagtatattccccgaaaacaactatgagcccgcaaaaagagatgagttgctgtccctgctaaaaaggtccttcgacagtggttttttagagatagagagccggtttgattttaataaaaatggtctggttgttttgaagtctaattcatttttagtagatcaagtaattagggttctgtttgaagtggctaccactctagcttacccaagaggaaatccttcaactgctgaaaaaatcagcctggtagctgttggtggatatgggcgagaagaactagctccttattcagacatagatattatgtttcttcacccttataaaaaaactccttatattgagcaggttgtcgaatttctactctattttttatgggatctaggtttaaaagttgggcactctacaagatctataggtgactgtatccggctatcaaaaaacgacttaataatagagacaagcctgctagactccaggtggttatggggctaccaaaaaccgtatttggatttcgttaaggcgttccaagaagcaattgtaagtgggaatggaagccgttttgcagaggcaaagttaaaagaaagagaccagcggcatgaagatttaggtgacgtccggtatgtgttggaaccaaatatcaaggatggcaagggtggcctaagagaccttcaaaccctgttctggattacaaaacatatttatgggacatctaacttggcagagctagcagaaaaaggagtttttttaagacaggatgtttcccgttttcgtaaagctcttgaattttatgcatctgtccgttgtaacttgcattatctagccagaagaccagaagaaagaattacctttgacatac

SEQ ID NO: 254641 - DNA, 907 bp, Unknown
  Bacterial polypeptide expressing nucleotide sequence isolated from the Sargasso Sea
cttatttcttctacggtttgtgatgtgagagcaacaaatccaaatttatggaatagctggaaagaaagactcttcaaagacctttatcaattaacaaaaaatgccctgagaatggggcttgaaaatacccttgataaggaagaaattgttaaagaaaaaatagaaataatgacaaaaaatctagagattcaaggccttgatatcactgaaatggatgcagctatcaggaagctgagtgaggaatatttcctaagatttaatcaggacgaaatcaattatcatcttcagaagctcatatcgaatacatccaaagataaggaaaataccatcattggactgaaactcattgaggaagaaggcttgatgctgctattcataaaaactgctattaattttgatactttctcgataatcacaaataatttggtcgataaaaatgtatccattagagatgcaaaagtcattgaactgaatgatggtagctgcatatacaatttctatactgatatgcccaaaggtgacgcttacgatattgataataagctagaatctttaattagaaacttaagcttaagactcgaaaaaaagcaaataacttcgaagaagcaattcaaactgccccgaaggctaagaagcttttcaacatcaacaaaagtaaattttttagaggatcatattcataatcggactgttctagagatggtttcaatagataggccaggtcttcttgtcgatatatctgaggtcctaagaagaaataatatttggatcgaatcagcaaagatagcgacaattggcgaaagagctgaggatgtcttttatctcagaaacgaacatcaggatgccattcctcttgaaacaaaaaagagattagagtcagaactgattgagtcattggataattaat

SEQ ID NO: 254642 - DNA, 778 bp, Unknown
  Bacterial polypeptide expressing nucleotide sequence isolated from the Sargasso Sea
ttggatattaatttaagagaaaacaggcaaatctatcaagagcttgtatcaacaacaaaggaaattattaaaaattctttagaaagggcaaagaaaaatttagaagaaggacactataaaggctcgcaatgtgctgaagaaatatccaacttatacgatcatgtgataaaaaattattataactatcttaatgcacatagttatatttcacaaaataagacagattttgaaaaaatggcgataattgctactgggggttatggaagaggtaaaatttctccaggttcagatattgacctgttatttttgatgcccttcaaaaaaactgcgtgggccgaaagtatagctgaaaatctactttatttcctttgggatcttggtttaaaaattggtcatgcaacgagaaatattaatgaatgtctaactctttcttccaaagatcaaacaattacaacatctcttttagatgcaagatatatttgtggagataaagaagtcaaaaatgtctttgataagaaatttcgaaatacaatttccaaaagatcgacaggagattttattgctgcaaaacttgaagagagagaaatgcgccatattaaggagggacaatctagatatcttgttgagccaaatgtgaaaaatggtaaaggcggactgagagatctagaaagtttatcttggatgacaaatttttgttatgaagctcctaggccagagcaaatggttaaaaatggagttcttactaaatctgaagcagaagcttttagaagatgtgaag

SEQ ID NO: 254643 - DNA, 1390 bp, Unknown
  Bacterial polypeptide expressing nucleotide sequence isolated from the Sargasso Sea
aactcaaaaatacttaaatcagagatcagatatatttgatgaattaattattgatgagtttttaaagagaaaacttgaaaatgattttgcaatagtcgctttggggggttatggtcgacgagaactatatccctcttctgatattgacctatcaataatccagttaacaaaaaaaactaaaaaaattgacgatgttagggattttattggatggctttggactctcaaagtaaaaataggtcattcagtaagaaccataaaagatattgataaaattactaaatctgatttaaaagagtttacctcttacctttcaaatcgggtcatttattgtcataggaataatattaatgatttaaatcaaaatttaaaaaaaatatcttctaattggaataaaactaaatttttcaatgcaaagaaattagagcaacagagaagatatcaatcttttgactcaacagaattcagccttgagccagatttaaaagaatcaccaggatgcttaagggattttcaaactgctttgtgggttctggaacattgctttgaaatagaaaaactagaagattgtataaaaattaagctttttaaaaaaatagaaattaaaaatgttaaaaaatcatatgatcatattaaatctttaagatacatattgaacttaaacaaccactcaaatcgaataagttttgagaatcaacttttgctagcaaaaaaatcaaaactgaagtcctcaaaaaaatcttcagctgttgaaaagtttatgagaaccttttttttgcatgcatccaatctttcagattttaatgaattagtttttcaagcctatgaagatcagttaactattcttaaaagatcatattctagagatttctatattttcaaggaccgtttagggatatctgatcgaattaatctggttaaaaagcctgaatttattcttgaaagtttgaaaaaagttggggagttaaaaaaaattaatggtttagattttaaatcaatcaaaaaaattaaatcagctctatctcaaattgatccaaattattttctatctccacaagctggaaaccaattcattgatattttaaagtcaacaacaaacctttcaacaatcctaaaaaaacttaagcagttgggcctattaagacttctgattcctgaatttggggaaatcgagggtcagatgcagtttgatatgtttcatatttacacagtcgatgagcatacttttaaggtggttcgaaacatgagacaaatgcagattggaaaagtggatgaggctctgaaaattgaacatgagttaataaacaaattgccaaaaattgaacttttatatcttgctggcatatttcatgacttgggcaaaggaaagggaggtaatcattctgagata

SEQ ID NO: 254644 - DNA, 1748 bp, Unknown
  Bacterial polypeptide expressing nucleotide sequence isolated from the Sargasso Sea
tgcaaaagaggtaggagatttaaccagaataatatgttctgttcttgaagagagacaaaaagataagttttcatttttttcatacataaaaaagatatttacaattccagcaaaattaatttcttctggtggaagtttaggtctttatgtatctagtggaaggttaaatatatcaaatgaagaggttttcaaaaaagatccttcaaaaataattttattttttgattttttagaaaagaagaatttatttgcacaccctaatgcaattagactcataaggaagtcaacaaaattaattgatcataaattaagaaacaatataagaactaatgaggttttcactaatatattaagcagtcctgaggcagaaaaaacacttagagccatgaatgaaagtggagttttagggaagtttgttcccgactttggaaaaattgtaggattaatgcaatttaatatgtatcaccattatacagccgatgagcatttaattaaggcagttggggaactaaacaaaatctttcactcagaaaacaaagattacactatacttaattcattaagtcttgatgaagaagaaaagagagttctatctttagccattttctttcatgatatagctaagggaagagaaaatgatcattcagaagaaggacaaaaagtagtcaaaaaaatggctaagcgacttggtctttcagagaaagatgaagaaatgatttcctggctggtgttagatcatcttgtgatgagtgactttgctcaaagaagagatatatctgatcctgtaacaatttcagattttgctgaaaaaattcaaaatacaaaaagactaaagctccttttgttccttaccgttgctgatattagagctgtaggtccaggagtatggaatgattggaaaggtgaattactaaagaatctttacaatgaaacttacttggctttaacaggaaattattccgaacaggatagactgtataaaacaaatgaaattaaagaaagaataaaaaaagaaataacagaggtaagtgaagaaaataaaattacatggtttaatttagtagatgaaaaatattggatatctgtcccagaaaagatccaaatacagaatttaattacttggcatgcaggaataggtgataaagaaaataatattattgatttctataattctgatgattattcctcaaccattatgacagtaataactcaagacaagaaaaggctttttgaaagaattacatcagggtgtcttgagatgaatattaatattgtcgatgcgaggatattttcgaataatgataatgtgatcgatattctatggatacaagataattttggtaaaaaaattgttgatccaaaaagattatcacgaatcaaacaaaagattttattcttcataaatgaaaaaaacattccaatgataagttatgaaaatagcattgataaaagatcatcagcatttaatatttctcctgatgtatcaattgataactcactttcaaataaatattctgttattgaggttagcggtaaagatagaccaggccttcttaacgatctaactagaaagatatctgatttagacattaatataagaagcgcacatattgctacatttggagaaagagctacagatgttttctacgtcttatcaaaaaatggagataaaataacatctaaaagtaagttaaaaaatatacaaaatgagcttattaaatcaatgagctttgatgaatatgtataaa

SEQ ID NO: 254645 - DNA, 1624 bp, Unknown
  Bacterial polypeptide expressing nucleotide sequence isolated from the Sargasso Sea
tttagatagtgcagcaaatgatattagggaaagggtagcaagagttgtggataatcttcctagtgagtcagatgcaccacaaatactgaaacagtctgcaggtttttcaactacaatgtggttagcattaagttcatccacatggagtgatttggaacttggggattatgcagaaagatacctggtagatcaattttcgagtgtaaaaaatgtcggtagaataagaactggaggactaagagatttaagtgtaagagtttggattgatccgattaagttagctgcaaacgacttgaccatacaagaagttgaaagtgctttaagaactgaaaatattagtttgcccgcgggtactttagaagcaaacaatattgatctaactttgaatttagacaaatcttataatgaaattaataagttaaaaggcctacctttaaagaagatcaaaaatagcattgtaagacttgacgatattgcgaatatagaatttggtccagtctctgaaaaaactctttttaaagcacaaaaaaaggattctttaaatttaaaaacagttggtattggaatttatgccaaaagtggatcttctacagtagaactttcaaaatcaataaaaaagaaattagttcaagtaagaaaaactttgccggatgatttaaaattagagatcgcttttaatagagcaaattatgtaggagctgcaattaaagaggtttataaaacacttgttatagctttcttattagtggtattaataatttatctatttttaggaaatctaaaggctgtaatagttcctgctgttgcacttccagtaagtcttatagcttcttttcttggtctatatttatttgatctttcaataaatatttttgtactactaagttttattctggcaataggaattataactgatgactcggtaataatgactgacgctatatatagaagaattgaaaatggagaaactccgttagtcgctgcctacaaagggtcaaaacaaataacttttgcgattgttgcaacaacactaatattaattgctgtttttttacctttaatttttattgatggtatagctggaacattgtttagggaaactgctatagctttatccttctcgattgtaatatcctctttcgttgctctaactttatctccaatgttgggaagtaaatttttaaaaagaaccccaaaacaaaactattttgtaacaaaatttggaggtttctttaattcgtttttaaaaatttaccaggaaacattgttgttttggttaaataaaaagaaaactataatttcatttataatagctataattatttgctctgcgggcctgtattcttttgcaaaaaaggaattactacctatggaagataggggtgtatacattatcattggcaacactgatgagggcagttcttttgagtatacagaaaaaagagctgaggaagttgaaaaaagattaattccacttcttcagtcctcagatacaccttataaaagattaattatgagagttcctggttttggagataataaaaattctttcaatagttttataataattgctcttttagatcattggaaaaatagagacctagactctttgacagtaatgagg

SEQ ID NO: 254646 - DNA, 1076 bp, Unknown
  Bacterial polypeptide expressing nucleotide sequence isolated from the Sargasso Sea
aatggtggttagcaatttaagaaggctagcactagacagattcaaccatgaatatccagaagacagcaagaaaatgcagttaatagaatcccaagaaatactctacttggcaggattatttcatgatattgcgaaaggtagaggtggagatcattcaattttaggggcaaaagatgctgaagagttttgcatttctcatggtatgacgagataccaatctaaacttgtttcttggcttgtagaaaatcatttgattttttcattgaccgcccaaaagaaagatattcatgacccactcgttgtgaaagagcttgctgagattattggagacgaagaaagattagagtatttatatcttttaactgtttgtgatgtgagagcaacaaatccaaatttatggaatagctggaaagaaagactttttaaggacctttaccagttaacaaaaaatgcccttagaatgggcctcgaaaatacacttgataagaaagaaattgtaaaagagaaaatagagattgcgacaaaatttataggggaccaaagccttgatatcgataaaataagagaagagatcagaaaacttagtgaagactatttcctacgatttaatcaggatgaaatcaattaccatcttgagaaactcataacagatggtgctcaagatgaaaaaaacaccattattggccttaaaattatagaagatgaaggcctgatgctcctgttcatcaaaacccttatggatattgatactttctcaataatcacgaataacttggtcgaaaaaaatatatccatcaaagatgcaaaggtcatcgagctgaatgacggaaggtgcatatataatttttatacagatatgccgaaaggcgatgcctatgatatagaaaataaaattgaatctttaattgaaaatttgagcttgagacttaaaaagaaacaaattatcaaaaagaaaaaattcaaattaccaagaagactgagaagctttacaacaaaaacaaaagttaattttcttgctgatgacattcacaatcgaactgttcttgaaatgatttcaattgataggcccggacttc

SEQ ID NO: 254647 - DNA, 823 bp, Unknown
  Bacterial polypeptide expressing nucleotide sequence isolated from the Sargasso Sea
agaaatatttttatggaaattttaactgcgaaggacggtcaaactcacacattacggagaatgcaccaatatggtattttgggaaagtatctaccagaatttgataaaattacaggccagatgcagtatgacctctatcatacatacacggttgatgaacattcgctaatggtgataagaaatttgagacgatttgcaattccacaaatggctcatgaatttccactttgtagttcaattatgtctaattttaaggaaccagagattctttacatagcaggactttatcatgatatcggaaaaggctctggaaaggatcattcgttagtaggaaaaatattagtaaaaaaattttgtacaatgcatgagatttcaaaaagaaatactaaaatcatcacatggttggtagaaaatcatttgttaatgtctgttttttcacaaaaaaaagatttatccaatcaaaatgaaattaaagaattcacacaaattgtaaaaactaaaaaaaaattagatgcgttatatctcttaactgtagcagacatcagggggactagtcctaaagtatggaattcatggaaagcaaatttattagaaaatttatacaattcatcaaagaattatttacagagtgaaaaaaataataacgacgatttagaatctataaaagtatcagttgttaaaaaactaagtaatgaagttaacaatgaaaaaattataaaattttttttgaatagcttggaaatttcctattttttaaatcatagccgtgatgaaatagaatggcatgcaaaagtattacatcattattatataaaaagaatac

SEQ ID NO: 254648 - DNA, 879 bp, Unknown
  Bacterial polypeptide expressing nucleotide sequence isolated from the Sargasso Sea
ttcccgatagaaggaggccgcattacaattgatagcgtgaaagcgctaaaggaagatactacacaaattctcaggatttttcaggttgcgcaatatcaaaaatttgatattcaccctagagcgatgagagtgatttctcagaatttaaatttaattggacctgatcttcgggaaaacgccacagccaatcgcatatttttagagatattaactgggcccgagccgcgcactgctcttatgtggttaaatgaaacaggtgtatttggccgatttattccagattttggcagagtggttggccagatgcagtatgacatgtaccatgtttataccgttgatgaacatactattcgtgcaattgaaattttggatggtatatttacgggccgccttaaatcagaacacccaatttcttgtggggtcattcttgagcttaaatctcgacgggcactttttgttgctacattacttcatgacattgcaaaaggccgcggcggagatcactccatacttggggcggaggtggcggaaaaactatgccctcggcttggcttgacggagtgggaaactgaaactgtcgtgtggttggtacgatggcaccttctcatgacgcatgttgcctttaaacgtgacctagaagatccaaagacaatttcggattttgttgaacaggtgcaatctccagagcgtctccgcatgttactggtactgactgtttcggatatacgggctgtaggtccagaggtttggaacacttggaaggcagggctattacgcgaattatattggcgagctcaggatttttttagtggcagcgtttcgacagaacaccgggataagagagcagaacgagtcaagttaagattaagtgagaaactc

SEQ ID NO: 254649 - DNA, 805 bp, Unknown
  Bacterial polypeptide expressing nucleotide sequence isolated from the Sargasso Sea
attgggaattcaaaatgttgacttaaaacataataaaaatcttatttttgagatatttatagaaattggtaaaagcaaggaaataactcttatcaatacagaaaccaaatctttaatgaaatcaaatatcggcttgattgatgatagttttagacaaaattctatttatactgagcaattcttacatatattaaagtcaaaatataatctctcgtccatcctaaagacaatgaaaactttgggggtattgcaggcatatatccctgaatttgcagaagtagttggacagatgcaatttgatttgtttcatgtttatacggttgatgaacatacctttaaggtcgtcagaaatatgagacaaatgaaattatatgaacaagagggttttgagcttgaacatgaattaatcaataaaattcctaaaatagagattctatatatagcaggaatttttcatgaccttggaaaaggtaaaggaggagaccactctgaaataggcgcaaagactagtttaaattttgcaaaaaggcttggtatgtcttctatcgatgcaaatttaatatcatggttggttaagaaacatttaattatgtcctctatatctcaaaaaaaagacattagcgaacctgaaactataaatgaattcattaaacatgtggaacaagatgaaaaattagattacctgtatcttcttacaatcaatgacattagagcaacaaatccagctttatggaatggatggaagcatcaacttctaaaagatttatatattttatctagatcaaagataaatcagcagcctgta

SEQ ID NO: 254650 - DNA, 807 bp, Unknown
  Bacterial polypeptide expressing nucleotide sequence isolated from the Sargasso Sea
cactgctaagagtgcactcaaaaaatcaaacgatgtcttaaattatcgatacaaagaagggcaggacatcaactgcatagttaggggaagggctggagtcgttgatgaaattttgaagctggcatggagagcattgaattggcccaatccgtcggatatctgtttaattgcagttggaggatatggtcgaggagagttactgccgcactcagatgttgacctcctaattttaactaagagcagctggcacaaaaaatatcaacattacgttagctcatttctaaccatgctatgggacatcggattagaacccggtcacagcgttcgatcaattcgtcaatgtaaaagtgaagcaatcaaagaaatcacgatcgccactgcacttatggagtcacgaattttaatcggcaatcctgagttattttcagaaatgtataaggccactaacaaccaacgagtttggcctattaagaaattcgtcgcggctaaattaaatgaacaaaaagtgcgacatcaaaaatttcttggagttgattatgcactcgagccaaacatcaaaacctcaccaggaggattaagagacattcaaacaatttcttgggtctgcaaacgtcgattcgggacagacacattcaaagacctggtcaatttaggcttccttaacgagcatgaacaagcagctctaaagcacggtcaagaatttttatggaaaattcgatatggccttcacatgcttgactctcgaagcgaggaccgtcttctttttgaaaaacagaaagaactcgcccgactactgggatatcagga

SEQ ID NO: 254651 - DNA, 752 bp, Unknown
  Bacterial polypeptide expressing nucleotide sequence isolated from the Sargasso Sea
ataccaggagctgatggagtgtgaagcttatttatggcaaatgcgttttgctctgcacgttgaatctggccgcaacgaaaaccgtattttgtttgactatcagcctgctgtcgcgaaacggctgggttttggtgatgatggtaaagcctctgttgaacgtatgatgaaacggtttttccagacagtgcaacgggtcgcagagctaaacgatatgctgctgcagcattttgacggcagtattcttaatagccaaagcaagctgaaacagcaaaagctggatgacttctttgagctgaccggtcatttaattcgtgccacagacaatgcagtctttgcgcgacgtgaaaatattctgcgactgttctggcatatagcgaacaactccaatatcaccggcattcactccgataccattcgattattgcgtttagtccggcgtcgtctgatgggcgatttacaggattatgaagcctgccgtcagctttttatgagcatcatccgccatccacgtggcatggacagagccattacgctcatgcaccgccacggtattctggcatcttacctgccggcatggcgcaatattgtcggtcaaatgcaattcgatttattccatgcctacacagtggacgaacacactcaccgtgtactgaaaaatttataccgctactcacaagctgggtttgaaaacgagtttccactgtgcacagacatagtcaagcgtatggaaaaaccggagattttatatctgg

SEQ ID NO: 254652 - DNA, 836 bp, Unknown
  Bacterial polypeptide expressing nucleotide sequence isolated from the Sargasso Sea
gtagcaacagcaatgggatataaagactctcaagctcgacgtggtgttgagatattcatgcaagattattttcgacacgcaacacgggttggagatttaacgagaatttttttaacttctctagaagccgttcacgcgaaggatgaacctctcctcgagcgaatattcaaaagaaaacccaaaattggtgaagagtatgctgttatccacaatagattagcaataaagtcagaagaaaaatttttaaagaatcctataaatttgttaaaattattttcagaggcacttcggactggtttattgattcaccccaatgctatgagattagtttctgccaacttatcgtccatagataaagagtttaggcgatcgccagaagctcagactatttttttagaattattactcaaacacggcaatccagagagagctctacgccgaatgaatgaattgggttttctggcgaaatttattccagaatttgagccgatcgtagccatgatgcagttcaatatgtaccacagctacactgttgacgagcatacaatccaatgcctaaaaacattagcacaaattgaaaagggcgaattggttgaggaattaccaatcgcaagctcaattttgaaagatggggttaaccgtaaggtaatttatgtagcgctattacttcatgatattggtaaagggcgctccgatgaccactcaatattaggagctaaaattgcaaggcaagtttcacccaggttaggcctgaaaaaacaggaaacagaaaccgttgagtggcttgttagatatcatttgctgatgtctgatatggcacagaaaagagacatatc

SEQ ID NO: 254653 - DNA, 850 bp, Unknown
  Bacterial polypeptide expressing nucleotide sequence isolated from the Sargasso Sea
gcttctagaagatgtgaagatttcctttggcatattagatgccaattgcattttttagaaaaaaatccaaatgatgtaattaactttaatgttcaaatggaaatggctgataaacttggataccatgatagaaagggactaaagccagttgaaagatttatgaagcattattttcttactgcaaaagaggtaggagatttaaccagaataatatgttctgttcttgaagagagacaaaaagataagttttcatttttttcatacataaaaaagatatttacaattccagcaaaattaatttcttctggtggaagtttaggtctttatgtatctagtggaaggttaaatatatcaaatgaagaggttttcaaaaaagatccttcaaaaataattttattttttgattttttagaaaagaagaatttatttgcacaccctaatgcaattagactcataaggaagtcaacaaaattaattgatcataaattaagaaacaatataagaactaatgaggttttcactaatatattaagcagtcctgaggcagaaaaaacacttagagccatgaatgaaagtggagttttagggaagtttgttcccgactttggaaaaattgtaggattaatgcaatttaatatgtatcaccattatacagccgatgagcatttaattaaggcagttggggaactaaacaaaatctttcactcagaaaacaaagattacactatacttaattcattaagtcttgatgaagaagaaaagagagttctatctttagccattttctttcatgatatagctaagggaagagaaaatgatcattcagaagaaggacaaaaagtagtcaaaa

SEQ ID NO: 254654 - DNA, 649 bp, Unknown
  Bacterial polypeptide expressing nucleotide sequence isolated from the Sargasso Sea
catggatgccagcctgctttccccccacctgttacccgacgctcagctcacccgcgagaactgcaaggagtacctgagccgttttctcggctggctgcacgcccgcttcgatgccggtgacaacatcatcgaactggtggctacccgctccgaatacatggacgagctgctgacccggttgtggcaaaagttcggcttcgacaagacggagctcactctgatcgcggtgggtggttatggccgtggcgaactgcacccccactccgacatcgacctgctgatcctctacgaaggggacgagttggacgaggtgctggggctgcgcatcggtgagttcatcaccctgctgtgggatctcaagctggaggtgggccaggcggtgcgcaacgtagccgagtgtctcgagcagggacgcggcgacatcacggttgccaccaacctcatcgaggcgcgctacatcaccggccgcgaggcgggcttccagcagctcaaggaggccaccggcccccagcacttctggccaagcgagcagttcttccagggccaacgcgaagagcaggcccagcgccaccagcagtttctcggcaccgccctacagctggagccggacctctcagagcatccggggcggcctgcgcgacatccagac

SEQ ID NO: 254655 - DNA, 955 bp, Unknown
  Bacterial polypeptide expressing nucleotide sequence isolated from the Sargasso Sea
tgagagtggtgtctttggtaaatttttacctgattttgggcgcattgtcgcaatgatgcaatttgacatgtatcatagttatactgttgatgagcatactttgaaagccataggcattcttcatggcattgaaaatggggagctttttgacgctgctcctgttgcaactgaagcgatgcctgaagttggctcacgccgggcactttttgtcgcgatgttgttgcatgatatagcaaagggaaggggtggtgatcactctgttattggatcagatattgcattagccctttgtccaaggttaggactgacgtctgaagaaactgacacggttagttggctagttttgaatcatctaatgatgagtaagatagcctttcgatatgatttaaatgatcctcaaaccatcaaagattttgcagctattgttcaatcaccagaaagactaaaacttttacttgtattaacggttgctgatattcgggcagttgggccaaatgtttggaatggatggaaagctgcgttgatgcgagacctttattaccgatgtgatgcggtgctaagaggtgcagatcctgcagtaattgcgcaaggcaatgccgaagaggcacgtcttgaagcgcggcaacagttgcgtgattgggacggaccacgttttttagcccatgcagcgaatatgccggtaatttattggactggttttgattgtgaaagtcatgtgcgtcatgcccggctctgtgagaaatttgacgaacttgatgttccacttttgattgactttctgcctgatccagagcgtcgaatgaccgaactaactgttttgactgttgatgacccgggtttgttttcgagaatcgccggagcagttgcggcggctggtgctaacatcgttggggcgcggatcactacttgtcatgatgggaccgtacttgatgtttttcttttgcaagacatgcaa

SEQ ID NO: 254656 - DNA, 895 bp, Unknown
  Bacterial polypeptide expressing nucleotide sequence isolated from the Sargasso Sea
catggaaaatacaataaacgataagtctcttttcgacaagaaggcttttggaaatgagctaaaagaaacaaaagaaccattattactatttaaaaaaatattaaagaatggttaccattatttgactgagtgtttcattcccggcaaaaatattgaattgcttgttaaaaaacagacatggtttgttgaccaattaattacttctgcatggaaaattttttttgatagtgacgaattatgtttagttgcagttggaggttacggtcgatctgaattattacttggttcagatattgatttaatgattcttataaaaccccacaaaaaaaataaacataaaaaagaattggaacattttctaacttttttatgggattttgggttagaggttggacacagcgtaagaacaataaaggaatgccagtatgaagcaaagaaagatataaccacaatgacaaatataatggaagccagatgtattattggcaataacatactctttgaagaaatgtgcaaattaacatcgcctaaaaaaatatggccaactgataattattttgaaaaaaaaatacacgaacaaaaaaatcgtcataaaaaattcaatgatactgcatataaactcgaaccgaacattaaagaatctcctgggggtttacgtgatatacaaatgataggttgggttgcaaaacgacattttgataatatcgatttgaaaaatcttgttaaacataaatttattacaagtagtgaatacgaagttttaaggagaggaagaaaccttttatggggagtacgttttgccctgcatatgttgacaaaaaggcgtgaggatagattacttttcgaataccaaagaagtatagctgaacttttcggttttaaagaaaaaaataat

SEQ ID NO: 254657 - DNA, 926 bp, Unknown
  Bacterial polypeptide expressing nucleotide sequence isolated from the Sargasso Sea
ggttttcaaaaagattctgggttactagcagttgaaaattttatgcaaaaatattttttacatgcaaaaaacattggtgagttaactagaattctgctttcaaaaatggaatctatgcatgtaaaaaaaagtcctagcttattaaaaaaaataaaatctgcaatttcaaacaataattcaatactggataaaggttttattatttcaaatggccgtattgatgtaattgacaaagataaatttttaaaagaaccattaaatcaaattaaattatttcaaaatggtttaaagagtagacgtttgatccatcctaattcgcttcatttaatttcaaaaaatattaataatgttgatttaaatttcttaaaaaattctgaggcttcaaaaatttttattgatgttcttctaaattatggagatccagaaagagcacttagaaggatgaatgaggttggttttcttgggaaatatatcccagaatttcaaaaaatagttggtatgatgcaatttaatatgtatcataaatatactgttgatgaacatattatccaatgtgtaaaaatcttatcgcaaattgaacagggttttcttagagaggatctgcccttagcttcgaaaattttaaaggatggaattaatagaaaagttctttatttagctctattattacatgatgtaggcaagggacaaactgagagccatagtatattaggatcaaaaattgcaactaaggttactgaaagattaggctttgaaagtcatgaagttgaattaacatcatggcttattaaaaaccatttactcatgtctgatatatcccaaaaaagagatctttcagaagaaaaaaccatccgtgattttgctaatgttgttaaaactacaaatagacttcgactgcttacagttttaacagtttgtgatattag

SEQ ID NO: 254658 - DNA, 729 bp, Unknown
  Bacterial polypeptide expressing nucleotide sequence isolated from the Sargasso Sea
tgaggagtttttgtgggccgttcgatgtcaaatgcatcatctatctgaaagggcaattgagcaattgagctttgaccttcaggtcgaagtagcaactgcaatgggatataaagactctcaagctcgacgtggtgttgagatattcatgcaagattattttcgacacgcaacacgggttggagatttaacgagaatttttttaacttctctagaagccgttcacgctaaggatgaacctcttctcgagcgaatatttaaaagaagaccgaaaattggtgaagagtatgctgttatccacaatagattagcaataaagtcagaagaaaaatttttagagaaccctataaacttgctaaaattattttcagaggcacttcggactggtttattgattcaccccaacgctatgagattagtttctgctaacttatcgtctatagataaagagtttaggcaatcgccagaagctcagactatttttttagaattattactcaaacacggcaatccagaaagagctctacgccgaatgaatgaattgggttttctggcgaaatttattccagaatttgagccgatcgtagccatgatgcagttcaacatgtaccacagctacactgttgacgagcatacgatccagtgcctaaagacattagcacaaattgaaaagggcgaattggttgaggaattaccaatcgcaagttcaattttgaaagatggggttaaccg

SEQ ID NO: 254659 - DNA, 931 bp, Unknown
  Bacterial polypeptide expressing nucleotide sequence isolated from the Sargasso Sea
gcaatcgaagaagagcatcaacggaaacctcgcctaaaactgtctgccccttggaggcgcccgaagagccttggagattttgagttagaggggggacgactgaacgcaaaagatccagaaattttcagtaaagatcctgttaattttttaagaatgtttcatgtggcacaagagaatgatttagagtttcatccacaaatactaaaattagttaaccaagatctcaaatttatagataaaaaactccgacatgatcaaaaagcaaatagcttgtttttaaaaatattaacctcaaagaaaggaccggaacgaatactccgccgtatgaacgaagcgcaggtttttggaaggtttattccagattttggaaaagtggtcgctcaaatgcaatacgacatgtaccacgtttacacagttgatgaacatacaataataatgcttggtattctatttaagatagagaagcgtgagttagaggaaatcgcgcccactgcctcaagcgtagttggaaaagtcatatcaagaagagagttatatgttgccgttcttctgcatgatattgcaaaaggacgacgcggcgatcattccattttgggggagaaagtggctcgccgattatgtccacgttttggaatgactgcagaagagacagagacagtcgcatggcttgtacgatggcatttgctaatgagctacgcggcttttaaacgcgatattaatgatcccaaaaccatagaggactttactgcaattgtgaggtcaccggaaagattacgtttactgttagtgcttacggtggcggatattcgagcagttgggccaaatgtttggaatagttggaaaggaactctattgagcgagttgtactggttagccgaggaagccttgttgggtcatagctctattaaagcacaaacagctcggatgaaaa

SEQ ID NO: 254660 - DNA, 871 bp, Unknown
  Bacterial polypeptide expressing nucleotide sequence isolated from the Sargasso Sea
aatttcgaaaaaagccagactaggtaaaagatctgcaaaaaactcagttgaaaagatgatgaaaaaattttatgaaatggcggcagtgctttcatactttaatgaaattgtttatgagaaatataatgaaaaatatcctaaaaaaaactattttcgaaaaattgaaggtattcacaaatatggcagcaaaattggaattgaaaatattaatctaagtgataataaaaatcttatatttgaaatatttattgaaattggtaaaagtaaaacaataaattcaattgatacaagaactaaatctcttattcgaaaaaacattaatttaatcgataaagagtttagaaaaaataaagagtatgcaagtcaattcttagaaatattaagatctaaatataacctttcatcaatattacgaacaatgaaatcacttggcgttatgcaggggtatattccagaatttaagggtgttgtaggacaaatgcaatttgatttatttcatacttacactgtagatgaacatacatttaaagtggtaagaaacatgagacaaatgaaactaaataagcaaactggatttgaattagagcatgagttaataaataaattaccaaaagtagaaattttatatcttgcaggtttgtttcatgatctcggaaaaggcaaaggcggagatcactcagaaattggtgccaagacaagtcaaagatttgcaaaaagattgggtatgtctaaaacagatgcagatttaatatcttggcttgtaaagaaacatcttataatgtcatctatctcccaaaaaaaagacattggtgaccccaatacagttgatgaatttgcttcagaagttgtatcaaaagtgaaaaaattagac

SEQ ID NO: 254661 - DNA, 830 bp, Unknown
  Bacterial polypeptide expressing nucleotide sequence isolated from the Sargasso Sea
actggcattatttttttagatattctgcgagtctctgaggcggtgcctaaactacttaggcagatgcatgagacgggcgttctgggccaagtttgccccgacttcaagcgtattaccgggcatgggcagtttgacaggtatcaccactacacggttgatgcgcacaccatcgttgctgtatcccatctccgggaattagagaaattcattgaagacaaaagctccgcttccctggtggtctcgctcttgaaggaacttgatcggccagagcttctgtacattgcggtcatttatcacgacattgcaaaagggagagggggagatcattctgagttgggggcagaactagcgaaaaagtttagtgttagaatgggaatctcgtcacatgatgcggagttaatttcgtggttggttttaaatcacttaaacttttccaagacggctcagcaccacaatttgaatgacacagctgtcattgaagagttcagtaagtttataggtgacaggcaaaggctaatttatttattcctcctgactattgtagatgttgcggcggtcggtccggggaccctcactgattggaagctgcatttattcgtccaactgttctatgcaactgacgattttcttcgaaccggtcggttagatgttaccgaacagctcgagcgcattgactcgcgaaaaacggcggcttctttgcttttggcccccaaagatagagcgtcccttcaatcccaggtggaaatacttcccgaaaccttgttgctgaatttagcgccagaatccatagtggcagtttgtgatgcactcaaagctccgttcggcataga

SEQ ID NO: 254662 - DNA, 1807 bp, Unknown
  Bacterial polypeptide expressing nucleotide sequence isolated from the Sargasso Sea
tttgatctgtcaaccaaagcaaatttttgatacaactaaagtcaaagtgtttttaaagtcagatagggctgaaagaactgaattagtaagtctgttgaaagaattgaaatcgtcgggatttgaaaaaatttcactcgaacttactaaaaaaccccttaatgccaaaaaggccgtcaccagttatgcttttctaactgactgcctggtaaaagccacttgggagtttgcaacgaagataaaatttccaacatataatccaacggatgcagaaagattatctattatttccgtagggggttatggaagacgtgaaatggccccttactcggatgtagatttgctttttttaacaccctacaaaattacgccttgggccgaaagtgtaatagaaacggttttataccttctctgggatttgaaactcaaggtagggcattcttctcgatctatacgagattgtttgcgaatgggaagtgaagactacacaattcgaacggctatgttggaacatagatttgtttgtggggacaccggtttagcctctgaattaaatgaaaaactttggaagaatttatttgaaggaactgctaaagaattcatttcagctaaattaaaggaaagggaaaatagacatgaaaaatacggccaaagatacatggtcgaacctaacgttaaagaagggaaaggcggactacgtgatttgcagtccctttattggatcgcaaagtacgtttataaaactcaaaatataagtgatttaattaagctaaatgtattcagatcggacgaatatgaacaatttgacaaagctgaggagtttttgtgggccgtacgatgtcaaatgcatcacctatctgatcgggcaattgaacaattgagctttgaccttcaggtcgaagtagcaacagcaatgggatataaagattctcaagcccgtcgtgctgttgagatattcatgcaagattattttcgacatgcaacccgtgttggagatttgacgagaatttttctaacttctctggaagcggttcacgcaaaggatgaacctcttctcgagcgaatatttaaaagaagacccaaaattggtgatgagtacgccgttattcacaatagattagcagtaaaatcagaagaaaaatttttggagaacccaataaatttactaaaattattttcagaagcacttcggactggtttattgatccaccccaatgctatgagattagtttctgcaaacctatcgtccgtagataaagagtttaggcaatcgccagaagctcagactatttttttagaattactactcaaacacggcaatccagagagagctctacgccgaatgaatgaattgggttttctggcaaaatttatcccagaatttgagccaatcgtagccatgatgcagttcaacatgtaccacagctacactgtagatgagcatacaatccaatgcctaaaaacattagcacaaattgaaaagggtgaattggttgaggaattaccaatcgcaagctcaattttaaaagatggcgtaaaccgtaaggtaatttatgtagcgctattacttcatgatattggtaaagggcgctccgatgaccactcaatattaggagctaaaattgccaggcaagtttcacccaggttaggcctcaaaaaacaggaaacagaaacagttgagtggctcgttagatatcatttactgatgtctgatatggcacagaaaagagatatatctgatcctcgaacagttcgtgattttgcaaaagcagttcaaagcgtcaaaaggttagatcttttaactgtctta

SEQ ID NO: 254663 - DNA, 1661 bp, Unknown
  Bacterial polypeptide expressing nucleotide sequence isolated from the Sargasso Sea
gctttatctgatttctataaatgaagtatctaaatctaatctttttaaaaatgaggtaaaagatgcggttaatgcatataactttataaaatcattgcgatttgcaaccaacataattgctaataaaaatagattggattttgaaacacaagtagagatatcaaataaagctaaattaactaaaaataaaacaaacatgtcggttgagttaatgatgaagagatattatgagatggcatcagtgctgtctcactttaataatattgtttttgaaaaatatcttgaaaagaacatttctaagattaaaaaatcaattgggatatataaaaataaaaataagataggtattaacgtagatagtctaaaacaaaataaaaatttaatttttcaaatatttattgagattggtaaaaataaaaaaattaatttaattgataccgatacaaaatcaatcttaaaagaaaatacatatttaattaatgatcaatttagaaaaaataaattatatgccaatcaatttttagaaattttaaaatctaaatataatttatcatcaatactaaaaacgatgaaggatcttggtattttacaaaaatatattccagaatttggagaagtggtaggtcaaatgcaatttgatttatttcatgcctacactgtagatgagcatacttttaaagttgtaagaaatatgagacaaatgaagttatataaacaaaagggttttgaaattgaacatgaattaattaataagatacctaaaattgagattttatatatttctggattatttcatgatttgggcaaaggaaaaggtggcgatcattcaaaaataggagcaaaaacaagttttgatttcgcaaaaagaattgggatgtctaaaactgatgcaaacttaatttcttggcttgtgaaagagcatttaattatgtcttctatctcacaaaagaaagatatctctgattatcaaactattgaggaatttgctgcaaaagttaagcaaattgaaaaactagattatttatatttgctaactgtaaatgacattagggctacaaatccatcattatggaatggttggaaacatcaattactcaaagatttgtatagattaacaagattaaaaataaataagcagcctatgcaagcatcctcggagattgcaaaagacagaaaagcaaatgtttttgataactttaagaagaaagaccatccatttttagaaaattattttaattttcttagcaaagattatcttaataagatatctagcgaatccttaaaatggcaagcaaaattaataataaataataatagtaatgatttaattgtcggatgcagaaaaagatttgagaatttaattgaaatttttattagagtaaaaaattcagatggtctatttttaaaaatggctaggatcttagaacactctggacttgaagtaattgatgcaaatatcttcacatcatcggataatgtatttgcagtaaatacatttatagcaaaatttactcatcatgaaagaccttttactaaagatgagttaaaagaattagctaatagaattagaaaaaactttaagtatttctcaaaaataattcaaatcccaaaaaagcctataaaaagagtaagttttgaaaagattataaatatttctcatt

SEQ ID NO: 254664 - DNA, 951 bp, Unknown
  Bacterial polypeptide expressing nucleotide sequence isolated from the Sargasso Sea
tttgcaaaaagcaaaaaaaaatcttgaacaaggaaattataaaggctctgaatgtgcacgagaaatagctaatctttatgaccatgtcattaaaaattactatcaatatttaaacgctcataattatatttcacaaaataaaactgattttgaaaaaatggtaataatagctactggaggttatggtagagggaaaatatcacctggatcagatattgatcttttatttttaatgccttttaaaaagactgcttgggcagagagtgtaactgagaacttgctatattttctttgggacttaggtctaaagattggccatgcatcaagaaatattaatgagtgcttaactctttcagctaatgaccagacaatcacaacatcacttttagatgcaagatatatttgcggagacatagaagtaaaaaaagtttttgataaaaaatttaggaatacaatttcgaaaagatcatcaaaagaatttattgatgcaaagcttgaggagagggaatccagacatattaaggaagggcaatcaagataccttgttgaaccaaatataaaaaatgggaaaggaggtctgagagatttagagagcttatcttggatgacaaatttttgttatcaagcttctagaccagagcaaatgtttaaaaaaggtgttcttactgagagagaggctgaaagctttaagaaatgtgaagattttctttggtatattagatgtcaactacatttcatagagaaaaatccaaatgatataataaattttaatgttcaaattgagatggctgataagcttaattataatgatagaaaaggactaaaaccagtcgaaagatttatgaagcattattttcttattgccaaagaggttggtgatttaacaagagtaatttgttcagatcttgaagaaaaacaaaaaaataaaaattcattaatttcaatcataag

SEQ ID NO: 254665 - DNA, 1297 bp, Unknown
  Bacterial polypeptide expressing nucleotide sequence isolated from the Sargasso Sea
gtgatagctaatacgcgccgtttcatgcgcgccgactacacagaccggttccccgtatcgacccggattgcccgccgcttgagggatccaaggctgctatacattgccgcattgtttcacgacatcggcaagggtcgaggcggcgatcactcggagctcggggcagtcgaagccgaaacattttgcatcgatcacggtttatccaagaccgacacccaactgattgtctggctggtaaagaaccatttgttgatgagccaaatcgcccaacgacgggatatctccgatcccgaagaaatccagcgcttcgccgagattgtagtgaccgaggagcgcctagattacctgtatacgttgaccgtggccgatatcgcgggcaccaaccctgagctctggaacgcatggcgtgcttcgctgatgcgtcagttatacacccaaacccgtcgagccctgagccgcggtttggataacccgctggaccgggacgaagtcattagggaaaccaagcgcagtgccgctgccgcattggaataccggggcttcctagaggttgagctggaagggctatggtcaacgcggggcgaggactattttctccgggagcgcgccgaggatattgcctggcacaccgaggccattgcggaccacaaccacgagcggggtgcgttggttttggtacggcaggccggcgaatcacccatcggtaatgcgacccagatttttgtgcatacgttggacgagcccagtaccttcgcccggatctgcgcagcgttagagacgctggacctcaccatccacgacgcacgcatatacagcgacaccgatggcagcactcttgatacctttttcgtcttaaaaagtgatggggcctctctcgacagccatccagatgcctttcaagagatcgaagacaggattcgccaacacctcagtgagtctgagctgaaacccgtgtcccgacacacacccagaacagtcaaagcctttaccatacccaccactgtgcagttctctcaagacgaaaccagtcatctgacgacgcttgaagtcaccactgccgaccgacccggattactggcgcgactggggtcagtactgtctggatacgatgtatcggtgcagggcgccaagatccaaaccctgggcgagcgcgtccaagatatcttttttctcgccgatgcagcaggcggtcaattaaaggatgatgctttgctcgcctcgcttgaaaacgatcttatccaggctctcggcggcggccagcaggaagacagcgccgtgtcggagctgagtatttgaa

SEQ ID NO: 254666 - DNA, 1633 bp, Unknown
  Bacterial polypeptide expressing nucleotide sequence isolated from the Sargasso Sea
tatgaaagaaaagttcgaatcaataaataaagatttctataaaaatattacagatatatatctagaaccaagaaagattaataaatatctgcgaaaacattcaaatatcattgaaaatttaattaaaagaaagtttaaagatctgaacttacatgaaaactttgtcatctatgctaatggcggttttggtagaaaagaaatgtttccaacatctgatgttgatatatcaatcgttgaaataaaaaaaaataagaactttaataatttagaaaaatttataagttatttgtgggatcaaggcttcaaggttggacattcggttcgaacgataaaggatataaaaaatatatcaaaatctgaaataaaagagtttacttcgtaccttactaggcgctcaatcatttcaaataaagatattgataaagagataactatgactttgtccaaattatggacaaaaaataatttttacaatgaaaaatacattgagcagcaaaagagacataatcagttcttttcaactgcttttaatcttgagcctgacttgaaagaatcacccggtaccatgcgagactttcaaactgctctatggatactgcaacactgctttggtcttgattctcaacctgcaatcaaaaaatcgaaactattagatggtcaatataaaaatactgtgattgcctataattttattaaatttcttaggtttcacgccaatctcttaactgacagaaacagactaagctttgaatctcaaatagaaatctccaagaatataaattctatctccgaaaaagatactaaatcaactgttgagaagatgatgagaaaatattacgaaatggctgcggacatatcatattttaacagtacagtgtttgaaaaatataacgaaacatacccaaaaaatttatttaaaaatgcaaatccaatttataaacataaaagtaaaatcggaataaatgaaaacattgatatcaaaacaaataaagatcttatatttaagttatttatagaaataggtaaaagtaaaaaaataaatttgattgatactaaaacaaaagcattgctaagaaaaaacttaaatcttattgatcaggaatttcgaaaagataaatattttgccgaacaatttatagatatcttaaagtcaaaacataatctttcatctattcttaagactatgaagagccttggaattcttcaaaaatatattcctgaatttggtgaagtcgttggacaaatgcaatttgatttatttcatgtttacacagttgatgaacatacattaaaggttgttagaaatatgcgtcaaatgaaactttatgaacaagcgggatttctacttgaacatgagttaattaataaacttcctaagattgaaatactatatattgcgggtttatttcatgatcttggaaaaggcaaaggcggagatcattcagaaataggagcaaaaacaagtttcaattttgctaagagacttggaatgtcttcaacggacgcaaaactaatatcatggcttgtaaaaaaacatttaataatgtcttcgatttctcaaaaaaaagatatttcggatcctcaaactgtaaatgagtttgctaaagaagtagaacaaaatgaaaaattaaat

SEQ ID NO: 254667 - DNA, 1397 bp, Unknown
  Bacterial polypeptide expressing nucleotide sequence isolated from the Sargasso Sea
aatgaaagaaaaaatacaatccatcaataaagaattctataaaaattttcaagaaatatactcaaaaccttcaaaaacaaataaatatctaaaaaaatattcaaatattgtagaaaaagatataaaaaataaatttcttgaattaaatcttaaccaagattttgtgatatatgctaatggtggattcggaagaaaagaaatttttcctaattctgacattgatttatcaattgttgaaaaaaataaaattaaagattttacaaatctagaaaaatttatttctttattgtgggatgaaggatataaaatcggacactcagtaagatcgatatctcacatcaaaaaaatatcaaaagaagatttaaaagaatttacttcatatttaacaagaagacctattatctcatgcgatgaaatagatataaaaattactaaagctctttctaggttatggacaaaaaacaacttttataacgggaaatatattgaacaacagcagcgccatagtgaatttttttcaactgcgtataacttagaaccagatttaaaagaatctccaggaactttaagggatttccaatcagctctatggattcttcagcattgctttgaacttagttctgtcgaagaaatctcaagatcaagattactaaatggagaattaaataatgcaataaatgcgtataactttataaaatctttgagatttgcaacaaatataaccacaaaaaaaaatcgtcttaattttgaagcccaaattgagattgctaagaaggctaaattgagcaaaagaaattctacaaaatctgtggaaataatgatgaagaagttttatgaaatggcttcaacactttcctattttaatgacattgtctatgaaaaatataatgaaaagtttcctagaaattattttaaaaaagttgctggaatatataaatataaaaataaaattggtattcaaaatataaaccttaaaaaaaataagaatctgatattcgaaatttttattgaaattggtaaaagtaaaaaaataaatattattgatactgttacaaaatcactaattaaaaaaaatattaacctaattgataaagaatttagaaataatagaatttacgctgaacagtttttaaccatattaagatccaaatacaatttatcatcaattttaagaaccatgaaaacattgggagttcttcagaaatatattcctgaattttctgaagttataggtcaaatgcagtttgatttatttcatacctacacagtagatgagcatacttttaaagttgtaagaaatattagacagatgaaactttataaacaaagtggatttgagcttgagcatgagttagttaataaattaccaaagctagaaatcctttatattgctggtt

SEQ ID NO: 254668 - DNA, 1327 bp, Unknown
  Bacterial polypeptide expressing nucleotide sequence isolated from the Sargasso Sea
aatgaaagataaggtttcaagaattaataatgaattcaataaaaactttccagaaatttatttaaaaccatcaaaggttaataaatttcttaagaaatataccaacgaagttgaaaaagaaattaaaaataaatttctaaaactaaaacttgataaaaatttcgttatatatgccaacgggggttttggtagaaaagaaatttttccaatatctgatattgacatatcaattgtggaaaaaaataaaccaaaagattttaaaaaccttgaagaatttatttcttttttatgggatcaaggatataaggttggtcattccgttagaacaatttcagacattaaaaaaatatcaaaatcagatttaaaagaatatacgtcttatttaacaaggcgccctatcatctcaacaaatgaaatggataaaaaaattaattatgctttatcaacaatttggactaaaaataatttctataatgcaaaatatgttgagcaacaacaacgacatagtgaatttttttctacagcttataatttagagcctgatttaaaagaatctcctggaacacttagagattttcaatctgcattatggattcttcagcattgttttgatttgaaatcagttaatgaaatttcaaagtcgagattattcaatggagagctaaataatgcaattgatgcatataactttattaaatctttaagatttgctactaacatatccacaaataaaaatagattagattttgaagctcagattgaaatctctaaaaaagcaaaacttggcaaaagaactacaaagaagtctgtagaaatgatgatgaaaaaattttatgaaatggcttcttcactttcatatttcaatgaaattgtttacgaaaaatataatgaaaagtatcccagaaagagtttttttaaaaaaattgaaggtattcataaatataaaaataaaattggtattcaaaatattaaccttaaaaataataaaagcatgatatttgaaatatttattgaaattggcaagagcaaaattataaattcgattgatactgaaactaagtctctaattaggaaaaatataagtttaattgataaggagttcagaagaaacgagcactatgccaatcaatttttagaaatactcaaatctaaatacaatctatcctcaatactaagaacaatgaaatcgttaggagtgttgcaaaagtatattcctgagtttgatagtgttgtaggtcaaatgcagtttgatttatttcatgtttacacagtggatgaacatacatttaaagttgtcagaaacatgagggcaaatgaaattaaataa

SEQ ID NO: 254669 - DNA, 1207 bp, Unknown
  Bacterial polypeptide expressing nucleotide sequence isolated from the Sargasso Sea
ataggtcaaatgcaatttgatttatttcatgtttacacagtggatgaacatacatttaaagttgtcagaaacatgaggcaaatgaaattaaacaagcaacctgggtttgagttagagcatgaattaataaataaattaccaaaaatagaaattctgtatattgcaggtttatttcatgatcttggcaaaggcaaaggaggaaatcactcagaaattggtgcaaaatcaagtttcagatttgcaaaaagactaggaatgtctaatacagatgcaagtttaatatcttggcttgttaaaaaacatctaataatgtcatccatatctcaaaaaaaagatattgccgatccaaatacagttagtgaatttttagcagaggttaagcaagatgaaaaacttaactatttatatctgcttacaatcaatgatattagagcaacaaatcctgcattatggaatggttggaaacatcaactattgcgagatctttatttacttacaagatcaaagattaataaggagcccgtaaaggcatcttctcaaatatctcttgatagacaaaaaaatgttattaataattttaaaaataaagatgaaaagctgttaataaagaaacattttaaaaattttgaagacagttacttcaataaacattcatcaaagtctcttatatggcagtcagagttaattataaaaaataaaaataataaacttattgttgggtgtaaaagaaaatttgatgatcttattgaaatatttattaaggttgaagattcgccaggacttttctataaatcagtaaagatacttgagcatagcggtcttgaaataatagatgcaaatattttttcatctgaaaataataaacttgcagcaaatacttttattacaaaatattctcgacatgatagaaccctaaataaatctgagttaactgagctttgtacaaagattgaaaaaaatttcaataaagaagatggggcctccaagatgcaatcactaaagaaaaaaaatacaagatttgaaaaaaatataaaaattaatgaatctattaattttgataaaaatagaaatttaataactattgaaacagttgacagttctggcttgctagctaatattgctaaggtatttcttgaaaataaggtttcaatttactctgcaagaattaatactctaggtgagagagttgaagatacttttgaaattg

SEQ ID NO: 254670 - DNA, 1483 bp, Unknown
  Bacterial polypeptide expressing nucleotide sequence isolated from the Sargasso Sea
aatgaaagataaggtttcaagaattaataatgaattctataaaaactttccagaaatttatttaaaaccatcaaaggttaataaatttcttaagaaatataccaacaaagttgaaaaagaaattaaaaataaatttctaaaactaaaacttgataaaaatttcgttatatatgccaacgggggttttggtagaaaagaaatttttccaatctctgatattgacatatcaattgtggaaaaaaataaaccaaaagattttaaagatcttgaacaatttatttcttttttatgggatgaaggatataaggttggtcattccgttagaacaatttcagatataaaaaaaatatcaaaatcagatttaaaagaatatacgtcatatttaacaagacgccctatcatttcaacaaatgaaatggataaaaaaataaattatgctttatcaaaactttggactaaaaataatttctataatgcaaaatatgttgagcaacaacagcgtcatagtgaatttttttctacagcttataatttagagcctgatttaaaagaatctcctggaacactaagagattttcaatctgcattatggattcttcagcattgttttgatttgaaatcagttaatgaaatttcaaagtcgagaatattcaatggagaactaaataatgcaattgatgcatataactttattaaatctttaagatttgctactaacatatccacaaataaaaatagattagattttgaagctcaggttgaaatttctaaaaaagcaaaacttggcaaaagaactactaagaagtctgtagaaatgatgatgaaaaaattttatgaaatggcttcttcactctcatatttcaatgaaattgtttacgaaaaatataatgaaaagtatcccagaaagagtttttttaaaaaaattgaaggtatttacaaatataaaaataaaattggtattcaaaatattaaccttaaaaataataaaagcttgatatttgaaatatttattgaaattggcaagagcaaaattataaattcgattgatactgaaactaagtctctaattagaaaaaatataagtttaattgataaggagttcagaagaaacgagcgctatgccaatcaatttttagaaatactcaaatctaaatacaatctatcctcaatactcagaacaatgaaatcgttaggagtattgcaaaagtatattcctgagtttgatagtgttataggtcaaatgcaatttgatttatttcatgtttacacagtggatgaacatacatttaaagttgttagaaacatgaggcaaatgaaattaaacaagcaacctgggtttgagttagagcatgaattaataaataaattaccaaaaatagaaattctgtatattgcaggtttatttcatgatcttggcaaaggcaaaggaggaaatcactcagaaattggtgcaaaatcaagtttcagattgcaaaaagactag

SEQ ID NO: 254671 - DNA, 1153 bp, Unknown
  Bacterial polypeptide expressing nucleotide sequence isolated from the Sargasso Sea
ggcaaaagaactacaaagaagtcagtagaaatgatgatgaaaaaattttatgaaatggcttcttcactttcatatttcaatgaaattgtttacgaaaaatataatgaaaaatatcccagaaagagtttttttaaaaaaattgaaggtattcataaatataaaaataaaattggtattcaaaatattaacctcaaaaataataaaagcttgatatttgaaatatttattgaaattggcaagagcaaaattataaattcgattgatactgaaactaagtctctaattagaaaaaatataagtttaattgataaggagttcagaagaaacgagcactatgccaatcaatttttagaaatactcaaatctaaatacaatctatcctcaatactaagaacaatgaaatcgttaggagtgttgcaaaagtatattcctgagtttgatagtgttgtaggtcaaatgcagtttgatttatttcatgtttacacagtggatgaacatacatttaaagttgtcagaaacatgaggcaaatgaaattaaataagcaacctgggtttgagttagagcatgaattaataaataaattaccaaaaatagaaattctgtatattgcaggtttatttcatgatcttggcaaaggcaaaggaggaaatcactcagaaattggtgcaaaatcaagtttcagatttgcaaaaagactaggaatgtctaatacagatgcaagtttaatatcttggcttgttaaaaaacatctaataatgtcatccatatctcaaaaaaaagatattgccgatccaaatacagttagtgaatttttagcagaggttaagcaagatgaaaaacttaactatttatatctgcttacaatcaatgatattagagcaacaaatcctgcattatggaatggttggaaacatcaactattgcgagatctttatttacttacaagatcaaagattaataaaaagcccttaaaggcatcttctcaaatatctcttgatagacaaaaaaatgttattaataattttaaaaataaagatgaaaagctgttaataaagaaacattttaaaaattttgaagacagttacttcaataaacattcatcagagtctcttatatggcagtcagagttaattataaaaaataaaaataata

SEQ ID NO: 254672 - DNA, 2503 bp, Unknown
  Bacterial polypeptide expressing nucleotide sequence isolated from the Sargasso Sea
catgaaagaacaaatttcaacaataaacaatgactacattaatgatttctcaaatatttaccttgatccgtctaaagtaaacaaatatctaaataattattcaaaaattattgaaaaagatatcaaagataaatttattaaactaaatctcaataaaaattttgtaatttatgctaatggtggctttggaagaaaagaaatgtttccaagttcagatgtagacatatctattatagaaattaaaaaaacaaaaaattatgaagatctagaaaaatttatttcatatctatgggatcaaggatataaggttggacattcagttagaacaataaaagatattaggaaaatctctaagaaagatgtcaaagaatatacatcttatctaactagaagaccacttattacaaataatgttatagataaaaagatatctaatactcttttaaatttatgggataaaaaaaaattttttaataggaaacttcaggaacaaaaagaaagacatagccaatttcattcaactgcatataacctagagcctaatttaaaagaatcacctggcacattgagggattttcaaactgctttatggatattgcagcattgctttaatttgaattcaataaatgagatatctgaatcagatatatttaaagatgaaatagaagatgctattgatgcatataattttattaagtcgttaagattcgcaacaaatataacatcaaaagaaaacagattaaattttgaaacacagttagaaatttcttctttagctaaattaagaaaaaataaaaccaataagacagttgaagaaatgatgaaaaagtattatgaaatggcatcggtgttatctcattttaatagtattgtctttgaaaaatttgatgaaataaattcatctcgttttaaaaaatataaaggtatatacaaacataaaaataaaattggaattaatgtagctgaccttagcaagagtaaggaattaatatttaaaatatttattgaaattggtaaaaataaaacaataaatttaatagatacggaaacaaaatcattattaaaaagaaatgcgaatttaattgatagccaatttagaaaaaataaaacttttgctaatcaatttttaaaaatattaaaatccaagcacaatttgtcatcaattcttaaaacaatgaaagatcttggcattttgcagcaatatattcctgaatttggagaagtggtaggccaaatgcagtttgatctatttcatgtttataccgtagatgaacatacttttaaacttgtaaggaatatgaggcaaatgaaacttcatgaacaaaaaggtttcgaaattgaacatgagttaataaataagattcccaaaattgaaattttatatattgctggcctattccatgatcttggtaaaggtaaaggaggagatcattcaaaaataggagctaaaacaagctttaattttgccaaaaggattggaatgtctgacactgatgctaatttaatttcctggcttgtaaaagaacatttaattatgtcatccatatcacagaagaaagatatatcagacaaagaaactattaaagagtttgctgaaaatatacaacaaatcgaaaaattagattatttatatttattaactgtaaacgatatcagggcaactaaccctgcattatggaatgggtttaaacatcaattgcttaaagatctatataagctcactagactcagaataaataaagagcctatgcaagcatcttcagaaattgctttagatcgaaagacaaatgtaatcaagagtatcgagaagaaagatcataagattttagataattactttgatctacttaacaataattatttcaataagatttcaacagaagcattaaaatggcaagcaagactaataatagataacaataataaagacatgattattggatgtaggaaaagatttgaaaatttgatagaagtttttattaaagtgaaaaatacagagggcctttttttgaaaatggctagaattttagaacattctggacttgaggtgattgatgcaaatatctttacttcaaaagataatggttttgctgcaaatacatttataacaaaatatagccatcatgataggccctttactaaagatgaattaaaagaattagcacaaagaattaaaagaaactttaaagatttctcaaaaatacttcaaattccaaaaaagccaataaaaaaagtaagttttgaaaagattattaatatctcgcattctatcaataaagaaaaggatagagatatgattactatagaaacagctgacaggcccggacttcttgttgatattgccaaagtattttttaaaaaagatatgtctatcttctcttcaagaattaatacattaggagataaagtagaggacacatttgaaatagagggtaaaaataaagcaaaaatatctactaacaaggtaaatggaattattaaagctttaaaagaagttgtataa

SEQ ID NO: 254673 - DNA, 1010 bp, Unknown
  Bacterial polypeptide expressing nucleotide sequence isolated from the Sargasso Sea
aaaaaagatataacaataatgacaaatatcatggagtcacgattaattattggaaatgaaaaacttttcaatgaaatgcttaagatcacatctccaaaaaaaatctggacagcaaaaaaattttttgagagcaaactattagaacaaaaaaatcgtcataaaaaatataaccatagcgaatataaacttgaaccaaatattaaagaatcgccaggtggacttcgtgatattcaaatgattgcatgggttgctaaacgtcactttgataatattaatcttaagaatcttattagttataaatttctatctaacgaagaatatgaaactctaaggaatggtagaaacttattatttgcaattcgttttggtttgcacatgattgcaaaaagacgtgaagatcgtcttctttttgattatcaaaaaaatatagctgagcttttcggctttaaaaataatgaaaaaaataaaggaattgaagattttatgaaaatgtattttaaaacagttcgtgaaatcagtagattaaatgaaatactattacaacatttccaagaagatattatatataaaaaaaataaagataaaatcgttaagataaattctcgtttccaaaaaaggaatgatctgattgaaataattaatgaaagtatatttgagcgttatccgtattcattatttgaaatttttttacttattcaacaagacccaaagataaaaggcataagagcaactactatacgctctattagaaaatatatttatctaatagataaaaaatttcgaaacgatgttataaataaaagtttatttatagaaattctaaaacaaccaaatcttgttggtcataaattaagattgatgcataaatatggaattttaggtgcatatatgcctgcattttcaaaaattgaaggactaatgcaatttgatctttatcatatttttacagtagacgaacatatcttaagagtaataagaaatttgagactttttggtttagatgaatataa

SEQ ID NO: 254674 - DNA, 1445 bp, Unknown
  Bacterial polypeptide expressing nucleotide sequence isolated from the Sargasso Sea
tggagttcttactaaatctgaagcagaagcttttagaagatttgaagatttcctttggcatattagatgccaattgcattttttagaaaaaaatccaaatgatgtaattaactttaatgttcaaatggaaatggctgataaacttggataccatgatagaaagggactaaagccagttgaaagatttatgaagcattattttcttactgctaaagaggtaggagatttaaccagaataatatgttctgttcttgaagagagacaaaaagataagttttcatttttttcatacataaaaaaaatatttgaaattccagcaaaattaatctcttctggtggaagtttaggtctttatgtatctagtggaaggttaaatatatcaaatgaagaaattttcaaaaaagatccttcaaaaataattttattttttgattttttagaaaagaaaaatttatttgcacaccctaatgcaattaggctcataaggaagtcagtaaaattaattgatcataaattaagaaacaatataagaactaatgaggttttcacaaatatattaagcagtcctgaggcagaaaaaacacttagagccatgaatgaaagtggagttttagggaagtttgttcccgactttggaaaaattgtgggactaatgcaatttaatatgtatcaccattatacagccgatgagcatttaattaaggcagttggggaactaaacaaaatctttcactcagaaaacaaagattacactatacttaattcattaagtcttgatgaaaaagaaaagagaattctatctttagccattttctttcatgatatagctaagggaagagaaaatgatcattcagaagaaggacaaaaagtagtcaaaaaaatggctaagcgccttggtctttcagagaaagatgaagaaatgatttcctggcttgtgttagatcatcttgtgatgagtgactttgctcaaagaagagatatatccgatcctgtaacaatttcagattttgccgaaaaaattcaaaatacaaaaagactaaagctccttttatttcttaccgttgctgatattagagctgtaggtccaggagtatggaatgactggaaaggtgaattgttaaagaatctttacaacgaaacttacttggctttaacaggaaattattccgagcaggataggctgtataaaacaaatgaaattaaagaaagaataaaaaaagaaataacagaggtaagtaaagaagataaaattagatggtttaatttagtagatgaaaaatattggatatctgtcccagaaaagatccaaatacaaaatttaattacatggcatacaggaataggtgataaagaaaataatattattgatttctataattctgatgattattcctcaaccattttgacagtaataactcaagacaagaaaaggctttttgaaagaa

SEQ ID NO: 254675 - DNA, 1882 bp, Unknown
  Bacterial polypeptide expressing nucleotide sequence isolated from the Sargasso Sea
aatcaaaaaatcgaaactattagatgatcaatataaaaatactgtgattgcctataattttattaaatttcttaggtttcacgccaatctcttaactgacagaaacagactaagctttgaatctcaaatagaaatctccaagaatataaattctatctccgaaaaagatactaaatcaactgttgagaagatgatgagaaaatattacgaaatggctgagtacatatcatattttaacagtacagtgtttgaaaaatataacgaaacatacccaaaaaatttatttaaaaatgcaaatccaatttataaacataaaagtaaaatcggaataaatgaaaacattgatatcaaaacaaataaagatcttatatttaagttatttatagaaataggtaaaagtaaaaaaataaatttaattgataccaaaacaaaagcattgctaagaaacaacttaaatcttattgatcaagaatttcgaaaagataaatattttgccgaacaatttctagatatcttaaagtcaaaacataatctttcatctattcttaagactatgaaaagccttggaattcttcaaaaatatattcctgaatttggtgaagtcgttggacaaatgcaatttgatttatttcatgtttacacagttgatgaacatacattaaaggttgttagaaatatgaatcaaatgaaactttatgaacaagcgggatttctacttgaacatgagttaattaataaaattcctaagattgaaatactatatattgcaggtttatttcacgatcttggaaaaggcaaaggcggagatcattcagaaataggagcaaaaataagtttcaattttgcaaagagactaggaatgtcttcaacggatgcaaatctaatatcatggctagtaaaaaaacatttaataatgtcttcaatttctcaaaaaaaagatatttcagaccctctaacagtaaatgactttgctaaagaagtagaacagaatgaaaaattaaattacttatatttactgaccgtaaacgacatcagagccaccaaccccgccctatggaacggttggaagcatcagttattaagagatttatatactcttacaagatctaaaattaacaaaaatccaatcaaagcatcctctgatattgctttagatagaaaaaattctgttctgtctgagctaaataaagatgagaaatcctttgttaaaaattatttttctaagttcagcgatagctatttcaataagaatgcaactgagtcgttaaaatggcaatctcaattaatcattcaaaataaaaattgtgatctagttatagcatgtaaaaataagttcgacaatttactcgaaatatttattaaagtggataactcaaaaggtctttttttaaaattaacaaaaactcttgaaaagtctggtcttgaaatcattgatgcaaatatttttacctcaactgacaataagctggcagcaaatacctttattacaaaattttcacaccatgacagaactcttaatcaaagcgaacttaaagaattatctataagaattataaaaaatttcaataattatgaagatttttctgacagcatcaaaattgctaataaaaaaattaaattccaaaacaaacttaatattacaaatacgcataatactagtaaaggaagaaatcttattaccattgaaacatcagataggcctgggttgttgtctgatattgccagggtcttttatgacaataatctttcaatattttcagcaagaattaatacccttggcgacaaggtagaagatacatttgaactcgaaaatttcaataaaacactaatacctaataaaaagatgaaagaaattattgcatcattaaaaaaagtggtgtga

SEQ ID NO: 254676 - DNA, 913 bp, Unknown
  Bacterial polypeptide expressing nucleotide sequence isolated from the Sargasso Sea
atcctgtggcggattcgcttcgccctgcatctggtcgttagtcgttacgacaccgccctgctgttggaccgccagctcagcgtggcgcaacggctaaactacggcggcgaaggcaacgagcctatcgagcggatgatgaaagactatttccgggtcacgcgacgggtcagcgaactgaaccatatgctgttgcaactgttcgacgaggcgatcctcgccctgccagccgatgaaaaaccgcgcccgattgatgacgactttcaactgcgcggcacattgatcgatctgcgcaacgacgacctgtttatccgtaaacccgaagcgatattgcggatgttctacatcatggtacgtaacagtgcgatcagcgggatttactccaccacgctgcgccatttgcgtcatgcccgccgtcatttaacccagccgctatgctacattccggaagcgcgttcgctgtttctcagtatgttgcgccatccgggcgcggtgagtcgcggcctgctgccgatgcatcggcacagcgttttgtgggcttatatgccgcaatggtcgcacattgtcggccaaatgcagtttgacctgtttcatgcctatacggtggatgagcacactatccgtgtgatgctcaagctggagagttttgctaacgaagagacccgcccgcgccatccgctgtgcgtggatctgtggccgcgcttgcgacagccggagctaattctgattgccgcgctattccacgatatcgccaaaggtcgcggcggcgatcactcggttctcggtgcccaggacgtgctcaaattcgccgaactgcacggtctgaactcacgtgaaacacagctgatcgtctggctggtgcgtcagcatttgctgatgtcagtgactgctcagcgccgtgatattcaggatccgg

SEQ ID NO: 254677 - DNA, 724 bp, Unknown
  Bacterial polypeptide expressing nucleotide sequence isolated from the Sargasso Sea
aatgttagaagagttaataaaccaaaagaagactgatagcgatcttttatctaaacaatttgaccaatggctctataaagacagaggcaggaaaattagaggaatagaatatttcttaaatcaaaggtctgaaaatatcgataaattaattcgaaaagcgcatgatatgagcgatctttgctctatcaaagatttcggtatattttctgttggaggatacggccgtggagagcttcatcccttctcagacattgatttattgcttctttctgagtcaaatctttcaaccggtgaacagaaaaaaatagaaaaatttataagccttttatgggacttaggattagatattggacatagtgtgaggaccttagagcaagctatgaagcaggctcgagaagatatttttacaatgaccaatatgcttgaatttagaaagcttactggctcagaagatttacataaaatgtatttagacatcatagatacaaaaaatctatggagaaataaatcatttattcaagaaaaaattaaagagcaaatcgagcgccatgaaacattcaacaacacttcttacaatttagaacctgacattaaatcttctcctggtggactgagagacattcataccattgactggctaatcaaaaattctcttagaagtgtttcagaaaaggaaaaactttctggtgcgcttacctttgatgagagaaaagagctcaacaaa

SEQ ID NO: 254678 - DNA, 368 bp, Unknown
  Bacterial polypeptide expressing nucleotide sequence isolated from the Sargasso Sea
gatccgttttggactggaacaggcgatcacgcagcgcagctggcagccaccgcaaccacgtcgtcagccggcaaaattacgccactttaccgtcgataccgaggttactttcctgccgacccacaccgaccgaaaatcattccttgagcttatcgctctcgaccagcctggactgctggcgcgggtcgggcagatttttgccgatctgggaatttcgctgcatggcgcccgaattacaaccattggcgagcgagtagaagatttattcataatcgccaccgccgaccggcgcgcccttaataatgagctgcagcaggaagtacatcaacggttgacagaggccctcaatccaaacgataaagggtgat

SEQ ID NO: 254679 - DNA, 832 bp, Unknown
  Bacterial polypeptide expressing nucleotide sequence isolated from the Sargasso Sea
aatgaatactcttcctgaacagcacgcaaatactgccctccccaccctgcctggccagccacaaaacccagggacatggccacaacacgacctcaactgcaccggtattaaagcgcatatcgacaccttccagagctggttaggcgaagcgtttgacagtggaatttccgcagaacagctcattgaggcccgcaccgaatttattgatcagttgcttcagcgcctgtggattgaagccggtttcggtcaaattgccgacctggcgctggttgccgttggcggctacgggcgcggcgaactgcatccgctctccgatattgacctgctgatcctcagtcgtaaaaagctacctgattcgcaggcagaaaaagtcggtgagctattaacgctgctatgggacgtgaggctggaggttgggcacagcgtgcgtacgctggaagagtgtctgctggaaggattgtcagatttaaccgtcgccactaacctgattgaaacacgcctgcttatcggtgatgtggcgctgtttcttgagctgcaaaagcatatttttagcgaaggtttctggccgtccgataaattttacgccgccaaagtggaagagcaaaatcagcgccaccagcgttatcacggcaccagctacaacctggagccggatatcaaaagcagtcccggcggcctgcgcgatatccatactctgcaatgggtggcccgtcgccattttggcgccacctcgctggacgaaatggtcggcttcggctttttgacgctggcagaacgcgccgaactgaatgaatgtttgcatatcctgtggcggattcgctcgccctgcatc

SEQ ID NO: 254680 - DNA, 943 bp, Unknown
  Bacterial polypeptide expressing nucleotide sequence isolated from the Sargasso Sea
tttgtgaattgggattggttacgtcgtgatatcgaggggtttccggttcagcgtggacgactttctgtatcgtcgagtaacgaatttaaagaaaacccggtgcgaatattaaagcttttccatgtggcgcaaaaacggaacattgatattcatcctaatgccctaaagcttgtaacgagaaatctacgtaggatagataccattcggaacgatgcagaggccaaccgacttttccttgaaatgcttatgtcgtctagaggagcggaggcgacgcttcgtcgtttaaatgaggccagtgtttttggccggtttgttcccgattttggccgtgtggttgcgcagatgcagcatgacatgtatcacgtttatacggttgatgaacatacaattttcgccatcggaattcttcatggcatcgagcagggcaaatatcgggatgatatgccggttgctactgatgtaattcaaaaaattagctcccagcgagccttgtttgtagcgttgtttttgcacgatattgcaaagggccgtggcggtgatcattcgattcttggggcggaagttgcagaagcgttatgcccacgtcttggcctgtctgccgaggaaaccgaaacagtagcttggttagttcgtcatcacttgttgatgagccgtattgcatttcatcgtgatcttgctgatcctaagagcatccgagattttgccaatatagttcagtctctcgaacgtcttagacttctaatgcttctaacagtcgctgacattagagcggtagggcctagtgtttggaataattggaaagcttctttaatacgcgagttgtattttgctacggaagctcagttgtcagggggacacgaagcgacggggcgcgaagttagaatagagggtgcaaagttagccgttcgcgaacgttggagaattggggggaggaagaaaagga

SEQ ID NO: 254681 - DNA, 770 bp, Unknown
  Bacterial polypeptide expressing nucleotide sequence isolated from the Sargasso Sea
ccatgctgaattgcgcgtgcgattttttgaggaagtcgttaaaggcaagggtctttttgttgaggccaagcttgaagagcgggatgagcgacacgcaagaatgggtgattcccgctatgtccttgaaccgaacattaaggacggcaaaggaggtctccgcgatctacatacgctgttctggattgcgaagtacctttatcgttgcgagagcatcgcgcagctccgggatgaaggtgtgttctcgcaagacgagttggcgcgctttgataaggcgcaacggttcttgtggacggtgcgctgctaccttcattatctcaccgcccggtcggaagagcgcctgacgttcgacttacagccggaattggcgcgggaaatgggttatgttgaacgcgaaggtgtgtccggcgttgaacggttcatgaagcattattttttggttgcaaaggatgttggtgatctaacgcgaatattctgcgcttcgctggaagcgcgtcaccagcgtagctggaactttaaactgccagggttaggcttgttcacacgtgaggtcgaggggtttaaaatcgaagggggtcggcttaatgtcaccgaacatgaccattttcaagagcgtccggtcgagatgctgcggctttttgaggttgctcagcgtcatgagctcgatattcaccctaacgcattacatcttattacccgaagcctcagccgcatcactaaagatgtgcagaacgacccgaaagcgaatgctcttttcgtccatatgatgactt

SEQ ID NO: 254682 - DNA, 849 bp, Unknown
  Bacterial polypeptide expressing nucleotide sequence isolated from the Sargasso Sea
catgcaggtgtattaccgctggatgaagacgctcagccagctgaacgagttgctgattgaggtgtttgagcaccggctggctgatgctgccgactccgatattcgcgtgatcgatgacgatttcgaggtcagcaacagccgaatcagagcccggcacgacagcgtatttcaggataaccccagcaatttgttgcgggtattcgtgttgattggcaacgacccgttagttgatcgcatcgaacccaacacacaacgcctgctgcgccgcgactcgccccttgttgacgacgccttcagggcttcacaggaaaaccgtgatctgtttatggacgtgctcggcgtgccccacaatatgaccaagcagctaaggcgcatgtcgcggcacggtgtgttgggccgatacctgcccgcttttggcaagatcatcggtcagatgcagttcgatttattccacgcctataccgtggacgcgcacacgaccgaggtcatcgccaatactcgccgcttcatgcgcgccgactacaccgaccggttccccgtatctacgcggattgcccgccgtctaagagaccccagactgctctacattgccgcgctgtttcacgatatcggtaaaggtcggggcggcgatcactcggagctcggggcggtggatgccgggacgttctgtaccgatcacggtttatcgcagaccgacaccgaattaatcgtctggctcgtgaagaaccatctcttgatgagccaaatcgcccaacgtcgggatatctccgaccccgaggaaatccagcgcttcgcccagattgtcgtgacggaggaacgcctcgactatctctatacgctgaccgtagc

SEQ ID NO: 254683 - DNA, 739 bp, Unknown
  Bacterial polypeptide expressing nucleotide sequence isolated from the Sargasso Sea
catgccgagaaaaaaagcgatatcctcctcacaacgacaatcatcaattgacaaagtggctcttgataatgcccttaaaaccacaaacaaatctattaagttctttcgtgatgcattaaaaaaagctaatgatagtctcgcaacccgtttctataacaatgaatcaattgatgttctagtaaaggatcgtgcattaattattgacgagattatcctggctgtttggacccactttgcaaccgacgcaaaaaaacaatgcgctctaatagctgtcggcggttacgggagaggtgaactacatccttattccgatattgatctaatgattttactatcggagaacgaaagcactgatattgatgcaaaaattagtcggtttttaactttgctttgggatattggactagaggttgggcattccgttcgtacagctcaagattgcgctatccaatcaaaagacgacgttaccgtgctaacaactttaatggaagcgcggctactcagtggtccaactgaacttttcaagaccatgaaaaggcgtatatcaaaagataatatctgggcgcctgcagcattctatgaggcaaaactttccgaacagatcaaaaggcatcatagatatgacgatacagggtataaccttgaaccaaacattaagggtagcccgggaggattaagagacatacaaatgattgggtggattgctcggcgacatttagataccgaaagcttaaatgaa

SEQ ID NO: 254684 - DNA, 841 bp, Unknown
  Bacterial polypeptide expressing nucleotide sequence isolated from the Sargasso Sea
gctcgactttgatgcgcaaatggcgattgcgccgcgcatgggattttctgatccggtaggtatgcgcgcagtagagcggtttatgaaacgttactatctggcgatccgacatgttggtgatttaacgcgcatcttttgcgcggtgatggaaacagattttcgcaaacaactgaccttttggcggccggattttctgcgcgctaaaaatctcgatcccttttatattgaaagtggccgtgtccgcttgcgtgaaaatttacgatttcgtgatgacccgctgcgcattttcaggctgttcaatatcgcacagacctataatgctgatgtgcatccgcatagtttgcaaagggtaacaagaggtttgccctcagttggcgcaaaaatccgccaagatccagaagcaaacgcattatttcttgatattctgaccgctagcaaaaattctgaacgggtcttgcgtttgatgaatgagtgcggtgttttgggaaaatttctgcctgattttgggcgcattgtcgcaatgatgcaattcgatatgtatcacagctacactgttgatgaacatacattaaaggcaattggtattttgcaggcgattgaagctggtgatttagaatcgacggcacccgtggcgacagaggccatgcccgaaattcaatcgcggcgagctttattcgtggctactttgttacatgatatagccaaaggtcgtggcggcgaccattcgattttaggcgcggaagttgcgttgctcgcttgtccacgtctggggctaacgccggaggaaacagaaactgttagctggctggtaagacatcacttgctgatgagcaaaacagcg

SEQ ID NO: 254685 - DNA, 823 bp, Unknown
  Bacterial polypeptide expressing nucleotide sequence isolated from the Sargasso Sea
gtggccaacacgccagaagtacaaggcctcagtacgatttgcatacgtcagctgcgcaacgctcaccgcgcttttgaagcagaatactatgttgagcgcccgctgtgccgcgaaaaattcatgcgcttaatgaaacagcctgagttctttgattttgcatgggacatcatgcatcaatacggcattttacaagcttatcttcctgaatgggatgcgattgtaggtatgatgcagttcgacctgtttcacgcctacacggtggacgaacacactcaccgattggtgaagcacgttaactactttttctcaaaggcaaataaagacttcccgcgctgcggcagaatttgtagaaacctcgataaaccagaagtgctttatatcgcggctattttccacgatatcgccaaaggtagaaatggcgatcattccacattaggtgcccaagatgtagcaaagttctgtcagcaacacgatgttcccagcgacgatgctgaaatgattgcatggcttgtagaaaaccacctactgatgtcagtggtagcccaacgccgcgatatttatgacccagacgttataagcgagtttgctggcgcggtaagaagccacaatcaccttaatttgctttatacgctcacccttgccgatattcgtgccaccaatgacaatctttggaacgactggaaagcatctttacttcgcgaattatatttaatgacgcaaaaggcattggataatggactacagtgtcaagtaacattgaacgagcgagtaactactcacaaacaccaagcaaggcaaattttgcaagagcgcgctattgagc

SEQ ID NO: 254686 - DNA, 1477 bp, Unknown
  Bacterial polypeptide expressing nucleotide sequence isolated from the Sargasso Sea
ccgcacaccagcctgttcatcgaactattcaagtgcagggaaggtattcaccgcaacctgcggcggatgaaccgctacggcattctcggccgttacctgcccgagttcggccatatcgtcggacagatgcagcacgacctgttccacatctatacggtcgacgcgcacaccctcaacctgatcaagcacctgcgcaagttccgctggccggagctggcggagaaattcccgctggccagcaagctgatcgacaagctgccaaaatccgagctgatttacctcgccggcctgtatcacgacatcggcaagggccgtggcggtgatcattcggaactgggcgcggtagacgccgaagccttcgcccgccgccatcacctgccggcctgggacagcgccctgatcgtctggctggtgcagcaccacctggtgatgtccaccaccgcgcagcgcaaggacctctccgacccgcaggtgatccacgacttcgcccagttcgtcggcgaccagacccacctggactacctctacgtgctgaccgtggccgacatcaacgccaccaaccccagcctgtggaactcctggcgtgccagcctgctgcgccagctctacaccgagaccaagcgcgccctgcgccgcggcctggaaaacccgctggaccgtgaagagcagattcgccagacccagagcgcggccctggacaccctggtacgtggcggcaccgacccggacgatgccgaacagctgtggagccagctgggcgacgactacttcctgcgccacaccgccaccgacgtggcctggcacaccgacgccattctccagcaccccaacgatggcggcccgctggtgctgatgaaggaaaccacccagcgcgagttcgaaggcggcacgcagatcttcatctacgcgccggatcagcatgacttcttcgccgtgaccgtggctgcgatgagccagctcaacctgaacattcacgacgcacggatcatcacctccaccagccagttcaccctcgatacctacgtggtgctggatgccgacggcggctcgatcggcaacaacccggcacgcatccagcagattcgtgaaggcctgatcgaagcgctgaagaacccggacgactatccgaccatcatccagcgccgcgtgccgcgtcagctcaagcactttgccttcgcgccgcaggtgaccatccacaacgacgcgcagcgcccggtgaccattctcgaactgaccgcaccggaccgccctggcctgctggcgcggatcgggcgaatcttcctcgaatacgacctgtcgctgcagaacgccaagatcgccaccctcggcgaacgggtcgaggacgtattcttcgtcaccgacgccaacaaccagccgctgtccgaccccgaactctgtgcacgcctgcaggaaaccatcgtccgccgcctgtccgagcccagcgctcaaccgcagaccctgcagatcaacatatgat

SEQ ID NO: 254687 - DNA, 2530 bp, Unknown
  Bacterial polypeptide expressing nucleotide sequence isolated from the Sargasso Sea
tctgattgatgacttagttattaaagcaccaataaaggaaacgatatcaaagcggtgtgaattaaatgacgatgtcattcactttgtggcaaatcaatttttcagtaatgatgaatcaaaacttaacattattgctgttggtggttatggcagaggtgagttttacccaaaatctgatactgacttacttattcttctggataagaacactaaaaatgatcttaaaaacaatatttcaaaattcctgacatttctttgggatattggcattgaggcaagccatagcactcgaacggttaatgaatgcataaaagaatccaaaagagatatttctgtaggcacatcactgcttgaatctagatcaatttttggatcaaaaacgctattctcagagtaccagaagaaggttctcttgaaacaagcatggaaaaacgaaaaattttttagtgcaaaaattgatgaacagaataatcgacacaacagcttcaataacacggcttataaccttgagccaaatataaaagatggcccaggcggtttgagggatgctcatacaattttttggattgctaaaaaacttggctatggaaatattgccgatctagagcaagacaatattctgaatattgatcaaattcgattgcttcaagaagcatggggcttgatatcaaaaataagatatgcgcttcactcattggctaaacgtccagaagatagacttttgttcgattaccaaagagtccttgcagaaaattttggctacaaagactctgaacacttaatggctgtagaagttttcatgcaagattactataaagcagcaaaaactatctctagattcaatgaaatatgtttgcaaatatttgatcagaaaatcaatgccagacgattcatagcaaaaaaaaatattaataaaaattttcacataagaaataagctaattgggctaagaaagggagtagagtttgagaatgacccgagcttacttcttgagatatttcttcactttcaggaaaacaatatcactggaatagagtcaaaaacaattaaccaaattttagaaaatttagatctgatcaatgatggattcagagacaatccagataataaaaaactattccttaagatattaaaagcgccagagggtgttacccatgaattaaagagaatgaatctttacggtgtacttggattatatctaccaatatttggccaaatagaaggcagaatgcagtttgatctatttcacacactgactgttgatgagcatactttaaacgtggttagcaatttaagaaggctggccctggacagattcaaccatgaatacccggaagacagtaagaaaatgcagtcaatagaatctcaagaaatactctacttggcaggattatttcatgacatagcaaaaggtagaggcggagatcattctgttttaggagcaagagatgcagaagagttttgtattgcacatggcatgacgagatacgaatctaaacttgtttcttggcttgtagaaaatcatttaattttttcactgactgctcaaaagaaggatattcatgacccactagttgtcaaagagcttgcagaaattattggagatgaagaaaagctagagtatttatatcttctaacagtttgcgatgtgagagcaacaaacccaaatttatggaacagctggaaagaaagactctttaaagatctttatcatctaacaaaaaatgccctgagaatgggtctcgaaaatacaatcgataaggaagaaattgtaaaagagaaaatagagatagcgaatattcatataggggatcaaggtcttgatatctccaaattaagaacagagattgaaaaactaagtgaagactatttcctacgatttaatcagggtgaaatcaactttcaccttgagaaactgataacaaatagtgttacagatgaggaaaacaccatcattggtttaaaaatcattgaagaagaaggtctgatgctattgttcataaaaacacttatggatattgatactttctcaataatcacaaataacttggtcgaaaaaaacatatccatcaaagatgcgaaagtcatcgagttgaatgatggaaactgtatatataatttttatactgatgtgccaaaaggcgacgcctatgatatagaaaataagattgaatctttaattgagaaattgagctggaggcttaaaaagaaacaaatcatcaaaaagaaaaaattcaaacttccaagaagattaagaagctttacaacaaaaacaagagtgaatttcctagttgatcacatccataatcgaacagtccttgaaatcgtttcaatagatagaccaggacttcttgttgatgtgtcagaggtgcttagaaaaaataacatttggatcgagtcagcaaaaatagccacaattggtgaaagagctgaggatgtcttttatcttagagatgaatatcaagatgcaattgcgattgaaacaaataagaaattagagtcagaactcattgagtcattggatggttaa

SEQ ID NO: 254688 - DNA, 2587 bp, Unknown
  Bacterial polypeptide expressing nucleotide sequence isolated from the Sargasso Sea
gatgaatacagctctgctagctaaacaatcattaatcgaacagaatcaaacgcttttagcaagattcaaggccaaaaccccgattgaagagctagtgacgcagcgctgccagttcgtcgattccctcgtcaaacaggcctggcaacagcacggtctggaccaatatcctatcgccctgatcgccgttggcggctatggtcgcggcgagttacatccgcactcggatgtcgatttgttattcctgttcgaaggtgagttatcacaggcggccgaaaccgcgctcagcgaatttatcgcctttttatgggatgccagccttgaaattggccacagtgttcgcaccctcagcgataccctaaatctgggtcgagaagacatcaccatcgccactaatctgctcgaggcacggttactatcaggccccgaaaccctgttcgatcaactctatgacgccatccgtcagagcgacttttggacgtcgagccagttctttatcgccaaacgtgatgaacaaacggcccgccatgccaaggcaagcgccttcgatcttgagccaaacatcaaaagttgccccggcggcctgcgggacattcaaaccatcgcctgggtggcgatgcgtcactttggcgcctcacgcctagaagaactggtgcaatacgaatttttagaacccgccgaattagaagagctgctcgagtgtcagcattttctgtggaagctgcgctttgccctgcatatggcggtcggtcgcgatgaaaatcgtctgctgttcgatgtccaacgccaagtggccgaactcatgggttatgaagatgccactcaacttgccgttgagcagatgatgaaacgctactatcgcacggtgcgccgcgtgatggagctgaacgaaatgttgttgcagctgtttaagcgggcgacactgggccaaaccaaagccttagaaattcaagcgattgacaataactatcaacgccgcggtgcctttattgaggccctaaaggacgatttattcgatagcggcgaagaaattgtacgcctctttgtccatgtcgccaaaaactccaatatcaaaggcatttatgcgccgacactgagatcgctaaggcgcgcccgccgggcacagcagcaacccttgcaggaaaatccgcagtgccgccaagcctttatggaaatcttaaaacatcctcgtggcattgcggccttatcgctgatgcataaacacggggtgctgtcggcctatttgcccgcatggcgcaatatcgaaggccaaatgcagtttgacctgttccacgcctacacggtagatgaacacacccacagattgctgctcaatatcgagcgcttctctcagcctgagcagaaggaagagtttcctttaggttctgtgcttatcaatcagttaccgaaaaaaggtttgttggtacttggcgccattttccatgatatcgctaagggccgcggcggcgatcacagcaagcttggctcgagcgatgctctcgccttctgtaagctccatggcttgaacgaccacgatggccgcttagtcgcttggctggtcgaaaatcacttagtaatgtcggtaaccgctcagcgccgcgatatttccgatcccgatgtggtggccgactttgccagcaaggtacgcgatgcggtgcatttaagttatttatattgcctaaccgtcgccgatatctgcgccaccaacgagaagacctggaacaactggaaaggctcactgctgcgcgacttatatttttccacccaaagggtactggcgcgggggaaagaaaaacccgtcgatatccgcgcgcgggtgcgggaatatcaagccaaggccaagaaagagttgctgcgccgtggcgtaaaagaaaaagagttagatactctctggcaacgctttaaggccgactactttttgcgccaccagccgaatcaagttgcttggcatgccgaagctatccttaagcataaacagctagatgagccgctggtgctagtgtctaagcacacgacgcgcggcggcaccgaactctttgtctactgtcaggatagacctaagctgtttgccactgtgatggcggtgctcgataataaaaacatcaacgtccacgacgctaacattatgacatcgaaggataattatgccctcgacaccttcgttatcctcgagcaagacggcgcccccgtgagtcaactctcgcgtattcagagtatccgtaaagcccttgaaaaggcgctcgcgagcgataaccctaagctgccgcgctttagaaagctgtcacgcaagatgaaaccttttaatgttcccactcaggtgagtttccttgagagtaaccgtcatggtacaagtatgatggaactcatcgccttggatacgccgggattattagctaaagtgggcgatattttttatcgctgcaacaccaccttgctggccgccaagatcaccaccattggtgagcgagccgaagacttttttattttgcaaaccaatgatggcttgcaactcaatgaaacccaagagaatacgctcaaggaagccttgattagcgcgctgagcgccatcaacacagagtcaaccaattaa

SEQ ID NO: 254689 - DNA, 2506 bp, Unknown
  Bacterial polypeptide expressing nucleotide sequence isolated from the Sargasso Sea
aatgaaaggaaaaataatttcaattaaggaagacttcctaaatgaatttccacaaatctaccaaaaaccttcaaaaataaataaatatctaaagaagtattcaaataaaattgagatagatatcaaaaataagttcaagaaacttgagcttgataaaaattttgcaatatatgcaaatggtggttttggaagaaaagagatgtttccatcatctgatattgatttatctatagttgaattaaataaaattcaagactacggtaatttagaaaagtttatatcatttatgtgggatagaggatacaaggttgggcattcggtgagatcaatcaatgatataaagaaaatatccaagaatgacctaaaagaatttacatcatatctcacaagaagagctattatctctaatcaaaatattgataacaaaattacaaaagcactaaacgggttgtggactagaaataatttttataatcagaaatttatagaacaacaaaggcgtcacagtgaattccattcttctgcatataatctagagcctgatctgaaagaatctcctggcacactgagagatttccaatcagcactatggattctgcaacactgttatggctttgattctcaagatgctataaataaatctggtgtgatagatggagagtttaaaaaaacaattgaagcctataattttattaaatcgcttagatttgcaactaacattgccactcaaaaaaatagacttaactttgaagctcaaattgaagtttcaaaatatgcaaaattgaataaaaaaaattccaaagcatccgttgagaaaatgatgaaaaattattatgaaaatgcttctattttgtcttattttaatgagattatttttgagaaatataatgaaaaaaaagtaaacatattttcaaaaaagataagtggtatctataagaataaaaataaaattggtatccgaaatattgatataaaaaagaataaggatcttatatttcaaatatttatagagattggtaagaacaaaaatattaatcttattgatacgtcaacaaaatccttgctaaaaaagcatattaatcttattgataaaaaatttagaaaacaaaatatttattctaaacagtttcttgaaatattaagatcaaaatataatctgtcatctattcttaaagcaatgaaaaatcttggtgttcttcaagcatacattcccgaatttgcgcaagttgttggacaaatgcaatttgatttatttcacgtttacacggttgatgagcatacatttaaagttgttagaaatatgaggcaaatgaagttatttaaacagaaagaatttgaacttgaatatgaattaattaataaaattcctaagattgagattttatatttagctggaatatttcatgatcttggtaagggtaaaggtggagatcactcagatattggtgcaaaaacaagttatgacttcgcaataagaataggcatgtcagaaacagatgctggtttgatctcatggctcgtaaagaaacacttgatcatgtcatcaatttctcaaaaaaaggatattggacaggaagaaactataattgagtttgctaaacaagtagaacaaagtgaaaaattagattatctatatttattaacaataaatgatatcagagcaactaatcccgctttatggaatggatggaaacatcaactactgaaagatttatatatcttaacaagatcaaaaataaataaagagcctttaatagcttcatcaagtatagctctagaaagaaagaaaaataccttgcttgcttttacgagtaatgatggtgaagttttagagagttacttatctaatcttggtaatagttattttaataagaatcttagtgaatcacttaaatggcaagcagcacttattgttaaaaataaagataaggacttaatagtgggatgtagaaatatatttgaaaacttaattgaaatttttattaaagtaaaaaactctaaggggcttttttataaatttacaaaaatattagatcattcaggacttgaagtgattgatgcaaacattttttcatcaactgataacacttttgcagcaaatacttttattgcaaaattttctcatcatgatagaaaattgctaaattcagaccttattgaattaaaaaaaagaattgagaagaattttactgaattcaataaaattaaagactttcaaaaaaaatccattaagaagaataggtttgaaaaagttataaatatttcaaattcaattaataaagataaaggtagaaatctcattacaattgaaacttcagatagccaaggactgcttgccaatattgctaaagtattttttgataataatgtatctatattttctgcaagaattaataccttaggagatagagttgaagacacttttgaaattgaaaatcataacaaaacattgattggaagtaacaaaatagaaaaaattgtagctgatttagaaaaagtggtataa

SEQ ID NO: 254690 - DNA, 2593 bp, Unknown
  Bacterial polypeptide expressing nucleotide sequence isolated from the Sargasso Sea
gatgaaaacatatagtaataaagaattagccttaaaatttaaaagtaataatgaaattaatagttttgttcacaaaaaatattcatcaaacagaaataatattgaaaaacttctttatttaaaaactcaaattgttgattcaatattaattgaagcttggatagagaataagctagataaatatcctattaccttagtagcagtgggaggatatggaagagaagagattttcccatactcagatatagatattttaattatttataatagtaaagttgataaaaatttcaaacattgtatttctagttttattgcaaaaatctgggactataagcttcaattaagtcatagtgtaagaaaaattaatgaatgtttgaaggaatctaaatcagacatttcaactgaaacaaatatgcttgaatcaagatatattttcggaaataaagaaatttactcatcttttaaaaataaaatcaaacaagattcagcgtcatctaaaaaaaattttataaataagaaaataattgagcaagaaattagacataataaatttaatgcaacgtcatatatgttagaaccaaacataaaagaatgtattggagggatgagagacttaaataacattttttgggtgtcaaaaaaaatttatggaatttcagattttcatggtcactacgataataaaattataagtaaaaaagagtttaatcaagttaaatcatcaagaaactttttattcaatgtaaggtatcttttacactatttaaacaaaaaacctctagaaagattatattttgagaatcaaattttacttgccaagttccttaattataggggtaatggtaatcaaccagtagaaaggttcatgaaaaacctttataaaaatattagtgttgtaaaacatacaaacaatattattttaaattatataaattttaatttaaaagctttgagaggaagatttataaaaattaataaatacttctattcaaaagacaatatgatttttattaacaacgatgaatcctttttaaaaaatccaagcctacttctagaaattttttatgtaatgcaaaataaaaaccttcaagaaatagaaccaaggaccctaagattaataaatgactcgctttacttaatagattcaaagtttagaaactcaaaaacaaatcaaatagtttttatgaatattttaaaaaacgattttaacgtcacgaagatattaagaaaaatgagtgaaagtggggtgttaggttcatattggccaaccttcaaaaagtctattggtcaaatgcagtttgatttatttcacatttatactgtagatgagcataccttatcagttttatcaaatttacgatttatgggaaccaatgaatgcaataagaaatataaatttatttatgaagtatacaaaaatataaaggataaagaagttttatatttgtcatcgttgtttcacgatattggaaaagggtcaaataaagatcattcaaaagtaggaaaagatttgatatataagtttgcaattaaacatggtcttagtgagcatcagtcaaatacagcaagttggcttgttgaaaatcatctacttatgtcactaaccgttcaaaaaaaggatattaatgatccaatagaagtcataaaatttgctacaaatgttaaaactcaagaaagattagattatttatatctccttacaattgctgacataagaggaactaatcctaagttatatactgactggaaagatcatctattaaaagagttttatttgttaacatcaaaatatattgctaccaattcaattcttgattcttcaaaagattcatatattaaaaatattaaatcatctgttctaaaaaaattaaatactttaaataataaaaaatttctcgaggatatgtggggtcagttacctattgattattaccaaaagcataacgatgaagatctagagtggcattctgaatgtttaatgaaaaaaggtaccaataaagattttatgcagattaaagaaagtccatacaggggctgtacacaattaatgatttaccaaaaaactagaaaaaatttattaaggaaaattacaagtgtttttgaaaaattaaaaattcaaataacagaagcgaatattgtgacattaagtaataattcgtctattgatacctacttacttttagatagttctggaaaacaaataaaaaataaatatatgttaaatgacttaaaaaataatattgagcaggttttaattgatccaaaaaaagtgaaaataagtaaaagaaccaaaaaagcatcgtacacaaaagactttacaagcgtattagatgtagaggtttacagtaaaaataactctgtaacaatagaggttaatgctcttgatagcccaggcttattgtcttcaatatgtgaagttatggatgacagtaatctaataattaaggacgctaaagtttctacattaggtgaacaggtaaacgatatattttttgttgagagcataaattttgataattttgataatttttctaaaaaaatcaaaaataagttaaaacaaaagctttcagacctatataatagtcaaatgtaa

SEQ ID NO: 254691 - DNA, 2656 bp, Unknown
  Bacterial polypeptide expressing nucleotide sequence isolated from the Sargasso Sea
atggatgccagcctgctttccccccacctgttacccgacgctcagctcacccgcgagaactgcaaggagtacctgagccgttttctcggctggctgcacgcccgcttcgatgccggtgacaacatcatcgaactggtggctacccgctccgaatacatggacgagctgctgacccggttgtggcaaaagttcggcttcgacaagacggagctcactctgatcgcggtgggtggttatggccgtggcgaactgcacccccactccgacatcgacctgctgatcctctacgaaggggacgagttggacgaggtgctggggctgcgcatcggtgagttcatcaccctgctgtgggatctcaagctggaggtgggccaggcggtgcgcaacgtagccgagtgtctcgagcagggacgcggcgacatcacggttgccaccaacctcatcgaggcgcgctacatcaccggccgcgaggcgggcttccagcagctcaaggaggccaccggcccccagcacttctggccaagcgagcagttcttcaaggccaaacgcgaagagcaggcccagcgccaccagcagtttctcggcaccgcctacaagctggagccggacctcaagagcaatccgggcggcctgcgcgacatccagaccctggcctgggtggctcgccgtcacttcggcgccaccaccctgttcgagatgaccagccacggcttcctcaaccgggccgagtatcgcgagctgctcgattgccagaattttttgtggaaggtgcgcttcgccctgcacatggccatcaacaagggcgacaaccggctgctgttcgatcgccagcgtaccgtggcccagatgctgggcttcgagggggaaggcaacgccccggtcgagcagatgatgaaacgcttctaccagacggtgcggcgggtctccgagctcaacgagatgctgctgcagctgtttgacgaggcgatcctcggcaacaccgccatggacgtgcgccgcctctccgacgagttccagctgcgcgggcgcctcatcgatgcggtggattccgagctgttcggccgcgagcccgcagccatcctgcgcctcttctaccagatagcccagcacccggagattgccggcattcactccgccaccctgcgccagctgcgcgaggcgcgccgcaagctcaactgctggctgcaggatctgccggaatgccgccgcctgttcatggcgctgctgcgccaccccaacggcatcggccagccgctcaccctgatgcacaagtacggcatcctggcggcctacctgccgcagtggaacctcatagtcggccagatgcagttcgacatgttccacgcctacacggtggatgaacacactcaccggctgctcaagaacatccatcagtttcccaacccggccagccgccagacccacccgctctgccacgaggtgttcacccggctgcgcaagccggagctgctcagcatcgccgccctgttccacgacatcgccaaggggcggcgtggcgaccactcagagctcggcgccgtcgatgcgctggagttctgccagctgcacggcctggatcgctacgagagccggctggtcgcctggctggtacgccaccacctgctgatgtcggtcaccgcccagcgccgcgacatctatgaccctgaagtggtcaccgactttgcccagaaggtgcgcgacgagcagcacctcgacctgctttattgcctgaccgtggccgatatctgcgccaccaacgacaccctctggaacgactggaaaggcaccctgctgcgcgagctctacttcgccacccagaaggcgctgcgccaggggctggaaaatccgcccgacatgcgcctcaagatccgcgaaaaccagcgtcaggccaagcagatcctggcccagcgcgacgtgccggaggaagccatcaaccagctctggagcgacttcaaggccgactacttcctgcgccatacgccggagcagatcgcctggcactgccgcaagatcatcgaacacggcgacaacccggcgccgctggtgatcatcggcaagcacccgacccgcggcggcagcgaggtgttcatctattgtcgcgacaccccgaatctgttcgccaccgtggcctcggcgctggatcagaagaacctcaatatccacgacgcccagatcatgaattcgcgcagcgactatgtgctcgataccttcgtggtgctcgagcccaacggcgagcccatcagccccaaccgcaccgccaccatcaagaaggcgctggagaaggcgctgcaggagccgggcaagctggtgctgcgcagcaagcccctgtcacggcgccaccgccagttcagcgtgccgacccgggtggtttttctgccccacaaaggggagacccgccacaccctgctggagctgaccgcgctcgataccccggggctgctggcccgcatcggcgccgtgttccagcagtgcggcctgtcgctccatgccgccaagatcaccaccatcggcgagcgggtggaggactttttcagcctcaccaccctggccggcgagccgttgacccaggccgagcagcaggcgctggaggagcggctggtcaaccagctcaacccgcaagagtcggccgatgatgagggcaggccgggcctatgaa

SEQ ID NO: 254692 - DNA, 1987 bp, Unknown
  Bacterial polypeptide expressing nucleotide sequence isolated from the Sargasso Sea
ttgaacgatggtgtgatccgctatgtggcggaacaatttttcaaaaaagatgaatcaaaacttaacattattgcagttggcggatatggcagaggtgagttttacccaaaatcagatactgacttactgatccttctggataaaaacagcaaaaatgatctcaaaaataatatttcaaaatttctgacattcctttgggatattggcattgaggcaagccacagcacaagaacaatcaatgaatgcataaaacagtctaaaaaagatatttctgttgggacatccctccttgagtctaggtcaatttttggatcaagcgaactcttcacagagtatgagaaaagagttcttttaaaacaatcatggaaaaatgaaaaattctttgctgcaaaaattgatgagcaaagtaaccgccataatagattcaacaatactgcatataaccttgaacctaatataaaagatggtccgggtggtttgagggatgctcacacaattttctggattgctaagaaactaggatacaaaagtattgctggtttggagaaagataacattctaaacaatgaacaagttaaattactcctagaatcatggggtttgttatcaaaaataaggtttgcacttcactcattggctaaacgtccagaagatcggcttttattcgattatcaaaggatccttgcggataattttggctataaagattccgaacacctaatggccgttgaagttttcatgcaagattattataaagcagcaaaaaccatttcaagattcaatgaaatatgtctacagatattcgatcagaagattaatgctagacggtttatggcgaaaaaaaatattaataaaaactttcacataagaaataagcttattggattgagaaaggacataggtttcaaagataacccaagcttacttcttgaaatatttcttcactttcaggaaaacaatatcatcgggattgagtctaaaacaattaaccaaatactggaaaatctagatctgatcaacgatgaatttagagccgacccaaataataagaaactattcatcaagatactcaaggcccctgaaggcgtcacacatgaactcaagagaatgaatctttatggtgtccttggtttatatcttcccatatttggtcaaattgaaggcagaatgcaatttgatctcttccatacactcactgttgacgaacatacattaaatgtagtcagtaatttaagaaggcttgccctgaaaagatttgatcacgaatatccggaagacagtaaaaaaatgcaatctttagaatcacaagaaatactctacttagcaggattatttcatgacatagcaaaaggcaggggtggagatcattctattcttggagcaaaagatgctgaagatttttgtatttcacacgggatgacaagatatcaatctaaacttgtttcctggcttgtagaaaaccatttgattttttctttgactgcccaaaagaaagatattcatgatccattggttatcaaagaacttgcttcaattattggagatgaggaacgactagaatacttatttcttctaacggtttgtgatgtcagagcaacaaatccaaatttatggaatagctggaaagaaagactcttcaaagacctttatcaattaacaaaaaatgccctgagaatggggcttgaaaatacccttgataaggaagaaattgttaaagaaaaaatagaaataatgacaaaacatctagagattcaaggccttgatatcactgaaatggatgcagctatcgggaagttgagtgaggaatatttcctaagatttaatcaggacgaaattaattatcatcttcagaagctcatatcgaataaatccaaagatgaggaaaataccatcattggactgaaacttattgaagaagaaggcttgatgctgctattcataaaaactgttattgattttgatacttttctcgataatcacaaataat

SEQ ID NO: 254693 - DNA, 2587 bp, Unknown
  Bacterial polypeptide expressing nucleotide sequence isolated from the Sargasso Sea
atgaatacagcgctgctagctaaacaatcattaatcgaacagaatcaaacgcttttagcaaggttcaaagccaaaaccccgattgaagagctagtgactcagcgctgtcagtttgtcgactcccttataaaacaggcgtggttgcaacacggcctagatcaataccccatcgccctgattgccgttggtggctatggtcgcggagagttacatccgcactctgatgtcgatttgctattcctcttcgagggcgagttagctgcggtagcggaagccgcgctcagcgagtttatcgcctttttgtgggatgctagtcttgagattggtcatagcgtccgcacccttgatgatacgctacgccttgggcgagacgacattaccatcgccactaatttgcttgaagcgcgcttgctttcagggcctgaaagcctatttgaccagctctacgatgccattcgtcaaagcgatttttggacctccagtcagttctttatcgccaagcgcgatgaacaaacagcccgccatgccaaggcgagtgccttcgatcttgagcccaatatcaaaagttgccccggcggccttcgggacattcaaaccatcgcctgggttgccatgcgccactttggcgcctcacgcctagaagaactggttcaatacgaatttttagaacccgccgaattagaagagctgctggagtgtcagcactttctgtggaagttgcgttttgccctgcacatgactgtcgggcgtgatgaaaaccgcctgctgttcgatgtccagcgccaagtggctgagttaatgggatacgaagacgcgacccaacttgctgttgagcagatgatgaaacgttactatcgcacggtgcgccgcgtgatggaactcaacgaaatgctgctgcaactatttaagcgggcaactcttggtcaaacgaaagctttagaaattcaagcgattgacaataactatcagcgccgtggtgcctttatcgaggccctaagtgacgatttattcgacagcggtgaagaaattgtacgtttgtttgtccatgtcgcgaaaaactctaatattaaaggcatttatgcgcctaccctacgctcactgagacgtgctcgccgagcacagcagcaacctttgcaagaaaatcctcagtgccgccaagcctttatggagatcttaaaacatccacgcggtattgcagccttatcgctgatgcataaacacggggtgctgtcggcctatttgcccgcatggcgcaatatcgaaggccaaatgcagtttgacctgttccacgcctatacggtggatgaacacacccacagattgctcctcaatatcgagcgcttctcgcagccagaacaaaaagaagagtttcctttaggctcagtgcttatcaatcagttaccgaaaaaaggtttgttagtactcggcgcgattttccacgatatcgccaagggccgcggcggcgatcacagcaagcttggctcaagcgatgccctagccttctgtaaacttcatggcttgaacgaccacgatggccgcttagtcgcttggttagttgaaaatcacttagtaatgtcggtaaccgcccagcgccgtgatatttccgaccccgatgtggtggccgactttgccagcaaggtgcgcgatgcggtgcatttaagttatttgtactgtttaaccgtggccgatatctgcgccactaacgaaaagacctggaataactggaaaggctcattgctacgcgacttatatttttcaacccaaagggtgctcgctcgcggcaaagaaaagcccgtcgatattcgggcccgagtacgcgaataccaagccaaggcgaaaaaagaactactgcggcgcggcattaaagaaaaagatttagataccctttggcaacgctttaaggccgactactttttgcgccaccagcccaatcaagtcgcttggcatgctgaagccatcctcaagcataagcagttggatgagcccttagtgctcgtttcaaaacacacgacccgcggcggcacagagctgtttgtttattgtcaggacagacctaagttatttgctaccgtgatggcggtgcttgataataaaaatattaacgtccacgatgctaacatcatgacatcaaaggacaattatgctctcgatacctttgttattctcgagcaagacggcgaacccgtcagccaactctcgcgcatacaaagtatccgtaaagcccttgaaaaagcgctcgccagtgataaccccaaactgccacgctttagaaaactgtcgcgcaagatgaaaccttttaatgttcccactcaggtgagtttccttgagagtaaccgtcatggtacaagtatgatggaactcattgccttggatacgccgggattattagctaaagtgggcgatattttttatcgctgcaacaccactttgctctccgccaagatcactaccatcggcgagcgagcggaagacttttttattttgcaaaccaatgatggcttgcaactcaatgaaaaccaagagcatacgctcaaggaagccttgattagcgcactgaacgccatcaacacagagtcaaccaattaac

SEQ ID NO: 254694 - DNA, 2608 bp, Unknown
  Bacterial polypeptide expressing nucleotide sequence isolated from the Sargasso Sea
tttgcaaaaagcaaaaaaaaaccttgaacaaggaaattataaaggctctgaatgtgcaagagaaatagctaatctttatgaccatgtcattaaaaattactatcaatatttaaatgctcataattatatttcacaaaataaaactgattttgaaaaaatggcaataatagctaccggaggttatggtagaggaaaaatatcacctggatcagatatcgatcttttatttttaatgccttttaaaaagactgcttgggctgagagcataactgagaacttgctatattttctttgggacttaggtctaaagattggtcacgcatcaagaaatattaatgagtgcttaactctttcagctaaggaccagacaatcacaacatcacttttggatgcaagatatatttgcggagatagagaggtaaaaaaagtttttgataagaaatttaggaatacaatttctaaaagatcatcaaaagaatttattgatgcaaagcttgaagagagggagtccagacatattaaggaaggacaatctaggtaccttgttgagccaaatataaaaaatggaaaaggaggtctgagagatttagaaagcttatcttggatgacaaatttttgttatcaagcttctagaccagatcaaatggttaaaaaaggtgttcttacagagagagaagctgaaagttttaagaaatgtgaagattttctttggtatattagatgtcagctgcatttcatagagaaaaatccaaatgatataataaattttaatgttcaaatggagatggctgataagcttagttataatgatagaaaaggattaaaaccagttgaaagatttatgaagcattattttcttattgccaaagaagttggtgatttaacaagagtaatatgttcagttcttgaagaaaaacaaaaaaataaaacttcattaatttcaatcataagaaatttttttgaagttcccgctaaatatgtttataccggtggcggacttggtctttatagctcaaaagggagacttaatgtatcaaatgaagatatcttcaagagagacccaagtaagataatattattttttaatcttcttgaaaaaaataacttatttgcccatccaaatgcggtaagaattattagaaagtcagctaatcttattgatcatagattaagaaataatattaaaactaatgagttatttacaaatattttaagcagccctaaggcagaaaaaactctaagggctatgaatgaatgtggtgttttaggaaaatttatccctgattttggaagaattgtaggtttaatgcaatttaatatgtatcaccactatacagctgatgaacatttaattaaagcagtgggggaattaaataaaatttttcactcaaaggatgaaggttttgatattctgaattcattaaaccttgatgatgatgaaaaaagaattctgtctctagcaatattcttccatgatatagcaaagggtagagagaatgatcattcagaagaaggacaaaaagtagtaagaaaaatggctaagcgccttggtctttctgagaaagatgaagaaatgatctcttggttagtattagatcatttggcgatgagtgattttgcacaaagaagagatatttctgacccagtaactatttcagattttgctgaaaaaattcaaaccacaaaaagacttaagcttcttttgtttttgactgttgcagatattagggctgttggtccgggcgtatggaatgactggaaaggagaactattaaagaatctgtataaagaaacttatcttgctttaacaggtaattattcttcgaaagatcgagtatacagagcaaatgagatcaaggaaaaaataaaatctaaaataaataatataagtgaagagaaaaaattaaggtggtttgatttagttgacgaaaaatattggtcatcagtcccagaaaaaatacaaattcagaatttaatagcatgggaaaaaggcaatcaagataaagaaaatgatattatcgatttttataattcagatgattattcttcaacaattatgacagttataactcaggataaaaaaagactttttgaaagaattacatctggatgtcttgatatgaatattaatattgttgatgccagaatattttctaataagagtaatgttattgatattctgtggatccaggataattttggaaaaaaaattgttgataggaaaagattatcaagaattaaggagaaaatattactttttattaatgaagatgaaattccgttaattaattatgaagataatattgataaaaggtcttcagcatttaacattttacctgatgtatcaatttataactctctttcaaaaaaatattctgttattgaggttagcgctaaagatagacctggacttcttaatgatttaacaagaaagatctctgacttaagtatagatatacggagcgcgcatatagcaacatttggcgaaagagccacagatgttttttatgttttaaataagagcggtgaaaaaatatcttctaaaaataaaatagaaaatatacaaaaagagcttattaaatcaattagctttagtgaatatgtataa

SEQ ID NO: 254695 - DNA, 2578 bp, Unknown
  Bacterial polypeptide expressing nucleotide sequence isolated from the Sargasso Sea
atgagcgctcacgctgcccccccgcccgaagcgctgtcgcggcgcgccgaattcaaggccgccaagacggagatgctcgagcgctttcgccgcgcggcgaacgtcgcgtcgctgatgcacgcgctgtcgaaactcaccgacgaagcgctgaagcgcgtgtgggacgactgcggcctgcccgcgacgctcgcgctcgtcgccgtcggcggctacgggcgcggcgagctcgcgccctattccgacgtcgacatcctcgtgctgctgcccgatgcgcacgatccggccctcgacgggcgcatcgagcgcttcatcggcatggcgtgggatctcggcctcgagatcggcagcagcgtgcgcacggtcgcgcagtgcatcgaggaggcgtcgcaggacgtcacggtgcagacctcgctgctggaagcacgccgaatcgtcggcagcaccgcgctgttcgagcgcttcacggtgcgctaccgcgaggcgctcgacgcccgcgcgttcttcaccgcgaaggtgctcgagatgcgccagcgccacgcgaagtgccaggacacgccgtacagcctcgaaccgaacgtgaaggaaagccccggcgggctgcgcgacctgcagacaatcctgtggatcgcgcgcgcggccggtttcggcagcagttggcgcgaactcgacacgcgcggcctcatcaccgatcgtgaagcgcgcgagctgcgccgcaacgaaggtttcctgaaaacgctgcgcgcgcggctgcacgtgatcgcgggccgccgccaggacatgctcgtgttcgacctgcagacgcaggccgccgagagcttcggctaccagccgacgcaggccaagcgcgcgagcgaacagctgatgcgccgctattactgggccgcgaaagccgtcacgcagctcgccacgatcctgatccagaacatcgaggcgcaactgttccccgcgacgagcggcatcacgcgcgtgctgtcgcccgaccgcttcgtcgagaagcagggcatgctcgagatcgtcgacgacggcgtgttcgaacgccaccccgacgcgatcctcgaagcattcctgttgtacgagacgacccgcggcgtgaagggcctgtccgcccgcacgctgcgcgcgctgtacaactcgcgcgagatcatgaacaacacgtggcgccgcgatccgcagaaccgcgacacgttcatgcggatccttcagcaacccgaagggatcacgcacgcgttccggttgatgaaccagacgagcgtgctcggacgctacctgctgaacttccgccgcatcgtcggccagatgcagcacgacctgtaccacgtgtacacggtcgaccagcacatcctgatggtgttgcgcaacatccgccgcttcgcggtggccgagcacgcgcacgaatatccgttctgcagccagttgatcggcaacttcgagcgcccgtgggtgctgtatgtcgccgcgctgttccacgacatcgcgaagggtcgcggcggcgaccactcgacgctcgggatggccgacgcacggcgcttctgccgcgagcacggcatcgccggcgacgatgcggcgctgatcgtgtggctcgtccagcatcacctgacgatgagccaggtcgcgcaaaagcaggacacgagcgaccctgaggtcgtcaagcgcttcgccgaagtcgtcggcaacgagcgttacctcaccgcgctgtacctgctgaccgtcgccgatatccgcggcacgagcccgaaggtatggaacacgtggaagggcaagctgctcgaggacctctaccgcatcacgctcgcggtgctcggtggggccagccccgacgcgcattccgagctgaagtcgcggcaggagcaggcgctcgcgctgctgcgtctcgagaccgtgcccgacgacgcgcatcgcgcactgtgggatcagctcgatgtcggcttcttcctgcgtcacgacgcggccgacatcgcgtggcagacacgcgtgctgtaccggcacgtgaatgccgaaaccgcgatcgtccgcgcgcggccgtcgccgatcggcgacgcgctgcaggtgctcgtgtacgtgaaggatcgccccgacctgttcgcgggcatctgcgcgtatttcgaccgcaacgggctgtcggtgctcgacgcacgcgtcagcacgacgcggcacggctatgcgctcgacaacttcatcgtcacgcagaccgaacgtgacgtgcggtatcgcgacatcgcgaatctcgtcgagcagcaactcgcgtcgcggctcaccgaaaccgcaccgctgccggagccgtccaagggccgcctgtcgaggctgtcccggacgtttccgatcacgccgcgcgtcgacctgcgggcagacgagcgcggccagtactacatcctgtccgtgtcggccaacgaccggccgggccttctctattcgatcgcgcgcgtactcgccgagcatcggatcggcgtccacgcggcgcggatcaacacgctcggcgaacgcgtcgaggacatctttctgctcgcgggtgccggcctgtccgacaaccgcctgcagatccagctcgaaaccgaattgctgcgtgcgatcgcagtctgaa

SEQ ID NO: 254696 - DNA, 1183 bp, Unknown
  Bacterial polypeptide expressing nucleotide sequence isolated from the Sargasso Sea
aatgcaatctttagaatcacaagaaatactctacttagcaggattatttcatgacatagcaaaaggcaggggtggagatcattctattctaggagcaaaagatgctgaagatttttgtatttcacatggtatgacaagatatcaatctaaacttgtttcctggcttgtagaaaaccatttgattttttctttaactgcccaaaagaaagatattcatgatccattggttatcaaagaacttgcttcaattattggagatgaggaacgactagaatacttatttcttctaacggtttgtgatgtgagagcaacaaatccaaatttatggaatagctggaaagaaagactcttcaaagacctttatcaattaacaaaaaatgcccttagaatggggcttgaaaatacccttgataaggaagaaattgttaaagagaaaatagaaataactacaaaatatctagagattcaaggcctcgatgtcactgaaatggatgcagctatcgggaagttgactgaggaatatttcctaagatttaatcaggacgaaatcaattatcatcttgagaaactcatatcaaataaagttaaagaccatggaaataccatcattggactgaaactcattgaggaagagggtttgatgctgctattcataaaaactcttattgattttgatactttctcgataatcacaaataatttggtcgataaaaacgtatccattagagatgcaaaagtcattgaactgaatgatggtagctgtatatacaatttctacaccgatatgcccaaaggtgacgcttacgatattgaaaataaaatagaatctttaattggaaacttgagcttaagacttgaaaaaaaacaaataactaggaaaaagaaattcaaattaccgcgaagactaagaagttttaaaacatcaacaaaagtaaattttttagaggatcatgttcataatcgaactgtcctagaaatggtttcaatagataggccgggtcttctagttgatatatctgaggtcctaagaataaataatatttggatcgaatcagcaaagatagcgacaattggcgaaagagctgaggatgtcttttatctcagaaacgaacatcaggatgccattcctcttgaaacaacaaagagattggagtcagaactgattgagtcattggatagttaa

SEQ ID NO: 254697 - DNA, 1330 bp, Unknown
  Bacterial polypeptide expressing nucleotide sequence isolated from the Sargasso Sea
gtgctcggacgctacctgctgaacttccggcgcattgtcgggcagatgcagcacgacctgtatcacgtgtacacggtcgatcagcacatcctgatggtgttgcgcaatctgcgccgcttcgcggtagccgagcatgcgcacgaatatccgttctgcagccagttgatcgccaatttcgaccggccgtgggtgttgtacgtggcggcgctgtttcacgacatcgccaagggccgtggcggcgaccattccacactcggcatggccgacgcgcggcgcttctgccgtagccacggcatcgagggcgaggacggcgaactggtcgtctggctggtgcagcagcatctgaccatgagccaggttgcgcagaaacaggacacgagcgaccccgaagtcatcaagcgctttgccgaactggtcggcaacgaacgccggctgaccgcgctttacctgctgaccgtggccgacattcgcggcaccagcccgaaagtctggaacacgtggaagggcaagctgctcgaggacctctaccgcacgaccctggcggtgctcggcggcgcgcggcctgacgcgcactccgagctgaagtcgcgtcaggaagaagcgttggccctgctgcgcctggaaaccgtgccggaaggcgcgcaaaaggcgctgtgggacaagctggacatcggctacttcctgcgccacgacgcggcggacattgcctggcagacccgcgtgctgtaccggcacgtggaaaccgcgacaccgatcgtgcgggcacgtccgtcgccgatcggcgaagcgcttcaggtgctggtctatgtgaaagaccagcccgatctgttcgccggcatttgtgcgtatttcgaccgcaatggcttgtcggtgctcgatgcgcgggtcagcacgacccgtcacgggtacgcgctcgataatttcctcgtcgcgcataccgaagaagacgtgcattatcgcgatattgccaatctggtcgaacaggaactgaccgcacgcctcaccggcgacggcaccctgctaccgggaccgtcgaaaggccgtttgtcgcggctgtcgcggaccttccctgttacgccgcgcgtcgatcttcgggccgacgagcgcggccaatattacatcctgtccgtgtccgccaacgaccggccaggccttctttattcaatcgcgcgcgtgctggccgagcaccgggtcggcgttgcgtcggcgcggatcaatacgctcggcgaacgtgtcgaagacgtgttcctgctagacggacacggtctgtcggacaaccgcctgcaaattcaggtcgagaccgaactgctgcgcgcgattgcagtgtgag

SEQ ID NO: 254698 - DNA, 2194 bp, Unknown
  Bacterial polypeptide expressing nucleotide sequence isolated from the Sargasso Sea
atgaccaatatgctagagcatagaaaactagttggaaacgaaggaattcataggcaatttctatcgattttaaatacaaaaaacttatggagaaataaaatatttttagaagcaaaaatggaagagcaaatgcttagacatgagcgttttaataatacggaatacaatttagaacctgatataaaatcctctcctggaggtcttcgagatatacatacaatagattgggttttaaaaaactttcaaagaaatatatctcaggatgctgtaaatcttgattcaataataactcaagaagaaaaacatgagcttcttaaatctaagcattggctatggactataagatatttactccatgaagaagccaatagagaagaagatagactgctctttgagcatcaaataactatagctcaaaaattatttccttccgttaaagattcaaattctgcagctgaaaaattaatgcatagatatttcagatcagccttaaatatatcagaaattaattcaacggccctacaagcttgtaaagaaataactgcaacgagtaaattgaagcgaaaaaaaataattgatacaaatttttatgaaaaaaataacctaattcatttaacagacctaaatggtttcaagaaaaacccttctttgttgttagagctatttgtgaagcttactgaaaacccaaaaataaaaggtatctcatctaatacgctcagaatgttaaaaagagatagaactttaattgatgcaagatttagagctaaaacaaaaaacatcaatttgtttttaaaattactaaaatctaaaaggctgattgtaacgcaattagagaatatgaaaaatttgggtattctaggaagatatttacctgaattcggaagggttacagggcaaatgcaatatgaccttttccatatttatactgtggatgctcatacccttcaggttttgaggaatataagaagaatgattctaaggaagtcaaacgatatatatcctttggcaactaaattagtaacaaaattaccaaaaatagaacttctttatattgcaggtctgtatcatgacattggtaaaggccgaggttctgaccactccaatttgggaaagtccattgcaggaaaattttgcactaagcatctatttactgatgaggataaaaagactgtgcaatggctagttgtgaatcatctattaatgtctgttaagtcacaaaaggaagatctctctgatcctcaagtgattagtgattttgctaagacagtgaagaccaaagatcgattaaactacttatattgcttaaccgttgcagatgtgagtgccactaatcctaacttatggaattcatggaatgcttctttactaagcgagctctacacaaaaacccttgagtatctagagaataaaaattctataattctctccccaaaagaaaataaagccgaggcattaatgcttattgaaacaatgcaaagcaaagttgtcagcaaagttaaaaatacttggaagaatttctactctgattattttgagaattttaattatagagatcttgtcttacacgctaaatatctaagcacactagaagatgaaactttagttgagataattgaaaaaaattctgattccttatctactgtcatgatccatacgaaagacagagctaatgtgtttgcaacaataatcggcattttggattcagaaaatataaatttcttggacgcaaaattattcggaatgagaaacgggtattgccttgatttcattactattagtgaccaatctgggcaaatgattaaaaaaaattcaagtattgcaaattcactagtaacaagactgatagaagcgcttgatcaagagactctattgcctaaaattgtccaaaggagacagccaagacatttaaaacattttaatactgatactatcattgaatacaaacatgatatgactcacagatggacagagatggatataaaaacatcggatcgacccggtttattggcctcaatttgtaaggtattccttgatcatggcgcattaataaaaaaagctagaattgcaacttacggcgaacgtgcagaagacaagttttgtataacttcaaaagaaaataccccttttttaaaaaagactgaacttgaaaaattaatcaatgatatgaatgtgtcattatctaaaaagaaatgaa

SEQ ID NO: 254699 - DNA, 1161 bp, Unknown
  Bacterial polypeptide expressing nucleotide sequence isolated from the Sargasso Sea
aaatactctacttagcaggattatttcatgacatagcaaaaggcaggggtggagatcattctattcttggagcaaaagatgctgaagatttttgtatttcacatggtatgacaagatatcaatctaaacttgtttcctggcttgtagaaaaccatttgattttttctttgactgcccaaaagaaagatattcatgatccattggttatcaaagaacttgcttcaattattggagatgaggaacgactagaatacttatttcttctaacggtttgtgatgtgagagcaacaaatccaaatttatggaatagctggaaagaaaggctcttcaaagacctttatcaattaacaaaaaatgccctgagaatggggcttgaaaatacccttgataaggaagaaattgttaaagagaaaatagaaataacgacaaaatatctagagattcaaggccttgatatcactgaaatggatgcagctatcgggaagttgagtgaggaatatttcctaagatttaatcaggacgaaatcaattatcatcttgagaagctcatatcgaataaagccaaagatggggaaaataccatcattggactgaaactcattgaggaagaaggtttgatgctgctattcataaaaactgttattgattttgatactttctcgattatcacaaataatttggtcgataaaaatgtatccattagagatgcaaaagtcattgaactgaatgatggtagctgcatatacaatttctatactgatatgcccaaaggtgacgcttacgatatagataataagttagaatctttaattggaaacttaagcttaagactcgaaaaaaagcaaataactagtaataagaaattcaaactgccccgaaggctaagaagcttttcaacatcaacaaaagtaaattttttagaggatcatgttcataatcggactgttctagagatggtttcaatagataggccaggtcttcttgtcgatatatctgaggttctaagaagaaataatatttggatcgaatcagcaaagatagcgacaattggcgaaagagctgaggatgtcttttatctcagaaacgaacatcaggatgccattcctcttgaaacaacaaagagattggagtcagaactgattgagtcattggataattaat

SEQ ID NO: 254700 - DNA, 1766 bp, Unknown
  Bacterial polypeptide expressing nucleotide sequence isolated from the Sargasso Sea
gatgttagaagagttaaaaaaccaaaagaagactgatagcaatattttatctaaacaatttgaccaatggctctataaagacagaggcaggaaaattagaggaatagaatatttcttaaatcaaaggtctgaaaatatcgataaattaattcgaaaagcacatgatatgagcgatctatgctctatcaaagatttcggtatattttctgttggaggatacggccgtggagagcttcatcccttctcagacatagatttattgcttctttctgagtcaaatctttcaaccggtgagcagaaaaaaatagaaaaatttataagccttttatgggacttaggattagatatcggacatagtgtgaggaccttagaacaagcaaagaagcaggctcgagaggatatttttacaatgactaatatgcttgaatttagaaagcttactggctcagaagatttgcataaaatgtacttagacatcatagatacaaaaaatctatggagaaataaatcatttattcaagaaaaaattaaagagcaaatcgagcgccatgaaacattcaacaacacttcttacaatttagagcctgacattaaatcttctcctggtggactgagagacattcataccattgactggctaatcaaaaattctcttagaagtgtttcagaaaaggaaaaacttactggtgcgcttacctttgaagagagaaaagaactcaacaaagctaaatattggctttgggtcataagatatttaactcatatagaagcaaatagagaggaagatagactgctctttgagcatcaaataccagttgctatgaaattatttccatcatctaagacatctaaccaagcggcagaaaagttgatgcatagatactatcgatcttcattgagtgtctcagaaataaactcaaccttcatccagaatattaaagagacttatgacttaacgaagttttctagaaagaaaaatcttgattctaatttcttcattaaaaataatcttattcatctctacgaaatggacggttttaaaaaaaatcctagcctacttttggagctttttattaaattaagtgaaaatcccaccgtaaaaggtattgggtcgcaaacgctcagagctctaaaaagagatagggatctaatagattcaaagtttagatctaacaaaaaaaacatccgactctttcttaaacttctcaagtcaaaaagattgttagtaacacaattagaaaaaatgaaggatttaggtattttgggaagatacttgcctgagtttggaagaataactggacaaatgcaatatgatttatttcatatttatacagtagatgctcatacattagaggttcttaggaatatgaggtggatgtctcttggaaaatcagaagaaagatttccccttgcttcgaaattgatcaataaattacccaagctcgagatcctttatatctcaggtttatatcatgatattggaaaaggaagaggtacagatcattccaatctaggtaaatcaattgtgaatagcttttgtaaaaggcatttatttcaagaagaagacacccttctcattgaatggttagttgagaatcaccttttaatgtctgttacttcgcaaaaaaaagacctttctaataacttagtagttaaggaatttgcagaaaaggtaggtaatttagagacacttgattatctttattgcttaacagttgcagatgttagtgcaacaaatccaagtttatggaattcatggaatgcat

SEQ ID NO: 254701 - DNA, 549 bp, Unknown
  Bacterial polypeptide expressing nucleotide sequence isolated from the Sargasso Sea
aactgttattagacccaaatagtggtacgcttaatagtttattattaaattatcaaatcattgaaactccaataaatttacttggacaaaaatatattgaaattagtatttttggttttgattttaaattaagacttgctctaactacagttataatgtttgaaatttggaggtatttccctttagcctttttatttattcttgcaagacttcaagcaataccaaaggaattatatgaagctgccgatgtcgatggcgcaagtccatttcaaaaattttttaaaattacgcttccacaaattactgcggtaatttcgattttattcatgattagatttatatggaattttaataaatttgaggatgtctttttattaactgggggcgcatcaggaacaaggactttaccaataaatgtttatcagcaaggttttgcaatttcagatattggaatgggttcagctgtttcaatagtaatagttgtattacttttaatgtttatgtttttttattttagacttttagggaagagggtagatgagaactaaa

SEQ ID NO: 254702 - DNA, 681 bp, Unknown
  Bacterial polypeptide expressing nucleotide sequence isolated from the Sargasso Sea
tatgaaaaaagaattaacagatttgtttaaaggctcagaaatttctgatgctcaaaattttaatagcataaaaatttcactagcaagtcctgaaaagataaaatcatggacttatggtgaaattaaaaaacctgaaaccataaattatagaactttcagaccagaaaaagacggactattttgtgcaagaatatttggtccaataaaagattatgaatgtttatgtggaaaatataaaagaatgaaatttaggggaattatttgtgaaaaatgtggtgttgaggttactaaatcaaatgtaagacgtgaaagaatgggtcatataaatttggccactcctgtagcccatatttggtttttaaaatctttacctagtagaatagcgttagctgtagatatgaaacttaaagaagtagaaagggttttatattttgaaaatttcatagttatagaaccaggtttaactggattaaataaaaaccaacttttaaatgaagaagaattaacaaaatatcaagacgaatttggagaagaagcatttacggcaggcataggtgcagaagctgttcttgaaatgttaaaaaatttagatctagagcttgagaaaaaaaatcttgttaattatatcaaagaaacaaaatcaaaagttaatgaggaaagagcgattaaaagattaaaatt

SEQ ID NO: 254703 - DNA, 386 bp, Unknown
  Bacterial polypeptide expressing nucleotide sequence isolated from the Sargasso Sea
agctgaggatgctgttgcatattcagcaaggagttttcaagagcaattaaaaatgtttattaattttgatgaaccagttgaagcaccagtcaaggaagtttctacagaacctgaatttaataaaaatttattgagaaaagttgatgaacttgaactgtcagtaagatctatgaattgtcttaaaaacgataatattatttatattggagatttagttcaaaaatcagagggtgaaatgttaagaacaccaaattttggaagaaaatctttaaatgaaattaaagaagttttaactggaatgtctttatatttaggtatggagataccaaattggccaccagataatatagcagaaatgtcaaaaaaacttgaggagactatttaat

SEQ ID NO: 254704 - DNA, 952 bp, Unknown
  Bacterial polypeptide expressing nucleotide sequence isolated from the Sargasso Sea
ggtgctaggaagggattggctgataccgcattaaaaaccgcaaactccggatatttaacaagacgcctggtggatgtatctcaagacagtgttgttttagaggaagactgcggaaccctagatggaattgaaatgactgcacttatagaatctggagaaatcattgaacctttgggagaccgcatcttaggtcgcgttttacttgaagacgtaattgatccagaatctgaatatgatatcctcattcctgctgggacactcatcaatgagaaagaaagagatgcaatccagaatacaaggatagaaaaagtacaaatacgatcacctctaacttgtatgacagaaaagggtgtctgcaggtcttgttatggtcgcgatttatgtcatggggggttagtaaacttgggtgaaaccgtaggcgtgattgctgcccaaagcattggagaaccaggaactcagctgaccatgaggactttccacattggtggaacagctagtagatcagttgaacaaaataagtgggaggcaaatttcagtggtgtactacgcttcgatgatcttaaagaagttaaaaaccgagaaggtaacatagtgatacttggacgtcggggagaagcattaatcgttgaaggagacaaaacaataaaacctaaatcattaggaaatcttgaaaatgaaagagaacgtgaaaggcgcccccttccaatgggtgctactttgatcaagcaagaaggtgagttcgtagaacagggggacttaattgcagaatgggaccctttttcagtcccaatcataacagatgtatcaggaatagttgaatttagggatataagtgaaggagaaacgtttaaagagcaggtagatgaagtctcaggcgtttcaagaaaagttatccatgaatctcaaagcatggaacaacgcccattaattgcaatctgcgataaaaagaaaa

SEQ ID NO: 254705 - DNA, 944 bp, Unknown
  Bacterial polypeptide expressing nucleotide sequence isolated from the Sargasso Sea
aaagcatacagaatgttagaagatgacggtatggtagcaactgaatctggtgttgacggcggagatattttgattggaaaaactagtcctccaagatttatggaagagtataaagaatttgaaacaagtggtccatacagacgtgatacatctgttggtgtaagaccatctgaacatggtgttgttgacaccgttgtaatgactcagtcaaatgaaggtggaaagatgtacaaaatacgtgtacgtgatatgagaattccagaaattggtgacaaatttgcatcaagacacggacaaaaaggtgtacttggcattttagcaaaacaagaagatcttccatatactgaggatggaacacaacctgatgtcttgattaatccgcatgcattcccatctagaatgactgttggaatgatgatggaatctgtttgtggaaaagcagccgcacttagaggaaaacaatttgatggttctgcatttgttggagaaaaaatggacattgtaaaagaaattcttgataaacaaggtttcaagtattctggtaaagaaaagatgtatgacggtagaaccggtaaagcatttgaagttgatactttcatcggagttgtatattatcaaaaacttcatcatatggtttcagataaaattcatgctagagcaagaggtcaagttcagatgcttactaaacaaccaactgaaggtcgtgcccgtggtggtggtttaagatttggtgaaatggaacgtgactgtttaattgcatatggtgcatcaatgcttctaaaagatagattgttggatgaatctgataaaactgacattttactatgtgaaaaatgtggattaaccggttatcatgatgcaagaaaaaggaaatttgtctgtgcacaatgtggtgaaaatgcacctatatcatctgtatcagttgcatatgctttcaaattact

SEQ ID NO: 254706 - DNA, 121 bp, Unknown
  Bacterial polypeptide expressing nucleotide sequence isolated from the Sargasso Sea
atttattaatcgtcttcctcaaggatttttggctgtagatgcagtatttatgccggttcgaaaggtaaatttttttgttgaacttctcgaaatagttcattttctgttacggaaagtttaa

SEQ ID NO: 254707 - DNA, 712 bp, Unknown
  Bacterial polypeptide expressing nucleotide sequence isolated from the Sargasso Sea
gccgagcccgtcgtcttgacgctcgaagtcgagaaggagggggagataaccgccgccgacatctcgcccgccgaagggatcgagatcatcaacccggaacaactcatcatgactaccgaccgcaagcagaagatcgttgcggaaatgacggtttccgttggcagaggcttttgccttggggaggacagcaaaaccgacgatcaagcgattggcattatcaacgtcgatgctctctacagccccgtcaagctggtgaagtataacgttgagaatacacgtgtcggacaaatgaccgactacgacaagcttattctggaggtaaacacggacggaaggatctcacccgacgatgccctcaagcaatccgccgcgattctccggcatcacttggatgtttttgatcagataagcgaagagcagatcgagttcgaaagccattccaaggaagtgagcgaggaacagaaccgactgagaaacctgcttagcatgagcgtgaatgaaatcgaactctcggtacgggccgcaaattgcctcaacaacgccaacattactaccgttggggagcttgctaccaaatccgagcccgagatgctcaagtatcgaaactttggcaagaaatcgctcaatgagatcaaggccaagctggagcaacttggcttgtccttgggaatgaagtttgaaaatcgcttgcttgattcagcatccaattaat

SEQ ID NO: 254708 - DNA, 436 bp, Unknown
  Bacterial polypeptide expressing nucleotide sequence isolated from the Sargasso Sea
gatggaggaggaccacgaggattacggcgacgacgacgtcgaccgggacgacgcgatcgaccacgacctcccggacgaggacgcggacgaggacgcggacgcgcgcgaggtgatcgaatcggacgaacgactcgatggacgcggacgacgaggactcggtcgagcggtgccgagacacgagcggacgacgacgccgtacatgacgaaatacgagcgggcgagaattttggggacgcgcgcgttgcaaatttcgatgaacgcgccggtgttggtgcagttggagggagagacggatccgttggagatcgcgggaaaggaattgagagagaagagagtgccgtttatcgtgcgacggtacatgccggacggatcgtatgaggattggggattggaggagttgatcgtcgcggacccggaccagagacgcgcggggtga

SEQ ID NO: 254709 - DNA, 604 bp, Unknown
  Bacterial polypeptide expressing nucleotide sequence isolated from the Sargasso Sea
aatactaattttcatatggaaatgaacgtaggaacaggtaaaggatatgtttctgcagatatgaacaaacctgaagatcctccactagggttaatacctattgactctctctatagccctgtaaaaagagtgtcttattcagtaagtacggccagagaaggaaaagctttagactatgataagttaacaatggaagtagaaactaacgggtcgatttctgctgaagacgctgttgcatatgctgctagaatttttcaagatcagttgggtatgtttgttaattttgatgaacctcaagaagttattgttagagagcaacctgcagaaccagaatttaacaaaaatctattaagaaaagttgatgaattagaactttctgtaagatctatgaattgtctcaagaatgacaatataatttacattggtgatttagttcaaaaatctgaaggtgaaatgctaaggacgcctaattttggtagaaaatctctaaatgaaattaaagaagttttaacaggtatgtcgctatatttagggatggaaataccaaattggccaccagacaatattgcagaattatcaaaaaaacttgaggaagcaatataat

SEQ ID NO: 254710 - DNA, 889 bp, Unknown
  Bacterial polypeptide expressing nucleotide sequence isolated from the Sargasso Sea
cgtccctcgggttaaacaagacaataatcaacgaatggaagatgatttaacccacaaatattgtgatattgtaaagacaaatcgaacgttaaagaataaaattaaatcacaatccgcatctcatattattgatgaatgggtatcactcttacaatatcatgtggcgactctcatcgataatcaaattcccggattaccttcttccacccagcgttctggaagaccgttaaaatctcttcgagaacgttgtaaaggaaaagagggtcgtgttcgtggtaatttaatggggaaacgtgtggattttagtgcgcgtagtgtcattactccggatcctaatattggaattgacgaattaggggtacctaaaaaaatcgcaaagaatctaacttatcctgaaattgtcaatcaatttacaattgagcgattgacacaagcagttcgaaatggtcctcatcattatccgggggccttatcctttactcatacgaaatcaaagattacaaagtccttacttcatattccagatcgagatgtgattgaattagaatttggcgatgtggtcaatcgtcatttaatcgatggagatatcgtaatgtttaatcgacaaccgtctcttcacaaaatgagtatgatgggtcaccgaattcgtgtcatggattatgatacatttcgattaaatgtaacggttacaagtccttataatgctgacttcgatggggatgaaatgaatatgcatgttcctcaatctatcttagccagtactgaaattgaaaaattagcgttaattcctacacaaattgtgggacctcgagaacatcaaccgcgaattggtattgttcaagatacgttattaggttccaatcgatttaccaaatatgatgtgtattta

SEQ ID NO: 254711 - DNA, 734 bp, Unknown
  Bacterial polypeptide expressing nucleotide sequence isolated from the Sargasso Sea
tatgagtaaagaattatcagatttatttaagtcatcagaaatatctgatgctcaaaatttcaatagtataaaaataactctagcaagtcctgaaaaaattaaatcatggacatttggtgaaataaaaaaaccagagacaattaattatagaacattcagacctgaaaaagacggtttattttgtgcaagaatatttggaccaatcaaagactatgagtgcttgtgtggaaaatataaaagaatgaaatttaggggtatcatatgtgaaaaatgtggagttgaagtaacaaaatcaaatgttcgaagagaaaggatgggacacataaacttagctactccggtagcgcatatttggtttttaaaatcattacctagtagaatttctcttgcaattgacatgaaacttaaagaagtagagagagttttgtattttgaaaattttatagttatagaacctggcttaactggacttaaaaaaaatcagctattaggagaagaagagttaataaaataccaagatgattatggtgaagaagcttttactgctggtattggagccgaagcaatattagaaattttaaaatcaattgatttaaaggaagaaagagaagctttaattaaaagtataaaagagacaaaatctaaagtttctgaggaaagatctattaaaagactgaaactaatagagtcttttattgaaactggaaacaaaccagagtggatgatattaacaa

SEQ ID NO: 254712 - DNA, 304 bp, Unknown
  Bacterial polypeptide expressing nucleotide sequence isolated from the Sargasso Sea
tgttaaagaggttaaatcttcagagccagaatttaatagaaatttattaaaaagagttgaagaactcgaactatcagtcagatctatgaattgtttaaaaaatgataatataatttatataggggatttagttcaaaaaactgagccagagatgttaagaacgccaaattttgggagaaaatcacttaatgagattaaagaagttcttaataccatgtctttatatttaggaatggaaattcctaattggccaccagacaatatagctgaattatctaaaaaacttgaggaaaatagttattaa

SEQ ID NO: 254713 - DNA, 852 bp, Unknown
  Bacterial polypeptide expressing nucleotide sequence isolated from the Sargasso Sea
gacagggatggaaaccctcgcccgggtgttgtcgtcgaaagacaccttatcgatggtgatgttgcaatcttcaatcgacagccctcacttcacaggatgtctatgttagttcacgaagttcgcgtcatgcctgggaagaccttccgcttcaatctagcagattgtacaccttacaatgctgatttcgatggagatgaaatgaacctccacgtaattcaatctgaagaggcaagagctgaagcaaagattctgatgcgagttcaggagcatatcattacaccaagatacggaggtgctgtaattggaggtatacatgaccacatttcaggcgcttatcttctaactcatggtgagagaataataccgaaggaattggccatggaagtcttgggttctgttggctgggatggcgatatgcctgaagaagttactagcaaggatggcgttgttgggtacagaggtgcagacctcctcagcctaattgttcctgcaggattcaaactaaactataccagcagaagtggagacgaagttaatgtaacgtcaaagggtcttgtaagcggtacgattgacaagcgcggtattggagctgaagacggtaggttgctggatgcagtagttcaaactcatggcactgataaaggggccgaattcctaaatcgaatgactaagatgacaatcgcaatttgtacatcccttggattcaccactggaatcgatgacgaagacttacctcttgcggctattaaggaaatctccgacatcaacgtccgtgctagcgacgaagtagatgctgaattagcaaagtttggtaaaaatggacgcggatatgagacacgaccaggaagaact

SEQ ID NO: 254714 - DNA, 217 bp, Unknown
  Bacterial polypeptide expressing nucleotide sequence isolated from the Sargasso Sea
tatgaattgtttaaaaaatgataacataatttatataggagatctggttcagaaatcagaaggagagatgttaagaaccccaaattttggtagaaaatctctaaatgaaataaaagaagtattaagcggcatgtctttatatttggggatggaaattcccaattggcctccagacaatattgctgaattatcaaaaaaactagaagacgccatataa

SEQ ID NO: 254715 - DNA, 451 bp, Unknown
  Bacterial polypeptide expressing nucleotide sequence isolated from the Sargasso Sea
tagagaaggaaaagccctggattacgacaaactaattatggaagttgaaactaacggatctatatcagctgaagatgctgttgcctattcagcaagaatttttcaagatcaactaaaaatgtttatcaactttgatgaaccagttgaagctccagtgaaagaagtttcaacagaacctgagttcaataaaaatttgttaagaaaagtagatgagctagaactgtctgttagatctatgaattgtttaaaaaatgataatattatctacattggagatttggttcaaaaatccgaaggtgaaatgctgaggactccaaattttggaagaaaatctttaaatgaaattaaagaagttctaactggtatgtcattatatttaggtatggaaatacctaactggccaccagacaatattgcagaaatgtctaaaaaattagaggaagccatctaa

SEQ ID NO: 254716 - DNA, 190 bp, Unknown
  Bacterial polypeptide expressing nucleotide sequence isolated from the Sargasso Sea
atggaaaacgcgataattaatcataattggaaagatttaataaaaccaaataagctaaatattaaaagcagtgatgataaatcttacacaacagttactgctgaacctctagaaaaaggatatgctttaacaattggaaattctctaagaagaattttgctttcatcaatacaaggctctgcaattacag

SEQ ID NO: 254717 - DNA, 511 bp, Unknown
  Bacterial polypeptide expressing nucleotide sequence isolated from the Sargasso Sea
tttgttaattaattatcaaataatagaaacaccgattaacctattaggtcaaaaatatattgcagtaaatattttaggattcgattttaaattaagacttgctcttacaacagttattatttttgaaatatggagatattttccgttggcttttttatttattcttgccagactacaggctattccaaaggaattatatgaagctgctgacgtagatggagcaagtccttttcaaaaattttttaaaataacattgcctcagattacagcagtaatttctattttgttcatgattagatttatttggaattttaataaattcgaagatgtttttttgcttacaggtggagcatctggaaccaggacgttgccaataaatgtgtatcagcaaggttttgcaatatcagatattggcactggctcagctgtatctatagtaatagtaattcttttacttcttttcatgtttttctattttaaacttttaggaaagagagttgatgaaaactaa

SEQ ID NO: 254718 - DNA, 812 bp, Unknown
  Bacterial polypeptide expressing nucleotide sequence isolated from the Sargasso Sea
tatgagtagagaattatcagatctatttaaagaaaaatcaatttcagagtctcaaaattttaatagcattaaaattactttagcaagtcctgaaaaaataaaatcttggacctatggtgaaattaaaaaacctgaaactataaactacagaacatttagacctgaaaaagatggtttattttgtgcgagaatttttggtccaataaaagactatgaatgtttatgtggaaaatacaaaagaatgaagttcagaggtataatctgcgaaaagtgtggtgtagaggtaaccaaatcaaatgttagaagagaaagaatgggccatataaatctagctacaccagtagcacatatttggtttttaaaatctttacctagtagaatttctttagttatagacatgaagcttaaagatgttgagaaagttctttattttgaaaactttatagtaatagaaccaggacttacaggacttcaaaaaaatcaacttctttcagaagaggaactgataaaatatcaagatcagtacggagaagaatctttttctactggaattggtgcagaagctatattggaaattttaaaatctatagatttaaaacttgaaagagaaaaacttgcaaaatcgatcaaggaaacaaaatcaaaagttacagaagaaagaaatattaaaagattaaaattaatagactcttttatagaaacagggaataagccagaatggatgatattaactactataccagttataccgccagaattaagaccattagtacctcttgatggaggtagatttgccacttctgatttaaatg

SEQ ID NO: 254719 - DNA, 247 bp, Unknown
  Bacterial polypeptide expressing nucleotide sequence isolated from the Sargasso Sea
gttgatgaactagaactttctgttagatcaatgaattgtttaaaaaacgacaatattgtttatataggagatttagttcaaaaaactgaaccagaaatgttaagaactccaaattttggtagaaaatctcttaatgaaattaaagaagtgttaaattccatgtcgctttatttaggcatggaaatacctaattggcctcctgataacatagctgaaatgtcgaaaaaacttgaagaaagtatataaa

SEQ ID NO: 254720 - DNA, 624 bp, Unknown
  Bacterial polypeptide expressing nucleotide sequence isolated from the Sargasso Sea
tatgaaaaaagaaattactaatttattcaaaagttcagaaatttctgaagctcaaaattttaatagcattaaaattacacttgcaagcccagataaaataaaatcatggacttacggagaaattaaaaaacctgaaacaataaattatcgaacttttagaccagaaaaagatggtcttttttgtgcaagaatatttggaccaataaaagattatgaatgtttgtgcggaaaatacaaaagaatgaaattcagaggtattatatgtgaaaaatgtggtgttgaagttacaaaatcaaatgtgagaagagagagaatgggtcatattaatttagcaacaccagtagctcatatttggtttttaaaatctttacctagtagaatatcattagctatagatatgaagcttaaggaagttgaaagagttttatattttgaaaatttcatagtaattgaaccaggtcttactagtcttaaaaaaaaccagctattaaacgaggaagaacttactaaataccaggacgagtatggagaagagtcctttactgcaggtattggcgccgaagctattcttgaaatattaaaatcaattaatttagaagaagagaaaaatgctttaattaaagc

SEQ ID NO: 254721 - DNA, 838 bp, Unknown
  Bacterial polypeptide expressing nucleotide sequence isolated from the Sargasso Sea
cgtcatcggggagttcacggagctgctgcagtaccacatcatgacgttcatggataacaccgtggcggggatgccccgggcgctgacgcgaagcgggcggccgatcaagagcatctcggagcgcctcaaggggaagaacgggcgcatccgcggaaacctgatgggaaagcgcgtggacttctccgcgcgcacggtcatcacccccgaccccaacttgatgctggacgagctcggcgtgccttggagcatcgcgctcaacatgacgtaccccgagacggtgaccccgtacaacatcgagcgactgaagaagctcgtggagaacggaccgcaccctcccccgggcgagacgggggcgaagtacatcatccgcgaggacgggcagcgcatggacctgaggttcctgaagaaggagagcgaaaagaggctggagtacgggtacagggtggagcggcacatgatcaacggcgactgcgtgctgttcaaccgccagccctccctgcacaagatgtccatcatgggccaccgcgtgcgcatcatgccgtactccacgttcaggatgaacatctccgtgacgccgccgtacaacgccgatttcgacggggacgagatgaacatgcacctcccgcagtcgatggagacgcgcgcggaggtgcaggagctcatgatggtgccgaagatgatcgtctccccgcaggcgaacaagcccgtgatggcgatcgtgcaggacacgctgctggcgtgccgcctgatgaccaagcgcgacacgttcatcaccaaggacgtcttcatgaacatcctgatgtggctcgagaattgggacggcaaggtgcctaaaccg

SEQ ID NO: 254722 - DNA, 476 bp, Unknown
  Bacterial polypeptide expressing nucleotide sequence isolated from the Sargasso Sea
agtttcatattcagtaagcactgctagagaaggtaaagccttagattatgataaattgattatggaagtcgaaactaatggatcaatttcagctgaagatgctgtagcttattcagctagaattttccaagatcagcttaagatgtttataaattttgatgaaccagttgatgttccagtaaaagaagtttcgacagagccagagtttaacaaaaatctattaagaaaagtagatgagctagaattgtctgttagatcaatgaactgcttgaaaaatgataatattatttatattggggatttggttcaaaaatctgaaggtgaaatgctaagaacaccaaattttggaagaaaatcattaaatgaaattaaagaagttttaacaggcatgtctttatatttaggaatggaaatacctaattggccgccagataatattgctgaaatgtctaaaaaattagaggaagcaatttaaa

SEQ ID NO: 254723 - DNA, 417 bp, Unknown
  Bacterial polypeptide expressing nucleotide sequence isolated from the Sargasso Sea
ttatggaagttgaaaccaacggatcaatttcagctgaagatgccgtagcctattcggctagaatatttcaagatcaacttaaaatgtttattaattttgatgaaccagttgaagcccctgttatagaagtttcaacggagcctgagttcaataaaaacttgttaagaaaagttgatgagcttgaattatctgtaagatcaatgaactgcttaaaaaatgataatatcatttatataggtgacttagttcaaaaatctgaaggtgaaatgttaaggaccccaaattttggtagaaaatctttaaatgaaataaaagaagttttaacaggtatgtcactgtatttaggtatggaaatacctaactggccacctgacaatatagctgaaatgtctaaaaaattagaggaagcaatttaat

SEQ ID NO: 254724 - DNA, 778 bp, Unknown
  Bacterial polypeptide expressing nucleotide sequence isolated from the Sargasso Sea
tatgaaaaaagaacttaaagatatttttaaaaacactgagatatcagactcgcagaactttaatagtattaaaatttcattggcaagtcctgaaaaaattaagtcatggacatatggtgaaattaaaaaacctgaaacaataaactacagaacatttagaccagaaaaagatggtttattctgtgcaagaatttttggaccaattaaagattatgaatgtttgtgtggaaaatataagagaatgaagtttagaggtattatatgtgaaaagtgcggtgttgaagttaccaaatcaaatgtaagacgtgaaaggatgggtcatattaatcttgcaacaccagtagcacatatctggttcctaaaatctttaccaagtagaatctctttagcaatcgacatgaaattaaaagaggttgaaagagttctttactttgagaactttatagtcatagaacctggtctgaccggtctaaagaagaaccaattattatctgaagatgagttaataaaataccaaaatgagtatggcgatgagtcttttaccgcaggtattggagcagaagctatattagaaatattaaaaaatattaatttagaacaagaaagagaaattcttgtaaaaaatatcaatgaaacaaaatctaaagtttcagaagaaagatctattaaaagattaaaattgattgattcatttattaagactggaaatcaacctgaatggatgattttaacagtaatacctgtgataccaccagaactaagacctttggtacattag

SEQ ID NO: 254725 - DNA, 376 bp, Unknown
  Bacterial polypeptide expressing nucleotide sequence isolated from the Sargasso Sea
atggcaatactaaattttcaaaaaccagataaagtaatcatgatagattcaacagaatctcatggaaagtttgaattcagacctcttgagccaggttatggattaactataggtaatgctcttagaagagttttactttcatccttagaaggatatgcatttacatcagttaagattgagggagttgaccatgagttttctacaatagaaggtgtagtagaagatgttacagaaatcatattaaatattaaacaaataagattaaaaagacaaattgatgattttgatgaggaaaaaataaatattgtaattggtaatcaaaaggaattgaaagcttctgattttcaaaagtttatttctggatttcaaatttgaa

SEQ ID NO: 254726 - DNA, 211 bp, Unknown
  Bacterial polypeptide expressing nucleotide sequence isolated from the Sargasso Sea
aatggaagtcgaaaatgttaatgtaaaaaattggaagtcattaattaagccatctaagttagatgttcaaataagtgatgacttaacacatgcaaaaattgtagctgagcctttagaaaaaggttatggattaactttaggaaattctctaagaaggattttgttatcatctataagaggggctgctgtaacttcaattcaaattgatgga

SEQ ID NO: 254727 - DNA, 922 bp, Unknown
  Bacterial polypeptide expressing nucleotide sequence isolated from the Sargasso Sea
aaaaccgcaaactcaggatatttaacaagacgcctagtagatgtatcccaagatagtgttgttttagaggaagactgcggaaccctagatggaattgaaatgactgcacttatagaatctggggaaatcattgagcctttgggagaccgcatcttaggtcgcgttttacttgaagacgtaattgatccagaatctgaatatgacatccttattcctgctgggacactcataaatgagaaagaaagagacgcaatcgagaataccaggattgaaaaagtacaaattcgatcacccctaacttgtatgacagaaaaaggtgtctgcagggcttgttatggtcgcgatttatgtcatggaggtttagtaaacttgggtgaaaccgtaggcgtaattgctgcccaaagcattggagaaccaggaactcagctgaccatgaggactttccacattggtggaacagctagtagatcagttgaacaaaataagtgggagtcaaatttcagtggtgttctacgcttcgatgatcttaaagaagttaaaaaccgtgaaggtaatatagtgatacttggacgtcgcggagaagcagtagtagttgaaggcgacaaaacaataaaacaaaaatcattaggaaatcttgaaaatgaaagagaacgtgaaaggcgcccccttccaatgggagctactttgatcaagcaagaaggtgaattcgtagaacagggtgaactaattgcagaatgggaccctttttcagttccaatcataacagatgtctcaggaatagtagaatttagggatataagtgagggagaaacgtttaaagagcaggtagatgaagtttcaggtgtttcaagaaaagtcatccatgaatctcaaagcatggaacaacgcccattaattgcaatctgcaataaaaagaaaaaaa

SEQ ID NO: 254728 - DNA, 759 bp, Unknown
  Bacterial polypeptide expressing nucleotide sequence isolated from the Sargasso Sea
catgaaaaaagaattaacagatctttttaaaaatagtgaaatttctgaagctcaaaattttaatagcattaaaatttctttagccagtccagagaaaattaaatcttggacttatggtgaaataaaaaaaccagaaacaattaattatagaacgtttagacctgaaaaagatggcttattttgttcaagaatttttggaccaataaaagattatgagtgtctttgtggaaaatataaacgtatgaaatttagaggtattatttgtgaaaaatgtggtgttgaagttacaaaagccaatgttcgaagagaaagaatgggccatattaaccttgctacacctgttgctcatatttggtttttaaaatctttacctagtagaatttctttggcagtagatatgaagcttaaagaaatagaaagagtgctttattttgaaaattttatagtaattgaacctggtcttacaggattacaaaaaaatcaacttcttaatgaagaagaattagcaaaatatcaagatcaatttggagaagaagcttttactgctggaataggagctgaagcagtactagaaatgcttaaaagtcttgatttagagtcagaaagaaaaaatctagtaaattatattaaagaaacaaagtcaaaagttaatgaagaaagagctataaaacggttaaaacttatagagtcttttattgaaactgggcaaaaaccagaatggatgattatgactgtagttccagttattccaccagaatt

SEQ ID NO: 254729 - DNA, 183 bp, Unknown
  Bacterial polypeptide expressing nucleotide sequence isolated from the Sargasso Sea
aatggaaacagaaaatgtaaacgtaaaaaattggaaatctttaattaaaccagctaaattagatgtaaaaattagtgatgacttttctcaggccactatagttgctgaacctttagagaaaggttttggcctcaccttgggaaattctttaagaagaattctactatcctctataagaggagc

SEQ ID NO: 254730 - DNA, 574 bp, Unknown
  Bacterial polypeptide expressing nucleotide sequence isolated from the Sargasso Sea
atgaataaacagcttacagatttatttaaaagttcagaaatttcagagacacaaaattttaatagtataaaaatcactttagcaagtcctgaaaaaataaaatcttggacatatggtgaaattaaaaaacctgaaactataaattatagaacttttaggccggaaaaagatggactattttgtgccagaatatttggtccaataaaagattatgaatgtctttgtggtaaatataaaagaatgaaattcagaggaattatatgtgaaaaatgtggagtagaagtaacaaaatccaatgtaagaagagaaagaatgggtcatattaatttagctactccagttgcccacatatggtttttaaaatcattaccaagcagaatatcattatctgtagacatgaaacttaaagatgtagaaaaagttctttattttgaaaattttattgttattgagcctggtttaacaggtcttaaaaaaaatcaattgttaagcgaagaagaattaactaaatttcaggatgaatatggggaagaaaatttcacagcaggtataggagctgaggctatattagaaa

SEQ ID NO: 254731 - DNA, 742 bp, Unknown
  Bacterial polypeptide expressing nucleotide sequence isolated from the Sargasso Sea
catgaaaaaagaattaactgatctatttaaaagtaatgaaattacagattctcaaaattttagtagtataaagataactctagctagtcctgagaaaattaaatcttggacatacggtgaaataaaaaaaccagagacaattaattatcgaacatttagacccgaaaaagatggactattttgtgcaagaatttttggacctataaaagactatgaatgtttgtgtggaaaatataaacggatgaaatttagaggaataatttgtgaaaaatgtggtgttgaagttacaaaatcaaatgttcgtagagaaagaatgggccatattaatttagctacaccagttgctcatatttggtttttaaaatctttacctagcagaatttctttagcggttgatatgaagttaaaagaagttgaaagagttctatattttgaaaattttattgtaattgaacctggtctaacaggattaaagaaaaaccaattattaaatgaagatgaattggttaaatatcaagatgaatatggcgaagaagcttttacagcaggaataggagctgaagcaattttagaaattctaaaagcaatcaatttggaagaagaaaaacaaattttagttaaagctataaatgaaacaaaatctaaagtatctgaagaaagagcaattaaaagacttaaattaattgattcattcattgaaacgggaaataaacctgaatggatgatattaacaactatacca

SEQ ID NO: 254732 - DNA, 743 bp, Unknown
  Bacterial polypeptide expressing nucleotide sequence isolated from the Sargasso Sea
tatgaaaaaagacttaacagatttatttaaaggttcagaaatttcagaatctcaaaatttcaatagtattaaaattacactagcaagtcctgaaaaaattaaatcttggacatatggtgaaattaaaaaaccagaaactataaattatagaacattcagacctgaaaaagatggattgttttgtgctagaatttttggcccaataaaagattatgagtgcttatgtggaaaatataaaagaatgaaatttagaggcataatatgcgagaaatgtggtgtcgaggtcactaaatcaaatgtaagacgagaaagaatgggtcacataaaccttgcaacgccagtagcccacatttggtttttaaaatcactaccaagtagaatttcacttgctatagacatgaaactaaaagatgttgaaagagttttatattttgaaaattttatagtaatcgaaccaggattaacaagtcttaagaaatatcaattgcttggagaagaagagttagccaagtatcaagacgaatatggtgatgaatctttcactgctggaattggagctgaagcaattttagaaattttaaaatctatagatttaaaagctgagagagaaaatttaattaaaacaataaatgaaactaaatcaaaagtatctgaggaaagatctattaaaaggttaaaattaattgagtcatttattgaaactggaaataagccagaatggatgatattgaccgttatacctg

SEQ ID NO: 254733 - DNA, 274 bp, Unknown
  Bacterial polypeptide expressing nucleotide sequence isolated from the Sargasso Sea
tgagttcaataaaaatttattaagaaaagtagatgagctagaactgtctgttagatctatgaattgtttaaaaaatgataatattatctacattggagatttggttcaaaaatccgagggtgagatgctaaggactcctaattttggaagaaaatccttaaatgaaattaaagaagttctaactggtatgtcattatatttaggtatggaaatacctaactggccaccagacaatattgcagaaatgtctaaaaaattagaggaagccatctaa

SEQ ID NO: 254734 - DNA, 1009 bp, Unknown
  Bacterial polypeptide expressing nucleotide sequence isolated from the Sargasso Sea
gttataaatatggacaaaatatttgatgaattaagtataagccttgctacctcggatcaaatgagaagttggtctttgggcgaagtaaaaaaaccagaaacaataaattacagaactttaaagcctgaaaaagacggactttttgatgagagaatatttgggcctacaaaagattgggaatgttcctgcggacgatataagagaataagataccgaggaattgtttgtgaaagatgtggtgttgaagtaactaggcgtgaagtgagaagagagagaatgggccacattgaacttgcagcacctgttactcatatatggtatttcaaaggagtcccaagtagattaggttatttcttagatatgtctccaaaagagttagaaaaagttatatatttcgcagcttatttagtagtttctattgattctaaaaagagaacaaaagatttagctgaactagaagaagcagttatagctgaagttgagatagtaaacgaagattttgaagaatgggaacaaaaaagaattaagcagatggatactgagcttaaagcaatggaaaatgccaaaattcctgagcccgaaattcagatacgaaaaaaagaagtactaaaagaaattgaaggcaaaaagaagaagtctcaagaagagattaaagtcatagaggaggctttttctacattgaaaacactaaagccaaagacattaattgaaaatgacactctatggcgtgaaatggttgacaaatatgatgattattttaccggtggtatgggtgctgaagcagttagagagttagttcagcatgttgacttaaaagctgaaatggaaaaattagaaacagacttagattctaagtcagctcaaagacgccaaagggctattcaacgcatgaaagttataaagccatttgcagatggtaaaaatcctccagaagcaatgatccttgaggtagttcctgttattcctcctgaacttcggcctatggttcaattggatggaggtagatttg

SEQ ID NO: 254735 - DNA, 889 bp, Unknown
  Bacterial polypeptide expressing nucleotide sequence isolated from the Sargasso Sea
gcctttgggagaccgcattttaggtcgcgttttacttgaagacgtaattgatcccgaatctgaatatgacatccttattcctgctgggacacttatcaatgagaaagaaagagatgcaatcgagaaaaccagaatagaaaaagtacaaatacgatcacctctaacttgtatgacagaaaaaggagtctgcagggcttgttatggtcgcgatttatgtcatgggggtttagtaaacttgggagaaaccgtaggcgtgattgctgcccaaagtattggagaaccaggaactcagttgaccatgagaaccttccacattggtggaacagctagtagatcagttgaacaaaataagtgggaggcaaatttcagtggtatactacgcttcgatgatcttaaagaagttaaaaaccgtgaaggtaatatagttatacttggacgtcgcggagaagcagtaattgttgaaggcgacaaaacaataaaacctaaatcattaggaaatcttgaaaatgaaagagaacgtgaaaggcgcccccttccaatgggagctactttgatcaagcatgaaggtcaattcgtagaacagggtgaactaattgctgaatgggatcctttttcagttccaatcattacagatgtctcaggaattgtagaatttagggatataagtgagggagaaacatttaaagagcaagtagatgaagtttcaggtgtttcgagaaaagtcatccatgaatcccaaagcatggaacaacgcccattaattgcaatctgtgataaaaagaaaaaaacaattgtccgtaaaaatgatactccgacggaaattgcccctgcaatcaaatctgaattaatgggtgaaacggtatttgagttcatgccggagatgtactag

SEQ ID NO: 254736 - DNA, 821 bp, Unknown
  Bacterial polypeptide expressing nucleotide sequence isolated from the Sargasso Sea
ttttcaaaactttagccaagccgagctcgattggcagtataataaccgaaagcgagttccggaggtcgagagcttatacaaacgttgggttgaacccagtagtggaataattgagcaatatgaatccttccttgatataccttatggtaatagtgatagggaaatacttgatattatccttccacccacttcaggcccatacgctttaaatctctatttgcatggtggttattggatgagcagatcaaaatctgatcaaacctttctagcaaagcctattcttgattcaggagcaatctttgcggcgatagagtatgacttgattccaaatgtgcgtatggcagatattgtaagacagtgcagaaacgcagtttcctggattttcaaaaatgcggagcggtttaacattgatatcaatcaagtatatgtttctgggcattctgcgggggctcatatagcttcaatactgatatcaactgattgggatgcaattgatcagtactccaatatttcgctgagaggggcttgcctgattagtggtatatatgatttgcttcctgttaaactgagctacatgcaaaatatactcagttttagtgatgaagaggtccgtaattttagtccggctcactttaaactaaattttagcgggcctataattgttgcggtaggctcggaggaaagtgaggagttccgccgtcagtcatcagatctcgttaatgaatggagtgaacaaggtatacattgttcttatctggagcttaatggatgtaatcattttgatatcttagaaagttttgccaacttggatggtttgcttt

SEQ ID NO: 254737 - DNA, 736 bp, Unknown
  Bacterial polypeptide expressing nucleotide sequence isolated from the Sargasso Sea
tatgaaaaaacaactagcagatttatttaaaaattcagaaattcaagaagcccaaaattttaatagcattaaaataacattagctagtcctgaaaaaataaaatcttggacttacggggaaataaaaaaaccagaaactattaactacagaacatttagaccagaaaaagacggcctattttgtgcaaggatatttggtccaataaaagattatgaatgtctttgtggaaaatacaaaagaatgaagtttagaggaattatatgtgaaaaatgtggtgttgaagttacaaagtcaaatgtcagaagagaaagaatgggacacattaatcttgctactccagtagctcatatatggttcctaaaatcacttccaagcaggatctcattagtgcttgatatgaaattaaaagatgttgagagggttttatattttgaaaactttatagttatcgaacctggtctaacaaatttaaagaaaaatcaattactttcagaagaagaattaacaaaatatcaggatgaatatggagaagaatcattcactgctggtattggtgcagaagcagttttagaaatccttaagtcaataaaattggaagaagaaaaacaaaaattagtaacagcaattaaagaaactaagtctaaagtagctgaagaaagagcaatcaaaagattaaaattaatagagtcatttattgaaacaggaaacaaaccagaatggatgatattaactgtt

SEQ ID NO: 254738 - DNA, 463 bp, Unknown
  Bacterial polypeptide expressing nucleotide sequence isolated from the Sargasso Sea
caaaaatatattgaaattagtcttttaggttttgattttaaattaaggttagcacttacaacagttataatgtttgaaatctggagatattttcctttagcctttttatttattcttgcgagacttcaagctattccaaaagaattatatgaggccgctgatgttgatggagcaagtccctttcaaaaattttttaatattacacttcctcaaattactgcagtaatttcgattttattcatgattagatttatatggaattttaataaatttgaggacgtgtttttattaacaggaggagcatcaggaactagaactttaccaataaatgtttatcaacaaggttttgcaatatcagatattggaatgggctcagctgtttcaatagtaatcgtagtattacttttaatgtttatgtttttttattttaaacttttaggaaagagagtagatgagaactaaa

SEQ ID NO: 254739 - DNA, 758 bp, Unknown
  Bacterial polypeptide expressing nucleotide sequence isolated from the Sargasso Sea
gatgaatactagtacttatgtccgtcaacactttatgttgtatccacaaacacctattgtatcaactcgtgcaatgaacttacttggaatggaagaaagacctgcaggagtaaattgtgtagttgctgtactaccatttgacggttacaacattgaagatgcaattgtattaaatcgttcatctgttgatagaggtttattcagaacattcttctatagaatttatgatactgaagcaaaacaatatcctggtggaatgcgagataattttgaaataccaaatgcagatgacaatgttagaggttacaaaggagaaaaggcatatcgtatgcttgaagatgatggcattgtagcaacagaatcgggagttgatggtggtgacatactaattggaaaaactagtcctccaaggttcatggaagagtataaagaatttgaaacaagtggaccatatagacgtgacacatcaattggtgtaaggccatctgaacatggtgtagttgacactgttgtcatgactcaatccaacgaaggtggaaagatgtacaagattcgtgttcgtgatatgagaattccagaaattggtgacaagtttgcatcaagacacggacaaaaaggtgttcttggaattttagcaaaacaagaagatcttccttatactgaggatggaacacaacctgacgtcttgattaatccacatgcattcccatctagaatgactgttggaatgatgatggaatctgtatgtggaaaagcag

SEQ ID NO: 254740 - DNA, 400 bp, Unknown
  Bacterial polypeptide expressing nucleotide sequence isolated from the Sargasso Sea
tttccctgcgactggtgaacctattgttactccatctcaagatatggttttaggctcttattacttgaccgcattgcaacccaattataaaaaacctgattttggaaaaaataatagtacttttgcttctttagaagatgtgatatacgcctttgaagacaaaagactaggattacatgaatgggtttgggtaaggtttaatggtgaagttgaagatgaagatgaaggtaaatcaccaagagattttaaagagcttgaagatggctcaaaactagaaatttggaactttagaagagataggtttgattctgaaaataatttgataagtaggtatattttaacgaccgtaggaagagtagtaatgaatcatacgatcattgactctgtatcaaaaacgtaa

SEQ ID NO: 254741 - DNA, 791 bp, Unknown
  Bacterial polypeptide expressing nucleotide sequence isolated from the Sargasso Sea
tatgaatcaagatttaacaaatgttttcaattcaaacttttcacaatcacaaatttttgatcagataaaaattaccatcgcatcacctgagaagatgctctcatggtcttttggtgaaataaaaaaacctgaaacaattaattacaggacgtttaaacccgaaagagatggtctattttgctcacgaatttttggtccgataaaggactatgaatgtctgtgtggtaagtacaagcgtatgaagtataggggggtaatctgtgaaaaatgtggcgtggaagtcacgctatcgaaagtcagacgtgacagaatgggacacattgaacttgcagctcctgttgctcacatttggtttttaaaatcacttccatcgagaattggactgcttttagatatgaaattaaaggatcttgagcgggttctctattttgagaatttcatagttatagaacctgggctgacacccctaaaagaattacaactgctgactgaagatgagcttatcacttacaaagatgaatacggggatgactcattcaccgttggaattggcgctgaggcgattcgtgatatattaatagggcttgaccttgaaaagcttgcggagagtttgagggttgaaattgacgagtccacttcagagcttaaaccaataaaacttgcaaaaaggttaaaagttgtagaggcatttttgagttcaggaaataagcctgaatggatgattatgacaattgttcccgttataccacctgagctgagaccacttgtcccattagatggtggtagatttt

SEQ ID NO: 254742 - DNA, 355 bp, Unknown
  Bacterial polypeptide expressing nucleotide sequence isolated from the Sargasso Sea
atttcaagaccaattatcaatgtttgtaaattttgaggatccacaagaagtagttaaagaggtaaaatccacagaaccggaattcaatagaaatttattaaaacgtgtagaagaacttgaactttcggttagatcaatgaattgcttgaaaaatgataatattatttatataggtgatcttgttcaaaaaacagaaccagaaatgttgcgtactccaaattttggaagaaaatcactaaatgaaattaaagaagtattaaatacaatgtccctatatttaggaatggaaattccaaactggccacctgataatattgctgaattatcaaagaaactagaggaaaataattattaa

SEQ ID NO: 254743 - DNA, 178 bp, Unknown
  Bacterial polypeptide expressing nucleotide sequence isolated from the Sargasso Sea
tatgaattgtttgaagaatgataatataatttatattggtgatcttgttcaaaaaacagaactagaaatgttaagaactccaaattttggtagaaaatctcttaatgaaattaaagaggttttaagctgtatgtctttatatcttggaatggaaattcccaattggcccccagacaat

SEQ ID NO: 254744 - DNA, 297 bp, Unknown
  Bacterial polypeptide expressing nucleotide sequence isolated from the Sargasso Sea
ttaaagaagtttctaccgagccagaatttaataaaaatttattaagaaaagtagatgagttagaattatctgtcagatcaatgaattgtttaaaaaatgataatattatttacattggtgatttagttcaaaaatcagagggtgaaatgttaagaactcctaattttggaagaaaatcacttaacgaaataaaagaagttttaactggtatgtctttatatttagggatggaaatccctaactggccacctgataatatagctgaaatgtctaaaaaattagaggaagcaatttaat

SEQ ID NO: 254745 - DNA, 751 bp, Unknown
  Bacterial polypeptide expressing nucleotide sequence isolated from the Sargasso Sea
tatgaaaaaagaattaacagatctttttaaaaattcagaaatttcagagtcacaaaattttaatagtataaaaatttctttagcaagtcctgaaaaaattaaatcatggacatatggagagataaaaaaaccagaaacaataaattacagaacattcagaccagagaaagacggtttattttgtgcaagaatatttggtccaatcaaagactatgaatgtttatgtggtaaatataaaagaatgaaattcagaggaataatttgtgaaaaatgtggtgttgaggttacgaaatcgaatgttcgaagagaaagaatgggccatattaatcttgcgacacctgtagcacacatttggtttttaaaatctttgccaagtagaattgcccttgctgtggacatgaagttaaaagaaattgaaagagttttatattttgaaaattttatagtaattgagcctggccttactggtctacaaaaaaatcaattattgaatgaagaagaattggccaaatatcaagatgaatttggagaagaagcattcaccgcaggcataggtgcggaagcagtattggaaatgttgaaaagtcttgatttagagatagaaaaaaataatttgtctaaatatattaaagaaaccaaatcaaaagtaaacgaggaaagagcaataaaaagattaaaattaatagaatccttcattgaaactggtcaaaagccagaatggatgataatgactgtggtaccagtaattcct

SEQ ID NO: 254746 - DNA, 857 bp, Unknown
  Bacterial polypeptide expressing nucleotide sequence isolated from the Sargasso Sea
tatgattgaaactacttctgaagactcttttgactctatatctacttctttattaaaactatcaaaaggtgaggttagttcatgcgaattggtagaactcgctataaacaatattaataaatttgatactcatacaaatgcagttgtatataaagattttgatgcggctatttcagcagcaaaaaactctgacaaacaaaggaaaaataaagcaaaactaggcccccttcacggcatacctattacaataaaagaagctttcgatgtttgcggtcagcctacaacctggggagtaccaaaatttaaaaataatatagctcagcgtgattctctaattgtagaaaaattaaaagatgccggagctattttaattggaaaaacaaatgtcccttttatgttaagtgactggcaaacatttaatgatatttatggtacaaccaataatccctgggatctatccagaagcccaggcgggtcatctggaggcgcagcagctgcagtggcgtctggatatgtacctgcagagataggtagcgacattggaggctcaatcagggggcctgcacattattgcggcatttatggtcataagtcctcatatggacttgtacctatggatggtcacactcttcctgggattgacattgatctggacctgatagtggcagggcctttagcaagacacgcaaatgacctaagaatggtattaaacataataaaaggcccatcaagaattaattcgccagcttgggatgtcaacttgccagaacgcccgcgctcccatcttagtaattttagagttgcaatattttgtgaagaaaaaaactgtagtgttgacaatgagatcctagaaaaat

SEQ ID NO: 254747 - DNA, 748 bp, Unknown
  Bacterial polypeptide expressing nucleotide sequence isolated from the Sargasso Sea
atgaaaaaagaaattaaagatttgtttaaaagttcagaaatttctgactcacaaaactttaatagtattaaaattacacttgctagcccagaaaaaattaaatcatggacttatggtgaaattaaaaagcctgagacaataaactatagaactttcagaccagaaaaagatggtctcttttgcgcaagaatatttggccccataaaagattatgagtgtttgtgcggcaaatacaaaagaatgaaattcagaggaattatctgcgaaaaatgtggtgttgaagtaacaaaatctaatgttagacgagaaagaatgggtcacataaaccttgcaacaccagtagcacatatttggtttctaaagtcattaccaagtagaatttctttggcgattgatatgaaacttaaagaggtagaaagagttctttattttgaaagttttatagtagtagaaccaggattaacaccacttaaaaaaaatcaactattaaccgaagaagaattagccaaataccaagaagaacacggagatgaatcatttaccgcaggcataggggcagaagcaattttagagatattaaaatctatcgatttaaaaaatgagagagaaattttaataaaaaatataaatgaaactaaatctaaagttgctgaagaaagatctattaaaagattaaaattaatagattcatttattgaaactggcaataaaccagaatggatgattttaacaaccaattccctgtaat

SEQ ID NO: 254748 - DNA, 288 bp, Unknown
  Bacterial polypeptide expressing nucleotide sequence isolated from the Sargasso Sea
aatcttctgaaccagattttaataaaaatttacttagaaaagttgatgaattagaattatctgtaagatcaatgaattgtttaaaaaacgataatattatttatataggtgatttggttcagaaatccgaaggtgaaatgttaagaacaccaaactttggtagaaaatcactaaacgaaattaaagaggttttaacaggaatgtcattatatttaggaatggagataccaaactggcctcctgataatatagcggagttatcaaaaaaattagaagagtcaatataat

SEQ ID NO: 254749 - DNA, 847 bp, Unknown
  Bacterial polypeptide expressing nucleotide sequence isolated from the Sargasso Sea
agtccgcaaaaagttagagaatcttcattgacagtaaggcatggtgaaaagggaactgtggattctgttatgctatctgaaactgaaaacggatcaagaattgcaagaatacgcgttagagatcaaagagttccagaaatgggcgataaatttgcaagtaggcatggacagaagggagttattgggcacatggttcctcctgagggtatgccatttactgaaagtggagttactccagacttgataatcaatccccatgcaattccttctcgtatgactgttgcccacgttttagaaatgattggtggaaaattcggaagtatggaaggccgtgttgttgatggtagtgccttctctggtgaaaaagaagttgacttgagagctgggcttgctgactacggatttaggcacagtggaagagaagttctttatgatgggcagactggccgtagaatagatgctgaaatattcattggcgtcatttactatcaaaaactacaccacatggtctccggtaaaatgcacgcacgttctcgtggacctgtgcaattactaactagacagcctacagaaggtagagctcgtatgggtggtttgagattcggagaaatggaacgtgattgtttgattgctcacggtgcgtcaatggttatcaaagacagattattagacgaaagtgacaaaactgtccagtatgtagatagtcaatctggacatattggatatttagaccgaagaggagtactcacttctccaatgggagataatacttccatttatcctgttgctatgtcttatgctttcaagcttttacttgaggagttgaaatcactgggaattgcagcca

SEQ ID NO: 254750 - DNA, 973 bp, Unknown
  Bacterial polypeptide expressing nucleotide sequence isolated from the Sargasso Sea
gcttgttccgaaattagagttatggaaggaaagacattccgattcaacctagccgattgcactccctacaatgcagattttgatggcgacgagatgaatcttcatgtaattcagagcgaggaagctagagccgaggctcgaatcctgatgagggtccaagagcacatcatatcccctaggtacgggggcagcgtcataggggggatacacgaccacattacgggagcctatctcctcacgcatgataatgtattcctaccaacgcacgttgtaatggatgtattgagctcaatcaactacgagggagatttgccaccagcaaaagaggaaaacggccaggaaggatacagtggaagtgacattttcagcttattggtaaagggtggattcagcctaaatttcaagaatagggctggcgaagacgtcacagtagccagcaatgagggatcagttagcggagccatcgataagagaggaatcggtgccgaagacggacgcctacttgatgcagtagtccagactcatggcaccgctgagggtgccgacttcatcaacaagatgacgaagatgacgatcgcaatttgcacagcaatgggattcactactggtattgacgacgaggatctgcctcccgaggcaaaggatgagatttccagaattaatgccgaagccagcgccaatgtagatgctgaattggaaaaattcggaaaggatggtaggaaatacgaagcccgacccggacgaactccccatgagacactagaggagaatatcctgactattcttgacgcggccaaggccgagacaggtaatgtggcaaaggcacaactgggagatgataactcagccgttctaatggcaacttcaggagccagagggtccatggacaacttagcaatgatggccggttcaataggtcaacctaaggtcaggggtaagaggctcgagagaggctatcaagatcgtgtcctat

SEQ ID NO: 254751 - DNA, 235 bp, Unknown
  Bacterial polypeptide expressing nucleotide sequence isolated from the Sargasso Sea
cctggtggataaccttacacaattcgataagccaaaaaacccaatcctgtttgacgcgattcgggttcgtattgcttctccagaaaaaattcgctcatggtcttacggagaagtaaagaagccagaaaccattaactaccgaacattcaagcctgagcgggatggattattttgtgcaaaaatttttggaccagttaaagattgggaatgcacctgtggtaatataagaggatga

SEQ ID NO: 254752 - DNA, 895 bp, Unknown
  Bacterial polypeptide expressing nucleotide sequence isolated from the Sargasso Sea
tttgacggagatcaaatggctgtacatataccattaagtttagaagcacagcttgaagctagagtattaatgatgtcaaccaataatattcttagcccatcgaatggaaaaccaataattgttccaagtcaagatatagttttagggatctattatttatctcaagcgcaagaaaatgataaaaagcctaaaggtattttttcaacagtagaagagattgaacaggctttagaaaataaatctataagcttgcatacaaaaataatttcaatttttaaaactgttgattctgaaggccttgaaaaatcagataaatatactagtacagcgggaagatttttgttggctaatttgttacctaaaaatcataacataaagtttagtttagtaaatcgattattaactaaaaaaaatgtttctgaagtaattgatactatctttagatactgcggacaaaaagaaacagtaattttttgtgataaaatcaaaacacttggctttaaacatgcctttaaagcaggaatctcttttggaaaagatgatttgttaataccaaaaacaaaagaaaatttaatattaaacacaaaaaaacaaatcgaagattatgaaaagcaatattcaaatggattaattacaagaggagaaaaatataacaaagtagttgatatttggtctaaatgtactgatacagttgccaatgaaatgatgaaagagatttcttctgccgaaaagatttataaagacgatagaattgaaacaaattcagtgtttatgatggctgattctggagcaagaggatcacaagctcaaatgaagcaattagcaggaatgagaggtttgatagccaaaccttctggagaaattattgaaactccaaattatatcaaattttaaa

SEQ ID NO: 254753 - DNA, 181 bp, Unknown
  Bacterial polypeptide expressing nucleotide sequence isolated from the Sargasso Sea
atgattgaaaagaattggaaagaaataatcaaaccatcgaagcttgaggttaaagaagagagtaagtctgaaaacacctcaacaataattgctgaaccccttgaaagaggatatggagtaactataggtaacgccctgagaaggatacttctttcatcgcttcagggctccgctataactc

SEQ ID NO: 254754 - DNA, 463 bp, Unknown
  Bacterial polypeptide expressing nucleotide sequence isolated from the Sargasso Sea
atgtcagatacagttttaacgcctaacatagtcaacgtaaaaaatgttgggccaaataagtcatctttagttatcgagcctttgtctagaggcatgggccatactttaggttgcgctctcagaagaattttgctttcttctattccaggagctgcagttaccgaagtaatgatagacaaagtagagcatgagttcagtgcccatccatcgttaaaagaagatgtcgttgatgtattattgaatctcaaaaaattacctttgaaaatctctttcgaaaaagacttagtaactgtccatttacagaaaaaaggtgatggtgaaattaaagcttctgatattttaccttctgaagatattgaaatagtagatccagattttgtgataggtcatgtagttaacaaaggtgagattagcatggagctaacagttgaaaaaggttatggatatagacctgctaattata

SEQ ID NO: 254755 - DNA, 197 bp, Unknown
  Bacterial polypeptide expressing nucleotide sequence isolated from the Sargasso Sea
tatggccagaatcactgtcgaagattgtattgataaagttcctaatagatttgatttagttttactagcagcgcatagagctcgtgaaatctctttaggttcagaattaactgtaaatagagacaatgataaaaatcctgtcgtggcacttagagaaattgcagatgaaactttgacatctgatcaaattagagagt

SEQ ID NO: 254756 - DNA, 844 bp, Unknown
  Bacterial polypeptide expressing nucleotide sequence isolated from the Sargasso Sea
aatgaataaagaacttacaaatatatttaatcagaaccaaggtgttcaaaattttaatagtcttaaaatatcaattgcaagtcctgacgacataagatcttggtcatttggtgaaatcaaaaaacccgaaactattaactacagaacttttaagcctgaaaaagatggcctattttgttctaggatttttggacctgtaaaagattatgagtgcttatgtggcaagtataaaagaatgaaattcagaggaataatctgcgaaaaatgtggagttgaggtaacactttcaaaagtaagaagagatagaatgggccatatagaattggctgctcctgtttctcatatctggtttatgaaatctttaccaagcagaattgctactcttttggatatgacaataaaaaatcttgaaaaagttctttacttcgagcagtttattgttgttgagcctggtttaactgatttaaacaaaggtgaaattatctccgaggaacaatttattgaatatcaagatgaatatggagaagattcatttagtgcagcaattggagccgaagcaattgagcaaatgctcctaagtattgatctagatgctgattataaccaattaaaaattgatctacaagagactaaatccgaattaaaaaaaactaaaattactaagagattaaaacttatagaatctttcattgtatcaaagaacaaaccagagtggatgattatgagagttctcccagttattcctcccgaattaagaccactggttccccttgatggtgggagatttgccacaagtgacctaaacgacttatatagaaggggtataaatagaaataacagaata

SEQ ID NO: 254757 - DNA, 205 bp, Unknown
  Bacterial polypeptide expressing nucleotide sequence isolated from the Sargasso Sea
atggaaacaacagaagtaaatacaaaaaattggaaatctttaataaaacctgccaaacttgatgttcagttaagtgaagataagtctaacgctaaaattattgccgaaccacttgaaaaaggttatgggttaactttaggtaattctttacgaagaattttactttcttctattagaggaactgctgttacttcaatacaaattg

SEQ ID NO: 254758 - DNA, 787 bp, Unknown
  Bacterial polypeptide expressing nucleotide sequence isolated from the Sargasso Sea
atgaagaaaacaaagtcattggttgatttaattggtaatactccgattgttcaagctaaaaatttagacaccggaaaatgtaatctttttcttaaaatggaaagccttaatccaggatcttccataaaagatagagtggctctaagaatcattgaggacgctgaagctcaaggaaagttaaagaagggttcaacagttgttgaggctacagctggtaatactggacttggtctagctttgatagctctcttaaagggatataagtcaaaagttgtaatactcgataaaatgaaccacaacaaaatacttcatctaaagtctctcggagcagaagttattttggcaaggagtgatgtggggcctgatagtcctgagcattatgtaaatgtagctaaagaagttgcaaaaaatactcccgactcatttatggcaaaccagtttacaaatatgtcaaatccccaggctcatgaatattcaactggtccagaaattctggatcaaatgaataatgatgttgatgctgttgtttgtggcgttggtacaggaggaacaatttcaggccttggtaaatttttttcagagcatagtccaaaaacagaaatggttcttgcggatccaaagggttcaatagttaaagatgctgttgaaaacaagccattaaaaaaagcggactattcatggcttgttgagggtataggtgaagatttcattcctgagactttagaattaaagtatataaaaaaagcttatgaagttacgaatgaagaagcttttagcatgattagag

SEQ ID NO: 254759 - DNA, 220 bp, Unknown
  Bacterial polypeptide expressing nucleotide sequence isolated from the Sargasso Sea
aatggaaaatgcagaagtcaatattaaaaactggaagtctttaattaaaccagcaaaacttgatgtccagctcagtgaagataaatcttttgctaagattgtggctgaaccattagaaaaaggttatggtttaactttaggcaactcgttaagaaggattttattatcttcaataagaggaacggctgtaacatcaatacaaattgatggtgtattacat

SEQ ID NO: 254760 - DNA, 214 bp, Unknown
  Bacterial polypeptide expressing nucleotide sequence isolated from the Sargasso Sea
atggagcaaacagaagtaaattcaaaaaattggaaatcattaattaaacctgcaaagctagatgttcaaataagtgatgataaagcatttgcaaaaattacagccgaacctctagaaaaaggttacggactaactcttggtaattcactaagaagaattctactatcctctattagaggtactgctgtaacttctatacaaattgatggtgtgc

SEQ ID NO: 254761 - DNA, 240 bp, Unknown
  Bacterial polypeptide expressing nucleotide sequence isolated from the Sargasso Sea
gttgcaataccagattgacagaatcgaccatcaaatagcagatgatcgctcccaaacaggaacttttttaatcggccctctagaaaggggacaagctacaactttgggtaattctctcagaagagtccttatgggaggacttgaagggagtgcagttactgcagtaagaatagcaggaattaatcatgaatatgctactattcccggagttagagaagacgttttagatattcttctcaa

SEQ ID NO: 254762 - DNA, 927 bp, Unknown
  Bacterial polypeptide expressing nucleotide sequence isolated from the Sargasso Sea
aaaatattaaaaaaaatttcggatgaagatgtaaatttcttaggatttagtccaatgtggtcaagaccagaatggatggtgtgtcaagttatagcaattcctccacctgcagtaagaccatctgtaaaacatgatgtccaacaaagaagcgaggatgatttaacacatattataataaatataattaaagcaaataaaacattacaagaaaaattagaacaaaattcatcacctaatatattagatgattggacaactgttttacaatattatgtagcaacattaattgataataaaataccgggagtggctgctgtagctcaaagatcaggaagaccattaaaagctattaaagatagattaaatggtaaagggggtcgtataagaggaaacttaatgggtaaacgtgtagattttagtgctcgttcggtaattactccggatcctaatttatcaattagtgaattaggtattccattaaaaattgccaaaaatttaacaaaaccaataactgtaaattctaaaaataaaaattatttaatgcaattaattttaaatggtcctgatgtttatcctggtgctaagatttatgagaaaaaaagtggagattgtattagtttacgatatattgacagagaatcaataaaattagaaaatggtgatatagttcatagacatattttagatggagattcggtattatttaatagacaacctacgctccatcgaatgtctatgatgagtcatattgcaaaaattatgaatatgggagatacatttagaatgaatgtaggagatactaaaccatataatgctgattttgatggtgatgaaatgaatttacatatgccacaagatgaagagtcagaaatagaattaaaaatgttagctgctgttaaatatcagataattagtccggcaaataat

SEQ ID NO: 254763 - DNA, 292 bp, Unknown
  Bacterial polypeptide expressing nucleotide sequence isolated from the Sargasso Sea
gtcaccgccattcggatcgatggtgtcaaccacgagtacgccaccgtccccggtgtgcgtgaggacgtcctcgacatcctcctgaactgcaaggagctctccgttaacagccggtcgactgagctggagatcggtcgtcttgtggtggctggtcccgctgaagtgaccgcgaacgatctgcagttctcctcccaggtggatgtggtggacggcaaccgacccatcgccaccgtggccgacggttacagcctcgagcttgaggtccacgtggagcgcggcgtgggctaccgac

SEQ ID NO: 254764 - DNA, 186 bp, Unknown
  Bacterial polypeptide expressing nucleotide sequence isolated from the Sargasso Sea
gtgatcttgttcaaaagtcagagtctgaaatgctaagaacaccaaattttggaagaaaatcactaaatgaaattaaggaagtgcttcaacaaatggaactaaatcttggaatgtctgttcctgattggccgccagaaaatattgatgaactagcaaaaaaatatgaggatccttttaacaagtaac

SEQ ID NO: 254765 - DNA, 733 bp, Unknown
  Bacterial polypeptide expressing nucleotide sequence isolated from the Sargasso Sea
tatgagtaaagaattatcagatttatttaaatcttctgaaatatcagaggcacaaaatttcaatagtataaaaataactttagcgagtcctgaaaaaattaaatcttggacttttggagaaataaaaaaaccggaaacaataaactatagaacatttagaccagaaaaagatggattattttgtgcaagaatttttggacccataaaagattatgagtgtttgtgtggtaagtataaaagaatgaagtttagagggattatatgtgaaaaatgtggtgtagaagttacaaaatctaatgtcagaagagaaagaatgggtcatataaatcttgctacgcctgttgcccatatctggtttctaaaatcattaccaagtaggatttctttagttgtggacatgaaacttaaagaagttgagagagtgctatattttgaaaactttatagtaatagaacctggtctaacaggattaaagaaaaaccaattattgggcgaagaagaattaataaaatatcaagatgaatatggtgaagaagccttcacagcaggaattggtgctgaagctatacttgagatactaaaatctattaacttagaagaagaaagagattttctaattaaagatattaaggaaacaaaatcaaaagttaatgaagagagatctatcaaaagattaaaattaattgagtcatttattgagacgggtaacaaacctgaatggatgattttaact

SEQ ID NO: 254766 - DNA, 193 bp, Unknown
  Bacterial polypeptide expressing nucleotide sequence isolated from the Sargasso Sea
aatgcaaacaactacgaatgtaattgacaaaaattggaaagcattaattaaacctaataagttagacataacaagcaatgaagacaggacaattgctaaggttgttgcggaaccattagaaaaaggctttggtcaaactattggtaactccttaaggcgtatattgttatcttctattcaaggtgcagcagtt

SEQ ID NO: 254767 - DNA, 391 bp, Unknown
  Bacterial polypeptide expressing nucleotide sequence isolated from the Sargasso Sea
catatctgcagaagatgcagttgcatactcagctagaatttttcaggatcagctaaaaatgttcattaattttgatgaaccagtagaagcacctgttaaagaagtttcaagtgaaccggaatttaacaaaaaccttttaagaaaagttgatgagttagaactttcagtgagatcaatgaactgtttaaaaaatgataatataatttatataggtgatctagtccagaaatctgaaggtgaaatgttaagaacacctaattttggaagaaagtcacttaatgaaattaaagaagttttaacaggaatgtctttgtatttaggaatggaaattccgaattggccaccagacaatatagctgaaatgtcaaaaaaattggaggaagcgatttaa

SEQ ID NO: 254768 - DNA, 487 bp, Unknown
  Bacterial polypeptide expressing nucleotide sequence isolated from the Sargasso Sea
agtcaaaaaagtttctttttctgtagaaaacacaatagcagggagcgcacttgattatgacaaattaataatgacagttgaaactaacggaactgttgacgctgaagatgcaatagcatattcagccagaatattccaagatcaattatcaatgtttgtcaactttgaagatcctcaggaagttgtaaaagaggttaaatcaactgaacctgaatttaatagaaacctacttaaaagagttgaagaattagaactttcagtaagatcaatgaactgtctaaaaaatgataatataatttatattggagatcttgttcaaaaaacagagccagagatgcttcgaactccaaactttggaagaaaatcactaaatgaaataaaagaagttttaaatactatgtcattatacctaggcatggaaatccctaattggccgccagacaatattgctgaattatctaaaaaacttgaggaaaataattattaa

SEQ ID NO: 254769 - DNA, 340 bp, Unknown
  Bacterial polypeptide expressing nucleotide sequence isolated from the Sargasso Sea
ttgaagatgtttattaattttgatgaaccacaagaagtaatagtaaaagaaaaaccaactgagccagaatttaataaaaacttgttaagaaaagttgatgagcttgaactttcagtaaggtctatgaattgtttaaaaaatgataacattatatatataggtgaccttgttcaaaaatctgaaggagaaatgctaagaactccaaattttggccgtaagtcattaaatgaaataaaagaagttttgactggcatgtcactttatttaggaatggaaatacctaattggcctccagacaatatagcagaactatcaaaaaaacttgaggaaacaatataaa

SEQ ID NO: 254770 - DNA, 199 bp, Unknown
  Bacterial polypeptide expressing nucleotide sequence isolated from the Sargasso Sea
atggcacgcgttactgtagaagactgtatagataaagtatcaaacagatttgaactagttttacttgctgcgcatagagcaagaatgatttccggaggggttgagcccggcctggatcgagataatgataaaaacccagttctcgcgcttagagaaatagctgtagaaacagttactttcgatgagttaatggagtcaa

SEQ ID NO: 254771 - DNA, 307 bp, Unknown
  Bacterial polypeptide expressing nucleotide sequence isolated from the Sargasso Sea
gaagctcctgtaaaagaagtttctacggagcctgaatttaacaaaaacttattaagaaaagtggatgaattagagttatctgttagatctatgaactgcttaaaaaatgacaatattatttatataggtgacctggttcaaaaatctgaaggtgaaatgttgagaacacctaattttggaagaaaatcattaaatgaaattaaagaagtcttaacaggtatgtctttatatttaggaatggaaatacctaactggccaccagataatattgcagaaatgtctaagaaattggaggaagcgatttaat

SEQ ID NO: 254772 - DNA, 600 bp, Unknown
  Bacterial polypeptide expressing nucleotide sequence isolated from the Sargasso Sea
ttctcctttttccatacgttgctccagtagttgctttagcttacacttgggaacttttactagaccctaatagcggcacgttaaatagtttactattaaattatcaaattattgaaactccaataaatctccttggacaaaaatatattgaaatcagtatttttggctttgattttaaattaaggttagcacttacaacagttataatgtttgaaatttggaggtactttcctttagcctttttatttattcttgcgagacttcaagctattccaaaagaattatatgaagctgctgatgttgatggagcaagcccttttcaaaaattttttaatattacacttcctcaaattactgcagtaatttcgattttattcatgattaggtttatatggaattttaataaatttgaggatgtatttttattaactggaggcgcatcaggaacaagaactttaccaataaatgtttatcaacaaggttttgcaatatcagacattggaatgggctcagctgtttctatagtaatcgttgtattactattaatgttcatgtttttttattttaaacttttaggaaagagagtagatgagaactaaa

SEQ ID NO: 254773 - DNA, 921 bp, Unknown
  Bacterial polypeptide expressing nucleotide sequence isolated from the Sargasso Sea
tgtattgttcacagacaaccttcacttcatcaaatgtcaattatggctcattatgtgagagtattacctggaaaaactttcagattacatccatctgtttgtccaccatacaacgctgactttgatggagatgaaatgaatcttcatgtgccccaaagtgaagaagcacgttcagaagcaattctcttaatgagagttcaggatcaactaatctctccaagatttggtggtccaattattggtggtcttcgtgatttcattactggtgcatacctacttaccaaagatggaacaactttgtctagtcaagaatttgcaaatcttgcaatgttaggaggctttgctggacatttacctgaacctgaaaataaaaaggaaaatctctacactggaaagcaacttttctctctcttcttacctgaagatttcaattatgtcatgacatcaaaatggtctaaaggaacaaaagggcaacaaaaagatgttgtaattaaaaatggtcaattaatcagtggagtcatagataaatcatcaattggtgctgaagagccagagagtgtcttacaccgaattgcaaaagattatggtaatgaaaaagccaaagttttcttaaattctgaattgatcataattaaacaattcattactcattatggatttagctatggatatggtgacttggaagttccagctgaaggtagagagtcaattaaggatgaaacacaaaagacttatgatgaaattcatgatctcattgctcaagaaaagaaaggaactctaaaggcaattagaggtatgaccaccaaagaaacacttgaggcatacatcatgagaaatcttagtagattaagagatagtgctgcatctactgcaaatctttcactggatgataataatgcaggaaagattatggctaccact

SEQ ID NO: 254774 - DNA, 160 bp, Unknown
  Bacterial polypeptide expressing nucleotide sequence isolated from the Sargasso Sea
atgctagtaacaagtccggaagattttgaatatttagagattggtttgtgttcacctgataaggtgcgatactggtctcgtggcgaagtagaaaagcctgaaacgattaattatcgaacatttaaaccagaacgaaaaggtttgttttgtgagaagatat

SEQ ID NO: 254775 - DNA, 151 bp, Unknown
  Bacterial polypeptide expressing nucleotide sequence isolated from the Sargasso Sea
aatgttgagaactcctaattttggtcgaaaatcactaaatgaaataaaagaagtactaaattcaatgtctttatatcttggtatggaaattcccaattggcctccagaaaatatagctgaattatctaaaaagcttgaagaaaacaattag

SEQ ID NO: 254776 - DNA, 217 bp, Unknown
  Bacterial polypeptide expressing nucleotide sequence isolated from the Sargasso Sea
aatgaattgtctgaaaaatgataatataatttatattggtgatttagttcaaaaatccgagggagagatgttaagaacaccaaattttggaagaaaatctttgaatgagataaaagaagttttaacaggcatgtcgctatatttaggtatggagataccaaattggcctccagacaatatagctgaattatcaaaaaaacttgaggaagcaatttaa

SEQ ID NO: 254777 - DNA, 379 bp, Unknown
  Bacterial polypeptide expressing nucleotide sequence isolated from the Sargasso Sea
aatgccgaaacaagtcgtccgtgacgacgaagtttcaacagaaacatacggaaaattttatgcagaaccttttgaggggggatatggtcgcacaatgggaaattcattgcgacgtgtcttgctttcttctttagaaggcgcagcagtttcttctgtgacaataaaaggcgcgcctcatgagtattgtagcttagatggcgttaaagaagacgtaactgaaatagtgttgaatataaagaaattgatttttagaagttattctcgtgatgttcaaactgtaaaaattaaagttgaaggtccaggagaagttcgtgctggtgatattgtgacatcagactccattgaagtttctatcctgattttgttatttgtaatttag

SEQ ID NO: 254778 - DNA, 211 bp, Unknown
  Bacterial polypeptide expressing nucleotide sequence isolated from the Sargasso Sea
tatggaaaatacagtaatcgataaaaattggaaatctttaatcaaacctaataaacttaacattaaaagtagtgacgacaagtctattacgactgtagtagctgagccgttagaaaaaggttatgctcttactattggtaattcattaagaagaattttactttcttcaatacaggggtcagctattactgcaatacaaattgatggcgtt

SEQ ID NO: 254779 - DNA, 437 bp, Unknown
  Bacterial polypeptide expressing nucleotide sequence isolated from the Sargasso Sea
gttgcaagtaatatgcccacactgtggtagtcctgacaatgaatggggagaaagaactcgagttgaagatcgtctttctactgtagatattcatggtaatccacgtccaggaatgcttgtagaacgtcacttgatcgatggtgatgtagcaattttcaatcgacaaccatctcttcatagaatgtcgatgatggttcacgaagtacgtgtaatggaaggtcatactttcagatttaatctagcggtatgtactccttacaacgctgattttgatggtgacgaaatgaaccttcacgtaatacagggtgaagaggcaagagcagaggctaagattttgatgcgtgtacaggaacatatcctaactccaaggtatggaggtgctgtgattggcggaatacatgaccacatatctggtgcatatttgctatcacgtcctg

SEQ ID NO: 254780 - DNA, 768 bp, Unknown
  Bacterial polypeptide expressing nucleotide sequence isolated from the Sargasso Sea
tatggcacttagagatttatttgaaatagcagaaaatccgaataattactccgcggtaaggataaaaattgcatcttcagatgaagttacttcatggtcacatggtgaagtacgcacttcggaaacaattaactataggacatttaagccggaacgagatggcctgttttgcggcaaaattttcggcccggtgcatgactatgaatgtatctgcggtaaatacaaacgtatgaaacatagaggaataacctgtgaaaaatgtggtgtagaagtaattgagtcaaaggtgcgcagggacaggatgggcaatatcaaactcgcatgtccagtatctcatgtctggtttctaaagggagtcccaagccgaattgcaacaattcttgacatgatgcttagagatttagaacgagtactttattttgatgcatacattgttctggatccgggagattctgatcttgagccattagaattggttgaagaagatcaatctagggaattggaagaaaatcatcctgatttgatgttgggaatgggagccgaagctatccagacacttcttagaagaattgaactagacgaactagaaaatcaattgcaaacagagatgcgtgaagttaattctgaaacgcgtcgcaaacggatcgcaaaaagactcaatgtaatcggatcccttttaaagtccggaaatgctgtagattcaatgatcatcgacaatctacctgtgcttccgccggaattgagacctctagtcccccttgaaggtgg

SEQ ID NO: 254781 - DNA, 553 bp, Unknown
  Bacterial polypeptide expressing nucleotide sequence isolated from the Sargasso Sea
atggaaagaaatataaaaaaattttcaaaaacaagtatttcagaaaaggaacttcaatacttaaaaattaccttagcaagcccagataaaatcaaatcatggtcttggggggaaataaaaaaacccgaaacaataaattatagaacttttagacctgagaaagatggtttattttgcgctcgaatttttggtccggtgaaagattacgaatgtctttgcggaaaatataaaagaatgaagtttagaggcattgtatgtgaaaaatgcggtgtagaagttaccaaatcaaaagttagaagagaaagaatgggtcatattgatttagcatcaccagttgctcacatttggtttttaaaatcacttcctagccgtatttctctgtccatagatatgaaactaaaagaggtagaaaaagttttatattttgagagttttattgttattgaacctggcttaacagaattaaaaaaggggcaacttctttcagaggaagagtatttaaaagctcaagaaaagtacggtgaagatggatttacagccggcataggggctg

SEQ ID NO: 254782 - DNA, 436 bp, Unknown
  Bacterial polypeptide expressing nucleotide sequence isolated from the Sargasso Sea
tctagattatgataaattaactatggaagttgaaaccaatggttcaatttctgctgaagatgcagtcgcttattctgcaagaatttttcaagatcaactaggcatgtttgtgaactttgatgaacctcaagaggtagtaattagagataagcccacagaacctgaatttaataaaaatttactaagaaaagttgatgaactagaactctcagtgagatcgatgaattgcttgaaaaatgacaatattatttatattggcgatttagttcaaaaatctgagggtgaaatgttaagaacacccaactttggaagaaaatcgttaaatgaaatcaaggaggttttaacaggtatgtctctatatttaggtatggagatacccaactggcctccagataatatagcagaactctcaaaaaaattagaggaagcaatttaa

SEQ ID NO: 254783 - DNA, 799 bp, Unknown
  Bacterial polypeptide expressing nucleotide sequence isolated from the Sargasso Sea
atctagtgcgcaagagattgcaaagattgatccatatgaggcagcaggtatcatcacagcacaatcaatcggtgaacctggaacacagatgactatgcgtacattccactatgcgggtgttgctactgttaacgtgacacagggtcttcctagaatcattgaaatcgtggatgctagaaaagtaccagacacacctacaatgacaattcgtcttgagggtaagaatgctgaatccgcagatgctgcaagaaaacttgctgcatcgattgaaattactacaacggtaaacattgcagatattgaaaccgatgttgcccagcgtcgtttagttctaaaacttcgcaagggtaacttgaagcaaaaagcaatgactggtgctgaagttaaggataaactagaacgtgcattgcgactatacgtggaagcagataaagagaagaatccttcaacattaacattgattccaggtattcaaaccgaagatgatatgaagacactggccgaaaaccctccatcttatactgagttattgcaactcgaagataagattagagatttgcgtctaaaaggtgtaccaaatatccaaagagcaaacgtgcaactggatgactctactggtgagtactatctttcaacaattggttcgaacctttctagaatttctgacatggatggaatcgaccgttctagaacatatactaacaatatcattgaaatttatgaatatctaggtatagaggcggcacgacaagcgattatcaatgaattacaagcaacgttagatggagcgcgtctagaa

SEQ ID NO: 254784 - DNA, 784 bp, Unknown
  Bacterial polypeptide expressing nucleotide sequence isolated from the Sargasso Sea
ttcaacagttgttgaggcaacagcgggtaatactggacttggtctagctttgatagctctcttaaaggggtataagtcaaaagttgtaatacttgataaaatgaaccataacaaaatacttcaccttaaatcccttggagcagaagttattttggcaagaagtgatgtgggacctgatagtcctgagcattatgtaaacgtggctaaagaagttgcaaaaaatactcctgattcatttatggccaaccagtttacaaatatgtcaaatcccaaggctcatgaatattcaactggtccagaaattctggatcaaatgagtaatgatgttgatgctgttgtttgtggggttggtacgggtggaacaatttcaggcctaggtaaatttttttcagagcatagtccaaaaaccgaaatgattcttgcagatccaaagggttcaatagttaaagatgctgctgaaaacaaaccactaaaaaaagctgactattcatggcttgttgagggtataggtgaagatttcattcctgatactttagaattaaagtatataaaaaaagcttatgaagttacgaatgaagaagcgtttagcatgattagagaattggctttgaaagagggaatattgggaggctcatcaagtggaactcttatttcagcagctattaaatattgcaaggaccaaaataaagaaaaaaatgtagttacatttgtttgcgataatggtgaaaaatatttaaatacagcatataatgaagaatggctaaaagaaaaaaatcttatataa

SEQ ID NO: 254785 - DNA, 607 bp, Unknown
  Bacterial polypeptide expressing nucleotide sequence isolated from the Sargasso Sea
aatggaaaaacaaataactaaaaattttaaaaaaggtttatcagaaagaagctttagtaatataaaaattactttagctagtcctgacaaaataaagtcgtggtcgtttggtgaaataaaaaaaccagaaacaattaactacagaacatttagacctgaaaaagacgggcttttttgcgcaagaatattcggtccagtaaaagactacgaatgcttatgcggaaaatataagagaatgaaatttagaggaattatttgtgaaaagtgcggtgttgaagtaaccaaatccaacgtaagaagagaaagaatgggccacattgatcttgcatcaccagttgctcacatatggtttttgaaatcattacctagcaggatatctcttgcaatagacatgaagttaaaggaagtagaaaaggtgctttattttgaaagttttattgtaatagaaccaggtttgactgaacttaaaaagggacaattattaaatgaagaagaatatataaaagctcaagaaaaatttggagaggacgcatttacagcaggtattggagctgaagctgtgagagaaatattattgagtattgatctaaaaaaagaaaaagaaaaa

SEQ ID NO: 254786 - DNA, 273 bp, Unknown
  Bacterial polypeptide expressing nucleotide sequence isolated from the Sargasso Sea
cattaaatccaaatcttttaagaaaagttgatgaactagaattatcagttagatcagctaattgcctaaaaaatgacaacattctgtatataggagatttggttttaaaaactgaaaatgagatgctgagaacaccaaattttgggaggaaatctcttaatgaaattagagaagtactttcaaatatgggcttaggcttgggcatgcatatagaaaattggcctccagaaaatattgaaacacttgctaaacaaattgaagacccttattgaa

SEQ ID NO: 254787 - DNA, 262 bp, Unknown
  Bacterial polypeptide expressing nucleotide sequence isolated from the Sargasso Sea
aacctattaagaaaagtagatgaattagaattgtccgtgaggtctatgaattgtcttaaaaatgataatattatttatattggtgatttagttcaaaaatctgagggtgaaatgttgagaacacctaattttggaagaaaatcactaaatgagattaaagaggttttgactggaatgtcactttatttagggatggaaatacctaattggcctccagataacattgctgaattatctaaaaaacttgaggaagccatttaat

SEQ ID NO: 254788 - DNA, 352 bp, Unknown
  Bacterial polypeptide expressing nucleotide sequence isolated from the Sargasso Sea
gatggcgcgggttactgtagaagattgtgtagataagattcctaatagatttgatcttgttatgttggcttcacatagagcgcgagagatatcttctggatcggctattactgtcgatagggataatgataaaaacccagttgtcgctttgagagaaattgccgatgaaatgcagtctgctgatgagcttcgtgagagactaattgaatctaaccagactcagattgagatcgacgaaccagaagaagattctatggcaatgcttatgggtggagagactgatgagccggctgaagatgatatttccgaggaaaagcttttaagggctttaatggcagcacaggggcagtga

SEQ ID NO: 254789 - DNA, 448 bp, Unknown
  Bacterial polypeptide expressing nucleotide sequence isolated from the Sargasso Sea
cggtgccgcgttagattatgataaattacttatggaagtagaaactaatggaacagttgcagctgaagacgctattgcatttgcagccagaatttttcaagatcaattatccatgttcattaattttgaagatccaaaagaagtttctaagcctaccacttcatcagaaccagaatttaacaaaaatttactaaaaagagttgaggagttagaattatcagtaagatctatgaactgtttaaaaaatgataatataatttatataggggatctcgtccaaaaaacagagcctgaaatgttaagaacaccaaattttggaagaaaatcgttaaatgaaattaaagaggttctaagttcaatgtctttatacttgggtatggaaattcctaattggccaccagataatattgcagaattatcaaaaaaattagaagaaaatacatattaa

SEQ ID NO: 254790 - DNA, 239 bp, Unknown
  Bacterial polypeptide expressing nucleotide sequence isolated from the Sargasso Sea
aatttcgattttattcatgattagatttatatggaattttaataaatttgaggacgtctttttattaactggaggtgcatcaggaacaagaactttaccaataaatgtttatcaacaaggttttgcaatatcagatattggaatgggctcagctgtttcaattgtaatcgttgtattacttttaatgtttatgtttttttattttaagcttttaggaaagagagtagatgagaactaaa

SEQ ID NO: 254791 - DNA, 449 bp, Unknown
  Bacterial polypeptide expressing nucleotide sequence isolated from the Sargasso Sea
ggaaggtaaagctttagattatgataaattaactatggaagttgaaacaaatggttcaatttcagctgaagacgcagtcgcttattcagcaagaatttttcaagatcaactaaagatgtttattaattttgatgaacctgttgaagcacctgtgaaagaagtttcaacggaaccagaatttaataaaaatttattgagaaaagttgatgaactagagttatcggtaagatcaatgaattgcctcaaaaatgataatattatttacattggtgaccttgttcaaaaatctgaaggtgaaatgttaagaacaccaaattttggaagaaaatcccttaatgaaattaaagaagttttaactggtatgtctttatatcttggaatggaaatacctaattggccaccagataatatcgctgaaatgtctaagaaattagaggaggccatctaat

SEQ ID NO: 254792 - DNA, 913 bp, Unknown
  Bacterial polypeptide expressing nucleotide sequence isolated from the Sargasso Sea
aacaagaagcacggccgaccagaaatggatgatcatcaagaacttgccagttgctcctcctgcagtgagaccatctgttgccatgccaaactgctacagaagcgaggatgacttgacctatgcgtaccagcaggtgatcaagaccaacaacatcctcaagatgcaaatcgacagaggaaccaactcaagcactctcaatgagattctgcagcagctccaattcttcgtcgccaccctcatggacaacgacttgtgcggtcaaccaaagcagaagcacaaatcaggaaagacgttgcgaactctccgagccaggctgaaaggaaaagaaggcagactcagaggcaacttgatgggaaagagagtcgacttctcgtcgcgcacggtcatcacgccagatccaaacctcaatctcgaccaactgggtgtgccgtacgagatcgcaaccaacttgactttccctgagactgtcactcactcaaactacgacgagatgaagaaactgattcagaatggaccacagaactggccaggagccaagtacatcatcagacacgacgagaagcagatcgacttgtcctacctgaagcacagatccgatgctcacatcgaaatcggctacaaggtcgaaaggcacatcagagacggtgactacgtcgtgttcaacagacaaccatccctccacaagatgtccatcatgggtcatcgagtcaaagttcttcctcacagaactttcagaatgaatttgagtgtcaccacgccatacaacgctgatttcgacggtgacgagatgaacatgcacgtgccccagagctacgagaccatcgctgaggtgaaagagatcatgatggtgcagaagcagatcatgaaccctcagtccaacaagcccatcatgggtatcgtgcaggactccctc

SEQ ID NO: 254793 - DNA, 562 bp, Unknown
  Bacterial polypeptide expressing nucleotide sequence isolated from the Sargasso Sea
tatgaaaaaagaattaacagatttatttaaaaattccgaaattttagaaacacaaaattttaatagcataaaaatttcattagccagtcctgaaaaaattaaatcatggacttatggagaaataaaaaaacctgagacaataaactatagaacttttagacctgaaaaggatggccttttttgcgcaagaatatttggtccgatcaaagattatgaatgcttatgtggaaaatacaaaagaatgaagtttagaggcataatttgcgaaaaatgtggtgttgaagtaactaaatcaaatgttcgaagggagagaatgggtcatattaatttagcaactcctgttgcccatatttggtttttaaaatcattaccaagcagaatagctttggctgtggatatgaaacttaaagaaattgaaagagttttatattttgaaaattttatagttatagagcctggtttaacaggattacaaaaaaatcaattattaaatgaagaagaattagctaaatatcaagatgaatttggcgaggaagcttttacagctggtattggtgcagaa

SEQ ID NO: 254794 - DNA, 436 bp, Unknown
  Bacterial polypeptide expressing nucleotide sequence isolated from the Sargasso Sea
gactatgataaattaataatggaagttgaaactaatggaactgttccagccgaagactcaattgcttttgctgcaagaatttttcaagatcaattatcaatgtttgttaattttgaagatccaaaagaggctcctaaacctaaaacttcaatagaacctgaatttaacaaaaatcttcttaaaaaagttgaagaattagaactttcagtgagatcaatgaattgcctaaaaaatgataatataatctatatcggggatttagttcaaaaaactgagccagaaatgcttagaacaccaaactttggaagaaaatcattaaatgaaatcaaagaggtacttagctcaatgtctttatatcttgggatggaaattccaaattggccacctgataatatagctgagctatctaaaaaattagaggaaaatacttattagc

SEQ ID NO: 254795 - DNA, 650 bp, Unknown
  Bacterial polypeptide expressing nucleotide sequence isolated from the Sargasso Sea
aatggaaaaaaatattacaaaaaattttgaaaatcaaaacttagctgcagaaaatagttttgatagtatcaaaatcaccttagctagtcctgaaaaaattaaatcttggtcatatggggaaattaaaaaacccgaaacaattaattatagaacattcaggcctgaaaaggatggtttattttgttcgagaatatttggtccagtaaaagattacgagtgtctttgtggcaaatataaacgtatgaaattcagaggaatcatttgtgagaaatgtggtgtagaagttacgaaatctaacgttagacgtgaaagaatgggacatatagatttggcttgtccagtagctcacatttggtttttaaaatctttgcctagtagaatttctttagctgtagatatgaagctaaaagaagtagagaaagttttgtattttgaaagttttatagtcgtagaaccaggcttaacaactttaaaaaaaggacaattattatctgaagaatcattaattaaagctcaagatgaatttggagaagatgcgtttaccgcagggataggagcagaagcagtaagagaaattttagtaaatttagatcttataaaagaacaaaaaaaactaagagactcactacctgaaatcaaatctaaagtta

SEQ ID NO: 254796 - DNA, 88 bp, Unknown
  Bacterial polypeptide expressing nucleotide sequence isolated from the Sargasso Sea
ctggcttcgcgtggtctgtctctgggtatgcgtctggacaactggccgcctgcaagcttgaagaaggacgacaaggtttcggcctgat

SEQ ID NO: 254797 - DNA, 416 bp, Unknown
  Bacterial polypeptide expressing nucleotide sequence isolated from the Sargasso Sea
tatgacagagcaaattttaattttttttcaaattgtttttattgatttagttttagctggagataacgcaattataataggtatggttgcttctcagtttcctgctgaaaaaagaaaaaaaataatttttttgggtattggtgctgcaataatcttaagaattatatttactttaataactgcatatttattacaaattacaggtttaagattaattggtggtttgttgcttctatatatttgttacagattatacattgacgtagttaaagaaaatcctaatgaagaaaataaaataaaagttgataattcgtcgtttattaaagcaatcaccacagtaattattgccgatgtaactatgagtttggataacgtattaggtgtagcaggagcagcaagagatcactatcttcttt

SEQ ID NO: 254798 - DNA, 133 bp, Unknown
  Bacterial polypeptide expressing nucleotide sequence isolated from the Sargasso Sea
atacaaagaagtgaaatggacttattaaaaactcctaatcttggaaaaaaatcattaaatgaaattaaagatgaattagcgtcaagaggactttctatgggcactgtccttaaaaattggccaccaatgtaaa

SEQ ID NO: 254799 - DNA, 867 bp, Unknown
  Bacterial polypeptide expressing nucleotide sequence isolated from the Sargasso Sea
taagtggaaaaagggtcgtgtaagaggtaatcttatgggaaaacgcgtatattatagtgcaagatctgttattacgcctgatccaaatctttctattagagaattgggtattcctatcaaggttgcaaaaaatattacaaaacctgtttatgtcaacgatacaaataagaagtttttgctaaaactcatacagaatggcccggatgtttatcctggcgcgaaaattcttcaaaagaaaaacggagacagtatatcgttaagatatattgacagaaattccgttgtattgcaaaatggcgacgtcgttcatagacacatgatggatggcgatgctatattgtttaacagacagcctacgcttcacagaatgagcatgatgtcacatatagccaaaattttaccaaaaggcgatacatttagaatgaatgttggttgtactaaaccttataatgcagattttgatggtgatgagatgaacttgcatatgcctcaagatgtagaagcagaaacagaattaagaaatcttgctgcggttcataatcaaatcattagtcctgcaaataatcaatccattattggtatatttcaggactcgctattgggttgttacagattcacaagaaaagatatatcttttacaccaagagaggttatgagtttaatgataaatgttaataattttgatagcgatatattcaataaaaaggagatgattaataactttgatgtattatcgcaaattatcccccccatgtcattgaatctaaagacaaagcagtttaaagaaggcgaggataagaaaacaagtaataatattattgaaattcaaaatggtaaatatattagaggacaaatcgacaaaagtgt

SEQ ID NO: 254800 - DNA, 667 bp, Unknown
  Bacterial polypeptide expressing nucleotide sequence isolated from the Sargasso Sea
aatggaaaaaaatattacaagaaacttcgataatcaaaatattatacctgagaataattttgatagcatcaaaattacactagcaagtccagacaaaattaaatcgtggtcatatggtgaaattaaaaaaccagaaacgatcaattatagaacttttagacctgaaaaagacgggttattttgctcaagaatatttggtccagttaaagattatgaatgcttgtgcggtaaatataaacgtatgaagtttagaggtataatttgtgagaagtgtggagtagaagtaacaaaatcgaacgttcgtagagaaagaatgggtcatatcgatttagcttgtcctgttgcacatatttggtttttaaagtctttaccaagcagaatatctttagctatagacatgaagctcaaagaagttgaaaaggttttgtatttcgaaagctttatagtagtagagccaggtttaactacgttgaagaaaggtcagcttttgtctgaggacgctttagtaaaagcacaggatgaatttggagaagatgcttttaccgcaggtattggtgcagaagctgttagagaaatattaatcaatttagatttaaaaaaagaacaagctaaactaagagattccttacctactataaaatctaaggtaactgaagaaagaacaata

SEQ ID NO: 254801 - DNA, 703 bp, Unknown
  Bacterial polypeptide expressing nucleotide sequence isolated from the Sargasso Sea
tatgagccaatctgtaatgaatatatttaaccctgctgcctcaagagatgatttcaatcaagttaaaatttccattgcaagtccagaaaggattttgtcttggtcttatggcgaaataaaaaaacctgaaacaatcaattatagaacatttaaaccagagagagacggtttattttgcgcgaggatctttggaccaataaaagactatgagtgtctatgtggaaaatacaaaagaatgaagtttaaaggcattatatgtgaaaaatgtggtgttgaagttacaaaaaaagatgtgagaagggaaagaatgggtcacatcaaattagcggcaccggtagcgcatatttggttcttaaaatctttgccaagccgtatagctcttatgatggatatgaaattaaaggacttagaaaaagttctatattttgaaaaatttatggtcacagaacccggattgacaaacctgatacaaaatcaattattggatgaagaagaattggaaaacgctaaggaagaatttggagaagattctttttctgcaggcattggagctgaagcagttcgaatagtactagagagaattgaattagaacctgaactggagcttcttcgttctaaattagctgaaacaaaagccgtagctttatctgaaaaactaattaaacgaattaaaatttttgaagcttttttatcatctggcaac

SEQ ID NO: 254802 - DNA, 673 bp, Unknown
  Bacterial polypeptide expressing nucleotide sequence isolated from the Sargasso Sea
atgaaaaaacaaataacagatatatttaaaaattcagaaatctcagaatctcaaaattttaatagtatcaaaattactttagctagtcctgaaaaaattaaatcgtggacctatggcgaaataaaaaaacctgaaacaataaattacagaacttttagacctgaaaaagatggccttttttgtgcaagaatatttggccccataaaagattatgaatgtctttgcggtaaatataaacgaatgaagtttagaggaattatttgtgaaaagtgtggagttgaagttacaaaatctaatgttcgtagagaaagaatggggcatataaatctagcaactccagttgctcatatttggttcttaaaatctttacctagcagaatttccttgacaattgatatgaagcttaaagaagttgagagagttttatattttgaaaattttattgttattgaaccaggtttaactgaattaaaaaaattccaacttctaaatgaagaggagttaataaagtatcaagatcaatatggcgaagaagcttttacagcaggcattggtgcagaagcgatacttgaaatattaaagtctataaatttggaagaagaaaaaaattctttagttaagactattaaagaaactaaatctaaagttgctgaagaaagatctataaaaagat

SEQ ID NO: 254803 - DNA, 145 bp, Unknown
  Bacterial polypeptide expressing nucleotide sequence isolated from the Sargasso Sea
ttgttttcagccgacaatccgtgcatctacgtgaacaaaattatttccgaaatggacgagctggtcggaatcgttcccgaagtctgccacgacccgacactcccgcgcacggacgatcaccaatgtcccaaggtaaccttttgaa

SEQ ID NO: 254804 - DNA, 762 bp, Unknown
  Bacterial polypeptide expressing nucleotide sequence isolated from the Sargasso Sea
gatgatattttttaatccggctgcatcaagagatgatttcaatcaagtaaaaatctcaattgcaagtcccgagagaatactttcatggtcatatggtgaaataaaaaaacctgaaacaataaattatagaacatttaaaccagaaagagatggtcttttctgcgcaagaatttttggtcctatcaaagattatgaatgtctctgcggtaagtataagagaatgaaatttaaaggcattatttgtgaaaaatgtggagttgaggttacaaaaaaagatgtcagaagagaaagaatgggacatattcaactagctgctcccgtcgctcatatatggtttttaaagtctctaccaagccgtatagctttaatgatggatatgaaattaaaagatcttgaaaaagttctctattttgaaaaatttatggttactgaaccaggattaacaccattaattcaaaatcaattacttgatgaggaagaattagaaaaggcaaaggaagaatacggcgaagactcttttacggctggtataggtgccgaagctgttagaaaagttcttgaaagaatagaacttgagtcagagcttgaagctttgcgtactaaactatctgaaacaaaagcggttgcattatctgaaaaattaataaaaagaataaaaatctttgaagccttcatatcatcaggaaatagacctgaatggatgatactaacgtctgtgcccgttattcctccagaattaaggccacttgtgccacttgatgg

SEQ ID NO: 254805 - DNA, 217 bp, Unknown
  Bacterial polypeptide expressing nucleotide sequence isolated from the Sargasso Sea
aatgaattgtttaaaaaatgacaatattatttacattggcgatcttgtacaaaagtcagagggtgagatgctcagaactccaaattttggaagaaaatcattaaacgaaattaaagaggttttaaccggaatgtctttatatttaggaatggaaatacctaattggccaccagataacattgctgaaatgtctaaaaagttggaggaagctatctaa

SEQ ID NO: 254806 - DNA, 565 bp, Unknown
  Bacterial polypeptide expressing nucleotide sequence isolated from the Sargasso Sea
atgccaacgcctgttgaagaccgactctcaaccgttgacatccgtggtaaccctaagcctggtatgcaagttgaacgccaccttatcgatggtgacgttgcaatcttcaaccgacaaccatcgcttcaccgaatgtcgatgatggttcacgaagtacgagttatggaaggacacacattccgattcaacctcgctgtttgtactccttacaacgctgacttcgacggtgacgagatgaaccttcacgtgattcaatccgaagaagcccgtgctgaagcgaagattctgatgcgtgtgcaagaacacatcttgacgcctcgctacggcggtgcagttatcggcggtattcacgatcacatctccggtgcatacctcctatctcgtccaggaaccttggtttcaaaggcgcatggtcttgaaatgcttggaagcattgcttacaccggtgagctccctgaaatcgtcaaggatgacaacggtaacgatgccttccgaggtcaagatatcatctcattgatcgtacctgacaacatcaatctccacttcatgtcccgaagtcgagacg

SEQ ID NO: 254807 - DNA, 304 bp, Unknown
  Bacterial polypeptide expressing nucleotide sequence isolated from the Sargasso Sea
agttattgttagagaacagccaacagaaccagaatttaataaaaatctattaagaaaagtagatgaacttgagctttcagtgagatctatgaattgtcttaaaaacgataatatcatttatataggtgatttagttcaaaaatctgagggagaaatgttaagaaccccaaattttggaagaaaatcattaaacgaaataaaagaagtattaacaggtatgtcactatatttaggaatggaaatacctaattggccaccagacaatattgcagagctatcaaaaaaacttgaggaagccctttaa

SEQ ID NO: 254808 - DNA, 939 bp, Unknown
  Bacterial polypeptide expressing nucleotide sequence isolated from the Sargasso Sea
actggtccatataatgccgatttcgatggcgatgaaatgaattggcacgtgttacaaaattttatggccattgctgaagcaaaacatatttgcggcgttcctcaccaactgctgtcggccaaggatagcaaaccatgcattggtctggtgcaagacgcggtcattggctcgtacctcttaacctccaaggatacgtttttgacccgtagccagttctttgatggaatgatgtgtgcaaagtacatggaatccgaggacgtaccaattccgaccatctttgctaagaacgccgacggaacatgggacgtccggtatactggcaagcaactggcgtcgtacgtgttgcccaagaaagtgtccatgcaaaagtgtgtccgcagcctggaatataccgattttgattcggtaatggacattgacgaacgcatggtgatcattcaagagggtgaactgctggctggaaaactatgcaaagcctcggtgggctcgtccaatcgaggcattgttcaccgtaccgtgcacgagcaaggaggttggcgggcgagtcattgggtgtccgacatgcaacgggtggcctgtcactttatgtcttcctacggcttcagcattggctttgaagatattttgcactccaaagacattcaacgaaagattgatcaaaccatcgaaagtgctatcgatgctgtcgtcagaggtcaaaagttggcgcacgatgccggggtgaacgaagaccgaatcgaagcggaacggatgcgggtgttgtctaatgtcttgaacgacgtgggccgtatctgtttgagcatggacgaaaacaacagtatccttcaatgcatcgaggccgggagcaaagggaaacggctaaacgcttgccagattcacggcgtggtgggtcaacaagtggtcggcgggaaacgcgtccagtaccgcactaacccaacg

SEQ ID NO: 254809 - DNA, 205 bp, Unknown
  Bacterial polypeptide expressing nucleotide sequence isolated from the Sargasso Sea
aaaaatgataatataatttatattggtgatttagttcaaaaatcagaaggtgaaatgcttagaacacctaactttggtagaaaatctttaaatgaaattaaagaggtattaaatactatgtcattatatttaggaatggagatacctaattggcctccagataacattgcagaattatccaaaaaacttgaagaagctatataat

SEQ ID NO: 254810 - DNA, 252 bp, Unknown
  Bacterial polypeptide expressing nucleotide sequence isolated from the Sargasso Sea
gaaaagtagatgagttagagttgtcagttagatcaatgaactgcttaaaaaatgataatataatttatattggcgatcttgttcaaaaatctgaaggtgaaatgttaagaacacctaattttggaagaaaatcattaaatgaaattaaagaagttttaacaggtatgtctctatatttaggaatggaaattcctaattggccaccagacaacattgcagaaatgtctaagaaattggaggaagcaatttaat

SEQ ID NO: 254811 - DNA, 783 bp, Unknown
  Bacterial polypeptide expressing nucleotide sequence isolated from the Sargasso Sea
aacggtgctaattccaatgtgattaatgattgggcgacaattctacagtattatgtcgccacaatggtggataataaaattcccggtgttgcctctgtcgcacagcgcacgggtcgcccactgaagtccatcaaagagcgtcttaatggaaaacatggccgtattcggggcaatctgatgggaaaacgcgttgatttctctgcgaggtcagtcattactcctgacccaaatatctctattaaagaattgggtgtaccgatgtctattgccaagaatatcacaaaaccggttatcgtaaatgaaaaaaataaggactatcttctgaaattagtgcaaaatggtccggatattcatcctggtgccaaaattctagagcggaaaaacggcgacagcatttcattgcgctacattgaccgcgattcgattacactaaatcatggcgatatcgtacatcgtcatatgctcaatggggatgccattttatttaaccggcagccgacactgcaccgcatgtctatgatgtcgcacacggttcgtgtcatgccggtgggcgacaccttccgcatgaatgttgccgatacgaaaccctataatgctgattttgatggtgatgaaatgaatcttcacatgccgcaggaccccgaaagtgaagccgagctgcgcaacctggcggcggttccatggcaacttattagtcctgctaataataaatctattgtgggtattttccaagactcacttcttggtgcattccttctaagcagaagtgatatcaacttttca

SEQ ID NO: 254812 - DNA, 532 bp, Unknown
  Bacterial polypeptide expressing nucleotide sequence isolated from the Sargasso Sea
aatgaagcaactcttccgtgatgttgatagcgatgacgagatgtttattcaactggacaaggctgttaaggaaaccgactcaaaccttactccgagaatgattgaccaactcgtccagggtttgcatagcaggggcgagaagaaggtcacaccagctaaggccaagaaaataatagattctgcaaccaacttctataatgacgcaaaggcagttccacatgaggcagtagggattacaactgcccagtccattggcgaacccggtacacagatgacgatgcggacattccactatgcaggtgtggctacagtgaacgttacccaaggtctaccaaggataatcgagattgtcgatgctaggaaggtgcctcaaacaccaaccatgataatttacatggacgagaaaaactccaagggaaaaccactgagaacaaatgaaaaactagtacgagacttagctgcttccattgagacaaccaccgctatagacatagcaaccgtagacgtcgatgtagctcagaggaacatatta

SEQ ID NO: 254813 - DNA, 449 bp, Unknown
  Bacterial polypeptide expressing nucleotide sequence isolated from the Sargasso Sea
aggtagcgcacttgattacgataaattgataatgacagttgaaacaaatggaacaattgctgcagaagatgcaatagcttattcagcaagaatatttcaagatcaattagctatgtttattaactttgaagatcctaaagaaatagtaaaagaagttaagtcatcagagccagaatttaataggaatttactaaaaagagttgaagaattagagctctcagtaagatctatgaactgtcttaaaaatgataatataatttatattggcgatttagttcaaaaaacagagcctgagatgttacgaacaccaaactttggtagaaaatctcttaatgaaattaaagaggttttaaatactatgtcactttatttaggaatggaaatacctaattggcccccagataatatcgcagaattatcaaaaaaacttgaggaaaataactattaat

SEQ ID NO: 254814 - DNA, 565 bp, Unknown
  Bacterial polypeptide expressing nucleotide sequence isolated from the Sargasso Sea
atgaaaaaagatataaaagatttatttaaagaaacatcagtatcagacacacaaaattttaatagtattaaaattacattagcgagtcctgaaaaaattaagtcatggacgtatggtgaaataaagaaacctgaaactataaactatagaacttttagacctgaaaaagatggtttgttttgtgcgagaatatttggaccaataaaagattatgagtgtctatgtggtaaatacaaaagaatgaaatttagaggaattatttgtgaaaaatgtggtgtagaggttaccaaatctaacgttcgaagagaaagaatgggacatataaatttagcaactccagttgcacacatatggtttttaaaatctttaccaagtagaatttctttggcaattgacatgaagcttaaagaagtcgaaagagttttatattttgagagttttattgttattgagccgggtttaactagtcttaagaaaaatcaattattaaatgaagaagaattaaataaataccaagaagaatttggtgaggaatcattcactgcaggaataggagcagaggcta

SEQ ID NO: 254815 - DNA, 232 bp, Unknown
  Bacterial polypeptide expressing nucleotide sequence isolated from the Sargasso Sea
tcagttagatctatgaattgcttaaaaaatgataatattatttatattggcgatcttgtacaaaaaacagaacctgaaatgttaagaacaccaaattttggtagaaaatctttaaatgaaattaaagaagttttaagctctatgtcgctctacttaggaatggaaattcctaattggccacccgataatatagcagaactctctaaaaaacttgaagaaaacacttattaat

SEQ ID NO: 254816 - DNA, 751 bp, Unknown
  Bacterial polypeptide expressing nucleotide sequence isolated from the Sargasso Sea
aaaaaagttttatttgaaaatgattttatagatttactactaacaacgttttattacacattttttggaaccgttggttcaatagtatttggtattttaactgctcaaatggtaaatcaaaaattttatggaagaacatttatgaggagtgttctacttttcccttatgttgctccagttgtcgctttagcttacacttgggagcttctactagaccctaatagtgggacattaaatagcttattattaaattatcaaattattgaaactccaataaaccttcttggacaaaaatatattgaaattagtattttggggtttgattttaaattaagattagcacttacaacagttataatgtttgaaatttggaggtattttcctttagcctttttatttattcttgcgagacttcaagccattccaaaagaattatatgaggcagctgatgttgatggggctagtccctttcaaaaattttttaatattacactccctcaaataactgcagtaatttcgattttattcatgattagatttatatggaattttaataaatttgaggatgtctttttattaactggaggtgcatcaggaacaagaactttaccaataaatgtttatcaacaaggttttgcaatatcagacattggaatgggctcagctgtttcaatagtaatcgttgtattgcttttaatgtttatgtttttctattttaaacttttaggaaagagagtggatgagaactaaa

SEQ ID NO: 254817 - DNA, 666 bp, Unknown
  Bacterial polypeptide expressing nucleotide sequence isolated from the Sargasso Sea
tatgagtaatattgaaaacaaaaaaattttactaattatttgcggaggaatttctgcttataaaagtcttgaaattataagattactaaaaaaaaaaggtgccagaataaaaactattcttactaaaagtgctaaggagtttgttactgctttatctgtagcatcactttcacaagaaaaagtttatgatgatttatttagtcataaaaatgagtctgagatggatcatatatctttatctagatggagtgatttaattttagttgctccagctactgcaaataccatttctaagttaagtgcaggaacttctaatgatttagcatcgacagttgtattagcttcaaataaggagatttttttagtacccgcaatgaatgttaggatgtgggaacatcaatcaactaaagataatttaaaaaaattaaaagaatttggttataattttataggacctgaaattggtgacatggcctgtggtgaatatggtcaaggaaaaatgactgaaccaacagaaattattaatataatagaacaatatttttataatttaaaaaaaaataaaaaactcaaagctttagttacagcaggtccaacacacgaatatatagaccctgtaagatatatctcaaatagatcaagtggaaaacaaggctatgaattagc

SEQ ID NO: 254818 - DNA, 181 bp, Unknown
  Bacterial polypeptide expressing nucleotide sequence isolated from the Sargasso Sea
aatggcaatagagctgttccagccgtttgtgatccatcgactaatccgccagaacatcgtcaacaacatcaaggctgccaagaatctgattcaacgccctgacgatgaagtgatgcatgtgcttcatgaagtgatcgatggtcacccgatcctgctgaaccgtgctccaaccctgcaccgt

SEQ ID NO: 254819 - DNA, 398 bp, Unknown
  Bacterial polypeptide expressing nucleotide sequence isolated from the Sargasso Sea
tataatatttgaaatttggagatatttcccattagcctttttatttattcttgcacgtcttcaggccataccaaaagatctatatgaagctgctgatgtagacggcgcaagtccattccaaaaattctttaaaataacattgcctcaaattactgcggtaatttcaatacttttcatgattagatttatttggaactttaataaatttgaagatgtatttttacttactggtggtgcatcaggaacaagaactttaccaattaatgtttatcaacaaggttttgcaatatcagatataggaatgggatcagcagtttcaatcgtaattgttttgctcttacttttatttatgtttttttattttaaacttttaggaaagagggtagatgaaaattaaa

SEQ ID NO: 254820 - DNA, 388 bp, Unknown
  Bacterial polypeptide expressing nucleotide sequence isolated from the Sargasso Sea
gttcctgaggatgcagtggcacttgcaggaaggataatttcagatcaagcttcttattttgtgaactttgaggaagaagaagaagttaaagaggttgaaacagaaacagaaccaaaattaaatccgaacttattgagaaaagttgatgaattagagctttcagttcgttcagctaattgtcttaaaaatgataacattttgtatataggcgatttagttttgaaaactgaaaacgaaatgctgaggacccctaattttgggagaaagtctttaaatgaaattagggaagtactttcagatatgggtttagggctaggaatgcatattgataattggccaccagaaaatatagaaagtcttgctaaacaaatagatgagccttactaat

SEQ ID NO: 254821 - DNA, 452 bp, Unknown
  Bacterial polypeptide expressing nucleotide sequence isolated from the Sargasso Sea
tagagaaggaaaagcattagattatgataaattaactatggaagttgaaacgaatggatcaatttctgcagaagatgcagtggcatatgcagctagaatatttcaagatcaattaggaatgtttgttaattttgatgagccacaagaagttattgtgagagaacaaccgactgagcctgagtttaataaaaatttattaagaaaagttgacgaattggaactttctgttagatcaatgaattgtcttaaaaatgataatattgtttatataggtgatttggttcaaaaatcagaaggagaaatgttacgaaccccaaattttggtagaaagtctttgaatgaaataaaagaggtattaacaggaatgtcgttatatttaggaatggaaataccaaactggcctccagacaatattgcagaattatcaaaaaaactcgaggaatctatataat

SEQ ID NO: 254822 - DNA, 861 bp, Unknown
  Bacterial polypeptide expressing nucleotide sequence isolated from the Sargasso Sea
ttggctagatctcaaaaagcctgacgaaatggaaataaagatctccgaatataacccgagccaggctgttgttgcggttgggccgtttgagcgtggtttcggtgtgaccattggtaatgcgttgcgtcgggttttgctatcatcgctgcaaggtgctgctgtcacgtcagttcagattcagggcgttgtacatgagttttcttcaatccccagcgttcgtgaagacgtcaccgatttggtgctgaatttgaaaggggttgcggttcgcatggaagaggaggggccaaaacgccttcgtcttgcggttgatggtcctgcgacggtaacagccggtatgattactgaaaccgcaaatgtggatatcatgaacccagatcatgttctatgccaccttgataagggtgcaaagcttgcgatggaattgaccgttgatactgggaagggttatgtccctgccagcgtacaccgtaccgaagactcgccaatagggctgatccctattgatgcgattttcagcccagttcgacaggttgcatacaaggtggaaaatgcccgaattggtcagatcactgattatgataaattgttgttgaccatcgaaacagatgggtcaatctctcccgaagatgcagtggcttatgcggctcgcattttgcaggagcagttgcaaacctttatcaattttgaggagccgaaaggtgaacccgttcccactgagccagaattgccgttcagtcgtaacctccttcgtaaggttgatgagcttgaattgtcagtccgttcggcaaactgtctaaaaaacgataatatcgtttacattggtgatctcgttttaagaccgagcatgaaatgctcaggaca

SEQ ID NO: 254823 - DNA, 726 bp, Unknown
  Bacterial polypeptide expressing nucleotide sequence isolated from the Sargasso Sea
aatgagtaaagaattatcagatttatttaaatcttcagaaatatctgaagcacaaaatttcaacagtataaaaattactttagcaagtcccgaaaaaattaaatcttggacttttggtgaaattaaaaaaccagaaacaattaattatagaacatttcgacctgagaaagacggtcttttctgtgctcgaatatttggccctatcaaagattatgaatgtctctgcggtaaatataaaagaatgaaatttagaggaataatatgtgaaaaatgtggtgtagaggtgactaaatcaaatgttcgtagggaaagaatgggacatattaatttagctacacccgtagcacatatatggtttttaaagtctttaccaagtagaatttctttagttgtagatatgaaacttaaagaggtggaaagagttttatattttgaaaattttatagttattgaacctggtttaactggattaaaaaaaaaccaattattaggtgaagaagagctaataaaataccaagatgattatggagaggaagcctttaccgccggtattggagcagaggcaattcttgaaatacttaaatcaataaacttagaggaagaaagagacgctttaattaagactattaacgagactaaatctaaagttgctgaagaaaggtcaattaaaagattaaaattaatagagtcatttatagagacaggtaataaaccagagtggatgat

SEQ ID NO: 254824 - DNA, 602 bp, Unknown
  Bacterial polypeptide expressing nucleotide sequence isolated from the Sargasso Sea
tttgactcaagaaaatgattttaatagtattaaaatcactcttgctagtcctgaaaaaattaagtcatggtcttatggtgaaataaagaaacctgaaacgattaattatagaacttttaggcctgagaaagatggtttgttttgctcaagaatttttggaccagttaaagattatgaatgtttgtgtggaaaatacaaaagaatgaagtttagaggaataatatgcgaaaaatgcggtgttgaagttacaaagtcaaatgtgagaagagaaagaatgggccatatagatttagcttgtcccgtagcccacatatggtttttaaaatccttaccgagtagaatttcattagcaatcgacatgaaattgaaagaagttgaaaaagttttatattttgaaagttttattgttatagagcccggtcttacaacactaaaaaaaggtcaacttatttcagaagaggcattaattaaagctcaggatgagtttggagaagatgcttttactgctggcattggcgctgaagcagtaagagagattttggtaaacttagaccttaaaaaggaacaaaaaaaattaagagattcactagctgaaattaaat

SEQ ID NO: 254825 - DNA, 357 bp, Unknown
  Bacterial polypeptide expressing nucleotide sequence isolated from the Sargasso Sea
tatttcaagatcaattatctatgtttgtgaattttgaagaccctcaggaagtaataaaagaagttaaatcgtcggaacctgaatttaatagaaatttattaaagagagtagaggaattagaactatcagtaaggtcaatgaactgtttaaaaaatgataacatcatttatataggtgatttagttcaaaaaactgagccagaaatgcttagaaccccaaattttggtcgaaaatcacttaatgaaattaaagaagtattaaatacgatgtcactttacttaggtatggaaattcctaattggcctccagataatattgctgaactttcaaaaaaacttgaggaaaataattattaat

SEQ ID NO: 254826 - DNA, 301 bp, Unknown
  Bacterial polypeptide expressing nucleotide sequence isolated from the Sargasso Sea
aaaatacaagatcaaccgaaagaaccggaatttaaccaaaatcttttaagaaaagttgatgaactagagctatctgtgagatctatgaattgtctgaaaaatgataatataatttatatcggagatcttgttcaaaaatctgaaggcgaaatgttaagaactcctaactttggaagaaaatctttgaacgaaattaaagaagttttaagtggaatgtctttatatctaggtatggagattcctaattggccaccagataatatagcagagctgtcaaaaaaattagaggacgcaatttaag

SEQ ID NO: 254827 - DNA, 688 bp, Unknown
  Bacterial polypeptide expressing nucleotide sequence isolated from the Sargasso Sea
gaaaaaatcaaatcttggactttcggtgaaatcaaaaaaccagaaacaataaattatagaacatttagacctgaaaaagacggacttttttgcgctagaatatttggaccaatcaaagattatgagtgtttatgtggaaaatataaaagaatgaaatttagaggaatcatatgtgaaaaatgtggtgttgaagtaactaaatcgaacgttcgtagagaaagaatgggtcatataaatttagcgacaccggttgctcacatttggtttttgaaatctttacctagcagaatttctttagttgtagacatgaaacttaaggaagttgaacgagttttgtattttgaaaattttatagttatagaaccaggattaacgggtcttaaaaagaaccaattacttggcgaagaagaacttatcaaatatcaagatgattatggtgaagaagcattcacagcaggtattggagctgaagcaatactagagattctaaaatcaataaatttggaagaagaaagagaaattctaattaaaaatattaaagaaactaagtcaaaagttaatgaagaaagatctataaaaagactaaaattaatagaatcgtttatagaaactggaaataaacctgaatggatgatactaaccactgttcctgtaataccacctgaattaagaccacttgtacctttgg

SEQ ID NO: 254828 - DNA, 782 bp, Unknown
  Bacterial polypeptide expressing nucleotide sequence isolated from the Sargasso Sea
agggggacgtgtaagaggaaatctgatgggcaatagagtggatttcagtgcgaggtcagtaattacaccggatccgaatctatcaatcaaagagttgggtattccattgaagattgcgaaaaacattactaagccggttgtcgtgaatgaaatgaattataactatttaatgaaattactggagaacggtgcgagtaagtatccgggtgccaacattttagagaagaagaatggtgcgttgattgcgttgaagtacgtagatttgaaatcgatcaagctggaaaccggcgatatcgtacatcgtcatttaatggacggcgatgccgtactcttcaacaggcaacctacattacatcgtatgagtatgatgtgtcatttagcgaagattttgcatgtaggcgatacattcagaatgaatgtaggagatacgaagccgtataatgcggattttgacggggatgagatgaatatgcacgtaccgcaagatataatgtcggagattgagttgaagtatattgcggcggtgccgaatcaaatcgtaagtccggctcaaaataatccgattattggtatatttcaggattcgttgttaggaatttacagatttaccaaacgcgataataaatttacaaaacagaaagtgatgaatttccttgcttgtttgccgacgttgaatattgacgtgttgcagcagcagtttgtggacaataaaggggtattgaatgggctgcacgtgattagacacattatgaagaacgtgtcattaaagtataaaacgaagg

SEQ ID NO: 254829 - DNA, 657 bp, Unknown
  Bacterial polypeptide expressing nucleotide sequence isolated from the Sargasso Sea
aatggataaatcatttaatctaaaagttaaaactgatgagaaatctttaacaaatacaagtggcaagtttttaatccaaccattagataggggttatggaattactcttggtaatgcaatgcgaagggtcttactaacaagcatccctggtgctgcagtaacacatgtaaagatagaaggtgtggatcatgaattttcaacgattaaaggtattaaggatgatgtcgctgatattataatgaatttaaaaaaggtaagatttaaactaatggataataatcctgataaagttaatctttctttaaaaggtaaaaggattgtcacggcgcaagatattcaatctgccagtgatcagtttgagattttaaatcctgatcaatatataactgaggttaatactagtggtaaaatagaaatggagcttcgaattggaataggtaagggctatgtaccatcggaagaaaatgaattacctaatttaacagttgggactttgtctattgatagcatttttaatccagtaactaatgttagttatagcgttaagccagtaccaggcgcaaaagaacctatagaaattctaacagttgaagtagaaactgatggctctattaatccgaaagatgcaattagttactcagctacatatataagaga

SEQ ID NO: 254830 - DNA, 814 bp, Unknown
  Bacterial polypeptide expressing nucleotide sequence isolated from the Sargasso Sea
aatgaatgatcttgtaaatccattttcacaagcgcaaagcccacaaagctttgaccaaattagagtaacgatttctgctccacaaagaataaggtcgtggtcttttggtgaaataaaaaagcccgaaactataaattatagaacatttaagccagagagagatggtcttttttgttcaaggatttttggtcctgttagagattatgaatgtttatgtggcaaatataaaaggatgaaatacagaggtatcatctgcgaaaaatgcggtgttgaagtaacattgtcaaaagtaagaagagaccgtatgggtcatattgaattagcttcacctgttgcacatatttggtttttgaaatctcttccctcaagaattggtcttcttgttgatatgacattaaaggatttagaaaaagttttatattttgaaaactttatagttattgattcaggattaacagatttgaaaactggacaacttttatctgaagaagagtattatgaaagtttagaagagtttggagaagattcattcactgcaatgataggggctgaggcaattcaatttcttttgtctaatattgatcttgagaaggaaaggttaaaagttagtactgagttaaaggaaactggatcagaagtaaaaagaaagaagcttgtaaaaaggttaaaacttattgaatcatttattcaatcaaatagcagacctgagtggatgattttagaggttgtgcctgtaattcctccagaattaagaccattggttccattagatgggggaaggtttgctacatctgatttaaatgacttatataga

SEQ ID NO: 254831 - DNA, 582 bp, Unknown
  Bacterial polypeptide expressing nucleotide sequence isolated from the Sargasso Sea
tatggaaaaaaaactaactaaactttttgagaatcaaaacattacaaaagaaaataattttgatagtattaaaattactcttgctagtccggaaaaaattaaatcttggtcttacggtgaaataaaaaaacccgagacaataaattatagaacttttcgtccagaaaaagatggtctgttttgttcaagaatatttggacctgttaaagattacgaatgcctatgtggaaaatataagagaatgaaatttcgagggattatttgtgaaaaatgtggagtagaagttacaaaatctaatgtaagaagagaaagaatgggccatattgatcttgcatgtccagtagctcatatttggtttttaaaatcattaccaagtagaatttctttagccatagatatgaaattgaaagaagtggagaaagtattatattttgagagtttcattgttgtagaaccaggcttaacaacactaaaaaaaggtcaacttatatcagaggaagcattaattaaaagcccagaagagtttggagaagactcatttacagctggtattggcgccgaagcagttagagaaattttagt

SEQ ID NO: 254832 - DNA, 766 bp, Unknown
  Bacterial polypeptide expressing nucleotide sequence isolated from the Sargasso Sea
catgaataacgctcttcttctcgacggcaaggttgccatgatttcgggtgcggcctcggcgcggggcatcggtctggctaccgctcgcctgttcgccagccacggcgccaaggtggcgattctcgacctggacgaaggtgcagccgtcgaagctgccgccgccatcggccccgaacaccgtggttatgcctgcaacgtggcggacaaggacgcgtgcctcaaggccaccgagcgcgccatcgccgacttcggtcgcatcgatgtgctgatcaataacgctggcatcacccagccggtgaagaccctggagatcgacccggcgagctgggatcgtatcctcgacgtcaacctgcgtggcgtgctgtacctgtctcaggccgtcattccgcacatgcaggcgcagggcagtggttcgatcgcgtgcatgtcttcggtatcggcccagcgcggtggcggtatcctcggcggcccgcattactctgcggccaaggccggtgtactgggcctggccaaggccatggcgcgcgagttcggcccgagcaatatccgcgtcaactgcgtgacccctgggttgatccagaccgacatcagctccggcaaactcagtgaccagcagaaggccgagattgccgccagcatcccgctcaatcgcctgggtaatgccgaagaggtggccggtgcctacctgttcctggcctcgaatctgtcggcgtacatcaccggtgcggtgatcgacgtcaacggtggcatgctcatccacggttga

SEQ ID NO: 254833 - DNA, 568 bp, Unknown
  Bacterial polypeptide expressing nucleotide sequence isolated from the Sargasso Sea
aatgagcaaagaattaaccaatcttttttcaaaaaaagttaataagcaagaattttctaaaattaaaattactttagctagtcctgaaaaaataagatcatggtcttttggagaaattaaaaaacctgaaacaattaattatagaacttttaagcctgaaaaagatggtttattttgcgctagaatatttggcccagtaaaggattacgagtgtctatgcggaaaatataaaggaatgaaatttagaggtattatatgtgaaaaatgtggaacagagatatgcaaatctaaagtaagaagagaaagaatgggtcatattgaattgtctacaccagtgtctcatatttggtttttgaaatctttacctagtagaatagcattgtctctagatataaaacttaaagagctagaaaaggtcctttactatgaaaattttatagtaattgaacctggtttgactaagttagaaaaaaatcaaataatttcagaagaagactatattaaagcccaggaagagtatggcgaagaatcatttacagcaggcataggagcttctgcaataagggaa

SEQ ID NO: 254834 - DNA, 367 bp, Unknown
  Bacterial polypeptide expressing nucleotide sequence isolated from the Sargasso Sea
atggcacgcgttacggtagaagattgtatagataaggtttcaaacagatttgaactagttttacttgctgcgcatagagcaagaatgatttctgcaggggctgaaccgagcttggatagagataacgataaaaacccagttctcgcacttagagaaatagcgatagagacagttaccttcgatgagttaatggagtctaccattgagagccaccaacggcaaatagaggttgatgagccagatgatgaggacttgtctctactcattcgagacggtcaaagaggtaaagaagaaagtgctgatgaaactgcaaatgaagatttgcttagagctttaatggatgctcaaacatcagaggacaaataga

SEQ ID NO: 254835 - DNA, 817 bp, Unknown
  Bacterial polypeptide expressing nucleotide sequence isolated from the Sargasso Sea
ctaactcataaattatgtgatatcattaaatcaaacaatacattaaaacaaaaaatagataataatagtcgtattgaagtcgttaatgattggacaaaagtattacaatatcatatcgcgactttcgttgataatgaactaccaggtgttgctcaagctgtgcatcgttcgggtagagcattaaaagcgattcgtcaacgtctcaagggtaaagatggaagaataagaaataatcttatgggaaaacgtgtagacttttcaggtagaagtgttattacaccagatcctaatattgaacttgatgaacttggtgtaccaattacaattgctaagaatctaacatatccagaaattgttaacaaatttaataaaggaaaattagaaaatctacttgttaatggaattgataaatatccgggtattaaattaattattaaagatggtatccaaattacactaacatccaataatattaacgatattgaactcaattatggtgatattgtccatcgacatttaattgatggagatcacgttcttttcaaccgtcaaccatcccttcataaaatgagtatgatgggtcatagagtcagggttatgaagggtaatacatttcgtcttaatgtaagtgctacttcaccttataatgcagattttgatggagatgaaatgaatatgcatgctccacaatctatcgcaaccgtctcagaattaatgaatattgcttcagttatctatcaaattgtatctccaagggaaaataaaccaattattacgatcgttcaagatacactattaggtattaataaacttacaa

SEQ ID NO: 254836 - DNA, 610 bp, Unknown
  Bacterial polypeptide expressing nucleotide sequence isolated from the Sargasso Sea
atgagaagtgttttgctttttccatatgttgctccagtagttgctttagcttacacttgggaacttttactagatccaaatagtggtacacttaatagtttgttgttaaattatcaaattattgaaactccaataaacctccttggacaaaaatatattgaaattagtattttgggttttgattttaaattaagattagcacttacaacagttataatgtttgaaatttggagatattttcctttagcttttttatttattcttgcgagacttcaagctattccaaaagaattatatgaggcagccgatgttgatggcgcaagtccttttcaaaagtttttcaaaattacacttccacaaattactgcagtaatttcaattctttttatgattagatttatatggaattttaataaatttgaagatgtttttttattaacgggaggtgcgtctggaacaagaactttaccaataaatgtttatcagcaaggttttgcaatatcagacattggaatgggctcagccgtatcaatagtaattgttgtattgcttttaatgtttatgtttttttatttcagacttttaggaaagagagtagatgagaactaaa

SEQ ID NO: 254837 - DNA, 436 bp, Unknown
  Bacterial polypeptide expressing nucleotide sequence isolated from the Sargasso Sea
catgcatttccctcctcccggggcgccgctgcgcatgcagccgcccgcccactccgatgcgtcgcccgccgccgcaccacgcgcgctcgacgcggctcagctcgacgatgcgccggccgtgcggctgctgacggatacgcttcacgcggctcgcgtacgcgacgcatccgacatccacgtcgaaccattcgaagccggctggcgcatccgcctgcgcatcgacggcgtgctgcacgaacatgcgcggccgccccttcatctgcgcgacgcgctcgtcacacggatcaaggtgcttgcgcgcatggacatcgccgagcggcggctcccgcaggacggcaggcttcgcatcgtgatcgacggcggtacgcgcggcgactaccgtgtcagctcgctaccgacgttgttcggtgagaagctggtgctgcggcggctggaa

SEQ ID NO: 254838 - DNA, 775 bp, Unknown
  Bacterial polypeptide expressing nucleotide sequence isolated from the Sargasso Sea
caacaggaagaagttttcgacgcgatcaagatcggtctggcctcgcccgacaagatccgttcgtggtcgttcggcgaagtgaagaagccggagaccatcaactaccgtacgttcaagccggaacgcgatggtctcttctgcgcgaagatcttcgggccgatcaaggactacgagtgcctgtgcggcaagtacaagcgtctgaagcaccgcggcgtgatctgcgagaagtgcggcgtcgaagtgacgctggcgaaggtgcgtcgcgaacggatgggccacatcgagctggcctcgccggtcgctcacatctggttcctgaagtcgctgccgtcgcgtctgggcatggtgctcgacatgacgctgcgcgacatcgaacgtgtgctgtacttcgaagcatacgtggtgatcgaaccgggtatgacgccgctgaaggcgcggcagatcatgaccgaagaggattactacaacaaggtcgaggaatacggcgacgaattccgtgccgaaatgggcgcggaaggcgtgcgtgagctgctgcgcgcgatcaacatcgacgagcaggtcgagacgctgcgcaccgagctgaagaacaccggctcggaagcgaagatcaagaagtacgcgaagcgcctgaaggtcctcgaggcattccagcgctcgggcatcaagcccgagtggatgatcctcgaagtgctgccggtgctgccgccggaactgcgtccgctcgtgccgctggacggcggcagtttcgcgacgtcggacctgaacgacctgtatc

SEQ ID NO: 254839 - DNA, 469 bp, Unknown
  Bacterial polypeptide expressing nucleotide sequence isolated from the Sargasso Sea
tattcagtaagcacagccagagaaggtaaggcgctagattacgataagttgacaatgcaagttgaaactaatggctcgatatctgctgaagatgcagtggcttactccgcaagaatttttcaagatcaactaaaaatgtttataaactttgacgaaccagtagaggcaccagtaaaagaggtttcaactgaaccagaattcaataaaaacttattgagaaaagttgacgaattagaactttcagtaagatcaatgaattgtctaaaaaatgataatataatttacattggtgatcttgttcaaaagtctgagggtgaaatgcttagaacaccaaattttggtagaaagtcacttaatgaaattaaagaagttttaacgggaatgtcattgtatttaggtatggagataccaaattggccaccagacaatattgctgaaatgtctaaaaaacttgaggaagctatataaa

SEQ ID NO: 254840 - DNA, 702 bp, Unknown
  Bacterial polypeptide expressing nucleotide sequence isolated from the Sargasso Sea
aaagactagatgtttctggagaaggagttattactgctggcgacatcatggtgcccggtgactttgaaattgtaaatcctgaattgtatattgcaacattagattcacctgatgcacatttagtcatagaatttaatgttgaaaaaggcgcaggatatatttctgcaagtagtaatgatggatatccaataggagttttgcctgtagattctatttttacaccagtttctaaagtcagttatgcagtagaaccaatgagagtaggtcaagttacggattatgaaaagttaattgttgaaatatggacagatggtactattatgccctctgaagcccttatcgaatcagggaatattttagttaaaagcgcaactttactaacaacaattggaactacgattacagaaggtggagaagaagatacttctagtagtccaaattcttctgtccctcctgagatatacaatagtcttgttgatggattaggtttatcagcaagaactttgaattgtttaaaaagagctaaacttaatcgtgttggagaaatattagaaaaagataaatctgaactaatgcaaattaggaactttggacaaaagtctatggacgagctcttcgacaaattaaaagaacttaaccttcttcctgaagagaatgctgaaaatacagaatcatcagacgaggaaaatactgaagagtaaa

SEQ ID NO: 254841 - DNA, 367 bp, Unknown
  Bacterial polypeptide expressing nucleotide sequence isolated from the Sargasso Sea
ttgctgcaagattttccaagatcaattatctatgtttgtgaattttgaagatccaaaagaagttccaaaaccggttcccactacagaacccgaatttaataaaaatttattaaaaagagttgaagagttagaactttcggtaagatcgatgaattgtttgaaaaatgataatataatttatatcggtgaccttgtccagaagacagaaccagaaatgcttagaacacctaattttggaagaaaatctttaaatgaaataaaagaagttttaagttctatgtccttatatctaggaatggaaattcctaactggccaccagataatatagctgagctttctaaaaaattagaagaaaatacttattaa

SEQ ID NO: 254842 - DNA, 172 bp, Unknown
  Bacterial polypeptide expressing nucleotide sequence isolated from the Sargasso Sea
atgatccacaaaaattgggccgaattaattaagcccgcacaactacaagttaaacaggcaaatgatcctactcgtcagggtaccgtaatcgctgagcctcttgaacgtggtttcggtttaacgattggaaacgctcttagaagagttcttatgagtagcctgcaaggcgccg

SEQ ID NO: 254843 - DNA, 691 bp, Unknown
  Bacterial polypeptide expressing nucleotide sequence isolated from the Sargasso Sea
ggggacatcgtcgagagacacttgcacgacggcgacattctcctgttcaaccgtcagccgagtctacacaagatgtccatcatggcgcacaaggcgcgtatcatgccgtgtagaactctacgtttcaacgagtgcgtgtgtacgccgtacaacgcagatttcgacggcgatgagatgaacattcactgtccgcaaacggaggaagcgcgcgccgaggcgatgcaactcatgggcgtgcatcacaacctctgtacgccgaagaatggtgaaattttgatcgccgccacgcaggatttcctcaccgcggcgttccttctcacgatcaaggatgccttcttcgatcgatcgcagttcggcgcgctcgtctcgtacatgggcgacgcgttactctcagtggatttgcccacgccggccatcgtcaagccggtcgagttgtggaccgggaagcaagtcttcagcgttctcatccgcccgaaagtgtcggataaaatcttcgtcaatctcgaagtcgctgaaaagctctacaacaagagggacaagacgatgtgcccggacgacggatacgtgtgcattcggaatagcgaaatcatgtctggtcagctcggcaaggcgacgctcggcagcggtaataaagccgggttattttacgtgctcaacatggagtacggtccacaggcggcggccgaggcga

SEQ ID NO: 254844 - DNA, 256 bp, Unknown
  Bacterial polypeptide expressing nucleotide sequence isolated from the Sargasso Sea
ctgagaaaagtagatgagctagagttatcagtaagatcaatgaactgcttaaaaaatgataatattatttatatcggtgacttagttcaaaaatctgaaggtgaaatgttgagaacacctaattttggaagaaaatcattaaatgaaattaaagaggttttaacaggtatgtctctatatttaggaatggaaattcctaactggccaccagacaacattgcagaaatgtctaaaaaattggaggaagcaatttaat

SEQ ID NO: 254845 - DNA, 693 bp, Unknown
  Bacterial polypeptide expressing nucleotide sequence isolated from the Sargasso Sea
tatgcgctggcggcggccgtacttctggcaaggcggcggacagaaggttcgattgcgcaccaccgctggcggacgctttaacaactacgaactcgattttgaggagccgtggcttatgggaaaaaaactgcgctttacaacgaatctctacaaccgggagatggaatacttccatgaaaaatttgacgttgaagaaaccggtatgcggctgggacttgagcgggcgatgtttggtaatgattacttccgtggtagggtgaattacaccgttgaaaatatcgggatggtggatatgaaaagcacggcttcccaggaattgttggacgaacgcgggcacgacttgatttccaaaattggcgtggggctcacattggatacccgcggtggtggcattattcccaccaaagggcagcgctcatccatagatgtggatttcgccccggatttactgggtagtgaaaaggaattttacggagttcatcttaagagtgcatggtacttcaagggattaggcgaaggacataccatcgaattgctatctcaagccgctacgatcgatagcttgactggggggcaaacggttccctacctgtatcgccatgcgttgggtggttcgcgaaatctgcgaggctatgatttccgagaggtggggccgcgtggaacggccggggattatatcggcggtaataccat

SEQ ID NO: 254846 - DNA, 154 bp, Unknown
  Bacterial polypeptide expressing nucleotide sequence isolated from the Sargasso Sea
ctaagaacaccaaattttggtagaaaatcattgaatgaaattaaagaagttcttcagcaaatggaattaaatcttggaatgtcagttcctgattggccacctgaaaatatcgatgaactagccaaaaaatatgaagatccattcaacaaataaa

SEQ ID NO: 254847 - DNA, 304 bp, Unknown
  Bacterial polypeptide expressing nucleotide sequence isolated from the Sargasso Sea
tgttaaagaagtaaaatcatcagaaccagagtttaatagaaatttattgaaaagagttgaagaattagagctttctgtgagatctatgaattgtttaaaaaatgacaatatcatttatattggagacctagttcaaaaaactgagccagaaatgttaagaacaccaaattttggcagaaaatctcttaatgagataaaagaagttttaaacactatgtctttatatttaggaatggaaatacctaattggcctccagacaatattgcagaattatctaagaaattagaggaaaatagctactga

SEQ ID NO: 254848 - DNA, 760 bp, Unknown
  Bacterial polypeptide expressing nucleotide sequence isolated from the Sargasso Sea
aatgtttttaattttttcttttttcattacatttttttcaagttatttgactttatatctattaataccacttttaaaaaaaaatattattgatactcctaacgaaagaagttctcataagtcacccataccatcggggggaggaattgtatttgcattaataggttctttaatgtgttcatattttgaaaataatattccactattttgtatgccactagcttttctaggacttatggatgatagatataatttgccatcttctataagatatgtaattcaaacattagtctctacgatactaatatttaattctccattgaaaaattatattgtttccagcaacatatttttatctttaattacgttcattgttcttatagtattttgtacaggcaacataaatttctttaatttcatggatggaatagatggccttgtcagttcttgcgttatagtttttttaataagtgcttcattgattgctcaaccttcatttatgcctatggttggagcactttgtggttttacaatattgaattggagtcctgctaaagtatttatgggagatgcaggcagtacatttctaggtgctttagttactgccttaattataaattcaatgaatttaaataattttttaggaatgttaattattatatttcctatttttggggatgcttctatatgcgtaatgagaaggtatttggccggacaaaatgttttcaagcctcataaattacatctatatcaaagacta

SEQ ID NO: 254849 - DNA, 691 bp, Unknown
  Bacterial polypeptide expressing nucleotide sequence isolated from the Sargasso Sea
gctgctcaccaactcggaggctcgcgtcaacctcgccgcgcagtcggtttgcgatggcagcgtgcgaggccagctatcggtggcgccgaatctgcttccggcggttggcgacgtggacctgggcatggacctcaggttgcagttccagcaatctgccggccagctgagcgtgcccgtgcacgccaactcggccgacgggatactggtcaactatcaggtcgaggtgacgatggaccctgccgtcttttacgcgagcgagtgcgccgctggcgccgtcaacggcttcacgtgcacgctgaatgatccgctcgagcgcatcaagctcatcgcgactgacaccgcgtccacatcgatgggctcgcgcgtgcacatcggcaccttcacgctgcgtgttgatcggacggcggtgacgctgatcacgggcacgatcgtcgagctcgtgcgcaatgcggacggcggcagccgagaggtgcgcacatcgaatgcgccgatcgtggcaggtcacggctatgcatcggtccaggtgggcgggcgacgcctcgcaggcagcgcgccgccgccggagacgccgcagcgcgacgcgcgagcgctgctgctgcaacggctgcatcggcgacggatgcagacggcgatctcgtgctactcgcaatcggcgccctccggcgcatgcctcgcgggcgcatggggtgac

SEQ ID NO: 254850 - DNA, 685 bp, Unknown
  Bacterial polypeptide expressing nucleotide sequence isolated from the Sargasso Sea
aatgagcaaagaacttactgatttatttaagggttcagaaatagctgaggcgcaaaactttaatagtatcaagataacgttggcaagccctgaaaaaattaaatcttggacatatggggaaattaaaaaacctgaaactataaattatagaacttttagacctgaaaaagatggtttattttgtgcaagaatctttggaccaataaaagattatgaatgtttatgtggaaaatataaacgaatgaaatttagaggaattatttgtgagaaatgtggagttgaggttacgaagtccaatgtgagaagagagagaatgggacatatcaatttagcaacaccagtagctcatatttggttcttaaaatctctacctagtaggatatctttagctatagatatgaaacttaaggaagtagaaagagttttatattttgagaacttcatagttatagaaccaggtcttacaggtttaaagaaaaaccaattacttggagaagaggaattaattaaatatcaagatgaatttggtgaagaatcttttacagctggaattggagctgaagctatattagaaatattaaaatcaattaatcttgatgatgagaggcaaaatttaattaaaacaatcaaagagacaaaatctaaagttgcagaggaaagatcgataaaaagattaaacttatag

SEQ ID NO: 254851 - DNA, 739 bp, Unknown
  Bacterial polypeptide expressing nucleotide sequence isolated from the Sargasso Sea
ttgcgtccaaatgagtatcctgaaaaaggaagtaaaattttacttggagatgttacttcaactttaattaaaattagtggaccacacgatagtattcaatttactaatccaccttcttttgatgaacaaagatggtctttagaacttatttcatctgaattaaacataaatattgaaagttttccatattggggttttggattattttctagttgttacctaaataaagtcgaattaaagggtagtttgattagaagagcaaaactaatttttgatcttgtagcttcactcggtagaaatccttgggagcctaaatttacttttttctgggaaaaagtcacaaaaaataggactggggagcatagagatgaatggttaaaattattaaattttgcaaaaaatggaatggaagaagaaatagaagaaattaattctagatacttaatagttgaaaaaaacaccaaagaggcgaaattatttcctccaggctgggaccaagaaaattcaaaaatgagcctaaaagaagtaaaaaaacatattgaaatcgcaagacaggcattacatgaccaaaatgcgggcggactaaaacgtgctttagatagagccgaagcaaaattaattgaggctgatccactagtaggtctacaaaatgaggagttgcttcagaatcaaaatttaaaaacattagaaattgacaatattccattccttgatttggttaatgatgaagaagaataat

SEQ ID NO: 254852 - DNA, 631 bp, Unknown
  Bacterial polypeptide expressing nucleotide sequence isolated from the Sargasso Sea
atgaaaaaagaacttacagatttatttaaaaacactgagatctcagaagcacaaaattttaatagcattaagatctcattagccagtccggaaaagattaaatcatggacttatggtgaaataaaaaaacctgaaacaattaattacagaacttttagacctgaaaaagatggtcttttctgtgcaagaatttttggcccaatcaaagattatgaatgtctatgtggaaaatataagagaatgaaatttagaggaattatttgtgaaaaatgtggagttgaggttacaaagtcaaatgtcagaagagaaaggatgggtcatattaatctagcaacgccagttgcacatatatggtttttgaaatctttaccaagtagaattgctttagcggttgatatgaaacttaaagaaatagaaagagttttatattttgaaaattttattgtaatagagcctggtttaactggtttacaaaaaaatcaactcctgaatgaagaagaactggcaaaatatcaagatgagtatggtgaagaagcttttacagcaggcataggagcggaagccgttcttgaaatgctgaagaatttagatctagagactgaaagaaaaaatttaacaacttcattaaaga

SEQ ID NO: 254853 - DNA, 616 bp, Unknown
  Bacterial polypeptide expressing nucleotide sequence isolated from the Sargasso Sea
atatttaatcactagaagtcctaaatatcttttttgggcattagaatttgaccctaatgttttaatggatccatattttgtggaaacagttaattattggtccactttgcttaattctaataattgtaatgataaagactctgtcaaaaatcttttaggaaatgttggagaatctttaagaaacagtaggaataataatttgttttatcattacgattcaggctttgttcatagcacaaagaaccccaatgagcctataataacttttgaggttcatccacctagaagatgctttagagtaattgataattttgattctataattaggttcttagaaatatcattgaaaacccacgctgatttaaaagaagagattatgaataaatataaaatctctgatataaatatagactttggtgacctaaaaattactgcagctgtaataatctcagaattacataatagaattccaaagaaagataaacttggtttatacttaacaccatttcttgcttatgaaatttataaggatgcagtagagcatagtgttaatctaaattatattgtagatacttttagaattgtcgattattgggatccagataaaaagaggtaa

SEQ ID NO: 254854 - DNA, 778 bp, Unknown
  Bacterial polypeptide expressing nucleotide sequence isolated from the Sargasso Sea
ctgcccgctccgccaggaggaaaggccttgaaagacctactgaatttgctgaaaaaccagggtcagatcgaagagttcgacgccatccgtatcggattggcctcgcctgagatgatccgttcgtggtcgttcggtgaagttaaaaagccggaaaccatcaactaccgtaccttcaagccagagcgcgacggcctgttctgcgccaagatctttggcccggtcaaggactacgagtgcctgtgcggcaagtacaagcgcttgaagcaccgcggtgtgatctgcgagaagtgcggcgttgaagtggccctggccaaggttcgtcgtgagcgcatggcgcacatcgaactggcctcgccggtcgctcacatctggttcctgaagtcgctgccgtcgcgtatcggcctgctgatggacatgaccctgcgtgatatcgagcgcgtgctctatttcgagagctacgtcgtgatcgatccgggcatgaccaccctcgagaaaggccagctgctgaacgacgaacagtacttcgaagccctcgaagagttcggtgatgacttcgacgcgcgcatgggcgccgaagccgtgcgcgagctgctgcacgccatcgacctggatcacgagatcggccgcctgcgtgaagagattccgcagaccaactccgagaccaagatcaagaagctgtccaagcgcctgaagctgatggaagccttcaaggactccggcaacctgccggagtggatggtgctgaccgttctgccggttctgccgccggatctgcgtc

SEQ ID NO: 254855 - DNA, 652 bp, Unknown
  Bacterial polypeptide expressing nucleotide sequence isolated from the Sargasso Sea
tttgcaaaatcaaggttcaatttctgaaaataattttggaagcataaaaattacattagcaagtcctgataaaattaaatcctggtcttacggcgaaataaaaaaacctgaaactattaattatagaacctttagacctgaaaaagatggtttattctgctctagaatatttggtccagtaaaagattacgagtgtttatgtggaaaatataaaagaatgaaatttaggggcattgtttgtgaaaaatgcggagtagaagtaactaaatccaatgtaagaagggaaagaatgggtcacattgatctagcttgtccagtggcacatatctggtttttaaaatcacttccaagcagaatttcgctagccatagatatgaaacttaaagaagttgagaaagtcctctattttgaaagttttatagttattgaacctggcttaacaaaactaaaaaaaggtcagcttatgagcgaagatgagctagttaaagctcaagatgagtatggtgaggattcttttactgctggtattggagctgaagctgttagagaaattttattgagcttagatttagagaaagaacaaaaaaaactaagagaagctttaaaagaagtcaaatcaaaagtcactgaggaaagaaccattaaaaggtga

SEQ ID NO: 254856 - DNA, 553 bp, Unknown
  Bacterial polypeptide expressing nucleotide sequence isolated from the Sargasso Sea
tatgcatatccgctggcgaggcctcgaactaccaggctccgttgtcgccgataccgcgacgctaacgaatacttatggcaagtttacagccgaaccttttgagaggggttttggaacgactgttggaaatagtcttcgacgcattctgctatcaagccttgagggcagtgctgtaacccaaattaaacttgggggagctcagcatgagtttacgacgataaagggcgttcaagaggatgtaactgatatcgtcctggctgtaaaaagcatggtcgtgaagaatcacagtgattcaacacgagttgttcatgtagagaaaagtctgaagggcccgatcacagctgctgatgttcagacggatgagtctgttgaagttgtgaacaaggatcttgttcttgcaactctcacagacgatgttccgttcgagttggaaatggtaatcgaaaatggtcgtgggtatgtgccaagtagtgagcacagtccggatgggcatgagattggtattgtccccgtcgacgcggtattcagcccggttactcgtgtgcgatacgag

SEQ ID NO: 254857 - DNA, 1276 bp, Unknown
  Bacterial polypeptide expressing nucleotide sequence isolated from the Sargasso Sea
atgcatttccctcctcccggggcgccgctgcgcatgcagccgcccgcccactccgatgcgtcgcccgccgccgcaccacgcgcgctcgacgcggctcagctcgacgatgcgccggccgtgcggctgctgacggatacgcttcacgcggctcgcgtacgcgacgcatccgacatccacgtcgaaccattcgaagccggctggcgcatccgcctgcgcatcgacggcgtgctgcacgaacatgcgcggccgccccttcatctgcgcgacgcgctcgtcacacggatcaaggtgcttgcgcgcatggacatcgccgagcggcggctcccgcaggacggcaggcttcgcatcgtgatcgacggcggtacgcgcggcgactaccgtgtcagctcgctaccgacgttgttcggtgagaagctggtgctgcggcggctggaaaccatgccaccggacctcacgctcgcccgcctcggcttcgacgcgcagcaagcagccgcgatggaggccgcgatacgcgcaccgcatggcctcgtactcgtcacgggtccgaccggcagcggcaagacgctgtcgctctactgcgcgctacagatgctcgatcgcgacgcgcacaacgtctgcacggtcgaggatcccgccgaaatccagctcgacggcatcagccaggtcggtgtcgccgaaaaggccgggctcacgttcgcgactgcactgcgtgcgctcctgcggcaggatccggacatcatcatggtcggcgagattcgcgatgcggagacggccgacgtcgcgatcaaggccgcgcagaccggccatctcgtgctgtcgacgctgcacacgaacgacgcaccggccgccgtcgcgcggctgctcgacatcggtgtcgcgccgtacaacctcgcggccgcactgcacctcgtcaccgcgcaacgcctcgtccggcggttgtgcaccgcctgccgcgtgcattcggacgcgcctgtgcccgtcctgcgcgaggccggctgcgacccggctgccctcgcaaccggatggcggccgttcgtcgcgcgaggttgtccggcctgtcacggcatcggctatcgcggccgtatcggcctgcaccagacgatgccggtatcgtccgggctggcggaacgcatcgtcgcacgggcgagtgttggcgaactcgcgcaatgcgtggcggccgaaggcgtgcgcaatctgcgcgacgcggcgctcgcacgcgtccgtgacggcacgacgagcatcgcggaagccctcaccgcgactcctgccgcatgag

SEQ ID NO: 254858 - DNA, 976 bp, Unknown
  Bacterial polypeptide expressing nucleotide sequence isolated from the Sargasso Sea
atgtcaaaaaaagaatataaattaaaaattaaaacagaaaaaaatactttaaccaatacgtatggaaaatttattctccagcctcttgaaagagggtatggagtaactgtaggcaatgccctaagacgagtactgcttaccagtttacctggagctgctattacaaatgtaaaagttgagggcgttctgcatgaattttcaacgatctctggcgtaaaagaagatatggctgatattattcaaaatttaaagagcgttagatttaaactttcagattcggatgttgatagtgtaaaattagctttaaaaggtaaaaaggtttttacggcagctgatatacaaaatgctacagatcaatttgaagttttgaataaagatcaatatatcactgaaattaacgctaatggaaaattagaaattgaacttagaataggtgttggtaaaggctatgtgccttcagaagagaatgaacttccaaatgctccaattggaacgttagcgatggatagtattttcaatccagtaactaaagttacttttaatgttcaaccggttccaggagctaaagatcctatagaaattctttccattgaagttgaaacggatggatcagttacccctcaagatgcgattagttattcagcaacatttttgatggatcacctcaaattagttgaagcaatagctaagccagaggtcctcgaagtaactgaaaaaataagcgaagaaataattaagataagaaatctactaaacctaactatagatgaaatggagctttccgttcgaagtcataattgcctacaagctgctggaatcaaacatatttatgaattggtaagtaaagaagaaaatgagatgcttaaatacaaaaactttggaagaaaatctctgactgaattagtggaaaaattggatgatatgggaattagttttggtatggatgttgataaatacttaaagcttgaagtctaaa

SEQ ID NO: 254859 - DNA, 676 bp, Unknown
  Bacterial polypeptide expressing nucleotide sequence isolated from the Sargasso Sea
atgaggaaagaactatcagaattatttaaagaaaaatcaatttctgagtcacaaaactttagtaaaattaaaataactctagccagtccagaaaaaatcaagtcttggacatatggagaaataaaaaaaccagaaacaataaattatagaacttttagacctgaaaaagatggattgttttgtgcaagaatttttggaccaataaaagattacgaatgtctatgtggaaaatacaagagaatgaaatttagaggaattatttgtgaaaagtgtggtgtagaggtaacaaaatcaaatgtcagaagagaacggatgggtcacataaatttagcaactcctgtggcacacatctggtttttaaaatctttgccaagcagaatatctcttgtaatagacatgaaattaaaagatgttgaaaaagtactttattttgaaaattttattgtagttgagcctggattaactggtttaattaaaaatcaattactttcagaggaagaattaattaaatatcaaaatcaatatggcgatgaatcttttactgcaggaataggtgctgaagcaattttagaaattttaaaatcaatagatttaaaagctgaaagagataaactttcaaaatcgattaaagaaactaaatcaaaagtaactgaggaaagaaatgttaaaagataaa

SEQ ID NO: 254860 - DNA, 661 bp, Unknown
  Bacterial polypeptide expressing nucleotide sequence isolated from the Sargasso Sea
aatgcataacactgttgaaaatttaataaatattgaaaaaaacatacaatctaatttaagcgatttaaagattaataatcaaacaaagattattgcagtttcgaagacttttggtaaagaaaaaattttgccacttatccatcacggtcataccgattttggagaaaataaagttcaggaagctgtagataagtggaccgaactaaggaaagcaaatccaaatgtgaacttacatatgattggaaaacttcaaacaaataaagttaaatatgctgtaaaaatatttgattatattcactctgttgataatgaaaaattagcaagaaaaatttctgaggaggaaaaaaaaataaataaaaaaatcaaagtttttattcaagtaaatataggtggagaagaacagaaatctggcgtaagcaaagtggatgttcataaattaatatcctattgtaaagaagtaaaactagaagttattggattaatgtgcattccacctttaaatgaagatccatctaattatttcaaagaaattagtgaactaaataaagatttaggtttttctgaattaagtatgggaatgtcattagattatttaagagctagtgaatattcagctacctatttaagaattggctcaagtatttttggccagcgatcttaa

SEQ ID NO: 254861 - DNA, 2392 bp, Unknown
  Bacterial polypeptide expressing nucleotide sequence isolated from the Sargasso Sea
catgtcgtcgcgcgtgcagtgcgggtgtcaatcctgcgcattgggcaccgcacttcgcgctgccttcggcgcagccgtccaacgtgcaggcgtcttgcctcgaacgcgccgggccgaaggccctgaccgcgttcgccggggcgctggctgccagcagcccagcgtcaccgggccgccgctgccgggagcgcgagcgggaggcaaaggcggaaggcaagacaaaaggatgcggcaccgggccacgtcgaaagccagtctgcacgtggggttggcgcagcacggagcggcttcgccgccgtgccgcttggggcgcgtggcccgcaccaatacgggcatgtccgcgtgctccgcacgaccggacacgccgcagctttcagggagagcgaccatgaccgaccgccgtgatgacgatttccgcgtgcgcccaaacccgccaaaggccccgaagaaccggggcaagggccaggggcagagctttgtttccaaggtgctcaagcaaaccggcaaggccagcagcggcaagtccacggtgcgcccgcgtggcaccggccagcgccccggctcacgcctagggcgcggccacacggccgcgcgcttcgcgggcgcaaagctcacgcccatgtcgcggcgcgtgacgatcaagacgctgctggtcaaccagcgccaggccagcccgcagtcgctcgccaagcacctgcgctacatcgagcgcgatggtgtggggcgcgatggcgagccgggacaagcctacgggccgcagaccgacgtggctgacctcggcgctttcaaggtacgctgcgccgatgaccggcaccatttccgcttcattctctcgcccgaggatggcgcggagctggaagacctgcgtacctacacgcggcacctcatgggccgcatggaggccgacctgggcacacggctggaatgggtggcggtggatcactggaacaccgacaacccgcacacgcacatcgttgtgcgggggcgcgatgacaccggcaaggacctcatcatcgcgggcgactacatcacagatggcttccgccaccgcgctgccgagctggcgaccgaatggctggggccgcgcaccgaactggagatccagcagaccttacagcgcgaggtgaatcaggagcgatggatgagcctggatcgcacgctcaaacgcgaaataggcgaggccggtgacgatggcctggtgcatgtcgaacggctcaacgaaccccgcttacaagaccagcgcctgctgctgatcggccgcctgcaatgcttgcagcgcctgggcctggccgacgagacgaagccgggcacctgggccgtccatgccgatgcggaaaagaccttgcgcgccctgggcgagcgcggcgacatcatccgcaccatgcaacgggccatgcgcggcgagccgcgcgaactggcggtgttcgagccggaccaggatgcagatggaagcggccggaccatcctcgggcgcgtagccgcgaaagggctggcagacgagctgcacgaccggggctatctggtcatcgacggggtggacggcaaggcgcactacgtcgcgctcaatgcccgcgacgagttggtgaactaccccacgggctccgtggtggaggtgaagggctcgaccgacgcgcgcgccgccgaccgcaacatcgctgcgctggcgagcaatggcctgtaccgcaccgatcatcacttggccgtggcgcaggggcaggccgtaccgggtcgcgacccgcaggaggtcttggcggcccacgttcgacggctggaagccctgcgccgggcgggcatcgtggagcgcgtggccgaggggctatggaaggtgcccggcgacctgcccgagcagggccgccgctacgacgctcagcgcctgggcggcgtggccgtggagttgaaatcgcacctgtccatcgagcggcaggcccgcgtgatcggggccacttggctcgaccagcagttgattggcggcggctcgggcctgggcgacctgggctttggtgcggaggtcaagcagcagatgcagcagcgcgccgacttcctcgccgaacaggggctggccgagcggcgcgggcagcgcgtgattctggcgcgcaagctgctgggcacgctgcgcaaccgagagctggcgcaggccgtgaaggacattgccgctgaaaccggtctggagcatcggccggtggccgatgggcagcgcgtggccggcatctaccggcgcagcgtcatgctctccagtgggcgctacgcgatgctcgatgacggcatcggcttctcgctggtgccctggcggccagtgatcgagcagcggctggggcggcggcttgctgcaatcgtgcgcggcggtagcgtgtcgtgggaagttgggcagcagcgaagcccctctgttggttag

SEQ ID NO: 254862 - DNA, 601 bp, Unknown
  Bacterial polypeptide expressing nucleotide sequence isolated from the Sargasso Sea
tctgaatcaaaattcaatccaagagaatagttttgatagcattaaaattactttagcgagtccagaaaaaataaaatcttggtcgtatggagaaataaaaaagccagaaactattaattatagaacattcaggccggaaaaagacggacttttctgttctcgaatatttggaccagtgaaagattatgaatgtttgtgcggcaaatacaaaagaatgaaattcagaggaataatctgtgagaagtgtggagttgaggttacgaaatctaatgtaagaagagaaagaatgggacatattgatttagcttgtccagttgctcacatttggtttttaaaatcgttaccaagtcgaattgctttagcgatcgatatgaaattaaaagaagttgaaaaagtgctttattttgagagctttattgttattgaacctggattaacaacacttaagaaaggtcaactaataacagaagaagctctactaaaagctcaggaggaatttggtgaggatgcttttacagctggtataggagctgaggcagtaagagaaatattagtaaatttagatcttaaaaaagagcaaaagaaattaagagaatcatta

SEQ ID NO: 254863 - DNA, 1153 bp, Unknown
  Bacterial polypeptide expressing nucleotide sequence isolated from the Sargasso Sea
ttgcacagcaggggggagaagaaggtcacagccgctaaggccaagaaaataatcaactcggcaagcaacttctacaatgacgcgaaggccgttccacatgaggcagtaggaattaccactgcccagtctattggtgaacccggtactcagatgacgatgcgtacattccactatgcaggtgtggctacagtgaacgttacccagggtctacctaggataatcgagattgtcgatgctaggaaggtaccccaaactccgaccatgataatttacatggacgagaaaaactccaagggaaagccactgaggactaatgaaaagctggtacgagacttagcagcatccatagagacaaccaccgctatagatatcgcaactattgacgtcgatgtagctcagaggaacatattactccagctaaacaacaaaaacatgaagctgaagaaaatgaccggtgcagaggtcagagacaagctctcacgcgctctaaggctgtacgtgcaggccgatgacgatgaccgccccaagtctctaaggatcatcccaggcgtgtcaaaggaagaagatcttgcatcccttgcatcagatccccctacctacaccgctcttctgcaactcgaggataagatcaagaaactacgattgaagggtctccccggaattagcagagccacagtacagggcccaatgtccgaaacaggagaatattacatctcgacaatcggctcaaacctatcgaaggtcagtgagttcgacggggtcgaccgatcaaggacgtacacgaacaacatcaatgagatacatgactaccttggtatagaggccgccagacaagccataattaacgaaatgtgggacactctagagggcgcaggtctcgatgtagacgtgaggcatcttattatggtctcagatgtgatgactaccggtggagaggttagggccattggccgtcacggtgtaagcgggacaaagcactccatccttgctcgttcagctttcgaggtcacagttacacacctgctaaaggctggagtaatcggcgaaagggacaacctatccggagtaacagagaacatcatagtgggccaaccagtagcgctaggaacgggaagcgtcgaactattctacatccccgaggaaaacaactgag

SEQ ID NO: 254864 - DNA, 2557 bp, Unknown
  Bacterial polypeptide expressing nucleotide sequence isolated from the Sargasso Sea
ttgttactacttacctcttcaatttctgcagatgaagttgatgaggtggtagtcagcggatacttcattccagacgaaaagagagataccacagaaataaatgtggttttagatagtactgcaatagaaaggactggcgatgacaacatagcagttgcattaactagacttactggtctaagtttagttagaggtaaatatgtctacgttagaggcttgggggaaagatattctgctgccacactcaatggcggtgttttaccaagtcctgaaccgcttaaaagagttgttccattagatctttttccaactgaggcgattgaatcagctattgttcaaaaaacatactccgcagatatgaatggtgaatttggtggcggtatgattgcaattaaaacaaaagcagttccttcagaaagaattgcatctttatcgttatccacgggttacaacacaaatcataaagaagatggtcttctttatgatggcggtggagatgatgactggggctatgatgatggtatcagagattatccagcttcagtcgcaagtgcaattgctgctggtaaaaaaattgatcgatctaattttgaaccatatcaactagctaatatggctagagaatttgaaaactctaaactatgggtgatacaaaagggcaatgttcctgctaatggttcattcaatgtaacctatggcaatcaacttgattgggatcttggcaatgacctttcatctggatttctattaacagcaggagttaaatcttcttggcaaactcaagaaggtttaaggcaaactggagacttgcaagctaattcagacggaactgtatctgtaatcaaggccgaagataaaacatttatgtctacgtctaatgatgctacaacttatggaatgggtgtctttggagttgaatcggattctgcagaggtaaaattgacttccctatacatccacaaaggcactaaagaagcaagatctataactggatatgatccaagtgatgctgctgatgtacgtgaagattatactgagttttttgaaagaactttgcgcaataatcagctaagttttgataagatttttcaaaatgaaattactttgaatggaagagtatctttcggaacggcaagtcgtaatgcaccttatgaaagatctgttttttatgaagatagtgataatgacggtatatttttatacgatgttaacacaggaagaaatcaaactcagttcagtagtgtagacgatgatgtttttaatatcggtttagatctaacgcttcccgttgaaactgataccgctgatttaatctttaaaattgggttagatcagaaagtgaatgatagggaggctgaagttagaagctacagatttttagctgctggtggacctctccccgatgatttacttggaaaaagagttgattatatatttgctgatcagaaccttgatccaaatagactttatgtgattgaaaatactggttcttcatcacctgctggatacgaaggtgagcttgaaactgacgcttattatgcatctgttgaagcgttgatctctgatcaatttaggatctctgctggagctagatacgaagacggaacacaggaaattaatacctatgatctttttactggtaaagacaactcgatagataaaacaattgatgaagattatattcttcctagcctaacgtttacatatctacctgagaattatgaaaatcttcaaatcagatttggttactctgaaactattgctaggccaacattcagagaattgtcacctacactatttgtagacgtagatactgatagggtgatagctggatctttatatcttgaaaattcagagattgaaaatttcgacctcagacttgaatattattttgatcaaaatcaatttttaacgcttggtgctttttataaagagattgataaaccaattgaagaatctgtaacagaaattggagacttggtaattacttcataccaaaacgtacctttagctgaaataagcggttttgaatttgaatttgagagaatttttgacggttttgaatcatcttggtttgcaagtaaagaactgttagtaaaagtaaactacactttcactaactctgaaattgtaatcggagaaggagatacgtttgttaatttagtgggcgtgaccgaattagcttcaagcttattagctaatggtagggacgatagattacagggtcaatctgataatattcttaattttcaaattggcttcaatgatttcattgcaaattctcaaggtaccctaatttttaactatgttgatgatagggttagggcaagaggaattgatgttttaccagatatcatagaggaagtaccaacaactcttgattttgtttactcacgaaattttgatgttgatgacctggagaacactttaaaactatcattggagattcgaaatattttagatgagtcctatgaggcaactgttgctgataatattttctatgatcagtatgatttaggtagatccttctcattgggattaaaatatgagttctaat

SEQ ID NO: 254865 - DNA, 678 bp, Unknown
  Bacterial polypeptide expressing nucleotide sequence isolated from the Sargasso Sea
aatgaaaaaagagctatcagaattatttaaaaactcagaaatatccgagtctcaaaattttaacagtataaaaataacattagccagcccagaaaaaataaaatcttggacttatggtgaaataaaaaaacccgaaactataaattatagaacttttagaccagagaaagatggattattttgtgccagaatttttggcccaattaaagattacgaatgcttgtgtggaaaatataagagaatgaaatttagaggaattatatgtgaaaaatgtggagttgaagtaacaaaatcaaatgtaagaagagaaagaatgggccacataaatttagcaacaccggttgctcatatatggttccttaaatctttaccaagtagaatttcattagtagtagatatgaaacttaaagatgtagagagagttttgtattttgaaaactttatagttattgagcctggattgactggccttaaaaaaaatcagcttctcgatgaagaagagcttattaaatatcaagatgagtatggagaagagtctttcactgctggtattggagcagaagcagttcttgaaattttaaaatcaattaatttagaagacgaaagaaatttattaattaaaaatataaaggaaacaaaatccaaagtatctgaagagagatcaataaaaagattaaa

SEQ ID NO: 254866 - DNA, 1153 bp, Unknown
  Bacterial polypeptide expressing nucleotide sequence isolated from the Sargasso Sea
atggaaaaaaaaattagaggcggtgctttaatcgcaagggcattaaaagaaaaaggtattgataaagtttttacattatctggaggtttttgtaatcctgcaatagaaggatttatggaatgccaaattgaggttactaattgtccccatgaacaaattgcaggacatatggctgatggatatactagaattacaaggaagccatctgtttgtttagtaggacctgaaggtttcgcaaatgctgtaccttctatgatggaagcgtggggagaaagaactcccataatttatattactggatccagtagtttaaaaagacaaggctcaggaggatttaaagaaatagacgatgttgcaattgctgctcctttaactaaatatagcgcaagtattactgatggaaatagaataagagagtttgttgataaggcttatagaattgcaacaaatgggtatcctggtgcagttcatttaagtttgcctgttgatttaatgttttcatctttttcagaagatgcaggtctcgaggaaagacctttttcacataaagcaaaacctattgcaaaagcttggccagatccaaattcaatgtcagaaattttagaaatagctactaattcaaaaaaaccaattttgataggtggacacggagtatggtggtcccactcagaaaaaaaattagaaaatgctgggaacaatttgagtattccaatattcaatataccttatcatcaaaaattattaggagaagagtcaagctcatacatgggtttagctgatattcatcaatacccaccatctgaatttgcattaaataatgcagatttaatattaatggtaggagcaagactagataatcaaatgaattttggaaatcctccttttattccaaaaaatactaaactagtttgcataaatggatctcatgaggaaatagaatttaatagagcagctgatattaatcttttatgtgatcctggagtatttttagacactttaagcaatttaaaaaaaaataaaaaatggattttagatagaaattggtttgacgaaaataagaataaaaaaaaagaatgggttgataaatctttaaatgatttagaaattgaagctaaagaaacaaaaaaaaatggaggtaaaatacatccattac

SEQ ID NO: 254867 - DNA, 1663 bp, Unknown
  Bacterial polypeptide expressing nucleotide sequence isolated from the Sargasso Sea
atggctgctaaggacgtcaaatttaacacagatgctcgcgaccgcatgttacgcggcgtgaatattctagccgatgctgtgaaagttactctcggaccaaaaggacgaaacgttgttttggataaatcattcggagcgccgagaattacaaaagacggtgtttcggttgcaaaagaaatagaattagatgacaaatttgagaatatgggtgctcaaatggtcaaagaagttgctagtcgaactaatgacgaagctggtgacggaaccacaacggctaccctgctagcgcaagcaattgtaaaagagggtatgaaagctgttgcggctggcatgaaccccatggatttgaagcgtggcattgatatggctacgtcaaacgtcgtagacgcaatccgcaaaatggcgcgcgatgttgctgacagcgatgaagttgcgcaggttggtacgatttcagcgaacggtgaagccgaaatcggcaaacagatagctgatgcgatgcaaaaagttggtaacgaaggtgtcataaccgttgaagagaacaaaggcttagaaactgagactgatgttgtagagggtatgcaattcgacagaggctatctatcgccttatttcgtaactaacccagacaaaatgactgctgaactagaagattgtatggttctattgcacgagaagaaattgtcttctttgcagtctatggtgcccttgttagaatccgtgattcagtctcaaaaacctctgttgataattgcagaagacgttgaaggcgaagctttggctactctcgttgtaaataaactgcgtggtggtctgaaaattgctgcagttaaagcacctggttttggtgatcgtcgtaaagcaatgttacaagacatcgcgattttaactggtggtcaggtgatcagtgaagatctcggtatgaagctagaaaatgttactatggatatgctagggaccgccaaaaagatccaaataacaaaagatgaaacaacaattgttgatggatcaggtgaaaaggctgagattgaagctcgtgtagcacaaatcagaacccagattgaagaaacttcttcagactacgatcgtgaaaagttgcaggagcgtgtggctaaacttgctggtggcgttgctgtaatccgcgttggtggaatgtctgaagtggaagtaaaagagcgtaaagacagagttgatgacgctttaaatgccactagagctgctgttcaagaaggtattattgtcggcggcggcgttgctctaattcaatctgcaaacggtttagacaaacttaaaggtggtaacgctgatcaagacgcaggaattacgattgtacgaagagctttggaagccccacttcgtcaaatagcagaaaatgccggtgttgatggtgctgtcgttgcaggaaaaattcgtgagagtaaagattcagcctttggctttaatgcccagactgaagagtacggcgatatgtttaagtttggtgttattgatccagccaaagttgttcgtactgctctggaagatgcggcgtcagttgcttctcttctcattacaacagaagcaatggttgctgataagccagaaccaaaaggcgcagccggtggcggcggtatgcctgacatgggcggcatgggcggcatgggcggcatgggcggtatgatgtaac

SEQ ID NO: 254868 - DNA, 4096 bp, Unknown
  Bacterial polypeptide expressing nucleotide sequence isolated from the Sargasso Sea
catgacctcctcctcctctaaatccagcaagtcccgtaagtccagcaaggccgccaaggacatcgctcctgttcttgaaagcgcttcccgtcccctcagcaagacgcccccaccgttccgaaaccacatcgtcgacaaacggggcctcaagcagctggtggcctgggcttacaaaaaccacggcacggcggtcacctcatcaatggccgacaagctcaaggatctcggcttccgctacgccactcaggcggcggtttcgatttccgtgaacgatctgcgagttcccgaggcgaaaaaagccctgctcggagaggccgaggagcagatcacagccacggaggagcgttaccggttgggtgagatcacggaggtggagcgtcacaccaaggtcatcgacacctggactgagaccaatgagcgtctggtggatgcggtcaagaagaacttcaaccagaacgcaccgctgaattcggtctggatgatggccaactctggcgcccggggaaacatgtcccaggtgcgacagctggtgggcatgcggggcctgatggccaatccccagggcgagatcatcgacctgccgatccgcaccaacttccgcgaaggtctcacggtcaccgaatacgtcatctcctcctacggcgcccgtaagggtctggtggacaccgccctgcgaacagctgactccggttatctgacccgtcgcctggtggacgttgctcaggacgtcatcgttcgcgaagacgactgcggcaccacgcgccatatcgtggtggaggctgaggatggacgtttcggtaaccgtttggtcggccgcctcacggcatcccaggtggtgagcgcagacggagaggtgctggccgagcgggacaccgaaatcgacccacccctgtcaaaacgcatcgaaaaggcaggggtcaccgcggtgagcgtgcgctctcccctcacctgcgaggccaaccgctccgtctgccgcaagtgctacggctgggccctggcccacaacgaactggtggacctcggtgaagccgttggcatcattgcggcccagtccatcggtgagcccggaacccagctcacgatgcgcaccttccacaccggtggtgtgtccacggccgaaaccggtgtggtgcgttccgttgtatcgggcaccatcgagttctctgccaaggccagggttcgcccttaccgcacgccccacggcgtcaatgcccaacaggccgaggttgacttcaacctctccatcaagccgtctggaaagggcaaaacccagaaaattgagatcactaatggttcgctgctgtttgttgaaaacggtcagaccatcgatgctgatgtgaccgttgctcagatcgccgctggtgcggtgaagaagagcgtcgagaaagccaccaaagacgtgatttgcgacctggccggtcaggtgcgttacgaggacgcgatccagccccgggaagtgaccgaccgtcagggcaacatcaccctcaaggcccagcgtctgggccggatgtgggtgctggcgggtgatgtgtacaacctgcctcccaatgcccaaccggtggttcagggagataccgaggtcaccgagggtcaggtgctggcggaagccagtcagcgcagtgagtacggcggtgatgtgcgcctgcgcgactccatcggcgattcccgcgaagttcagatcgtcaccacagcgatgacgctgaaggacttcaagctgctggaggagtccacccactccggagagatctggaatctggaagccaaggacggcacccgctatcggttgaacaccattccaggcagcaagatcggctctggtgaagtgatcgccgaactggccgacgaccgcttccgcaccggcaccggtggcctggtcaagttcgcccctggtctggcgatcaagaaggcccgttccgccaagaacggctacgaggtcaacaagggcggcaccttgctctggatcccccaggagacccacgagatcaacaaggacatctccctgttgatgatcaccgatggtcagtggatcgaagccggcaccgaagtggtgaaggacatcttcagccagaccgccggcatcgtcacggtcacccagaaaaacgacatcctgcgcgagatcattgttcgcagcggtgatttccacctcagttccgacagcaaggcgctcgaacgatttgaaggcgatggccagatggtcaaccccggtgaggagatcgccaagggtctgagcatcgaggagatgaagtacgtccagaccgtggagacccctgagggcaaaggtctgctgctgcgtcccgtggaggaatacaccatccccaacgaggcgcaactgcctgagctgtcgcacgtcaagcaggccaatggcccccacctgggcatcaaggccacccaacgactggcgttcaaggacaacgagctgatcaagtcagtggagggcgttgaactgctcaagacccagctgatcctggagaccttcgacaccacgccgcagatgaccgtggatgtggagaaggctcctgacaaacgggccaagacaatctcccgtctgaggctggtgatccttgagtcgatcctggtgcgtcgcgacaccatgtccgactccagccacggctccacccataccgagctgcaggtggaagacggcatctccgtcaaagctggcgaagtgatcgccaccacccagatcctctgcaagcaggccggtgttgcgcagctgccagaagccactgaggcagatcccgtccgccgtttgctcgttgagcgtccggaagacaccaccaccctcagcacctccggcaaaccggtggtcgctgttgggcaacgcatcgtcgatggcgaactgctggctgagggagagccctccagctgctgcggtgaggtggaagctgtcgacagcaacagcgtgaccctgcgcctcggccgtccttacatggtgtctcccgactccgtcctgcacgtccgtgacggtgatctggttcagcgcggtgacggtttggccttgctggtgtttgaacgtcagaagaccggtgacatcgttcagggtctgccccgaatcgaggaattgctggaggcccgtcgtccccgtgagtcggcagtgctgtgcaaaaagccaggcacggtggagatcaagcaaggtgacgacgacgagtcactcacggtgacggtgatcgaagccgatgacgccatcggcgaatacccgatcctgcttggtcgcaacgtgatggtcagcgatggccagcaggtgaccgccggtgagctgctcaccgatggtccgatcaatccccatgagctgctggagtgtttcttcgaagaccttcgcagccgtaagccgttgatggatgcagctcaggaagcgattgccaacctgcagcaccgtttggtgaccgaggtgcagaacgtctacaaatcccagggcgtgtcgattgacgacaagcacatcgaggtcatcgtgcgtcagatgactagcaaggtgcgggtcgaagatgccggtgacaccacactgctgcccggtgagctgatcgaactacgtcaggtggaagacaccaaccaggccatggcgatcaccggtggtgcccccgcggaattcacgccggtgctgttggggatcaccaaggcttcgctcaacaccgacagcttcatctccgccgcctccttccaggagaccacgcgcgtgctcacggaagctgccatcgagggcaagagcgattggctgcggggcctcaaggagaacgtgatcatcggtcgcctgatccctgcaggcaccggcttcagcggtttcgaagaggagctgcagaaggaggctggtcctcacccggacatcctgtcggaggatcctgccggctaccgccgcatgcagaacctccgtccggattacaccgtggagatgcctccggccgccagctccacggctgtgttggatgaccccagcgatgccgatcttgaggcgacccgcacccgtcacaacatcgacccctccaccagcaacttcgccgcgtttgcccgcccggacgccgacaatgagctgaaggaggaacaagtcgttgatgctgaagccgtcgaaggtcttcaggaagaaggcctgctttcagacgactga

SEQ ID NO: 254869 - DNA, 595 bp, Unknown
  Bacterial polypeptide expressing nucleotide sequence isolated from the Sargasso Sea
tatgaaaaaagaattaactgatttatttaaaaatagcgaaatttcagaagctcaaaattttaatagcattaaaatttctttagcaagtccagaaaaaattaaatcttggacatatggtgaaataaaaaaacctgaaacaattaactatagaacatttagacctgaaaaagatggtttattttgttcaagaatttttggaccaataaaagattatgaatgtttgtgtggaaaatacaaacgtatgaaatttagaggtattatttgtgaaaaatgtggagttgaagttaccaaagctaatgttcgaagagaaagaatgggccatattaatcttgcaacaccagtagctcatatatggtttttaaaatctttgcctagcaggatagctttagcagtagatatgaaacttaaagaaattgaaagggtactttattttgaaaattttatagtaattgaaccgggccttactggattacaaaaaaatcaacttcttaatgaagaagaactagcaaaatatcaagatcaatttggagaagaggcttttacagcaggaataggagctgaagcagttttagaaatgctgaagaatcttgattag

SEQ ID NO: 254870 - DNA, 718 bp, Unknown
  Bacterial polypeptide expressing nucleotide sequence isolated from the Sargasso Sea
ttgctattaacaacgttttattacacattttttggaactgttggctcaataatatttggtattttaactgctcaaatggttaatcaaaaattttatggacgaacattcatgagaagtgttctacttttcccttatgttgctccagttgttgcattagcttatacttgggaacttttactagatccgaatagcggtacgttaaatagtttactattaaattatcaaattattgaaactccaataaatctccttggacaaaaatatattgaaattagtattttaggttttgattttaaattaaggttagcacttacaacggttataatgtttgaaatttggaggtatttccctctagcttttttatttattcttgcgagacttcaagctattccaaaagaattatatgaagctgctgatgttgatggcgcaagtccttttcaaaaattttttaatattacgcttcctcaaataactgcagtaatttcgattttattcatgattaggtttatatggaattttaataaatttgaggacgtgtttttattaactggaggtgcatcaggaactagaactttaccaataaatgtttatcaacaaggttttgcaatatcagacattggaatgggctcagctgtttcaatagtaattgttgtattgcttctaatgtttatgtttttttattttaaacttttaggaaagagggtagatgagaactaaa

SEQ ID NO: 254871 - DNA, 973 bp, Unknown
  Bacterial polypeptide expressing nucleotide sequence isolated from the Sargasso Sea
gatgaagaaaataaagtcattaattgatttaattggtaatactccgattgttcaagctaaaaatttagacaccggaaaatgtaatctttttcttaaaatggaaagccttaatccaggctcatccataaaagatagagtggctctaagaatcattgaggacgctgaagctcaaggaaagttaaagaagggttcaacagttgttgaggctacagctggtaatactggacttggtctagctttgatagctctcttaaagggatataagtcaaaagttgtaatactcgataaaatgaaccacaacaaaatacttcatcttaaatctctcggagcagaagttattttggcaaggagtgatgtgggacctgatagtcctgagcattatgtaaatgtagctaaagaagttgcaaaaaatacccctgactcatttatggcaaaccagtttacaaatatgtcaaatccccaggctcatgaatattcaactggtccagaaattctggatcaaatgaataatgatgttgatgctgttgtttgtggcgttggtacagggggcacaatttcaggccttggtaaatttttttcagagcatagtccaaaaacagaaatggttcttgcggatccaaagggttcaatagttaaagatgccgttgaaaaaaagccattaaaaaaagccgactattcatggcttgttgagggtataggtgaagattttattcctgagactttagatttaaagtatataaaaaaagcttatgaagttacgaacgaagaagcatttagcatgattagagaattggctttgaaagagggcatattgggaggctcatcaagtggaacccttatttcagcggcaattaaatattgcaaggaccaagataaagaaaaaaatgttgttacatttgtttgcgataatggtgaaaaatatttaaatacagcatataatgaagaatggttaaaagaaaaaaatcttatataa

SEQ ID NO: 254872 - DNA, 253 bp, Unknown
  Bacterial polypeptide expressing nucleotide sequence isolated from the Sargasso Sea
tatggcaattttaaactttcaaaaaccagataaagtaatcatgattgactcttcagagtctcatggtaaatttgaatttagacctttagaaccaggatatggtttaactattggtaacgctctaagaagagtattgttatcttctttagaaggttatgcttttacatcgattaaaattgacggtgtagatcatgaattttctacaattgaaggtgttgttgaggacgtaacagaaattatattgaacattaag

SEQ ID NO: 254873 - DNA, 439 bp, Unknown
  Bacterial polypeptide expressing nucleotide sequence isolated from the Sargasso Sea
tttaggatttgattttaaattaagacttgcccttacaacagttattatttttgaaatatggagatattttccgttggcttttttatttattcttgccagactacaggctattccaaaggaattatatgaagctgctgatgtagatggagcaagccctttccaaaaattttttaaaataacattgccccagattacagctgtaatttctattttgttcatgattagatttatttggaattttaataaatttgaggatgtttttttgcttacaggtggagcatctggaactaggactttgccaataaacgtgtatcagcaaggttttgcaatatcagatattggcaccggttcagctgtatctatagtaatagtaattcttttacttcttttcatgtttttctattttaaacttttaggaaagagagttgatgaaaactaa

SEQ ID NO: 254874 - DNA, 1048 bp, Unknown
  Bacterial polypeptide expressing nucleotide sequence isolated from the Sargasso Sea
ctgttcagccccatcctcggcaacctggcccgcgccatccagctgtgccgggacagcgagcagctggccctgcgccagcaggcggagctggtcgacatgcagcgcttcaacgaatccctgctcaaggcaatccccatcccggtgttctacaaggatgtcgagggacgcttcatcagctgcaacccgaccttcacccagatcaccggcatcagcaaggccgagctgctgggcaagcgggtggacgagatcctgccccccgagatggccgacgaatacacccagcgcgacctggaggtgctgcgcagcaggcagccgcaatatttcgagcacaccctgtttgatcgcagcggccaccgctatcaggtgctcaacttcaaggatctgttctacgaccatcagggcgaggtggccggcatcatcggtgccctggtcgacatcacccatatcaaggagagcgaacagcagcagcgcaccctgctgttccagaccatagcggcgctctcctccgccatcgcccacaaggatcccggcaccgcgggccacgagcggcgcgtgcacgatctcgcgctggccatcggccagcatctgcagctctctcaggagcgcctcgatgggctgggcctcgccgccatggtgcacaacataggcctgttgcagatcccggcggagatcctcacccgcccccgcgcattgagggaggtggagttcgagctcatcaagcagcacccgcaggcaggctgtgaaatcctgcagcagatagacttcccctggcccatcaccgctatcgtgcagcagcaccatgagaatctggacggcagcggttatccgcaagggctgcagggggatgccatctcgctggaggcgcgtatcatccgggtggccgattcgcttgccgccatgacggcccaccgcccgttccggcgagccatgtccctcaccgatgcctttgccgaactgacccgctatgccggcgtccattacgatgagcaggtggtcagcgcctgcttcgccgtgtggcaggcgggttatcgctttgcccccctttgac

SEQ ID NO: 254875 - DNA, 1261 bp, Unknown
  Bacterial polypeptide expressing nucleotide sequence isolated from the Sargasso Sea
atgaacaatacattagcaaaaacagagaagaaaactgcatatatactaacattacctgcggtatttttagtttttgctatagtattatttccaatatttgcaaatgtttggatcagcttcaaagaggtcgagttaaaagatataagaatacctgagcctcgggcaaaaaaaatagttaaatccatttcagatgaaaacacaaagattaaaattctttataaattaagaaacagttcactattacaagaaattagaaatgttaaatttgtagacaaatatcctaataatttacaaccaataaatttggatcaaaggtgtgaatttaagaaaaataaattgaaatgcgaatttggaaattggccggcaaaatatagggaaaactttcaactaatattcgagtcaaaagatggatccaatataaataaaaaaaaaataaagttaataaaaccaaaattaaatggtgaatccgataatattttacttaatacaaaatttaccttaaaaaattttaagaaagttctatttgagaatgagtttatagatttatttttaacaacattttattatactttttttggcacggttggttcaattgtatttggagtaatggctgctcagatggtcaatcagaagttttttggtagaacatttatgagaagtgtcttgctttttccatatgtagctccagtcgtagcattagcttatacctgggaacttttgcttgatccaaacagtggtacattaaatagtttattgatcaattatcagataatagaaacacctattaatctattaggtcaaaaatacattacagttaatattttaggatttgattttaaattaagacttgcgcttacaacagttatcatttttgaaatatggagatatttccctctagcctttttatttattcttgctagacttcaggcagtaccaaaagaactatacgaagcagctgatgtagatggagcaagtccatttcaaaagttttttaaaattacattacctcaaattacagctgtaatttctattctgttcatgattagattcatatggaattttaataagtttgaagatgtttttttacttactggtggagcatctggaactagaactttaccaataaatgtatatcaacaaggttttgctatatcagatattggcactggctcagcagtttctatagtaattgtaattcttttacttatcttcatgtttttttattttaaacttttaggaaagagagttgatgagaactaaa

SEQ ID NO: 254876 - DNA, 661 bp, Unknown
  Bacterial polypeptide expressing nucleotide sequence isolated from the Sargasso Sea
gatgcataaaactgttcaaaatttaattaatattgagaacgaaattaaatcgaatttaaatgatttaactgacacaaatttaccaaaaattatcgctgtctccaagacttttaaaattgataaaatttttccattaatagaacacggacatttagattttggtgaaaataaagtgcaagaggctgttgataaatggagcaaaataaaagaggaaaaacccgaattaaaattacatatgattggcaggcttcaaaccaataaagtaaaaatagcagtaaaactatttgatttcatccattctgttgatagtaaaaaacttgctaaaaaaattgctgacgaacaaattaaaattcaaagaaaaataaaaatttttattcaggtaaacattgggggtgaagagcaaaaatctggagttaacaaaaatgaactagaaggtttaatttcctacggtaaagaaatcggtctcgatattataggcttaatgtgtattcctccaattgatctagacccgttaaagttttttataaaaatggatgaaattaataaatcgttcagttttcaagatcttagcatgggcatgtcctcagactatttagatgcagctaaaaatcattcaacttatttaagaataggttcaagcatatttggacaaaggacttaa

SEQ ID NO: 254877 - DNA, 1723 bp, Unknown
  Bacterial polypeptide expressing nucleotide sequence isolated from the Sargasso Sea
gtggtgagcgccgacggtgaggtgctcgcggagcggaacaccgagatcgatccacccctctcttcaacgttcgagaaggccggcatcaccgccgtcagcgtccgttccccgctcacctgcgaggccaaccgctcggtgtgccgcaagtgctatggctgggcactggcccacaacgaactggtcgacctcggcgaagccgtcggcatcatcgccgcccagtccatcggtgagcccggcacgcagctgacgatgcgcaccttccacacggggggtgtgtccacggcggaaacgggtgtggtgcgctccaccattgccggaaccgttgatttctccgccaaagccagggtgcgtccctaccgcacgccccatggggtcgaggctcagcaggccgaggtggatttcaacctcaccatcaagccttcgggcaagggcaaggcccagaagatcgaagtcaccaacggttccctgctgttcgttgacaacggccagaccatcgacacggacgtgaccgtcgctcagatcgctgcgggtgcggtgaagaagagcgtggagaaggcgaccaaggatgtgatctgcgatctggccggccaggtccgttacgaagacaagatccagccgaaggaggtcaccgaccgccagggcaacatcaccgtcaaggcccagcgtctgggccggatgtgggtgctggctggcgatgtctacaacctgcctcccaacgcgcagcccgttgtcggcagtcagagctccgtcgtcgaaggccaggtgctggcggaagccagccagcgcagtgagtacggcggcgaggtgcgtctgcgcgattccatcggcgattcccgtgaggttcagatcgtcaccacggcgatgaccctcaaggacttcaagctgctggaggaatccacgcactccggtgagatctggaatctggaagccaaggacggcacccgttatcgcctcaacaccatccccggcagcaagatcggctccggtgaggtgatcgccgagctggcggatgaccggttccgcacccagaccggtggtctggtgcgcttcgcgcccggtctggcgatcaagaaggcccgctccgccaagaacggctacgaggtcaacaaaggcggcaccctgctctggatcccccaggagacccatgagatcaacaaggacatctctctgttgatgatcacggacggtcagtggatcgaggccggcaccgaagtggtgaaggacatcttcagccagaccgccggcatcgtcaccgtcactcagaagaacgacatcctgcgcgagatcatcgtccgcggcggtgaattccacctctccagcgacagcaaggcactggagcgtttcgagggcgatggccagatggtcaaccctggcgaggagatcgccaaggggctcagctccgaagagatgcgcttcgtccagaccgtcgagacccctgaaggcaagggcctgctgctgcgtccggtggaggaatacaccatccccaacgaagcccagctgcccgagctgtctcacgtgaagcaggccaatggcccgcatctcggcatcaaggccacccagcgactcgccttcaaggacggcgaactgatcaagtccgtcgagggcgttgaactgctcaagacccagctgctgctcgagaccttcgacaccacaccgcagatgacggtggatgtggagaaggccccggacaaacgggctaagaccatctcaaggctgcgtctgg

SEQ ID NO: 254878 - DNA, 298 bp, Unknown
  Bacterial polypeptide expressing nucleotide sequence isolated from the Sargasso Sea
agttagagaacaaccaactgaaccagaattcaacaaaaacctattaagaaaagtagatgaattagaattatctgtaaggtcaatgaactgtcttaaaaatgataatataatttatattggtgatttagttcaaaaatctgaaggtgaaatgctgagaacacctaattttggaagaaaatcactaaatgagattaaagaggttttgactgggatgtcactttatttaggtatggaaatacctaattggcctccagataacattgctgaattatctaaaaaacttgaggaagctatttaa

SEQ ID NO: 254879 - DNA, 829 bp, Unknown
  Bacterial polypeptide expressing nucleotide sequence isolated from the Sargasso Sea
atgaataaagaattaataaacatttttaatcaaaatttaggggttaaaacttttgatagtataaaaatttcaatagcaagtcctgaaaatattagatcatggtcttttggtgaaattaaaaaacccgaaacaataaattatagaactttcaaacctgaaaaagatggtttgttttgtgctagaatttttggacctgtgaaggattatgaatgtttatgtggaaaatacaaaagaatgaaattcagaggcattatttgtgaaaaatgtggtgttgaagttactctttcgaaagttcgaagggatagaatgggccatattgagcttgctgctccagtttctcatatttggtttatgaaatctttgccaagtagaatagcaacattattagatatgactattaaaaatttagaaaaggtactttactttgaacaatttatagttgttgaacctggattaacagatttaacaagaggtcaaataatttctgaagatcaatacatagattatcaggatcaacatggagaagattcatttagtgcttcaattggagcagaagctatagagcagatgcttcaaaatatagatcttcaaagtgattatgatcaattaaaacaagatctacttgagacaaaatcagaattaaaaaaagctaaaataactaaaagactaaaattaatagaacactttatatcttctaaaaataaacctgaatggatgattttgagagttttgccagttatacctcctgaattacgaccactagttcctttagatggaggtagatttgctactagtgatttgaacgatttgtatagaaagggtaattaac

SEQ ID NO: 254880 - DNA, 213 bp, Unknown
  Bacterial polypeptide expressing nucleotide sequence isolated from the Sargasso Sea
tcttaaaaaatgataatattatctatattggtgatttagtccagaaaacagagccagaaatgttaagaactcctaatttcggaagaaaatctcttaacgaaattaaagaggtgctcaatacaatgtctttatatttagggatggaaatacctaactggccgccagacaacatagcggaattatcaaaaaaacttgaggaaaataactattaat

SEQ ID NO: 254881 - DNA, 901 bp, Unknown
  Bacterial polypeptide expressing nucleotide sequence isolated from the Sargasso Sea
actacaaccattagaacgtggctatggcacaacgctgggcaatgcaatgcggagggtcctgttaactagtatccctggtgcagctattacacatatgaagatagatggtgtgcagcatgagttctctactattaagggtgttaaagaagacgttgcagatattataatgaatttaaaaaaagttagatttagacttatggacaatgagccagataaaattactttaaaattaaaagggaagaaggtttttacagcccaagacattcaagatgctagtgaccaatatgaaattttaaacccagaggaatacattactgaaataaattcttcaggaaaaatggatattgaattacgtataggtataggaaaaggttatgttccttcagaagataatgataaaccaaatcttccccttggaacgctttctattgacagtatttttaatccagtaacaaatgtaacatttaatgttcaaccagttcctggggcaaaagaaccaattgagattttaaatttagatgtagctaccgatgggtcaattactgctaaagatgcagtgtcatattcagctacttaccttagggagcacctgaagtttgttgaagctatctctaacccaagcgtattagaaatatcagatggggtttctgacgagactatggcactaagaaaacttcttaatcaaactattgatgagatggagctatcagtacggagctataattgcttgcaagctgcgggaataaaatatattcacgaactagttagcaaagaagaaaatcagatgctaaaatataaaaactttggacgtaaatctcttacagagttaatagagaaacttgattctatgggcttacattttggtatggaggtcgataaaattatggctgaagaaggatag

SEQ ID NO: 254882 - DNA, 178 bp, Unknown
  Bacterial polypeptide expressing nucleotide sequence isolated from the Sargasso Sea
aatggaagcaacagaagtaaatattaaaaattggaaatcattaataaaacctgcgaaacttgatgttcaattaagtgatgataaatctaccgcaaaaattatagctgaaccacttgaaaagggctatggattaacattgggaaactcattaagaagaattttactttcatctataaga

SEQ ID NO: 254883 - DNA, 735 bp, Unknown
  Bacterial polypeptide expressing nucleotide sequence isolated from the Sargasso Sea
aatgattgaaaaaaattggaaagaattaataaaaccatcaaaattgtctgttcaacatgatagtaatgatgagttcaaggcgacaatagtagctgagcctattgaaagaggttttggtgtgactattggaaatgctctacgaagaattttgctttcttctctccaaggtagctctattacttctattcaaattcaaggagttttacatgaattttcttctttgccaggtgtaagagaagatattacagatgttatacttaatgttaagggcataaaggtaaaaatggacgttgaaggtcctaagaaaattaacctaaatgtaactggccctttaaaagtaacagcaggccacattgaagagattactgatgttgaaataatgaatccagaccatgaaatttgtacacttgatgaaggggccaatttatcaatagaatttaatatagaaaatggtaatggttatgttccagcaggttcaaaagttgttgatgaaaaaccaataggtctaatacctattgatgccatttttagcccaattgttcaggtttcatacgatgtagataatgcaagagttggtcaacaaactgattatgataaacttttattaacagttcaaactaatggatcagtcactcctgaagatgctgttgcgtttgcggcaagaataatgcaggatcaaaaacaaaattttattaattttgaagaacctgaagaaccagaagaagtacctgaagt

SEQ ID NO: 254884 - DNA, 3349 bp, Unknown
  Bacterial polypeptide expressing nucleotide sequence isolated from the Sargasso Sea
aatgacagaaaattataatcaacgttggcctgtcattcaagacatacttagaagagaaggaattgcacgacaacatcttacttcttttgatgaatttttagataacggattacaaagtattattcaagaagtaggacaaattgaaattgaaaatgcagaatatccttacaaaattcaacttggaaaaataaaactacaacaaccacgaatgatggaattagatggttctattactcatgtaactcctgctgaagcaagattgagaaacatttcatatgttgcaccaatcatgatggaagcaagtgttgttgaagatggtaaaactctagaaactcgttttgttcacattggtgatatgccagtaatggtaaagtcacatgcatgtattctaaacacattcactgatcaaaaattaattgatcatcaagaagatcctcgtgaccctggtggatactttatcattaatggttctgaaagagttgtagttggattagaagatctttcttacaataaaattattgttgatgcagaaaaagttggaggaaaaatagttcacaaagctaaagtttattcttcaattattggttaccgtgcaaaattagaattaattatgaaagatgatggaatgattgttgcaaaaattcctggctctcctgtagacattccagttgtaactttaatgcgtgcacttggattggaatctgacaaagacattgcaggtgcagtatcacttgttgacgaaatacaagatcatttagaaggttcatttgaaaaagcaggtgatgtcccaacttcaaaagatgcaattgtttacatcagtaaaagaattgcaccaggaatgttagaagaatttcaaattaaaagagctgaaacacttcttgattggggtctgttacctcacttgggcaaacatcctgaaaatagaaaagaaaaagctcactttatgggtgaagccgcatgtaaattattagaactaaagttaggatggattgatccagatgacaaagatcattatggaaacaaagttatcaagtttgcaggtcaaatgcttgctgatttgtttagaactgcattccgtaatttagtcagagacatgaagtatcaactagaacgttctggtcaaaaacgtggaataaatgcagttgctgcagccatacgacctggaattgtttcagataaactaaacaatgcaattgccactggaaactggggaagaggacgtgttggtgttacacaattacttgacagaactaattatctctcaactatcagtcatttgagaagagtacaatctcctctaagtagaactcaaccaaactttgaagcaagagatctacattccacacactttggtagaatctgtccgagtgaaactcctgaaggctcaaactgtggtctggtaaagaacttagcattgtccgcaattatatctcaaaatgttccatctgaagaaattgtcgagaaactatttgatattggtgtatctgatttagtttctacatctaatgatatcaagaaagatggtactagagtatttgttgatggaaaattaattggattccataaagacggacaaaatctagtagatcaaatgcgtgagtttagaagaacttcaaagatacatccacatgttggaatatctatacacaagcctgaagaagaaggtgctactcaaagattatacgttaattgtaatgctggtcgtgtactaagaccacttgtaataattaaagatggtaaaactctactttcaaatgacattcttgagaaaatatccaagaaactaatctcttggaatgatcttgttcgaatgggtgtaattgaattactagatgcaaatgaagaagaaaattgttatgtaacatttgatgataaaaatacaaaaaaattcactcatatggaaattttcccatctgcaattcttggcgctggtgcatcaatcattccttatcctgaacataatcaatcaccaagaaatacttacgaatcagccatggcaaaacaaagtcttggattttccactcctatgatgaatactagtacatatgttcgacaacatttcatgctatacccacaaacaccaattgtttccacacgtgcaatgaatttacttggaatggaagaaagacctgcaggagttaattgtgtagttgccgttcttccatttgatggttacaacattgaagatgcaattgtattgaatcgctcatctgtagacagaggtttattccgaactttcttttacagaatttatgataccgaagccaaacaatatcctggtggaatgagagacaactttgaggttccaaatgcagacgataatgttcgaggttacaaaggtgaaaaagcatacagaatgttagaagatgacggtattgtagcaacagaatctggtgttgatggtggtgatattttgattggaaaaactagtcctccaagatttatggaagagtataaagaatttgaaacaagtggtccatacagacgtgatacatctgttggtgtaagaccttctgaacatggtgttgttgatactgttgtaatgactcaatctaatgaaggtggaaagatgtacaaaatccgtgtacgtgatatgagaattccagaaattggtgacaaatttgcatcaagacacggacaaaaaggtgtacttggcattttagcaaaacaagaagatcttccatatactgaacaaggaacacaacctgatgtcttgattaatccgcatgcattcccatctagaatgactgttggaatgatgatggaatctgtttgtggaaaagcagccgcacttagaggaaaacaatttgatggttctgcatttgttggagaaaaaatggacattgtaaaagaaattcttgataaacaaggtttcaagtattctggtaaagaaaagatgtatgacggtagaaccggtaaagcatttgaagttgatactttcatcggagttgtatattatcaaaaacttcatcatatggtttcagataaaattcatgctagagcaagaggtcaagttcagatgcttactaaacaaccaactgaaggtcgtgcccgtggtggtggtttaagatttggtgaaatggaacgtgactgtttaattgcatatggtgcatcaatgcttctaaaagatagattgttggatgaatctgataaaactgacattttactatgtgaaaaatgtggattaaccggttatcatgatgcaagaaaaaggaaatttgtctgtgcacaatgtggtgaaaatgcacctatatcatctgtatcagttgcatatgctttcaaattacttttgcaagaaattctaagtcttaacatcgcaccaagattgaaactaaaggagagagtataa

SEQ ID NO: 254885 - DNA, 595 bp, Unknown
  Bacterial polypeptide expressing nucleotide sequence isolated from the Sargasso Sea
atgaaaaaagaattatcagagttatttaaaagttcggaaataatagagtctcaaaattttaatagcattaaaatttctttggcaagcccagaaaaaataaaatcttggacttatggtgagataaagaaaccggaaacaataaattacagaacttttagacctgaaaaagatggacttttttgtgcaagaatatttggtccaattaaagactatgagtgtttgtgcggtaaatataaaagaatgaaatttagagggataatatgtgaaaaatgtggtgtcgaggtaacaaagtcaaatgttagacgagagagaatgggccacataaatcttgctactcctgttgctcatatctggtttttaaaatctttaccaagcagaattgctctagcggtcgatatgaaattaaaagaaattgaaagagttttgtactttgaaaatttcatagtaattgagcctggactaacaggattacaaaaaaatcaacttttaaatgaagaggaactagcaaaataccaagatgaatttggagaagaagcttttactgctggtataggtgcagaggcagttcttgaaatgttaaaaagtttagactaga

SEQ ID NO: 254886 - DNA, 529 bp, Unknown
  Bacterial polypeptide expressing nucleotide sequence isolated from the Sargasso Sea
aatgagcaccaaatctttttcaaaagggttagttgaaataataggttcatctgaaaattcagaaagggttgaaagcgaaatcctccaggttttcaatgctattgctgatcataaagaagctttagatgtatttagaaattttggcgttcctgcagagaaaaagattgaggcaatgagtaatttattaggaaagagggttgattctttaactttagatttaatctctttgacaatttctcagggctacggtgataatttgctagagatttcctcttatgtttcagaatattttgctgaaaacaggggagcctcattagcaaaagttgtatcggctattgagctagatgataagacacaaaatagtattaaaagagtactgaaaaagaagtttggaagaaaagtggagctacaagtagaggttgacgagtcagttataggtggtctcagcgtaagcgttggtgaaagaacttttgatggcttagtttcctcaagactccaagaagtaaaatctgttttagaaggtaggtaa

SEQ ID NO: 254887 - DNA, 157 bp, Unknown
  Bacterial polypeptide expressing nucleotide sequence isolated from the Sargasso Sea
catgaccaacagcaacacccgcaccgagagccacttcgattacgtcaagatcaagctggcttctcccgagcgcatcagggagtggggacagcgcaccctgcccaatgggcaagtggtgggcgaggtcaccaagcctgagacgatcaactaccgcacg

SEQ ID NO: 254888 - DNA, 1090 bp, Unknown
  Bacterial polypeptide expressing nucleotide sequence isolated from the Sargasso Sea
ctgcgggcgattgcccccgatagcgaaggctcactcaaacccagggccaacggctttccggcgaacgccgctgtcggcacgaggctcgagcccggccccaccgattccgacagcgcgcctgcggtacgcctgctaaccgatacgttgcaggaggcaacccgacgtaatgcatcggacctgcacatcgaaccggccgagcgtggctggcgcatgcgtttgcgcatcgacggcgtgctgcacgaaatccccccaccccctgcgcatctgcgcgacgcattcatcacgcgggtgaaagtactggcgcgcatggatatcgccgagcggcgcgtaccgcaggacggccggctgcgtattgccacctcgccaggccgcgtcgaagactaccgcgtcaactcgctgcccaccttgttcggagaaaagctggtgctgcgcagactcgacgcgttgcccgcggatctttcgctcgactcattgggcctcgatccacagcaacgtgcagcagtcgatgcggcgattcgcgcgccgcacggcctcgtgctcgtcaccgggcccaccggcagcggcaagacgctgtcgttgtactgcttcctgcatatgctcaacgacgaggcacgcaatctgtgctcagtagaagatccggcggaaattcaattggcagggatcaaccaggtgagtgtgcgcgaaaaggccggcctgacattcgcgctggcgctgcgcgcgttcctccgtcaggaccccgatgtgatcatggtgggcgaaatccgcgacgacgaaaccgccgacgtcgccgtcaaggcggcgcaaaccggccacctcgttctgtccaccttgcacacgaacgacgcgcctgctgccgtcgcgcgtctgatcgacatcggcgtcgagccgtacaacctggccgccgcgctaaagatggtgacggcccagcggctggtgcggcggctgtgcgtggcgtgccgcgcacccgcgccgcaatcggcggcggcgctacgagcagcgggcttcgccgacgagcacctcgacggctggcaaccattcggcgccgccggatgcgccgcttgccacggtatcggctaccgcggccgcgtcg

SEQ ID NO: 254889 - DNA, 445 bp, Unknown
  Bacterial polypeptide expressing nucleotide sequence isolated from the Sargasso Sea
catgagcaatgatttaaaatttaaaatttcgcataaagttactgaagataattcgagtaactttactattaaacctttagacagaggttatggtattacagttggtaattctttaagaagagctcttcttactgctgtaccaggagctgcaattacaaatgttaaaattgaaggagctcaccatgaattttcaacaattgatggagtaacagaagatgttgctgatgtaatcatgaatttaaaaggagttcgtttccatttatttgaaagttctgttgagccaatttttcttaaggttaaaggtccaaaagctttcacagctgctgatatacaggctgctagtgatgatttcacaattttaaatccagatcactacataactgatattgccaaaggaaccactttagaagttgagttaaggcttggaattggtaaaggttataag

SEQ ID NO: 254890 - DNA, 886 bp, Unknown
  Bacterial polypeptide expressing nucleotide sequence isolated from the Sargasso Sea
acgaccattggacatgcccttcgcagggtactgttgtcatctgtccgtggttccgccatctttgctgttcaaattgaaggagtgacccacgagttcagtaacatcagtggagtcgttgaggatgtattgcagatcatactcaatattaaggaactccagttggagcagtattttgatggagtgattgaactggaactgattggtgaaggcccctgcattttaacaggaaaggacatagccactttcgagaaggctaaggttctcaatcccaacaaagtcattgcaacccttcaggagggagcaaccatcagcatgaccctttatgcccagttcaataaaggctatgtgacttcggaagtcaatcaagaaaatgaacttccggttggaacgatctacctggattcaaatcattcgccgatcaaaaaaattcactatgaagtggaaaattccagggttgatcagagaacggattatgatcgtctgaattttgaactttggaccaacgcttctgtgaaacctgcggatagtctggcttatgcggcaaagatcctgaaggaacatatggatgttttcatcaatttcgatgaaagtgccatcgtcattgagcatgaagaagaagatgatgacgagcctctcaacgaaaatctttaccgcagtgtcagtgaactggaattgtcagtacgttctatcaactgcctgcagaatgcaaaaattgaaacgatcggggacctggtccagaaaactgaagccgaaatgctgaaaacgaaaaacttcggccgcaaatccctgaatgaaatcaaatccatcctttccgggatggggcttcagcttggaatggtattggaccgttttgacccgaataacaatccacatctgaaaatttaat

SEQ ID NO: 254891 - DNA, 821 bp, Unknown
  Bacterial polypeptide expressing nucleotide sequence isolated from the Sargasso Sea
tatgaataaaaatattaaagacaaaattgaatctataccaatatggaaaaatgatatctcgattcaaaatcttgacggaggaatgactaacgaaaattttttagtacaagaaaataatataaaatatgttgtaagattaggtgataatattcctgaacatttagtttcaagatcaaatgaactgatagtaagtaaagctgctgcaaatgctggcataagcccaaaagtaatttttcatagtaaaggtattttagttttagattatattgaaagtactaccttgtctgctgaagaagtcagaaagaatattaaatctattattcctataataaaaaacattcataatgaaattccaaaaaagctatatggacaatctttaattttttgggttttccatgttattcgtaattatgcaaagtttttaaaagataatcaaagtacacatttaaaaattttatctgatttaatttcaaaatctgaattgcttgaaaaaaactctgcaccatacgaaattgttttttgtcataatgatttattacctgcaaactttcttgatgatggatctcgtctttgggttatagattgggagtatgcaggttataatactcctctttttgatcttgggggtttatcttcaaataataatttttctttagaagaagaaatttaccttcttgaaaattattttgaaaaaaaaatcaatgacaaacttatgctccaatataattgtctaaaatctgcgtcacttttacgtgaaactatgtggagcatggtatcagaaatatcatcaaaaattaatgcggattatgccagctatacac

SEQ ID NO: 254892 - DNA, 841 bp, Unknown
  Bacterial polypeptide expressing nucleotide sequence isolated from the Sargasso Sea
attgaccagcatacctggtgcggcgataactcatgtaaaaatagatggtgtccagcatgaattttcaaccattgatggtgttaaagatgatgttgcagatattataatgaatcttaaaaaggtgcgatttaaacttatggatagcgaacctgataaggtcgtattaagtatgaaaggtaaaaaatcattcactgcacaagatattcaaaatgcaagcgatcagttcgaagtcctaaaccctgaggaatatataactgaggtgaattctaaaggtaagttggatattgaactgcgtattggtattggtaaaggttatgttccatcagaggataatgataaacctaacctttctgtgggtacactttctattgatagtatttttaacccagttacaaacgtaacttttaacgttcaaccagttcctggagcaaaagatccgattgaaattctttctcttgatgtatcaacagatggatcaattactgcgaaagatgctgtgtcttacacagcaacatatctaagggagcattttaaatttatagaagctatttctaacccaagtgtgcttgaaatatctgatggagtttctgacgaaacgatggcacttaggaaacttttgaatcagacaattgacgaaatggagctttctgtaaggagttataattgtttacaggctgctggaatcaaatatatccatgagttagttagtaaagaagaaaatcaaatgctcaagtataaaaactttggtcgtaaatccttgactgagcttgttgaaaaacttgattcaatgggattgcattttggtatggctgttgataaaattatggccgaagagggctaa

SEQ ID NO: 254893 - DNA, 339 bp, Unknown
  Bacterial polypeptide expressing nucleotide sequence isolated from the Sargasso Sea
ttcaagcaataccaaaagagttatatgaagcagccgatgttgatggtgctagtccttttcaaaagtttttcaaaattacacttcctcaaatcactgcagtaatttcaattctttttatgattagatttatatggaattttaataaatttgaggatgtgtttttattaacaggaggagcatctggaacaagaactttgccaataaatgtttatcagcaaggtttcgcaatatcagatattggaatgggcgcagctgtttcaatagtaattgttgtattacttttaatgtttatgtttttttatttcagacttttaggaaagagggtagatgagaattaag

SEQ ID NO: 254894 - DNA, 508 bp, Unknown
  Bacterial polypeptide expressing nucleotide sequence isolated from the Sargasso Sea
attaatcaattatcaggttatagagacaccaatcaatttgctagggcaaaaatatattacaataaatattttagggttcgattttaaactaagactagctcttacaacagtaattatgtttgaaatttggagatattttcctttagcttttttatttattcttgcaagacttcaggctattccaaaagaactatatgaagcagcagatgttgatggagcaagtccatttcaaaagttttttaaaataacacttcctcaaattacagccgttatatcaattctatttatgataagatttatttggaattttaataagtttgaggatgttttcctacttactggtggtgcctcaggtactagaactttaccaattaatgtttatcaacaaggttttgctatatctgatattggaatgggatctgctgtttcaatagttattgttgttttacttttattgtttatgtttttttacttcaaacttttaggaaagagagtggatgaaaactaa

SEQ ID NO: 254895 - DNA, 310 bp, Unknown
  Bacterial polypeptide expressing nucleotide sequence isolated from the Sargasso Sea
atgcaaaccaatttgctgaaacccaaggcgatcaatgtcgagcagcttggccacaatcgtgccaaggtcgcactggagccgttcgagcgtgggtacggccacacgctgggcaatgccatccggcgcgtcctgctctcgtccatggtgggttacgcagcgacggaagtcacgattgcaggcgttctgcacgagtattcgtccatcgacggcgttcaagaggacgtggtcaacatcctgttgaacctcaagggcgtagtgttcaagctccacaaccgtgacgaagtgacactgagcctgcgcaaagacggcg

SEQ ID NO: 254896 - DNA, 484 bp, Unknown
  Bacterial polypeptide expressing nucleotide sequence isolated from the Sargasso Sea
atgtcgaatgttttaggggcttacgcgttagggcttgattacggctctgattcagtacgcgcgttattggtggatacccaaacgggcgcagaagtagcaaccaatgtggtgtactacccacgttggaagaaggggctgttttgcgagcccgcgaagaatcaatttagacaacatcccctcgattacatcgaaagccttatcgaggtagtgcaaggattatgggcaaaagcccccagtggcgccgcgcaaagagtctgcgggttgagtgttgataccacaggttcaactcccattgccgtcgacgaagctggcgttgccttagccttaaaaccagagtttgcgaataaccccaatgccatgtttttgctttggaaagatcacagcgcgatcctcgaagctcagcaaattaccgccgcagcaaacaatgcaagcgaaaattacttgaaatatgaaggagggatttattcctctgaatggttttggg

SEQ ID NO: 254897 - DNA, 3430 bp, Unknown
  Bacterial polypeptide expressing nucleotide sequence isolated from the Sargasso Sea
atgtccatccacgtcgcgctgcatcacaccacccgctatcgttacgaccggctcgtcaacctcggcccgcaggtcgtgcgcctgcggcccgcgccgcactgccggacgccgatcctcgcgtactcgatgacggtcgagcccgcgcagcacttcatcaactggcagcaggatccgttctcgaactatctcgcgcggctcgtgtttccggagcgcaccgagcacttcgagatcacgatcgatctcgtcgccgagatgtcggtgtacaacccgttcgacttcttcctcgaagccagcgcggagcaatacccgttcagctatgacgacgcgctgaagaccgagctcgcgccgtatctcgtgtgcgatccgccgacgagcgcgtcgccgctgttccgcacgtatctcgacggcgtcgaccgcacgccggccggcaccgtgaactttctcgtcgcgctgaaccagcaactgcagcgcgacatcggctatctcgtgcggatggagccgggcgtgcagacgcccgagcagacgctcgaactggcctcgggctcgtgccgcgacagcgcatggctgctcgtgcagctgtgccgccacctcggcatcgccgcgcggttcgtgtcgggctacctgatccagctgacgcccgacgtgaaatcgctcgacggcccgagcggcacgtcggtcgacttcaccgacctgcacgcgtggtgcgaggtgtacctgcccggcgccggctggatcggcttcgacccgacctccggcctgctcgccggcgaaggccacattccgctggcctgcacgccgcagccgaccagcgccgcgccggtcgaggggctgatcgacgagtgcgaggtgtcgttcgaacacgagatgaccgtgacgcgcgtgtacgaatcgccgcgcgtgacgaagccgtacacggaatcgcaatgggacggcgtgctggcgctcggcacgcaggtcgacggtgcgctggcggccggcgacgtgcggctcacgcagggcggcgagccgaccttcgtgtcgatcgacgatcgcgacggcgccgagtggaacaccgacgcgctcggcccgaccaagcgcggctatgcgaccgaactcgtgcagcggctgcgcgccgaatacggcgatggcgggttcctgcatttcgggcagggcaagtggtatccgggcgagcaattgccgcgctgggcgttgtcgatcttctggcgtgccgacggccagccggtgtggcacgacccgtcgctgttcgccgacgagcgcgagccgtccgcctatacgaccgacgacgcgaagcgcttcatcgacgcgctggccgcacggctgaacctgaccggcgaattcatccggcccggctacgaggacgtctggtactacctgtggcgcgaacgccggctgccggtcaacgtcgatccgttcgactcgaggctcgacgacgagctcgaacgcgcgcggctgcgcaaggtgttcgagcagcagctcgacagcgtggtcggctacgtgctgccggtcaagcgcacggacgatgtggacggccgtgatcggccgggcctcgacggcccgcgctggcagacgggcccgtggttcttccgcgacgagcggatgtacctcgtgcccggcgattcgccgatgggctatcggctgccgctcgattcgctgccgtgggcgagccgcgccgaccatccgtatctggtcgagcgcgacccgtttgcgccgcgcgacgcgctgccggacgccgccgcgatccgcgcacgctacgccggcccgtccgatgcgccgcgctacctgtccggcgtgcatcgcgaggcagccgcgcagaccgtgatgcagtggcgcgacgacggcacggccggcaacgggcggccggccgcgcgcgacccgggtcgcgcccccgagcgcttcgagtcggccgcgtggatcacgcgcaccgcgttgtgcgtcgaagtgcgcaacggcatcctgtacctgttcatgccgccgcttgccgcgctcgaggattatctcgacctgctcggcgcgatcgagctgaccgcgcacgcgctgggcgtgaagctcgtgctcgaaggctatccgccgccgcgcgacgcgcggctgaagctgctgcaggtgacgcccgatcccggcgtgatcgaggtgaacatccatccggccggcaacttcgacgagctcgtcgatcacacggaattcctgtacgacgccgcgtggcagtcgcggctgtgcagcgagaagttcatggtcgacggccgccacgtcggcacgggcggcggcaatcacttcgtgctgggcggcgcgacgccggccgacagcccgttcctgcgccgcccggacctgctcgcgagcctgatcgcgtactggcacaaccatccgtcgctgtcgtacctgttctccgggctcttcatcgggccgacgagccaggcgccgcgcgtcgacgaagcgcgtaacgaccagctctacgagctcgacatcgcgttcgcggagatccagcgcaacaagctgctgttcgggcaggacatgccgccgtggctcgtcgaccgtgtgctgcgcaacctgctgatcgacgtgaccggcaacacgcaccgcagcgagttctgtatcgacaagctgtattcgcccgactcgtcgaccggccggctcggcctgctcgaactgcgcgcgttcgagatgccgccgcatgcgcggatgagcatcgtgcagcaattgctgctgcgcgcgctggtcgcgcgtttctgggccgcgccgtacacgacgccgctcacgcgctggggcaccgcgctgcacgaccgcttcatgctgcccgcgtttcttcagatggatttcgacgacgtgctgaccgagctgcgcgacgccggctttgcgttcgatccggcgtggttcgcgccgcacttcgaattccgcttcccgctgttcggccagatcgcggtgaacgggatgcagctgtcgctgcgcggcgcgctggagccgtggcacgtgatgggcgaggagggcgcgcccggcggcacggtgcgctacgtcgattcgtcggtcgaacggctcgaggtgcgcgtgacggggctgaacgacaaccggcacgtcgtgacggtcaacggccgcgcgctgccgctgcagccgaccggcaccgtcggcgaatacgtcgcgggcgtgcgctacaaggcgtggtcgccgccgtccgcgctgcatccgaccctcggcgtgcacgcgccgctcacgttcgacatcgtcgatacgtggctgcagcgctcgctcggcggctgccgctatcacgtcgcgcatccgggcgggcgcaactacgcgacgttcccggtcaatgcatacgaagccgagagccgccggctcgcgcgcttcgtcgagatggggcacacgccggggcggatggatgtcgcggctgccgcgccgagccgcgaattcccgttcacgctcgacctgcggcggccgtgac

SEQ ID NO: 254898 - DNA, 1129 bp, Unknown
  Bacterial polypeptide expressing nucleotide sequence isolated from the Sargasso Sea
atgccaggattacttcccgatgttgaccgcgaggggctcctcgaatactcggtggtgtacaccgatcgctcggtcaaccatatgtcgcagcgctttcagggcgtcatgcgcgacatctccggcacgctgaagaaggtctacaacgcgaagtccgtcgtgatcgtccccggcagcgggacgttcggcatggaagccgtcgcgcggcagttcgccacgaacaagaagtgtctcgtcatccgcaacggctggttcagcttccgctggtcgcagatcttcgacatgggcagcatcccgtccgaaacgacggtgctgaaggcgcggccggtcgaggcgggacggcaggccgcgtatgcgccggcgccgatcgacgaagtggtcgccgcgatcaacgaacacaagccggatctggtctttgcgccgcacgtcgaaaccgcgtccgggatgatgttgcccgacgggtatctgcgcgcggtgtccgacgccgtgcatgcggtcggcggcatgttcgtgctggattgcatcgcgtccggcacggtgtgggtcgacatgcaggcgagcggcgtcgatatcctgatcagcgcgccgcagaagggctggagcgcgtcgccgtgttgcgcgatggtcatgctcggcgagcgggcccgcgaacgtatcgacggcacgaccagcaccagcttcgcgtgcgatctgcgcaagtggctgcagatcatggaagcctatgaaggcggcgggttcgcttaccacgcgacgatgccgacggacagccttgcgacgctgcgcgacgtgatgaaggaaaccgaggcgtacggcttcgacaaggtgaaagaggagcagctcgagctgggcaagcggattcgtgcgttgctggccgagaagggtttccggagtgcggcggcgcaagggttcgaggcaccgggtgtcgtggtcagttatacggacgacgacgggattcgaaccgggaagaagtttgtcgacgtcgggttgcagatcgcggcgggcgtgccgttgatgtgtgacgaaggggacgatttcaagacgttccgtctcgggttgttcggcctcgacaagctgcatgatgtcgatggcgcggttgcgcggtttgcggatgcgttggagcggattctttaag

SEQ ID NO: 254899 - DNA, 1552 bp, Unknown
  Bacterial polypeptide expressing nucleotide sequence isolated from the Sargasso Sea
agcagaggttgtgcagaattcagggatcaaaaaagtaaaaattcgctcaccaattaaatgcgaagcatcgcttggtttgtgcgcaaaatgctatgggagagatttagctcgtggacatttagttcatgtaggtgaatctgtaggagttgtagcagcacaatcaattggagagcctggtacacaacttacaatgaggacattccacataggtggtgccgcttcaggttcagctgaagacgattcaataacaacacttcgtggtggaaaaatagtttttgatgcatcacttaagacagttgaaaagaaaaatggagaagcaattgtcatctctagaaacgcttatttaactatacaagatgacgatgaaaatcttcttgaaaaatattcaattccttatggagcagaaattcttcatacaaacaatacaaaggtcgaccctggaacacttattgcaaagtgggatcctcttactctacctattatttcagagcaagagggaacaattgtttttgctgatctaacagaagatgtaactatgaaagtagatattgacgaattgacaggatcaactaagagagaagttattgatgttaatgaaaggccactaaaaggaaaaggaatgacaccaacaattagcgttctcaatgataagaaaaaagctcttgcaacttatacgcttccttcaaaatcaattttgatgaaaaacaacagtaataaggtttctaagggagaatttatagctagagtaccagtcgaaggaacaaaaacaaaagacattacaggtggtttgccaagagttgcagatttattcgaggcaagaaaacctaaagatggtgcaatttattctgaactttctggagtgctttcatatggaaaagagactaagggacgtaaaagacttgtgattacaccagagaaaggtgagccatgggaagttatggttcataaatacagagctgtttccttcttagaaggagacactgttcaaagaggtgatattctttgttacggacctaccgatacacacagcttattgcatttgcatggtgttgaagaattagctaaacacttaatatctgaagttcaggatgtatatagattgcaaggcgttgttattaacgacaaacatattgaagtaataacaagacaaatgctgaagaaagttacagttattgattcaggagatagcggcttcattgaaggggatgtcttagaaattgcaaaagtaagagctgaaaataaaactttagaggattcaggtaaaaaccctgttaaatttgagagaatgctgctagggataacaaaagcagcgttatcgactgattcatttatatcggcagcttctttccaggaaactacaagggttttaactgaagcggctgtcacaagcagaaaagatatcttaaaaggtttaaaagaaaatgtagttgttggtagattgattcctgctggaacaggttttgcagcaaatcaaaaagcaagtgtatcttcagaagaaatacaagatattgaagaggcattgaaaaaagaacttctagagagctttcagtaa

SEQ ID NO: 254900 - DNA, 960 bp, Unknown
  Bacterial polypeptide expressing nucleotide sequence isolated from the Sargasso Sea
ttggattatcgccaattgatgatatttctgtttcagaacctgaggttcctgaacttagtatcagaatgattgaaggaactgatacatatggaaaatttatcgcagaacccttagataaaggttggggggttacacttggtaatccacttaggagaactcttttatctggtttaccagggactgcaattaattgggtaaaaattgaaggaattgaacacgaatattctacattaaaaggaatgcgtgaggaagtaaatgaattccttatgaatgctaaaggtataagactaagatctttatcagacaggtctggaagactaagattagaagttgaaggtgaaggtgaagttaaagctggggatatcatggcaacagctgattttgaaattgttaatccagggcatcatcttgctacacttgattcatctgacgctcatctttcagttgagttcagcgttgagcaagggcaaggatataaaaaagctacagaggaagatgatacaaatattggagtactacctattgattcaatatttactccaattaagaaagcaaatttttcagtacaaccaactagagttggacaaagatctgattgggaaagattaacattagaaatttggacagatggatcaatcgatcctcagtcagctttgcaaaaagcatcagaatctttgatggataacttttatacatttagtaaatttgatcaagcatctgaagaacaaagtcctgcagcaggattgggaatcagtcctgatatttacaatacacctgttgagactttagatctttcagcaagaacattaaactgtttgaaaagagctggaataaatagagttggagaagtaatagctatgccagaaggagatttattaaagataagaaactttggaaggaaatctttagatgaactttttgatgtattagcagaaagaaatatgcttccccaaagttaat

SEQ ID NO: 254901 - DNA, 544 bp, Unknown
  Bacterial polypeptide expressing nucleotide sequence isolated from the Sargasso Sea
atgagtaagaattattcaaatatgctcaatagggtgcttgacggttcctccttgtcagaagaagagtcatacaagctaatgatcgctatggccaatgagtcggtatcgccgatactttcaggtgctcttttagctggattaagagcaaaaggagaaacagcagatgaaattaggggttttgcaaaggctatgcgttttcttgcaattcaaccagaaattcctcttcatgaaccaatagttgatactgtaggaacaggaggggacagttcgggaagtttaaatctctcgacagggacgggattgcttgctgctgcttgtggaatcaaagttgttaaacatggcaatagatctgtttcaagcaaatgtggaagcgcagacatgctggagcatattggcatgcaatttcctcaagacaagaaatccgctctcgatgcactcaataaacttggattcacctttctattttcgcccgcatttcacccagccatgaaggcaattatgccagtgagaaatactttagcagttcgaactgtattcaatatgt

SEQ ID NO: 254902 - DNA, 1147 bp, Unknown
  Bacterial polypeptide expressing nucleotide sequence isolated from the Sargasso Sea
tagttttaaagaagttgaattaaaagatattagaattccagaaccaagagcaaaaaaaattataaaatctatttctgatgatccctccaaaataaaaatattatataagttgagaaatagttcattaattcaagaaataagagatgtttcatttcaagataattttccaaaaaattatgaaattaaaaatttagatccaagatgctcctacaaaaaatataatttaaaatgtgaatttggaaattggccagctaagtatagggaaaattttcaagtaatatttgcaacaaatgatggatctaaagtagacaaaaagaggcttaaatcaattaaaccaaaattagagggtgaatctgataatattttgcttaataccaactttactctcaaaaactttaaaaaagttttatttgaaaatgaatttatagatttattactaactactttttattacacattttttggaacggttggctcaatagtatttggtattttaaccgctcaaatggttaatcaaaaattttatggaagaacatttatgagaagtgttctacttttcccctatgttgcaccagttgttgctttagcttacacttgggagcttctactggaccctaatagtgggacattaaatagcttattattaaattatcaaattattgaaactccaataaaccttcttggacaaaaatatattgaaattagtattttggggtttgattttaaattaaggttagctcttacaacagttataatgtttgaaatttggaggtattttcctttagcctttttatttattcttgcgagacttcaagctattccaaaagaattatatgaggcagctgatgttgatggggccagtccctttcaaaaattttttaatattacactccctcaaataaccgcagtaatttcgattttattcatgattagatttatatggaattttaataaatttgaggatgtctttttattaactggaggtgcatcaggaacaagaactttaccaataaatgtttatcaacaaggttttgcaatatcagacattggaatgggctcagctgtttcaatagtaatcgttgtattgcttttaatgtttatgtttttttattttaaacttttaggaaagagagtagatgagaactaa

SEQ ID NO: 254903 - DNA, 130 bp, Unknown
  Bacterial polypeptide expressing nucleotide sequence isolated from the Sargasso Sea
atgagtattattaataattggcaggcattaataaaaccttcaaaactaaagctaatcagcgatgaagacactcaatataaagcaactctaattgctgaaccacttgaaagaggttttggtttaactcttg

SEQ ID NO: 254904 - DNA, 874 bp, Unknown
  Bacterial polypeptide expressing nucleotide sequence isolated from the Sargasso Sea
caatgcagactttgatggtgaccaaatggctgtccatgttcctttaagtttagaagctcagttagaagctagaatattaatgctttctacaaataatattctttcaccatctaatggtaagccaattattgtaccaagtcaggatatgattttaggtatttattatctttctcaagaacctattagtgacaaaccagttggatattttacaaacgcagatcaaattgattacgctttatcatcaggtgaaataaaagttcacagcactataatatctagaattgaaacaattgatgaaaatggaaataaaaaatatgaaaaatatacatcaacagcaggtagatttttattggctgacttgttacctaaaaatagtaatattaaattttctctagtagatagacttttgccaaaaaaagtagtttctgagattatcgatattgtatttagattttgtggtcaaaaaaatacagttatattctgtgataaacttaaagacttaggatttaaacacgcgtttaaagctggaatttcttttggtaaagatgatcttgtaatacctcaaaacaaaactcaactaattgatgatactaaaaaattgatcgctgattacgaaacacaatatgctgagggtttaattactagaggtgaaaaatacaacaaagttgttgatgcttggtctaaatgtacagataaagttgccggtgaaatgatgaaaggtatctcagctacagaaaaaacagcagaaggtttaaaaattaattcagtattcatgatggctgatagcggtgccagaggatcagctgctcaaatgaaacaattagctggcatgagaggtttgatagcaaaaccatcaggtgaaattaatgaaagt

SEQ ID NO: 254905 - DNA, 589 bp, Unknown
  Bacterial polypeptide expressing nucleotide sequence isolated from the Sargasso Sea
tatggagatgaatgttaatacaggtaaaggatatgttcctgcagagctaaataaacctgaagagccaccattaggccttattgctatagattcactttatagtccagttaaaaaagtttcatattcagtaagtactgctagagaaggtaaagcattagattatgataaattaacaatggaagttgaaactaatggatcaatttctgctgaagatgctgtagcttattcagctagaattttccaagatcagcttaaaatgtttgtaaattttgatgagccagttgaagctcctgttaaagaagtttctactgaacctgaatttaataaaaacttattaagaaaagtagatgagttagagttatcagttagatctatgaactgcttaaaaaatgataatattatttatatcggtgacctagttcaaaaatctgaaggtgaaatgttgagaacacctaattttggaagaaaatcattaaatgaaattaaagaagttttaacaggtatgtctctatatttaggaatggaaattcctaactggccaccagacaacattgcagaaatgtctaagaaattggaggaagcaatttaa

SEQ ID NO: 254906 - DNA, 547 bp, Unknown
  Bacterial polypeptide expressing nucleotide sequence isolated from the Sargasso Sea
tcatatatggttcttaaaatcgttaccaagccgcatagctcttatgatggatatgaagctaaaggatcttgagaaggttctttattttgaaaaattcatggtcactgaaccaggattaacgcctttaatacaaaatcaactgcttgatgaagaagaattagaaaaagctaaagaagaatatggggaagactcgttctcagctggtattggagctgaggcggttagaaaagttcttgaaagaattgaacttgaaccagagcttgaagctttacggataaaactatctgaaacaaaagcagttgcgttatcagaaaagctagttaaacgaattaaaatttttgagtcttttatttcatctggaaatagacctgagtggatgatcttaacctctgtacctgtaattccgccagagttaagaccacttgttccactggatggcggaagatttgcttcaagtgatttgaatgatctttatagaagagtaatcaatagaaataatagactatatagattaattgaacttcgagctccagatataattataaga

SEQ ID NO: 254907 - DNA, 533 bp, Unknown
  Bacterial polypeptide expressing nucleotide sequence isolated from the Sargasso Sea
ggacgcccctattggtttaattcctatagatgcgatttttagtccaattaaaactgtgtcatataaaattgaaaattcaagagtaggacaagataccgattttgatagacttttattagatatagagacagatggaactattactccagaagatgcaacagctttagctgcaagaatactaatagaacaaatgggtaattttgttaattttgaagatccgcaacctgaagttgtagaggaagagcctactcctgaagcactacttaaccctcatttgttaagaaaagtggaagagttagagttatctgtaagatcagctaattgtctgaaaaatgataatattgtatatattggtgatttagttcaaaaatctgagtctgagatgctaagaactcctaattttggaagaaagtctttaaatgaaattaaagaagtgcttacaaatatgggattaaatttaggtcaaatgatacctgaatggcctccagaaaacttagaacagcttgcaaagcagattgatgatcaattttaat

SEQ ID NO: 254908 - DNA, 835 bp, Unknown
  Bacterial polypeptide expressing nucleotide sequence isolated from the Sargasso Sea
tgtaagagagcatcctgtcctattaaatagagctccaacacttcatagacttggtgttcaggcatttgagccaaaattaattgagggcgatgctatagaattacatccactaacttgtgctgcttttaatgctgactttgatggtgaccaaatggcagtccatgtacctttaagtttagaagctcaactagaggcaagaattttaatgttatcgactaataatattctatcaccatcaaatggtaaaccaatcattgttccaagtcaggatatgatcttaggtatttattatttatctcaagaacctattaatgataaatcaataggatattttttagatgctgatcaaattgaatttgctttatcatcagggcaaattaaagttcatagtacaattatttcccgttttgaaacagtagatgaaaaaggcaataaaaaatttgagaaatatactacaacagctggacgatttttactagcaaatttacttccgaaaaactttaatatcaaattttcattaatagacagactgcttcctaaaaaaactgtttctgaaattattgatattgtttttagattttgtggacaaaaaacaacagttattttttgtgataaattaaaagacttaggatttaaacatgcatttaaagcaggtatttcatttggtaaagatgatttagttatacctgaaaataaaactcaattaatcgatgatactaaaaaattaattgcagattatgaaacacaatattcggagggtttaattacaagaggtgagaaatataataaagtagttgacgcgtggtctaaatgcaccgacaaagtagctggcgag

SEQ ID NO: 254909 - DNA, 463 bp, Unknown
  Bacterial polypeptide expressing nucleotide sequence isolated from the Sargasso Sea
gttgcaataccagattgacagaatcgattatcaaatagcagatgatcgctcccaaacaggaacatttttaattggtcctttagaaagagggcaagctactactcttggtaactctttaagaagagttcttatgggaggacttgaaggaagtgctgtaactgcagtaagaattgcaggaattaatcatgaatatgccactatcccaggcgttagagaagacgttttagatattcttcttaactgcaagcaactttctattaatagttctaacccagagcttgagattggaagattagttgttaatggtcctatggaagtaaaagctaatgacattcaattttcttctcaagtggaaattgttgatggtgataagcccatagcaactattcaagaaggacataatctggaacttgaaattcatgtagaaagaggaataggttatagacccgtagatcgtagaaac

SEQ ID NO: 254910 - DNA, 493 bp, Unknown
  Bacterial polypeptide expressing nucleotide sequence isolated from the Sargasso Sea
atttagtccagttaaaaaagtttcttattcagtaagtacagcgagagagggaaaagcattagattacgacaagttaactatggaagtagaaactaatggatcaatctccgcagaagatgctgtggcttactctgctagaatctttcaggatcaattatctatgtttgtaaattttgatgaacctcaagaagtcctagtgagagaaaaaccaacagaaccagaatttaatagaaatttattaagaaaagttgacgaattagaactttcagtaagatcaatgaattgtttaaaaaatgataatataatttatattggagacttggttcaaaaatcggagggtgaaatgttaagaacgccaaattttggtagaaaatctttaaatgaaattaaagaagttttgaatggaatgtccctatacttgggtatggagataccaaattggccccctgataatatagctgaattatctaaaaaacttgaagaagcaatttaa

SEQ ID NO: 254911 - DNA, 933 bp, Unknown
  Bacterial polypeptide expressing nucleotide sequence isolated from the Sargasso Sea
tttgaacctaaactaattgaaggtgatgctatcgaattacacccattaacttgtgcagcttttaacgctgactttgatggtgatcaaatggcagttcatattcctttaagtttagaagctcaattagaagcaagagtgcttatgatgtcgaccaacaacatattaagcccatcaaatggaaaacctataattgtgccaagtcaagatatgatacttggaatttattatttgtctcaatcaccatatcaaactgaaaaagtagaaggatattttgtaaacaattcagaaattgagcatgcattagaatcaagacaaataaaagttcattcaagaattgtttcaagatttattactgtcgatgaaaatggtaaagaaaaatatgaaaaatacataagtactgctggaagatttttattagcaaatcttttaccaaaaaatattaacaataaattttctttaattgatagattattaccgaaaaaagtagtttcagaaataattgatcatgtgtttagattttgtggtcaaaaatctactgttatattctgtgataagcttaaagatttgggtttcaagcatgcctttaaagctggaatttcttttggaaaagatgatttaataattcctgaaaacaaacaacaattaatcgaagaaacaaagaagcttatttcagattacgaaaatcaatactcagaaggacttataactagaggagagaaatataataaagtagttgatgcatggtcaaaatgtacagatagagtagcagcagaaatgatgaaaagaatttctgctactgaagttactgaaaaaggtttaaaaataaattcagtatttatgatggctgatagtggagcgagaggatctgctgctcaaatgaaacagctcgctggaatgagagggttaatagctaagccttcaggagaattattg

SEQ ID NO: 254912 - DNA, 565 bp, Unknown
  Bacterial polypeptide expressing nucleotide sequence isolated from the Sargasso Sea
atggcaaagttaaaatttcaatattttaaatcaagtgttgaagaatctggtaaattaaaaggacactttttactacagtcactagaagccgggcaaggattaacaattggaaatgctttacgccgagtattactttcaaatttagaaggtatagcaattactggtatccgaattccaggtattgtacatgaattttcgacaataccaaatgtgcgtgaagatgttcttgaaatttttctaaacctgaaacaaattgtcttaaaaagtgaaaaacaggcaccaacttttggtcatgtatcaattaaaggacctggtgttataacagcaagctcaattaaatttgatgatgatactatcaaagttataaatccaaaccaatatattgctactttatctggaaatgaaactttaaactttgatcttaaggttgaaaaaggtattggataccaatttgcagaacaaacaaataatacggaagatattgagtttttagctattgatactgtttttatgcctgtattaaaagttaattacaaaattaataatgtttatattggttatagta

SEQ ID NO: 254913 - DNA, 282 bp, Unknown
  Bacterial polypeptide expressing nucleotide sequence isolated from the Sargasso Sea
aatgacaaacagcaacttaagaactgaaaatcactttgattacgtcaaaatttcaatagcttctccccaaagaataatggattggggtcagaggacattgcccaatggacaagtagtcggtgaagttactaaacctgaaactataaattacaggacacttaaaccagaaatggatggattgttttgtgaaaagatttttgggccatctaaagattgggaatgccattgtggaaagtacaaaagggttagacaccgcggcattgtttgtgagagatgtggtgt

SEQ ID NO: 254914 - DNA, 707 bp, Unknown
  Bacterial polypeptide expressing nucleotide sequence isolated from the Sargasso Sea
attagatgccaaaggacctggtgaaataaaagcatctgacatagcatcagttcctgatgtgaaatttttgaatcctgacttagttatttgtaatttagatgaaaatactcacttccatatggaaatgaatgttaatactggaaaaggttatgttccagctgatttaaataaacctgaggaaccgcctttaggtttaattgcaattgactcattatatagtcccgttaaaaaagtttcttattcagtaagtacagcaagagaaggtaaggctttagattacgataaattaacgatggaagttgagacaaacggatcaatttctgctgaagatgcagttgcatattctgctagaatttttcaagatcaattaaaaatgtttattaattttgatgaacctgtggaagctccagttaaagaagtttcaacagagcctgaattcaataaaaatttattaagaaaagtagacgagcttgaattatctgttagatcaatgaattgtcttaaaaatgataatataatttatattggtgatttagttcaaaaatctgagggcgagatgttaagaaccccaaattttggaagaaaatcattaaatgaaattaaagaagttttaactggtatgtctctttatttagggatggaaattccaaattggccaccagataatatcgcagaaatgtctaaaaaattagaggaaagtatctaat

SEQ ID NO: 254915 - DNA, 247 bp, Unknown
  Bacterial polypeptide expressing nucleotide sequence isolated from the Sargasso Sea
gatggcacttgagatattcaagccattcgttatgaaaaggctagttgaacttggtctggctcaaaatattaaatctgcaaaaagaatggttgaaagatctcgggctcaagtatgggaggtccttgcagaagtaattgaagagcacccgggattactaaacagagctcctactttacataggcttggaattcaagcatttgagccaatccttgtagaaggtaaagctattcaagtccatccgttggtt

SEQ ID NO: 254916 - DNA, 852 bp, Unknown
  Bacterial polypeptide expressing nucleotide sequence isolated from the Sargasso Sea
ccctttaacttgcgcagcttttaacgctgacttcgatggagaccaaatggcagtacacgttcctttgagtttagaagctcagctagaagctagaatattaatgttatctacaaataatattttatctccatctaatggtaagcccattattgtacctagtcaggatatgatcctaggaatttactacttatcacaggaaccagttacagataaatcagctggatactttgttgatgctgatcaaattgaatttgctttatcttcaggtcaaataaaagttcatagtacaattatttctagatttgaaacagttgatgcagatggtaagaagaaatttgaaaaatacactactactgctggaagattcttattagcaaacctattaccgaaaaattctaatattaaattttctttaatagacagattgcttccgaaaaaaactgtctctgaaattattgatattgtctttagattctgtggacaaaaaacaactgtaattttctgtgataaactaaaagacttaggttttaaacatgcttttaaagcaggaatttcttttggaaaagatgatttagttattccagaaaataagactcaattgatagatgatactaaaaaactaattgcagattatgaaactcaatatgctgaagggttaatcacaagaggtgaaaaatataataaagttgtagatgcctggtctaaatgtactgataaagttgctggtgaaatgatgaaaggtatctctgctactgaaaaaacctcagaaggattaaaaatcaattcagtatttatgatggctgatagtggagcaagaggctcagcagctcaaatgaaaacattagccggcat

SEQ ID NO: 254917 - DNA, 1001 bp, Unknown
  Bacterial polypeptide expressing nucleotide sequence isolated from the Sargasso Sea
tgaacctaaattgattgaaggagatgcaattgaattacaccctttaacttgtgctgcttttaatgcggatttcgatggagaccaaatggctgtacacatacccctaagtttagaggctcaacttgaagctagagttttaatgatgtctacaaataatattttaagcccatcaaacggtaaaccgattatagttccaagccaagatatgatacttggaatttattatttatcccttcaaccatatcaagagaagaaaattgaaggttattttgtaaatgactctgaaatagagcaaggtttagaatctggaaaaataaaaatacactctagaattatatctagatttgaaacagttgatgaaaaaggtaatcaaatatttgaaaagcatactagtactgctggtagatttttattggcaaatcttttaccaaaaaataaagatatcaaattttctttaattgatagagttttaccaaaaaaagttgtctctgaaataattgattttgtttttagatatactggtcaaaaaagtactgtaattttctgtgataaattgaaagaccttggatttaagcatgcgtttaaggcaggtatttcttttggtaaagatgatctaattatacctaacaacaaagaacagttgatcgatgaaacaaaacaattaataaaggattatgaaaaccagtattcagaaggattaattacaagaggcgaaaagtacaacaaagtagttgatgcttggtctaaatgtactgacaaagttgcatctgaaatgatgaaaggaatatcagcaactaacaaatctgaaaaaggattagatattaattccgtctttatgatggcagactctggtgcaagaggttccgctgctcaaatgaaacaattagccggtatgagaggtctgatagcaaaaccatcaggtgaaattattgaaatcacaattacatctaactttaaagagggcctaacagccttagaatactttaattctactcatggtg

SEQ ID NO: 254918 - DNA, 703 bp, Unknown
  Bacterial polypeptide expressing nucleotide sequence isolated from the Sargasso Sea
tttgtatggtgaagatggaattgatgtagcaaaaagtgatcatggtgaagcatttaatgttgatagattaattgaatctgaaagtattgttgattctggaaaagccgcaacaaaggacgaaattgcaccaattatcaaaaaatacactagtgaatttaatcctcgtttaacaaacgctgtaagtacttcattagaaaattcaaaattaagtaaacaaggtgttgagaaagtagctaagaaaggattatcgttatacaataatgcaaaggcagaacctggtcaggctgtaggaattgtaactgctcagtctattggtgaacctggaactcagatgactttgagaacattccactttgcaggaattgctgaacgaaacgttaccttgggtcttccaagattaattgaattggtagatgcaagaaagaaacctgtcactccaacaatggatatttacttgtctggtgatgcaaaaacagatcaagcaaaaactgttgaagttgctcgaaatattctacaaaccactgttaatgatctaattcttgatgctgatactgattataaaacaaaaatcacactcaacctaaatgaaagaaaactaactgaccgtggttgtactttagatgatgtcaaggcagcgctagaatctaataaaaaattcaaaatggaagataatggaattaattcagttgttctcaacttagtt

SEQ ID NO: 254919 - DNA, 913 bp, Unknown
  Bacterial polypeptide expressing nucleotide sequence isolated from the Sargasso Sea
catgggatttgtaaaatcaaattatcgtgatggtttatcgactctagaatttttcttccacgctatgggtggtagagaaggtcttgtagatactgctgtaagaacacaacaaagtggatacatgcaacgaagattgatcaacgcattagaacacattaaacttgaatatgatggaacagttagagacccacacggtcacatcattcaatttttgtatggtgaagatggaattgatgtagcaaaaagtgatcatggtgaagcatttaatgttgatagattaattgaatctgaaagtattgttgattctggaaaagccgcaacaaaggacgaaattgcaccaattatcaaaaaatacactagtgaatttaatcctcgtttaacaaacgctgtaagtacttcattagaaaattcaaaattaagtaaacaaggtgttgagaaagtagctaagaaaggattatcgttatacaataatgcaaaggcagaacctggtcaggctgtaggaattgtaactgctcagtctattggtgaacctggaactcagatgactttgagaacattccactttgcaggaattgctgaacgaaacgttaccttgggtcttccaagattaattgaattggtagatgcaagaaagaaacctgtcactccaacaatggatatttacttgtctggtgatgcaaaaacagatcaagcaaaaactgttgaagttgctcgaaatattctacaaaccactgttaatgatctaattcttgatgctgatactgattataaaacaaaaatcacactcaacctaaatgaaagaaaactaactgaccgtggttgtactttagatgatgtcaaggcagcgctagaatctaataaaaaattcaaaatggaagataatggaattaattcagttgttctcaacttagtt

SEQ ID NO: 254920 - DNA, 581 bp, Unknown
  Bacterial polypeptide expressing nucleotide sequence isolated from the Sargasso Sea
tgaaacaggtaagggttatgtttcagctgaggtagcagaagatgaaaacaaagtaattggcgaaataaaattagacgccatgtttagcccagttattaaagcttcttataaaattgaaaatagtagagttggtcaagtaacagattttgataaactaatttttgaagtagaaaccaacggtgcaattacccctgatgatgcaatcgcattagcagctagaataatgcaagatcaacttcaaccatttataaattttgatgaacctgaagttctgcctgatcaatcacaagtagaatctttgtcttttaattctaatcttcttaaaaaagttgaagaactagaactatcggttagatcagctaactgtcttaaaaacgataatattatatacattggtgatttagttcaaaaatctgaatcagaaatgttaagaacacctaattttggtagaaaatcattaaacgaaattaaggaagttcttcaacaaatggaacttaaccttggaatgtcagtacccgattggcctccagaaaatattgatgaattagcaaaaaaatatgaggatccttttaataaataat

SEQ ID NO: 254921 - DNA, 734 bp, Unknown
  Bacterial polypeptide expressing nucleotide sequence isolated from the Sargasso Sea
aactggtcttaaaaaaatgtacataaaagcaagtggacctggagaaattagagctggtaattttgaaactgactcagaaactgaaatcatgaatagggatcaactaattatgacacttgatacaaacgcagatattgaaattgaagctaatatagaaacaggtaaaggatatgtgtctgctgaagttgctgaagatgaaaataaaataattggtgaaataaaactagatgctatgtttagtcctgttgtaaaagcaacatataaaatagaaaatagcagagtcggtcaagttactgattatgataaacttatatttgaagtagaaaccaatggtgttatttcaccagatgatgctatcgcacttgcctcaagaatattacaagatcagttacagccatttattaattttgatgaacctgaagttcaacaagatcaagggtcagcagaacagctttcttttaattcaaatcttcttaagaaagttgaggagcttgaactttctgttagatctgcaaattgtcttaaaaatgataatattatttatattggtgatttagttcaaaaatctgagtctgaaatgttaagaacacctaattttggaagaaagtctctaaacgaaattaaagaagttcttcagcaaatggaactaaatttaggaatgtcagttccagattggcctccagaaaatattgatgagttggcaaaaaaatatgaagatccttttaataaataat

SEQ ID NO: 254922 - DNA, 515 bp, Unknown
  Bacterial polypeptide expressing nucleotide sequence isolated from the Sargasso Sea
actgatagctattgattctttatatagtccagttaaaaaagtttcatatactattagtacagcaagagaaggaaaagctttagattatgataaattaactatggaagttgaaacaaatggatctatttcagcggaagatgccgttgcatactctgctagaatttttcaagatcaattaaatatgtttgttaattttgatgaaccagttgaagttccggttaaagaagtatcaacagaaccagagtttaataaaaacttattaaaaaaagttgatgaattagaattgtctgttcgatctatgaattgccttaaaaatgataatattatttatatcggtgatttagttcaaaaatctgagggtgaaatgcttagaacacctaactttggaagaaaatctttaaatgaaataaaagaagttttaacaagtatgtctttatatcttggcatggagatacctaattggccaccagaaaatatagcagaaatgtctaaaaaattagaggaacaaatttaaa

SEQ ID NO: 254923 - DNA, 650 bp, Unknown
  Bacterial polypeptide expressing nucleotide sequence isolated from the Sargasso Sea
tatagaaattttgaatcctgatctagtaatttgtaatttagatgaaaatacaaattttcatatggaaatgaccgtaggaaatggtaagggttatgtttcagcagattttaataaacccgaagaacctcctttaggattaatagcaatagactcactctttagtcccgttaaaaaagtttcttattcggtaagtacagccagagaaggaaaagcccttgattatgacaaacttacaatggaaatagaaaccaatggttctatatctgcagaagatgccgttgcttattctgctagaatttttcaagaccagttaggaatgtttgttaattttgatgaaccacaagaaactattgttagagaaaaaccatctgaacctgaatttaataaaaatcttttgagaaaagtagatgaacttgagctttcagttagatctatgaactgtcttaaaaatgataacattatttatataggtgatcttgttcaaaaatctgagggagaaatgcttagaacaccaaactttggaagaaaatcgttaaatgaaattaaagaagttttaaatacaatgtctttatatcttggaatggagattccaaactggccaccagacaacattgcagaattatctaaaaaactagaagaagccatataat

SEQ ID NO: 254924 - DNA, 646 bp, Unknown
  Bacterial polypeptide expressing nucleotide sequence isolated from the Sargasso Sea
gaaattcttaacccagatttagtaatatgtaacctggatgaaaatacaaattttcatatggaaatgacagtaagtaatggtaaaggctatgtttcagctgatatgaacaaacctgaagagccaccattaggtttaataccaattgactcattatttagcccagttaagaaggtttcatattcaattagtaccgcaagagagggtaaagctctagactacgacaaattaacaatggaagtagagacaaatggatcaatatcagcagaagacgctgtagcgtattctgcaagaatattccaagaccaactcggcatgtttgttaattttgatgagccgcaagaagttattgttagagagcaacctacagagccagaattcaacaaaaatttattaaggaaagtagatgaacttgaactttctgttagatcaatgaattgtctaaaaaatgataatataatttacattggtgacttagttcaaaaatctgaaggagaaatgttgagaactccaaacttcggcagaaaatctctcaatgaaattaaagaggttttaacaggaatgtctctctatttagggatggaaataccaaattggcctccagataatattgcagaattatctaaaaaacttgaggaagctatctaat

SEQ ID NO: 254925 - DNA, 368 bp, Unknown
  Bacterial polypeptide expressing nucleotide sequence isolated from the Sargasso Sea
atattctgcaagaatttttcaggatcaattaggaatgtttgttaattttgatgaaccccaagaagtaatagttagagatgcgccaactgaaccagagttcaacaaaaatttattgagaaaagttgatgaattggaactatctgtcagatcaatgaactgtttaaaaaatgataatattatttatataggtgatttagttcaaaaatctgaaggtgaaatgttacgaacaccaaactttggaagaaaatcattaaatgaaataaaagaagtattaactggaatgtcattgtatttaggaatggaaattcctaactggccgcctgaaaatattgctgaattatcaaaaaaactagaagaagcgatataat

SEQ ID NO: 254926 - DNA, 874 bp, Unknown
  Bacterial polypeptide expressing nucleotide sequence isolated from the Sargasso Sea
aaagaagatggctttagagctattcaaaccttttgtttatgggaagcttgaacaaagagagcttgctacaactataaaaggagctaagaaattagtagaaagagaaacaccagaggtatgggaagtgctagaagaagtcataagagaacacccagttttattaaatagagctccaactcttcataggcttggcttgcaagcatttgaaccaaaattaattgaaggtaaggcaattcagttacatccattagtttgcgttgctttcaatgccgactttgatggtgaccaaatggcagttcatgtgccacttacattagaagctcagctagaagcaagggcattaatgatgtcaactaataacatactttcaccagctgacgggtctccaatcataaatccaactcaagatattgtattaggcctatattatatgactcgagacaatgcaaatgcctcaggagctggaagagtttttagtaattctgatgaagttttaagggcgtatgagacagaaagtttagaaatccattctcctataaaagtaagaattgatcatgggaatggtgaaagtacactagaagaaacaactgtcggcaggatattaatatggagaatcacaccaaaagaggttggttttgagaacatcaatgatgttttaaataaaaaatcagtctcaaagcttgttgatatctcatatagaaaggcgggactaaagaaaactgttatttttgctgatcaacttatgtatttaggttttgatttttctacaaggtcaggttcttctatcggagttaatgactttgttattcctaaagaaaaagctcaaattattgattcatcagagaaggaagtaaaagcaatagaaaaacaattg

SEQ ID NO: 254927 - DNA, 805 bp, Unknown
  Bacterial polypeptide expressing nucleotide sequence isolated from the Sargasso Sea
cacaattaaacaagccaaaaaactagttgaaaaggaaactaatgcagtttgggatgcgcttgaactaattgtaagagaacatccagttatacttaatagagctccaacacttcatagacttggtgttcaggcatttgaaccaaaattaattgaaggtgatgctatagaattacatccattaacttgcgctgcttttaatgcagattttgatggtgaccaaatggctgtccatgttcctttaagtttagaagctcagttagaagctagaatattaatgctttctacaaataatattctttcaccatctaatggtaagccaattattgtaccaagtcaggatatgattttaggtatttattatctttctcaagaaccttttagtgacaaaccagttggatattttacaaacgctgatcaaattgattacgctttatcatcaggtgaaataaaagttcacagcactattatatctagaattgaaacaattgatgaaaatggaaataaaaaatatgaaaaatatacatcaacagcaggtagatttttattggccgacttgttacctaaaaatagtaatattaaattttctctagtagatagacttttgccaaaaaaagtagtttctgagattatcgatattgtatttagattttgtggtcaaaaaaatacagttatattctgtgataaacttaaagacttaggatttaaacacgcgttcaaagctggaatttcttttggcaaagatgatcttgtaatacctcaaaacaaaactcaactaattgacgatactaaaaaaattgatcgctga

SEQ ID NO: 254928 - DNA, 771 bp, Unknown
  Bacterial polypeptide expressing nucleotide sequence isolated from the Sargasso Sea
atggaattaattaaaccaagtaaaatggatgtaaatgtccagaatgatactaataaaaaaggtgtattaatagcagaacctttagaaagaggctttggacttacactaggtaatgcaattagaagagtattactttcatctcttcaaggagcggcaataacttctgtaaaaataaaaggagttgtgcacgaattttcaacaatacaaggtgtaaaggaagatttaactgacatattacttaatcttaaatctgttgcagttaaagtacactcaccagggttaaaaaaaatgtatataaaatcatctggttcgggagaaataagagcaggaaattttgaaactgattctgaaactgaaattatgaaccctgatcaattaataatgacccttgactcaaatgcagatattgaaatcgaagcaaatatagaaacaggtaaaggttatgtatctgctgaagtagcagaagatgaaaacaaggtaataggagagattaagcttgatgcaatgtttagtcctgtaattagagcttcatataaagttgaaaatagtagagtgggacaagtcacagattatgataagttaatttttgatgtcgaaacaaatggagttataactccagatgatgcaattgctcttgcttcaagaatattacaagatcaattacagccatttatcaattttgatgaaccagaaatccaaaacgatcaatcttcagcagaaaaactctcatttaattcaaatcttctgaaaaaagttgaagaattagaatta

SEQ ID NO: 254929 - DNA, 220 bp, Unknown
  Bacterial polypeptide expressing nucleotide sequence isolated from the Sargasso Sea
tatgaattgtcttcgtaacgataatataatctatataggtgatcttgttcaaaagagtgaaattgaaatgctgagaacaccaaactttggtagaaagtcacttaacgaaatcaaagaagttttgggaaccatgtctctatatctaggcatggaagttccaaattggcctcctgagaatattgaggaacttgcaagaaagattgaggatccatataactaa

SEQ ID NO: 254930 - DNA, 849 bp, Unknown
  Bacterial polypeptide expressing nucleotide sequence isolated from the Sargasso Sea
gactttgagaacattccactttgcaggaattgcagaacgaaacgttaccttaggtcttccaagattaattgaattagtagatgccagaaagaaaccagtaactcctacgatggatatctatctattaggtgatgcaaaaacagatcaaacaaaaactgtacaaattgcacgaaatatcttacaaactacaataaatgatcttattcttgacgctgataccgattataaaacaaaaattaccctaaatcttaatgaacgtaaattatctgatcgtggatgtactatagacaatgttacctctgcgttagaatcaaataagaaattcaaaatggaaaccatgggaaattctgtagtccttaatttagttgatgaagaagccgatgcccctgctgtaattacaattagaaataaagttctaaaaaccactgtgaaaggtgtcccggacatagcacgggtaacaattgttaagaaaggtgatgaatatgtcatacaaacaactggttctaatctttcaaaagtcttggaagttgaaggaattgataaaaataatgttagaacaaacaacgtatctgaaattgcagaaacactaggaatcgaggcagcaagaaatgctctaatcaatgaactaagtaccactcttgaagatgcaggtcttgaagttgaccaaagataccttatgctagtagctgacttaatgtgtcatcgtggatacatgcaacaaattggtcgtcatggaattgcaggtactaaggatagtgtacttgcacgtgccgcatttgagattaccgtcccaacaattgctggagcagcaagaactggtgagacagaacaattaagaggaattacaga

SEQ ID NO: 254931 - DNA, 355 bp, Unknown
  Bacterial polypeptide expressing nucleotide sequence isolated from the Sargasso Sea
tatgaccgccgtgaacgactttctcacgccccgctcgatcgcggtcaacgcgatcaaccagactcacgctaaagtggttctggaaccgctggagcgtggttttgggcacaccctggggactgcgctgcgccgcatcttgatctccagcatgcctggctgtgcgatcaccgaggtggaaatcgacggtgtgcagcatgaatactcttccattgaaggggtgcaagaagatgtgatcaatattcttcttaacctcaaaggcgttgccttaaaatggaagatagcgaagaaacgacccttgagctggtcaagaaaggtcctggtgtcgttaccgcgaatgatatccagcgtgatcaca

SEQ ID NO: 254932 - DNA, 531 bp, Unknown
  Bacterial polypeptide expressing nucleotide sequence isolated from the Sargasso Sea
aagaaccgcctcttggattaattgcaatagactcactttttagccctgtaaaaaaagtttcttatgctgttagcacagcaagagaaggtaaggcacttgattatgataaattaactatggaagttgaaactaacggatctatttcagcagaagatgcggtggcatactcagcaagaatatttcaagatcaattaggcatgtttgttaattttgatgagccacaagaagtaatagttagagaacaaccttcagaacctgagtttaataaaaatttattgagaaaagttgatgaattagagctttcagtaagatcaatgaattgtctaaaaaatgataatataatctacattggtgaccttgttcaaaaatctgaaggagagatgttaagaacaccaaattttggtagaaagtcattaaacgaaattaaagaagttttaacaggaatgtctttatatttaggaatggagatacctaattggcctccagataatatcgcagaattatcaaaaaaattagaagaagcaatttaat

SEQ ID NO: 254933 - DNA, 583 bp, Unknown
  Bacterial polypeptide expressing nucleotide sequence isolated from the Sargasso Sea
aatgaatgttaatacaggtaaaggttatgtgcctgcagatcttaataagccagaagagccaccattaggattaattgctattgattcactttacagtcctgtaaaaaaagtttcattttctgtaagtactgctagagaaggaaaagcacttgattatgacaaactaattatggaagtcgaaactaacggatctatttcagctgaggatgctgttgcttattcagcaagaatttttcaagatcaactaaaaatgtttataaatttcgatgaaccagttgaagctccagtaaaagaagtttctacagaacctgagttcaataaaaatttattaagaaaagtagatgagctagaactatctgttagatctatgaattgtttaaaaaatgataatattatctacattggagatttggttcaaaaatctgaaggtgaaatgctaaggacacctaattttggaagaaaatctttaaatgaaattaaagaggttctaactggtatgtcattatatttagggatggaaatacctaattggccaccagacaatattgcagaaatgtctaaaaaattagaggaagctatctaa

SEQ ID NO: 254934 - DNA, 830 bp, Unknown
  Bacterial polypeptide expressing nucleotide sequence isolated from the Sargasso Sea
aatggcacttgaattattcaaacccttcttgtacgcaagattaaataaacttggattagcgtcaacaattaaacaagcaaaaaaactagttgaaagagaaagaaacgaggtatgggatgctttagagttaattgtaagggaacatcctgtaatattaaatagagcaccaacactacacagattaggagttcaagcatttgaacctaaattaatagagggtaatgcaattgaacttcatccattaacttgtgcagcattcaacgcggattttgatggagatcaaatggctgttcatgtccctttaagtttggaggctcaattggaagctagagtattaatgatgtcaacaaataatattttaagtccatctaatggtaaacccataattgttccaagtcaggatatgatccttggtatttactatctatcacaaccacctgtccaaacagataaaatagatggatattttgtaaatacttcagaaatagaacatgctttagaaacaggacaaataaaagtacattcaaggattgtatcaagatttgaaacattagacgaaaaaggtaattcaaaatttgagaaacatataagcacagcaggaagatttttactttctaatttaattccgaaaaatattaataataaattttctttagttgatagattgttaccaaaaaaaatagtttcagaagttattgatcatgtgtttagattttcaggccaaaaaaatacagttatattttgtgataaattaaaagatatcggttttaaacatgcttttaagggggggatttcatttggaaaagatgacttggttaataccggataat

SEQ ID NO: 254935 - DNA, 367 bp, Unknown
  Bacterial polypeptide expressing nucleotide sequence isolated from the Sargasso Sea
ctgcaataccagattgaccgcatcgagcatcaggtggaagaggatcgctcccagagtggggtgttcctcatcggtccccttgagcggggtcaggcaaccaccctgggcaacgccctgcgacgtgtcctgatgggtggcctcgaaggcagtgccgtcaccgccattcgaatcgctggtgtcaaccacgagtacgccaccgtccccggtgtgcgtgaggacgtcctcgacatcctgctgaattgcaaggagctctccgtcaacagccggtcgcctgagctggagatcggtcgtcttgtggtggctggtcccgctgaagtgaccgccaacgatctgcagttctcctccccaggtggatgtggtggacggc

SEQ ID NO: 254936 - DNA, 261 bp, Unknown
  Bacterial polypeptide expressing nucleotide sequence isolated from the Sargasso Sea
taaagaaagttgaagagcttgaactgtctgttagatcagctaactgtcttaaaaatgataatattatttatattggagatctagttcaaaaatctgagtcagaaatgcttagaacaccaaattttggaagaaaatctcttaatgaaattaaagaagttttgcagcaaatggaacttaatttaggaatgtctgttccagattggccacctgaaaatattgatgagctggcaaaaaaatatgaggacccttttaataaataaa

SEQ ID NO: 254937 - DNA, 163 bp, Unknown
  Bacterial polypeptide expressing nucleotide sequence isolated from the Sargasso Sea
gaaaggtaaacaaggaagatttagacaaaatttattacggaagagagtagattattctggaagatctgtaatagttgttgggcccaatttggaacttcatcaatgtgggtatccaaaaaaaatggcactggaaactttcaaaccttttatttccacaacttga

SEQ ID NO: 254938 - DNA, 967 bp, Unknown
  Bacterial polypeptide expressing nucleotide sequence isolated from the Sargasso Sea
tgattctggaaaagccgcaacaaaggacgaaattgcaccaattatcaaaaaatacactagtgaatttaatcctcgtttaacaaacgctgtaagtacttcattagaaaattcaaaattaagtaaacaaggtgttgagaaagtagctaagaaaggattatcgttatataataatgcaaaggcagaacctggtcaggctgtaggaattgtaactgctcagtctattggtgaacctggaactcagatgactttgagaacattccactttgcaggaattgctgaacgaaacgttaccttgggtcttccaagattaattgaattggtagatgcaagaaagaaacctgtcactccaacaatggatatttacttgtctggtgatgcaaaaacagatcaagcaaaaactgttgaagttgctcgaaatattctacaaaccactgttaatgatctaattcttgatgctgatactgattataaaacaaaaatcacactcaacctaaatgaaagaaaactaactgaccgtggttgtactttagatgatgtcaaagctgcactagaatctaataagaaattcaaaatggaagataatggaattaattcagttgttctcaacttagttgatgaagaagctgatgctcctgctgtcattgtagtaagaaacaaggtcttaaaaacaaccgtaaagggtgtacctgatattgctcgagttacaattgtcaaaaagaatgatgaatatgttattcaaaccaccggttctaatctctctaaagtattggaagttgaaggaattgataaaaataatgttagaacaaacaatgtttctgaaattgctgaaacccttggaatagaggctgcaagaaatgctttgattaatgaattaagtaatacactagaggatcaaggtctggaagttgaccaaagatatctaatgttggtatctgatttaatgtgtcatcgtggatacatgcaacca

SEQ ID NO: 254939 - DNA, 833 bp, Unknown
  Bacterial polypeptide expressing nucleotide sequence isolated from the Sargasso Sea
gctgaacctgctgagcagggagaaaaacgaagacttcgatgcgatccgtatcggcctggcctctccggagatgattcgatcctggtcctttggcgaggtcaagaaaccggaaacgatcaactatcgaactttcaagccggagcgtgacgggcttttctgcgccaagatctttggcccggtgaaggactacgagtgcctctgcggcaagtacaagcgcctcaagcatcgcggtgtgatttgcgagaagtgtggtgtcgaagtcgctttggccaaggtgcgccgtgagcgcatgggccacatcgagcttgcgagcccggtggcacacatctggttcttgaagtcattgccttcccgaatcggcctgctgctggatatgacgctgcgcgatatcgagcgcatcctctacttcgaagcctacgtggtgaccgaccccggcctgtctgcgctggagcacggtcagctgctcaatgacgagcaatactacgaggcgatggaagagtacggtgatgagttcaccgccaagatgggtgctgaagccattcaggatctcatgatggagatcaacctcaagggtgagatcgagcagctgcgtgaggaaatcccgcagacgaactcggaaaccaagatcaagaagctgtccaagcggctgaagctgatggaggctttcgataagtccggcaacaagcctgagtggatgattctcaacgcgctgccggtgctgccgccagatctgcgcccgctagtgccactcgacggtggccgttttgcgacgtctgatctcaacgacctgtatcgacgtgtgatccaccgcaacaaccgtttgaagcggctgc

SEQ ID NO: 254940 - DNA, 825 bp, Unknown
  Bacterial polypeptide expressing nucleotide sequence isolated from the Sargasso Sea
tctcctttagagccaggattcggacatacgctcggtaactccctgcgccgaacactcctttcatcgataccaggtgctgccatcactcaagtcaattttgatgatgcaatacatgaatttgatgtaatagaaggagtttatgaagacgtcacggatatcctgcttaacctcaaagatgtcgttgtgcgccttgatagcgatgagcctgctgttcttcgtctagatgcacaaggcccaggtgaagttacagccggacaatttagccagacagcagacgtggaagttctctcaggagatttagtaattgcgacgcttagtcaaaatggccgaatcggtatggaagtaactatagaaaaaggccgtggctatctatccgctgaagggaataaggactcaactaccgtagggcaaattccagtagattccattttctcaccggttcggagagtgagttttgaagttgagccgactcgcgtagagcaatcgaccgattttgatcgactaactcttgaaatagagacagacggttcaatgtctcctagggaagcccttgcgtcagcaggagggacactccggaacctcattcagctagttgaagaaatgagtgaagaaccacagagtctcgaactaaccgaggtagttactggcacagccgggtctcctgatctagaacttggtatcgaagatctagaactctctgaacgaccaaacaattgtcttaagagagctcaaattcacactatcggtgagcttattctgaaatcagaagctgacctactatcaatcacaaacttggacaaaagtctcttgatgaaatcattgaga

SEQ ID NO: 254941 - DNA, 406 bp, Unknown
  Bacterial polypeptide expressing nucleotide sequence isolated from the Sargasso Sea
ctgacgggtcagttaaacctggaggatgcacttgcattttctgccagaattttaattgatcaacttaatccttttattaattttgatgaaccagaagaagagatcatagaagaaaacgaagatgaattagagtttaatgcatctcttcttaggaaagttgatgaactcgaactatctgttagatctgcaaactgcttaaaaaatgataatattgtatatattggtgatttaattcttaagtctgaaaatgaaatgctaagaactccaaattttggaagaaaatcactcaatgaaataaaagaggtattaattgaaatgaatttatctcttggaatggatataccaaattggccgcctgaaaatattgaagaattagcaagaaagcatgctgcagataaattttagt

SEQ ID NO: 254942 - DNA, 449 bp, Unknown
  Bacterial polypeptide expressing nucleotide sequence isolated from the Sargasso Sea
tatggtaaaaaataatgaaataattactcaaaagaaatttaataaaatatctataggtcttgcttctcctgaagtaatcttatctaaatcattaggagaagttttaaaaccagaaacaattaattacagaactcataaaccagagagagatggtttgttttgtgaaagaatttttggtcctgtaaaagattatgaatgcgcttgtgggaaatataaaagaataagatacaaaggaattgtttgtgatagatgtggcgtagaagtaactgaaaaaaaagtaagaagagatagagttggacatattagtttagttgttccagttgctcatatatggtattttaggtctttgccaaataaaatagggtacttactaggactaccttccaaaaagttggatatgataatctattatgaaagatatgttgtaattcagcctggattagcaaaaa

SEQ ID NO: 254943 - DNA, 313 bp, Unknown
  Bacterial polypeptide expressing nucleotide sequence isolated from the Sargasso Sea
aatggctagaatcaatgaaatagttacacaaaaaaaatttaataaaattgttataggactctcttctcctgaggttattttaaataattcaagaggagaagttttaaaaccagaaacaataaattatagaacgcataaacctgagcgtgatggtttattctgtgagagaatttttggtcccgtaaaggattacgaatgtgcttgtggaaaatataaaaggattagatataaaggaatagtgtgtgataggtgtggagttgaggttactgaaaaaaaaggtaagagagatagggttggacacattaacttagta

SEQ ID NO: 254944 - DNA, 865 bp, Unknown
  Bacterial polypeptide expressing nucleotide sequence isolated from the Sargasso Sea
gtgtctgtggtgcaggcgcccaccgtggaggacgacgacgatgccgacgcttcgcccgtggtgcgctatgtgaaccacatcatccagacggcggtgcgcgagggggcctccgacattcacatcgagccctcagacggcgatccccgggtgcgctttcgaatcgacggcgtgttgcatgaggccatgagcccgccgcgacgcatgcaggcgtcaatcaccagccggctcaagatcatggcctcgctggacatcgccgaacggcgattgcctcaggacggccgcattcgcgcgtcggtactcgggcgcacgctcgacctgcgtgtttccacctgccccacaccgcatggcgaaaagaccgtcatgcggatccttgatgcccggaccatccgtgtgccacttgatgagctgggcttctcccagtcggtgctccagtcttggcgtcgccagatggcgcggccacacggcatcgtgctagtcaccggccccaccggttcgggcaagaccacaacgctctacgcatcgctccaggagctggatctcggtcgcctgaacgtgtccacggtggaggacccggtggagtaccacctcggcggcatcacgcagattcagacgcacgaacgcatcgggctctcgttcgccgcgtcactgcgaacgctgctgcgtcaggaccccgacgtggtcatggtgggcgagattcgcgacaaagagacggcgaccatcgccacgcaggcggcgctcaccgggcatctcgtgctgtccacgctgcataccaatgatgcgccgtcatcagtcacgcgactgatcaacatcggcatcgagccttatctcgtgagcggagcagtcaacggggtgctcgcgcagcggc

SEQ ID NO: 254945 - DNA, 640 bp, Unknown
  Bacterial polypeptide expressing nucleotide sequence isolated from the Sargasso Sea
ctttcgaaaagccgaaatattaaatccagatcttactttggctacgttgcaaaaaggggcaactgttagtatgactatgtactcaaggtttaataagggttatgttacttcagaggataatcaagaggtagaattaccagttggcactatttttatagactcaaatcactcacctgttagccgaataaactacgaagttgaaaattcaagagttgatcaaaaaacagactttgatcgcttaaatttcgaattatggacaaacggttctgtcaagccggctgatagtctagcctatgctgcaaaaataataaaagaacatatggatgtatttattaactttgacgaaagcagtataaaagatgagccagaagatgaagtggaagaagaacagttgaatgaaaatttgtatcgaagcgtcagtgaacttgaactttcagtacgttctataaactgtctacaaaacgcaaagatagaaactataggagatcttgttaggaaaactgaacaggaaatgcttaaaacgaagaattttggcagaaaatctcttaatgaaattaaggtaattctaacggatatgggattagctctaggtactagtttggaaaattttgatccgacaaacaacccacacgaaaaataa

SEQ ID NO: 254946 - DNA, 391 bp, Unknown
  Bacterial polypeptide expressing nucleotide sequence isolated from the Sargasso Sea
tgatgctgctgctttagccgcaaggatccttcaagaccaacttaagccatttatcaattttgaagaacctacagaagacgaaagaaaaaaattacaatcttcaaacgaacctcagtttaataagaacttgctgaaaaaagttgatgaacttgaactttccgtaagatcagctaattgtttaaaaaatgataatatattttatattggtgacttagttcaaaaaactgaaggagaaatgttaagaacacctaattttggaagaaaatcactagatgagataaaagaagtgctatcctcaatgagtctatctatgggaatggatttacctggctggccaccagaaaatatagaagagttatcaaaaaaatacgaagatccttttaaagtataa

SEQ ID NO: 254947 - DNA, 616 bp, Unknown
  Bacterial polypeptide expressing nucleotide sequence isolated from the Sargasso Sea
atgaaaaatttagaaacttgggtaaaatttgatcagaaagatttaacatatggtgtttttgaaatgtcaccagttgaaagaggaatggggttaacgataggtaattcgttaagacgagtattgttatcttcattgcaaggtgttgctcctattttaattaaaattgagggtgcagagcatgagtttgatactatagaaggaatacaagaagatattcttgatattatatttaatttaaaaggtgttgtttttaatttatttgaaggtgaagataaacgagaagtttcattggatgtatctggtgaaaaagatgtgaaggcatctgatttagtgttgccttctgatgttcaaattattaatcctgatcagcatttattttcaataacaaataaaaagacaagtttccaaatgacaatgacaattgaaagaaatattggataccgtgcatctgaagatcaaaaacgtgaaggatatgatattaatacaatctttttagattcttctttttctccaattgaccgtgttaatcataaaatcgaggatgttagagttggccaagagttaaattttgataagcttattttggaagtttggacaaatggtagcattactactg

SEQ ID NO: 254948 - DNA, 202 bp, Unknown
  Bacterial polypeptide expressing nucleotide sequence isolated from the Sargasso Sea
aatgatgaaataatctatattggagatttagttcaaaaaacagaatctgaaatgttaagaacccctaacttcggaagaaaatccttaaatgaaattaaagaaatactttcaacgatgaatctagaacttggaatgaaaattgagggttggcctccagaaaatatcgaagagatccgaagaaagcttgatgacccttattaat

SEQ ID NO: 254949 - DNA, 605 bp, Unknown
  Bacterial polypeptide expressing nucleotide sequence isolated from the Sargasso Sea
aaaaacaaactttcatatggaaatgactgtaggtaatggaaaaggttatatttctgcagaaatgaataaacccgaagagccacctttaggattaataccaatagactcattatttagtcccgttaaaaaagtttcttactcagtcagcacagccagagaaggtaaggctctagattatgacaaactaactatggaagtagaaactaatggttccatatcagccgaagatgccgttgcttattctgcaagaattttccaagatcaattagctatgtttgttaattttgatgaacctcaagaagtagtaataagagaaaaaccatctgaaccagaatttaatagaaatttactaagaaaagttgatgaacttgaattgtcagtaagatcaatgaactgcttaaaaaacgataatattatttatataggtgatttggttcaaaaatcagaaggcgaaatgttaagaactccaaattttggtagaaaatctttaaatgaaataaaagaagttttaaatggaatgtctttatatttaggtatggagataccgaattggccaccagataatatagctgaactatctaaaaaattagaagaagcaatttaat

SEQ ID NO: 254950 - DNA, 409 bp, Unknown
  Bacterial polypeptide expressing nucleotide sequence isolated from the Sargasso Sea
gtccaaacaaatggatcaatatcagcagaagatgcagtagcttattcagcaagaatatttcaagatcaattgggaatgtttgttaactttgatgaacctcaagaggttattataagagaaaaaccaagtgaaccagagtttaataaaaatttactaagaaaagtagatgaattagaactttctgtaagatcaatgaactgcttaaaaaatgataatattatttatattggagatttggttcaaaaatctgaaggggagatgctcagaacaccaaattttggaagaaaatcattaaacgagataaaagaagttcttacaggaatgtctttatatttaggaatggaaattccaaattggccacctgaaaatatcgtagaattatcaaaaaaactagaagaagcaatataat

SEQ ID NO: 254951 - DNA, 900 bp, Unknown
  Bacterial polypeptide expressing nucleotide sequence isolated from the Sargasso Sea
gcagtattgggatgcattagaattgattgtaagagaacacccagtaatattaaatagggcgcctacactacacagacttggtgttcaagcatttgagcccaaacttatagaaggtgatgctattgaattacatcccttaacatgcgcagcatttaacgctgattttgatggtgatcaaatggctgttcacataccgttaagtttagaagcacaattagaagctaggattttaatgatgtcaacaaacaatattttaagtccatcaaatggaaaaccaattattgttcctagtcaagatatgattttaggaatttattatttgtctcaaccaccataccagactaaaaaagtagaaggttattttgtgaataattcagaaattgaacaaggtttagagtcagggagcataaatgtacactctagaattatatcaagattccaaacagctgataaagatggtaaattgataagtgaaaaacatataagtacagtaggaagatttttacttgctaatttattacctaaacataaagatattaaattttctttaattgataggttgttgccaaagaaaacagtttcggaaataatagatatggttttcagatttacaggccaaaaaagcactgtgatattctgtgataaattaaaagacttaggttttaaacatgcttttaaagcaggtatttcatttggaaaagatgatctaattataccagaaaataaagaacaattaattgatgaaacaaaaaaattaattaaggattatgaaaatcaatatgcagaaggtttaataacaagaggtgaaaaatacaataaagttgttgacgcgtggtcaaaatgtacagatagagtcgctggagaaatgatgaagcgtatatcagcaaccgaaacaacaaa

SEQ ID NO: 254952 - DNA, 722 bp, Unknown
  Bacterial polypeptide expressing nucleotide sequence isolated from the Sargasso Sea
ttcaaaaaaattaattttagatgcaaaaggacctggtgaaattaaagcttcaaatataactcctgttacagatattgaaatattaaatcctgatttagtaatatgtaatttagatgaaaacacaaatttccatatggaaatggttattggatctggcaaaggttatgtttcagctgatttaaataaacctgaagaacctccattaggtttaatacctatagattcactatttagtccagttaaaaaggtatcatactcagttagtactgcgagggaaggaaaagcattagattatgataaattaacgatggaggtagagactaatggatcaatatccgctgaagatgcagttgcttactcggcaagaattttccaagatcaacttggcatgtttgtaaattttgatgagccacaagaggtaattgttagagacaaaccatccgagcctgaatttaataaaaacttactcagaaaagtcgacgaacttgagttatctgttagatcaatgaattgtctcaaaaatgataatataatttatataggtgatttggttcaaaaatcggagggtgaaatgctaagaactcctaattttggtcggaaatctttaaatgagattaaagaggttttaacagggatgtcattatatttaggcatggaaatacctaattggcccccagataatattgctgaattatcaaaaaaacttgaagaaagcatttagt

SEQ ID NO: 254953 - DNA, 609 bp, Unknown
  Bacterial polypeptide expressing nucleotide sequence isolated from the Sargasso Sea
acgaaaatactattttccacatggagatgaatgtcggtactggaaaaggttatgtatcggctgatttaaataaacccgatgaaccaccattaggattaattgctatagactcattatttagccctgtaaaaaaagtatcttattcaataagtacagcaagggaaggtaaagccctagactacgataaacttactatggaagttgaaacaaatggatcaatttcagccgaagatgccgttgcttatgctgcacgaatttttcaagatcaattaggtatgtttgtaaatttcgatgaaccaaaagaagttataacgaaagaacaaccaacagaacctgaatttaataaaaatcttttaagaaaggttgatgagctggaactttctgtgaggtcaatgaattgtcttaaaaatgataatataatctatataggcgatttagttcaaaagtcagaaggtgaaatgctaagaacaccaaactttggtagaaaatctttaaatgaaattaaagaggtattaactggaatgtcattatatttgggtatggaaataccaaattggccaccagataatattgctgaattgtctaaaaagttggaagaagccatctaat

SEQ ID NO: 254954 - DNA, 924 bp, Unknown
  Bacterial polypeptide expressing nucleotide sequence isolated from the Sargasso Sea
tttcagcagaactgtcatatctccagatcctaacttagacttatctgaagttggtgttccagaaaccgttgcaaaaaaactaacaattcctgaaattgtaactgattggaatattgagaaattaaaaaaattagtaattaatggaccttctacattccctggtgtaaactacatcactcgtcctgacggtgtaaaaattagattagactttgttgaggatcgttctctaatagctgactcactagaaattggattcttagttgaaagacatctaatggatggtgatattgtattatttaacagacaaccatcacttcatcaaatgtcaatcatggctcattatgtaagggtattacctggaaaaactttcagattacatccatctgtctgtccaccttacaatgctgactttgatggtgacgaaatgaatcttcatgtaccacaaagtgaagaagcacgttcagaagcaattctcttaatgagggtccaagatcaattaatctctccaagatttggtggtccaattattggtggtcttcgtgatttcattactggtgcatatttacttacaaaagatggaacaactttgtctagccaagaatttgcaaaccttgcaatgttgggtggctatactggacaattacctgaacctgaaaacaaaaaggaaaacctctacagcggaaagcaactcttttctctcttcttacctgaagatttcaattatgttatgacatcaaaatggtctaaaggaacaaaaggacaacaaaaagatgttgtgatcaaaaacggtcaactgattagtggtgtaatagataaatcatcaattggtgctgaagaaccagagagtgtattacacagaatcgcaaaagattatggtaatgaaaaagcaaaagtcttcttaaattctgaactagtcataattaa

SEQ ID NO: 254955 - DNA, 859 bp, Unknown
  Bacterial polypeptide expressing nucleotide sequence isolated from the Sargasso Sea
atagtaagagagcatcctgtaatattaaatagagctccaacactccacagacttggagtacaagcttttgagcctaagttaatagaaggcgatgcgattgaactacatccattaacttgtgctgcctttaatgctgattttgatggtgatcaaatggcagtgcacattccattaagtttagaggcacaacttgaagctcgtgtactaatgatgtcaactaataacatattaagtccatctaatggtaaaccaataatagttccaagccaagacatgatcttaggtatttattatttatcattaccaccctatcaagaaaaaaaagttgagggatattttgttaataatgctgaaattgaacaagcattggagactggtagtattaaaatacactctagaataatatcaaggttcgaaacagttgatgacactggtaagattaaatatgaaaaacacacaagtactgcaggaaggtttttattagcaaatcttttacctaaagataaagatattacttttaacttaattgatagagttttaccgaaaaaaatagtttctgaaataatagatattgtttttaggtttactggtcaaaaaagcacggttatattttgtgacaaattaaaagatctaggttttaaacatgcatttaaagcagggatatcttttggcaaagacgatttaattatacctgatagtaaagagtcattaatcgatgaaacaaaaaaactcataaaagattatgaaaatcaatactcagagggacttataacaagaggagaaaaatataacaaagtagtagatgcttggtcaaaatgcacagataaggtcgcctctgagatgatgaaaggaatttctg

SEQ ID NO: 254956 - DNA, 820 bp, Unknown
  Bacterial polypeptide expressing nucleotide sequence isolated from the Sargasso Sea
cttcatgaattttcatctatcaaaggagtcagggaatatgttacggatatagttttaaacgtaaaaaacttggcaataaaattagattcagacggcccaaaaaaattagtcttagatgccgaaggtccaaaagaagttaaagcgaaagatatttcattagtttctgatattaaaatattaaatcctgatcaaacaatttgtaatttagatgaaaaaactaaatttcatatggaattaattgttaataacggtagaggatatgttttagcgcaacaaaacaaatccgatgacacacctcttggtatgataccgatagattcattatttagcccagtaaaaaaagtttcatttaaaattgacagtacaagagctggttctgctcttgattatgataaattagaaatggaagttgaaactaacggtacagttgctgctgaagatgcaattgcttttgcagcaagaatttttcaggatcaactttcaatgtttgtcaattttgaagatcctaaagaagttccaaaacccacaacttctactgagccagaatttaataaaaatttattaaaaagagttgaagaattagagttatctgtaagatcaatgaattgtttaaagaatgataacataatttatataggtgatctcgttcaaaaaactgaaccagagatgcttagaactccgaattttggaagaaaatcactaaatgaaattaaagaggttttaagttctatgtctctttatttaggtatggaaatccctaattggcctccagataatattgctgaactatcaaaaaaactagaagaaaatacttattaaa

SEQ ID NO: 254957 - DNA, 667 bp, Unknown
  Bacterial polypeptide expressing nucleotide sequence isolated from the Sargasso Sea
atgaaagcaattacatttttaaaaccaaacttagttgatatcgaaatgatatctgactctaaatccaagatagtaattcagcccttggagagaggctttggccatacattgggaaatgcacttagaagagttttattatcatcaatgcctggtagtgctgtaactgaggtctctattgataacatactacatgagtatagtactattgacggtgtacaagaagatgttctagaaataatactcaatatcaaaaaattagctctagttttacatgaaaaagataaaattgaggtcgttcttcgtaaaataggcaaaggccctgtattagcatcagatatagaagaacaccctaaccttgaaattaagaatcctgacttttgcttggctaatattacaaatgataaaactgaattgatagttaatttaactatatctcaaggtaaagggtaccagcctgctaccaagcgtaagtttaatgaactagaggatcttggaattggcaagatgcaagttgatgcatctttcacgccagtagagaaagtgtcttatagtgttgacaatgccagggtaaaacaaaaagcagatttagataaattgataatagagttagagacaaatagtactattaatcctgaagatgcaattagaactgcaggtaaaatttaag

SEQ ID NO: 254958 - DNA, 262 bp, Unknown
  Bacterial polypeptide expressing nucleotide sequence isolated from the Sargasso Sea
actactacttaagaaggtagatgaacttgaactgtcagttcgatctgcaaactgccttaaaaatgataacatcgtctacattggagatctgatccagaagactgaggctgagatgttaagaacaccgaattttggtagaaagtccctcaacgaaataaaagaagtgttatccggtatgggtttacatcttggtatggatgtcgaggattggccgcctgacaatatcgaagaactcgcaaaaaagtttgaagataatttttag

SEQ ID NO: 254959 - DNA, 920 bp, Unknown
  Bacterial polypeptide expressing nucleotide sequence isolated from the Sargasso Sea
tgaacctaaattaattgaaggtaatgctatagaattacatccattaacttgcgcagctttcaatgcagattttgacggtgatcaaatggcagtgcatgtgccattaagtttagaagcgcaattagaagcaagagttttaatgatgtcaacaaataatatattgagtccatctaatggaaagccaattattgtgccaagtcaagatatgattttaggaatttattatctatctcaattgccatatcaaactgataaaattgaaggatattttgttaacacttctgaaatcgaacatgctttagaaattggccaaattaaagttcactctagaattgtatcaagatttgaaactttagatgataaaggcaaagttaaatttgaaaaacacataagcacagctggtcgttttttattagcaaatttaattcctaagaatgaaaataataaattttcattaattgatagattgctacccaaaaaagttgtatctgaaataatagatcacgtatttagattttctggccaaaaaaatacggttattttttgtgataaattaaaagaccttggatttaaacatgcattcaaagcagggatttcatttggcaaggatgatctagttatacctgagaataaacaacaacttatagacgaaacaaaaaaattaatttctgattatgaaaatcaatatgcagaaggattgataaccagaggggaaaaatacaataaagttattgatgcatggtcaaaatgtacagacaaagttgcatctgaaatgatgaaaagaatttcagcaacagaagttaccaaagaagggctgaaaataaactctgttttcatgatggcggatagtggcgcaagaggctcagctgcacaaatgaaacaattggccggaatgagaggtttaatcgcaaaaccttctg

SEQ ID NO: 254960 - DNA, 361 bp, Unknown
  Bacterial polypeptide expressing nucleotide sequence isolated from the Sargasso Sea
atgacaactaaatcatcatcagactttaattctataagaatatctttggcatcacctgaacagattagggcctggtcttatggagaagtaacaaaacctgaaacaataaactacagaacactaagacctgaaaaagatggtttgttttgtgaaaaaatatttggtcctaccaaagattgggaatgttactgcggaaagtataaaaaaataagatacaaaggtgttatttgtgacagatgtggtgttgaagttacaagggctaaggtccgaagagaaagaatggggcacattaagcttgctgctccagttgatcatatttggttttcaaaaagttactccctcaagattaggattactgctt

SEQ ID NO: 254961 - DNA, 340 bp, Unknown
  Bacterial polypeptide expressing nucleotide sequence isolated from the Sargasso Sea
agagattttaagaatatcggcaaccattcttcaacatcaattatcggcttttgctgaacttggaagattagaagaggttattgaagaaaaagaggaagcgaagatagatccaattatgttaagacctgtagacgaactagaactcacagttaggtctgcaaattgcttgaaagctgagaatatacattacataggtgatttagttaccagaatggaatcagatcttttgagaactccaaacttaggaaagaaatccttaaatgaaattaaggaagtcctcttgtccagaggtctttcgttaggtttaattctcgataactggccaccagaaagtaattaa

SEQ ID NO: 254962 - DNA, 375 bp, Unknown
  Bacterial polypeptide expressing nucleotide sequence isolated from the Sargasso Sea
tagtcctagatcttgagacagatggaacaattgatgcaaagcaagcagtaaaatatgcagcaacaatcatgcagcatcagctttcggtttttgtggatgaagagcttgtatcaaggaaagagaaaagaaaagataaatatgattttgacccactcttactgagatctatcgaagagttagagctaacagttagatcaacaaattgtctgaaagcagaaaacatatttttaataggcgatcttattcaacgttcagaaatggatcttttgaaaacacctaatcttggaaaaaaatcattaaatgaaattaaagatgagttggcatcaagaggactctcaatgggaacagtactgaagaattggccaccaatgtaat

SEQ ID NO: 254963 - DNA, 808 bp, Unknown
  Bacterial polypeptide expressing nucleotide sequence isolated from the Sargasso Sea
attcaatgcagattttgatggtgatcaaatggcagtgcacgtgccattaagtttagaggcacaattagaagcaagagttttaatgatgtctacaaacaacattttaagcccatcaaatggaaaaccaataattgttccgagtcaggatatgattttaggaatttactatctctctcaaccgccatatcaaactgacagagtcgagggatattttgtaaatacttcagagatagagcatgctttagaaattggacaaattaaagttcattcaagaatagtttctcgatttgcaactgttgatgaaaaaggtaatactaaatatgaaaaacatattagtactgctggaagatttttattagcaaatttaattccaaaaaatataaataataaatttgctctagttgacagattactaccaaaaaaaatagtttctgaggtcattgaccatgttttcagattttctggtcaaaaaagcacagtaatattttgtgataaattaaaagaccttggtttcaaacatgcttttaaagctggaatatcatttggtaaagacgatctagtaattccagataacaaacaacaactaattgatgagacaaaaaaattaatttcagattatgaaaaccaatacgcagagggattaataactagaggtgaaaaatataataaagttattgatgcttggtcaaaatgtacggataaagttgcatctgaaatgatgaaaagaatttcagctacagagatgacagaagatggtctaaaaattaattcagtatttatgatggcagatagtggcgcaagaggttct

SEQ ID NO: 254964 - DNA, 655 bp, Unknown
  Bacterial polypeptide expressing nucleotide sequence isolated from the Sargasso Sea
ctacaagcttttgaaccgaaattaattgagggtaaagcaatccaattacatcctttagtttgcgttgcattcaacgcagactttgatggcgaccaaatggctgtccatgttccattaacattagaggcgcagctggaagccagagctttaatgatgtcaaccaataatattctatctccagcagacggatctcctattattaacccgactcaggatgtagttcttggactctactacatgacaagagataacgctaatgcatctggcggcggaagaatttttagtaatcctgacgaggttttgagagcatacgaaacagagaatttagaaattcactcacctgttaaagtaagaatcactcacgaaaatggtgagacatcaattgaagaaaccactgttggccgaattttaatatggagaataactcctgctgaagtaggttttaaaaatattaataccgttttaaataagaaaacagtatcaaaattagttgatacttcatacagaaaagcaggactaaagaaaacagtaatatttgcagaccaactaatgtatcttggttttgatttctcaactaggtctggctcttctattggtgttaatgattttgtaatacctcaagaaaaggcaagtattattgaatcatcggaaaaag

SEQ ID NO: 254965 - DNA, 591 bp, Unknown
  Bacterial polypeptide expressing nucleotide sequence isolated from the Sargasso Sea
aatggcaaaaaataacgaattattgacgcagaagaagtttaatactatttcaattggtttatcttcacccgaggttatacttggtaactctagaggtgaggttctaaagcctgaaaccataaactacagaactcataaacctgagagagatgggctgttttgtgagaggatctttggccctgttaaagactacgaatgtgcatgtggtaagtacaaaagaataagatataaaggtattgtttgcgatagatgtggtgttgaggttacagaaaagaaagtcagaagagacagagttggtcatattaatcttgttgtgccagttgcacatatatggtattttaagtctttaccaaataaaataggatatctcctaggattaccttcaaagaaactagatatgatcatttattatgaaagatatgttgttattcagccaggagaagcaaagaatgcagaaggtgaatctgtaaacaagatggactttttaacagaagaagaatatttaacaataatggaatcccttccagctgacaatcagtttttagatgatgctgatgagagaaaattcatagcaaaaatgggtgcagaatg

SEQ ID NO: 254966 - DNA, 730 bp, Unknown
  Bacterial polypeptide expressing nucleotide sequence isolated from the Sargasso Sea
agtatgtgctgcttttaatgctgattttgatggagatcaaatggcagttcatgttcctttgtctctcgaagcacaagttgaggctagagtattaatgttatcaagcaacaatatactctccccatctaatggcagtcctataattgttccatcacaggatattgtgcttggcatttattatatgtctagagaaaaaccaaacgcaaaaggagagggcatgattttttcagatgttgaggaagttcatagagcttatcaagagaagattgttgatctccaagcaaaagtcagagtcagaattaaaattaaagatgatagttcggatgagagtattactaaaattgtagagacaacagcagggaggtcagtattagcagaacttcttcctagagaaattccgttttcttacataaacaaagatttagacaaaaaagcaatatctgagctatttgacgtatcctaccgattagcagggttgaaagcaactgttgttctcgctgatcaaattatgtataccgggtttagatattcaacaagagcaggggtctctattggtgtaaatgatatggttataccaactcaaaaaactaaaatggtccagaatgctgaaaaagaagttaaggaaattgaaaagcaatacaactctggcctactaacatctggtgaaagatacaataaagtcgttgatatttggtctcatactaatgatcaagtatcacaagcaatgata

SEQ ID NO: 254967 - DNA, 847 bp, Unknown
  Bacterial polypeptide expressing nucleotide sequence isolated from the Sargasso Sea
gctgcttttaatgcagattttgatggtgaccaaatggctgtacatatacctcttagtttagaggcgcagcttgaagctagagttctaatgatgtccacaaataatatattaagcccatctaacggtaaacctattattgtaccaagccaggatatgattttaggtatttattatttatctctaccaccatatcaggaaaaaaagattgagggatactttgttaataattcggagattgaacaagcattagagtcaggaagtattaaaatacattctaaaataatatcaagatttgaaactgtggatgaaaacggtaaaataaaatttgaaaaatacacaagtacagctggtagatttttactcgcaaacgttttaccaaaagataaagatattacttttagtttaattgatagagttttaccaaaaaaaattgtgtctgagattattgatatagtatttagattcactggccaaaaaagtacagtaatattctgcgacaaactaaaagacttaggttttaaacatgcttttaaagcaggtatatcgtttggtaaagatgatctaatcatacctaacagtaaagaaactttaatagaggagacaaaaaatttaattaaagattatgaaaatcaatactctgaaggtttaataacaagaggtgaaaaatataacaaagtggttgacgcatggtcaaaatgtactgataaagttgcatctgagatgatgaaagggatctctgctactgaaaaaactgatcaaggacttaacatcaattctgtatttatgatggcagattctggtgctagaggttctgcagctcaaatgaagcaattagctggtatgagag

SEQ ID NO: 254968 - DNA, 790 bp, Unknown
  Bacterial polypeptide expressing nucleotide sequence isolated from the Sargasso Sea
aagagaagaagtttgggatgctttagaattaattgttagagagcatccagttttattaaatagagctccaactctacatagattaggtgttcaggctttcgaaccaaaactcattgagggagatgcaattgaacttcatcccttaacatgtgcagctttcaatgcagattttgatggtgatcaaatggcagtacatataccattgagtctagaagctcaattagaagcaagagttttaatgatgtctacaaacaatatactaagtccatcaaacggaaaaccaattattgttccaagtcaagatatgatacttggtatttattatctttctcaaccaccttatcaaaatgagaaaattgaaggatattttgtaaataattcagaaattgaacacgcattagaagtagggcaaattaaagttcattcaagaatagtttctagatttgaaacactagatcaaaaaggagagttaaaatacgaaaatcatataagtacagctggaagatttttgttagcaaatattttaccaaaaaatttaaataataaatttgctttaatcgatagattattaccaaaaaaaattgtttctgagattattgatcatgtatttagatttagtggtcaaaaagcaacagtaatcttttgtgataaattaaaggatttaggttttaaacacgcttttaaagcaggcatttcttttggaaaagatgatttggtaatccctgaaaataaacaacaacttattgatgaaactaaaaaattaatttctgattatgaaaatcagtatcag

SEQ ID NO: 254969 - DNA, 436 bp, Unknown
  Bacterial polypeptide expressing nucleotide sequence isolated from the Sargasso Sea
ttatgataaattaatttttgaggttgaaactaatggtgtaattacacctgatgatgctatagctcttgcgtcaagaattttgcaagatcaattacaaccatttattaattttgatgaacctgaggctcaacaggatcaaactgcctctgaaaaactttcatttaactctaatcttcttaaaaaagttgaagaacttgaattatctgtaagatctgcaaattgtctaaagaatgataatattatatatattggtgacttagttcaaaagtctgagtctgaaatgctaagaacaccaaattttggaagaaaatctctaaatgaaatcaaagaagttttgcaacaaatggaactaaatttaggtatgtcggttccagattggcctcctgaaaacattgatgaacttgcaaaaaaatatgaggatccttttaataagtaa

SEQ ID NO: 254970 - DNA, 505 bp, Unknown
  Bacterial polypeptide expressing nucleotide sequence isolated from the Sargasso Sea
aacgctgattttgatggggatcaaatggcggttcatgtacctttagcaattgaggctcaaacagaggcaagaatgttgatgttagccagtaacaatattctctctcctgctacaggggatccaattgttactccatctcaagatatggttttaggatcctattatctgactgcaattcagcccgaagcaattcaacccaagtttggagattattctcatacatatgcatcattgaaagatgttattcaagctctggaagataaaagaatagatcttcatgattgggtttgggttcgtttctctggtgaagttcaggatgacgatgagcttcaggaaccacgcaaatcggagactttaaaagatggaactcgcgttgaagaatggacatatagacgagatcgtttagatgaagatggaggcttaattagccgttatgttttaactactgtcggtcgagtggtcatgaatcacacaattattgatgcggtagctgctacgtcataac

SEQ ID NO: 254971 - DNA, 514 bp, Unknown
  Bacterial polypeptide expressing nucleotide sequence isolated from the Sargasso Sea
tttgataccaatagattcattatttagtccagttaaaaaagtatcttattcagtcagcacagcgagagagggaaaggcgttagattatgataaattaacaatggaagtcgaaacaaatggatcaatttcagcagaggatgcggtagcttactcagctaggatatttcaagatcaactagggatgttcgttaattttgatgagccacaagaagtcataataaaggaacaaccttcagaaccagagtttaacaaaaacttattaagaaaggtggatgaattagagctttctgtaagatctatgaattgtttgaaaaatgataatattatttacataggtgatttagttcaaaaatcagagggtgaaatgttaagaacacccaattttggaagaaaatcactgaatgaaattaaagaggtattaactggaatgtcattatatctaggaatggaaattcctaattggcctccagataatattgcagaactttctaagaaacttgaggaagcgatttaa

SEQ ID NO: 254972 - DNA, 242 bp, Unknown
  Bacterial polypeptide expressing nucleotide sequence isolated from the Sargasso Sea
aatggaaacagaaaatgtaaatttaaaaaattggaaatcgctaataaaaccttcaaaacttgatgtaaagattagcgatgatttaacaaaagcaaccataatcgctgaacctttagaaaaaggttatggtcttacgttgggtaactctttaagaagaatacttttatcctctataagaggttctgctgtaacctcaatacaaattgacggtgttttacatgaatttacctccataaagggag

SEQ ID NO: 254973 - DNA, 918 bp, Unknown
  Bacterial polypeptide expressing nucleotide sequence isolated from the Sargasso Sea
caccctttaacatgtgcagcttttaatgcagattttgatggagatcaaatggctgtacatgttcctctaagtttagaggcacaattggaggctagagtattgatgatgtcaaccaataatattttaagcccatcaaatggaaaacctataatcgttcctagtcaagatatgattttaggaatttattatctatctcaaccatcatatcaaaacgataaaatagaaggatactttgtaaatacggatgaaattgtacaagcacttgaaaataacagtataaaaatacattcaagaatagtttctagatttgaaactgttgatgaaaatggaaataaaaaatttgaaaaatatatcagcaccgctggaagatttttattagcaaatataataccaaaaaatttgaacaataaattttcactagtagatagattgcttccaaaaagagttgtatctgaagtaatagatcatatatttagattttctggtcaaaagaatactgttattttttgtgacaagcttaaagaccttggttttaaatatgcatttaaagcaggtatatcatttggtaaagatgatttagttattccagaaaacaaagagcaattaatagacgaaactaaaaaattaatttcagaatacgaaaatcagtatgcggaaggattaattacaagaggagaaaaatacaataaggttgttgatgcatggtctaaatgcacagataaagttgcctctgaaatgatgaagagaatttctgctacagaggttacagaacaaggtttaaaaattaattcagtattcatgatggcagattcgggagcaagaggctcagcagctcaaatgaaacaactagctggaatgagaggattaatagcgaaaccatcaggagaaattatagaaagtccaattacatcaaatttt

SEQ ID NO: 254974 - DNA, 859 bp, Unknown
  Bacterial polypeptide expressing nucleotide sequence isolated from the Sargasso Sea
ttaattgaaggagatgcaattgaattacaccctttaacttgtgcagcatttaacgctgacttcgatggtgaccaaatggcagtgcacgtgccgttaagtttagaagcacaattagaggcaagaattttaatgttatctacaaataacattctttctccatcaaacggtaaaccaattattgttccgagtcaggatatgatattaggaatctactatctgtcacaagaacctatatctgataaaccagcaggatactttacaaactcagatcaaattgaatttgcattatcatctggccaaataaatgtacatagtactatcatttcaagatttgagactgtagatgatcaaggtaataaaaaaatggaaaaatacacttctacagctggaagatttttattagcaaatttattgcctaaaaatagcaacattaagttctctttagtagatagattattacctaaaaaagtagtttcagaaataattgatgttgtatttagattttgtggtcaaaaaacaacggtaattttctgtgacaagcttaaagatttaggatttaaacacgcattcaaagcaggaatttcatttggaaaagatgatcttgttatccctgctaacaaaacccaattgattgatgatacaaagaaattaatttcagattatgaaacccaatatgcagaaggtttaattacaagaggcgaaaaatataacaaagttgttgatgcttggtctaagtgtactgataaagttgctggcgaaatgatgagaggaatttcagctacagaaaaaactgatgaaggattaaaaataaattctgtatttatgatggctgatagtggagcccagaggatctgctgct

SEQ ID NO: 254975 - DNA, 823 bp, Unknown
  Bacterial polypeptide expressing nucleotide sequence isolated from the Sargasso Sea
atgaaaaaagaattgacagatctttttaaaggtagtgaaatttcagaagcacaaaatttcaatagtattaaaatttcacttgctagcccagagaaaattaaatcttggacatttggtgaaatcaaaaagcccgaaacaattaattacagaacttttagaccagaaaaagatggtttgttttgtgcaagaatttttggaccaataaaagattacgagtgcttatgtggcaagtataagcgaatgaaatttagaggaatcatatgtgaaaagtgtggagttgaagtaacaaaatcgaatgtaagaagagagagaatgggccatattaaccttgctactcctgtagcacatatttggtttctgaaatctcttccaagcagaattgctttagcagttgatatgaagttaaaagaaattgagcgagttctatattttgaaaactttatagtaatcgagccaggtttaactgggttacaaaaaaaccaacttttaaatgaagaagaactagcaaaatatcaagatgaattcggtgaggaaagttttactgcaggaattggagcagaagctgttctagagatgctgaaaaatttagacttagaattagaaagaaaaaatcttgttagctttattaaagaaactaaatcaaaagttaacgaagaaagagcaattaaaagactaaaattaattgaatcgttcattgaaactggtcaaaaacctgagtggatgattatgacagtagttccagttataccaccagaattaagaccattagttcctctagacggtggaagatttgccacttcggatcttaacgatttatacagaa

SEQ ID NO: 254976 - DNA, 882 bp, Unknown
  Bacterial polypeptide expressing nucleotide sequence isolated from the Sargasso Sea
actggaatatgatggcacagtcagagatcctcatggtcatatcattcaattcctatatggagaagacggaattgatgtggcaaaaagtgatcacggtgaagcatttaacattgatagattaattgaatctgaaagtattgttgactctggaaaaccagcaacaaaagatgaagcagcaaacataatcaaaaaatatacctctacattcaatcctcgactaacaaaatctgtttctaactctttagaaaatgcaaaattaagtaaagatggcattgagaaagttgcaaagaaaggtcttatgctctataacaatgcaaaagcagaacctggtcaagcggtaggaattgtaactgcacaatctattggtgaaccaggaactcaaatgactttgagaacattccactttgcaggaattgctgaaagaaacgtaactctaggtcttccaagattaattgaactagttgatgcacgaaaaaagcctgtaactccaacaatggatatctatcttttaggtgatgcaaaaacagatcaaacaaaaactgttcaagtcgcaagaaatatcttacaaactactgttaatgatcttattttagatgttgatactgattataaaacaaaaatcactcttaatctaaatgaaagaaaattatctgatcgtggatgtattatagaaaatgttactactgcattagaatcaaataagaaatttaagatggaaacaatgggtaactcgatagtacttaatctagttgatgaagaagctgatgcacctgctgtaattacaattagaaataaagttctaaaaactactgtaaagggtgtaccagatattgcacgtgtcactattgttaagaaaggtgatgaatatgtcatacaaactac

SEQ ID NO: 254977 - DNA, 811 bp, Unknown
  Bacterial polypeptide expressing nucleotide sequence isolated from the Sargasso Sea
aatgaagtaagtggcataccacaagcacatcatcgttctggacgtccattgaaaacattaacacaaagattgaaaggaaaagaaggaagattcagaggttcattatctggaaaacgtgtagatttttcaagcagaactgtaatttctcccgatccaaatttggatttgtctgaagtaggtgttccagaaactgtggcaaaaaaattaacaattcctgaaattgtaactgattggaatattgaaaaattaaagaaattagtaattaatggaccactaacattccccggtgtaaactacatcactcgtcctgatggtgtaaaaattagattagactttgttgaagatcgttctctaattgctgactccttagaaattggattcttagttgaaagacatctcatggatggtgacattgtattgtttaatagacaaccctcacttcaccaaatgtcaattatggctcattatgttagagtcttacctggaaaaactttccgattacatccatctgtttgtccgccctataatgctgattttgatggagatgaaatgaatcttcatgtacctcaaagtgaagaagctcgttcagaagcaattttactaatgagagtacaagatcaattaatttctccaagatttggcggtcctataattggaggactacgtgatttcattactggtgcttatttacttacaaaagatggaactactttgtctagtcaagaatttgcaaatcttgcaatgttaggtggctatactggacaattacctgaacctgacaataaaaaagaaaacctctataccggaaaac

SEQ ID NO: 254978 - DNA, 790 bp, Unknown
  Bacterial polypeptide expressing nucleotide sequence isolated from the Sargasso Sea
aatggcaaaaaaagaatataaactaaaaataaaaacagataaagatactcttaccgatacttatggtaaatttgttcttcaaccactagagagagggtacggtgttacagttggtaatgcactaagacgtgttttgcttacaagcttaccaggagctgctattacaaatgtaaaagttgatggtgttctacatgagttttctacaatatctggcgtcaaagaagatatggccgatattattcaaaatttaaaaagtgtaagatttaaactttctgactctgatgttgacaatgttaagctaaccttgaaaggtaaaaaggtgtttacagctgctgacatccaaaaagcaacagatcaatttgaagtcttaaatcaagatcaatatatcactgaaattaattccaatggaaaaatggaaattgaattgagaataggtgtgggcaagggatacataccctccgaagaaaatgaattaccaaatgctccaattggtactcttgctatggatagtatttttaatcctgtcactaaagtaacttacaacatacagcctgttcctggagctaaagacccaattgaaattctttcaatggaaattgaaacagacggctcagttacgcctcaggatgcaattagttattcagcaactgttttaatggatcatttaaaattagttgaagcaatagcaaaacctgaagttcttgaagttactgaaaaaattagcgaagaaattattcaggtacgaaatttgctcaatttgaccatagacgaaatggagctgtctgttcga

SEQ ID NO: 254979 - DNA, 783 bp, Unknown
  Bacterial polypeptide expressing nucleotide sequence isolated from the Sargasso Sea
gtaatattaaatagagcaccaacacttcacagattaggtgttcaagctttcgaacctaaacttattgagggtaatgcaattgagcttcatcctttgacttgtgctgcatttaatgctgattttgatggtgatcaaatggcggttcacgtacctttaagtttagaagctcagttagaagcaagagtattgatgatgtcaacaaataatattttaagtccatctaatggaaaacctattatagttccgagtcaggatatgatattaggtatctattatttgtcacaaccaccaattcaaacagaaagagtggaagggtattttgtgaacaattctgaaatagaacatgcactagaaacaggacagataaaagtacattcaagaatcgtctctagatttgaaactgtagatgaaaaaggaaatactaagtttgaaaaatatataagtacagcaggaagatttctactatcgaatataattccaaaaaatgtaaataataagttctctttaattgatagattgttaccaaaaaaaatagtttctgaggttatagatcatgtatttagattttcaggtcaaaaaagtactgtaatattttgtgacaaattaaaagatattggttttaaacatgcgtttaaggctggaatttcatttggaaaagacgaccttttgatacctgataataaagaacaattaatagaagaaactaaaaaacttattgctgattatgaaggtcaatatgcaaaaggcttaataacaagaggtgaaaaatataataaagttatc

SEQ ID NO: 254980 - DNA, 762 bp, Unknown
  Bacterial polypeptide expressing nucleotide sequence isolated from the Sargasso Sea
aatgtttgttaatgatccaagagaatttgattttttagaaataggtttagcttctcctgacagaataagatactggtcatatggtgaggtagaaaagcctgagactattaattacagaacatttaagcctgaaagaaagggtcttttttgtgagaaaatctttggtcctgtaaaagactgggaatgttcttgtggaaaatatagacgtataagataccgtggtattgtgtgtgaaagatgtggtgtagaagttactcattctaaagttagaagagagcgcatgggacatttagaattagctgcaccagttactcatatttggtttctaaaaggtatacctagttatttaggtattatacttgatatttcttcaagaaatcttgaggaagttatttattatgattcatacataataacgtctgtttctgatgatttaaaaggtgagctagcaaaaggtgacttattatctacattagattacttcgatttaaaagcaaagcatggtacaaaatttgttgcagaaattggtgcatcagctataaaaacattattgagtcaattgaatgttaaacaactcattaaagaattgagagatgacttgtctacttcaaaagggcaaaaacgattaaaattagttaaaagattacgtatattagaatctgttgaaaagtctagaaatcaacctgagtggatggttcttgaggctattccagtaatgcctccagatttaagaccaatggttcaattagaggggtggcgttt

SEQ ID NO: 254981 - DNA, 784 bp, Unknown
  Bacterial polypeptide expressing nucleotide sequence isolated from the Sargasso Sea
cttactgatgtattgctaaatcttaaatctgttgcagttaaagtttattcaccgggattaaaaaaaatgtatttaaaatcatctgggtcaggagaattaagagctggtaattttgaaactgactcagaaactgaaataatgaatccagatcaattaattatgacacttgactcaaatgcagatgttgaaatcgaagcaaatgtggaaactggtaaaggatatgtttctgcagaagttgcagaggatgaaaataaaatcattggtgaaataaaattagatgcaatgtttagccctgttataaaagcttcatataaagttgaaaatagcagagtagggcaagttactgattatgacaagcttatatttgaagttgaaactaatggagtgattacacctgatgatgcaatagctttatccgcaagaattttacaggatcagttgcaaccatttattaattttgatgaacctgaagtaatgcctgaccaatctcaagtagaaaagctttcatttaactctaatttattaaagaaagttgaagagttagagttatctgtaagatcagctaactgtttgaaaaatgacaatataatttatattggtgatctggttcagaagtctgagtcagagatgttaagaacgcctaactttggaagaaaatctcttaatgaaattaaagaagttcttcaacaaatggaattaaatttaggtatgtcagttcccgattggcctcctgaaaatattgatgaaaaagcaaaaaaatatgaagatccatttaacaagtaat

SEQ ID NO: 254982 - DNA, 835 bp, Unknown
  Bacterial polypeptide expressing nucleotide sequence isolated from the Sargasso Sea
aaaaaattagttgaaagagaaagaaatgaagtttgggatgcgttagaattaatagtaagagaacatcctgtgatattaaatagagctccaactcttcatagattaggagttcaggcatttgaacccaaacttattgaaggaaatgcaattgagttacacccattaacttgcgcagcttttaatgcagattttgatggagatcaaatggctgttcatgtgcctttaagtttagaagcgcaattagaagcaagagtattaatgatgtcaacaaataatattttaagtccatcaaatggaaaacctataattgttccaagtcaggatatgatattagggatttattatctttcacaagaaccatatcaaactgataaggtcgaaggatattttgttaatacatcagaaatagaacatgctttagagacgggtgaaattaaagtgcattcaagaattgtatctaggtttgaaacaattgatgaaaaaggaaacaaaaaatttgaaaaacatataagtacagctggaagatttctcttatcaaatttaatacctaaaaatacaaataataaatttacattagttgatagattgttaccaaaaaaagtagtttcagagataattgatcatgtgtttagattttcaggtcaaaaaagtactgtaatcttctgtgataaattaaaagatttaggatttaagcatgcattcaaagctggaatttcttttggtaaagatgatctcgttattcctgaaaataaacagcaattaattgatgaaacaaaaaaattaatttcagattatgaaaaccaatattcagaaggattaatcacgagggggtgaa

SEQ ID NO: 254983 - DNA, 781 bp, Unknown
  Bacterial polypeptide expressing nucleotide sequence isolated from the Sargasso Sea
cgcagcgtttaatgcagactttgatggtgatcaaatggctgttcatattcctctaagtttagaagctcaattagaggctagagttttaatgatgtctacaaacaatattcttagcccatcaaatggtaaacctattattgttccaagtcaggatatgatactaggaatctattatttgtcacaacctccagtgcaaacagaaaaagtcgaaggttattttgtaaatacgtcagaaatagaacatgcacttgagacaggtcaaattaaagtacattctcgtatagtttcaaggtttgaaacagttgataaagaaggtaataaaaaaattgaaaaatatacgagtacagcaggaagatttttgttagctaatttacttccaaaaaatttaaataataaattttcattaattgataggctcttaccaaaaaaaattgtttcagagataattgatcatgttttcaggttttctggtcaaaaaaatacagttattttttgtgacaaattaaaagatctaggttttaaacatgcttttaaagcaggaatttcctttggtaaggatgatctagttataccagaaaataaagaacagttaatagatgaaactaaaaaacttattaaagattacgaaaaccaatattctgaaggtttaattacaagaggcgaaagatacaacaaagttgtagatgcttggtctaagtgtactgacaaagttgcttcagaaatgatgaaaagaatatctgcaaccgaagtaactgatgaaggattaaaagtaaattcagtc

SEQ ID NO: 254984 - DNA, 657 bp, Unknown
  Bacterial polypeptide expressing nucleotide sequence isolated from the Sargasso Sea
ctgatcttcaaaaatttatttctggctttcaaattttaaatcctgatctagttatttgtaatctagaaaaggatattaaacttagcattgagctaaatattgataaaggtaggggatatgttccagctgaagagaataaaaaatccaatgactccataggttttatcccattagattcaatctatactccaattaaaaatgttaaatataatattgagaattatagagttgaacaaaagactgactttgaaaaacttgtttttgagatatttactgacggctctatacatcctaaagaggctcttacagaagctgcaaaaatacttattcaccatttcatgctattctcagatgaacttattactcttgaggcagatgaaattgctcaatccgagacttacgatgaagaatctcttcatatgagacaacttcttaagacaaaacttatagatatggatttatctgttagagctttaaattgtctaaaagctgctgaggttgatacattaggtgatcttgtttcttttaataaaaatgacttaatgaagtttagaaattttggtagaaagtctttaacagagctagaagaattagttatactaaaaggtttatcatttggtatggatcttactaaatataaactagataaagattaaa

SEQ ID NO: 254985 - DNA, 495 bp, Unknown
  Bacterial polypeptide expressing nucleotide sequence isolated from the Sargasso Sea
tatatagtccagtaaaaaaagtttcttactctgtaagtacagctagagaaggtaaagctttagattatgataaattgactatggaagttgaaactaatggttccatttctgcagaagacgctgtggcttattcagctagaatattccaagatcaattaaaaatgtttataaattttgatgaaccagttgaagtacctgtgaaagaaacatcatctgagccagaatttaacaaaaatttgttgagaaaagtcgatgaacttgagctttcagtaagatcaatgaattgtttaaaaaatgataatataatttatattggtgatcttgttcaaaaatctgaaggtgaaatgcttagaactcctaattttggtagaaaatctttaaatgaaataaaagaggtattaactggaatgtcattatatttaggtatggaaattcctaattggcctcctgataatattgctgaaatgtctaaaaaattagaggaagctatataat

SEQ ID NO: 254986 - DNA, 919 bp, Unknown
  Bacterial polypeptide expressing nucleotide sequence isolated from the Sargasso Sea
gattaggtgttcagcttttgaaccaaaattgattgagggagatgctattgaattacaccctcttacatgtgcagcattcaatgctgattttgatggggatcaaatggcggtacacgttccgttaagtttagaagctcaactagaggcaagaatattaatgctatcaacaaataatattttatcaccatcaaacggtaaaccaattattgttccaagtcaggatatgattttaggaatttactatttatctcaagaaccgttaactgatagcccagctggatactttttgaatgctgaccaaatagaatttgccttatcttcaggacaacttaaggttcatagtacaattatatctagatttgaaacagttgacgagaatggaaataagaagtttgagaaatatacatcaacagcaggtagatttttactagcaaatttattaccaaaaaataaagatattaaattttcattggttgatagattgttaccaaaaaaagttgtttctgaggtaattgatattgtttttagattctgtggtcaaaaaacaactgttattttctgcgacaagctaaaggatttaggtttcaaacatgcgtttaaagctggaatctcttttggtaaagatgatttagttatacctgaaagtaagaataaacttattgatgataccaaaaaacaaatagcagattatgaaactcaatacgctgaaggacttattactagaggagaaaaatataataaagttgttgatgcctggtcaaaatgtactgatcaagtagcatctgaaatgatgaaaggtatttcagcaactgaaaaaacttcacagggtttaaaaattaattcagtatttatgatggctgatagtggagcgagaggttcagctgctcaaatgaaacaattggctggtatgagaggttaa

SEQ ID NO: 254987 - DNA, 307 bp, Unknown
  Bacterial polypeptide expressing nucleotide sequence isolated from the Sargasso Sea
caccagctgtccgcttttgctgaacttggaagattagaagaggttattgaagaaaaagaggaagcgaagatagatccaattatgttaagacctgtagacgaactagaactcacagttaggtctgcaaattgcttgaaagctgagaatatacattacataggtgatttagttaccagaatggagtcagatcttttaagaactccaaatttaggaaagaaatccttaaatgaaattaaggaagttctcttgtctagaggcctttcgttaggtttaattctcgacaactggccaccagaaaataattaag

SEQ ID NO: 254988 - DNA, 444 bp, Unknown
  Bacterial polypeptide expressing nucleotide sequence isolated from the Sargasso Sea
gaaaggctttagattacgataaattaatcatggaaatagaaacaaacggatcaatatctgcagatgatgcggtagcttatgcagctagaatttttcaagatcagctatctatgtttgttaattttgatgaaccgcaagaagtaatcattagagaaaaaccaacagaacctgaattcaataaaaatctattaagaaaagtagatgaattggaattatctgtaagatcaatgaattgtttgaaaaatgataacataatatacataggtgatttagtgcaaaaatctgaaggagaaatgcttagaacacccaattttggtagaaaatctttaaatgaaataaaagaagtattacaaggtatgtcattatatttgggaatggaaattccaaattggccaccagaaaatattgctgaattatctaaaaaacttgaggaacaaatctaat

SEQ ID NO: 254989 - DNA, 534 bp, Unknown
  Bacterial polypeptide expressing nucleotide sequence isolated from the Sargasso Sea
ccgaagagccaccacttggtttgattccaatagattcactatttagtccagtaaaaaaagtttcttattcagttagtacagcaagagaaggaaaagcattagattatgataaactaactatggaagttgagacaaatggttcaatttcagctgaagacgcggttgcatactcagctagaatattccaagatcaattaggaatgtttgttaactttgatgagccacaagaagtgattgtaaaagaacaaccttcagagccagagtttaataagaatttattaagaaaagttgacgaattagaactttctgtaagatcaatgaattgtcttaaaaatgataatattatttatattggtgatctagttcaaaaatctgaaggtgaaatgttaagaacacctaattttggtagaaaatcattaaatgagattaaagaagtattaacaggaatgtcactatatctcggaatggaaattccaaactggccgccagataatattgctgaactatctaaaaaacttgaggaagcaatctaat

SEQ ID NO: 254990 - DNA, 761 bp, Unknown
  Bacterial polypeptide expressing nucleotide sequence isolated from the Sargasso Sea
tgtaaaaaatttagccatcaaatcatcttcttcaagctcgaaaaaaattattttagatatcaaaggacctaaagaagtgaaagcaaaagatataactcttgttccggagatagaaattttaaatccagatcaaacaatctgtaatctagacgaaaaaactcattttcatatggaactaatggtaagcactggaaaaggatacgttcaagcacctaaaaataagtcagaagatagtcctttaggactgatttcaatagattctctatttagtccagtaaaaaaagtttcattttcagttgaaaatacaagagccggtagcgccttagattacgataaattagtaatgactgttgaaacaaacggcaccgttgatgctgaggatgcaattgcttattcagctagaatttttcaagatcaattatcaatgtttgtaaattttgaagatccacaagaggttattaaagaagtgaagtcttcagagccagagttcaatagaaacttgttaaaaagagttgaagaattagagctgtcagtaagatcaatgaactgtttaaaaaatgacaatattatttacattggagatttggttcagaaaactgagccggaaatgctaagaacgccgaattttggtagaaaatctcttaatgaaataaaggaagttttaaataccatgtccttgtatttaggtatggaaattcctaattggcctccagataatattgctgaattatcaaagaaattagaggaaaataattattaat

SEQ ID NO: 254991 - DNA, 716 bp, Unknown
  Bacterial polypeptide expressing nucleotide sequence isolated from the Sargasso Sea
aattattttagatattaaaagacccaaggaagtgaaagcaaaagatataactcttgttcctgaaatcgaaattttaaacccagatcaaacaatatgtaatttagacgaaaaaacacattttcatatggaactcatggtgagtactggaaaaggatacgttcaagcacccaaaaacaaatcagaagatagtcctctaggattaatttcaatagactctttgtttagtcctgtaaaaaaagtttcattttcagttgagaatacaagagctggaagtgccttagattatgataaattagtaatgactgttgaaacaaacggcactgtagatgctgaagatgcaatagcttattctgctagaatttttcaagatcaattatcaatgttcgtaaattttgaagatccacaagaagttattaaagaagtgaagtcttcagagccagagttcaatagaaacttgttaaaaagagttgaagaattagagctgtcggtaaggtcaatgaattgtttaaaaaatgacaatattatttacattggagatttggttcagaaaactgagccagaaatgctaagaacgccgaattttggtagaaaatctcttaatgaaataaaggaagttttgaataccatgtccttgtatttaggtatggaaattccaaattggcctccagataatattgctgaattatcaaagaaattagaggaaaataattactaat

SEQ ID NO: 254992 - DNA, 838 bp, Unknown
  Bacterial polypeptide expressing nucleotide sequence isolated from the Sargasso Sea
gaattaattgttagagaacatccagttttactaaatagagctccaacacttcataggttgggagttcaagcttttgaaccaaaattaattgagggagatgcgattgaattacaccctttaacgtgcgctgcgtttaatgcggattttgatggtgatcaaatggctgttcacgttcctttaagtttggaggcacaacttgaggccagaatattaatgctatcaactaacaatattctttctccatctaacggaaaaccaataattgtcccaagtcaggatatgattttaggaatttattatttatctcaagaaccagtcactgataagccagctggatattttttaaatgcggatcaaattgaatttgcgctttcttctggtcaaattaaagttcatagtacaattatttctagatttgaaactgttgatgaaaagggtaatcaaaaatttgagaaatatacatctactgcaggaagatttttactagctaacttattgcctaaaaataataatattaagttttctttaattgatagaattttaccaaagaaaacagtttcagagattattgatattgtctttagattttgtggtcaaaaaagaacagtcattttctgtgataaattaaaggatctagggtttaaacatgcatttaaagcaggaatttcttttggtaaagatgacttagtcattccggaaagtaaaaataaacttattgatgatactaaaaaactaatagctgactatgaaactcaatattctgaaggactaattacaagaggagaaaaatacaacaaagttgttgatgcatggtcaaaatgtactgatcaagtagcat

SEQ ID NO: 254993 - DNA, 406 bp, Unknown
  Bacterial polypeptide expressing nucleotide sequence isolated from the Sargasso Sea
aatgtgggtaatcaccccagatgatgcaattgctctagcggcaagaatacttcaagatcaacttcaaccattcattaactttgatgaacctgaagttcttccagatcaatcacaagctgaaaaattatcttttaactcaaatttattaaagaaagttgaagaattagaattgtctgtaagatctgcaaattgtttgaaaaatgataatattatttacataggtgatttagttcaaaaatctgaatcagaaatgttaagaacacctaactttggaagaaaatcactaaatgagattaaggaagttcttacacaaatggaattaaatttaggaatgtctgtacctgattggcctcctgataatatcgatgatttagcaaagaagtatgaggacccttttaacaagtaa

SEQ ID NO: 254994 - DNA, 244 bp, Unknown
  Bacterial polypeptide expressing nucleotide sequence isolated from the Sargasso Sea
atggatacaactgaggtaaatattaaaaattggaaatcactaattaaaccacctaaacttgatattaacttgagcgatgacaaatcttatgcaaagataatagcagaacctcttgaaaaaggttatggtttaacattaggaaattcattaagaagaatactactatcatcgataagaggtacagcagtaactgcaatccaaattgatggagtattacacgaatttacatcaattaaaggtgtta

SEQ ID NO: 254995 - DNA, 679 bp, Unknown
  Bacterial polypeptide expressing nucleotide sequence isolated from the Sargasso Sea
aagcatctaacatcacacctggttcaagatattgaaatattaaatccagatttagttatatgtaatcttgatgaaaatactaattttcatatggaaatgatggttggcaatggcaaaggatatgtttcagctgaaatgaacaaaccagaggaacctcctttaggtttaattcctattgactcattatttagtccagttaaaaaagtttcttattcagtaagtacagcgagagagggaaaagcattagattatgataagttgactatggaagtagaaactaatggatcaatttctgcagaagatgctgtagcttactctgctagaatttttcaagatcaattatctatgtttgtaaattttgatgaacctcaagaagtcttagtgagagaaaaaccaacagaaccagaatttaatagaaatttattaagaaaagttgatgaattagaactttcagtaagatcaatgaattgtttaaaaaatgataatataatttatattggagatttagttcaaaaatccgaaggcgaaatgctaagaactccgaattttggtagaaaatctttaaatgaaattaaagaagttttgaatggaatgtccttatacttgggtatggagataccaaactggccccctgataatatagctgaactatctaaaaaacttgaagaagcaatttaat

SEQ ID NO: 254996 - DNA, 959 bp, Unknown
  Bacterial polypeptide expressing nucleotide sequence isolated from the Sargasso Sea
tgcctcaagacaacctgcaattcatgcagtaaggctttgctgcacgatgctcctcaaacgcaccctattgatccagagaagtccgagcaggactactacagagacagggtgaacgacatcattctaaagcatggagttggtggcagggaattcaagaaaataatcaaggatattgagaatatttgcgctggcccgaagcgtgcgatatgcatgcattgcggtgcagagcaaggcaagataattcttgataagcccacaactttcaaagaaaagaaggcagataagggtgagcacaaactaaacgctcgggacatccgcgagtggcttgaaaagatacccgatgaacacctaatcttcctcgggatggagaaagacgttagtaggccagaatggacaatcatgaaggtacttccagtccctccgattacagtaaggccatctatcacactagaaagtggagatagatccgaggatgacctcacgcacaagttagtcgacgttctgaggattaaccagaggctgcgggaaaatcgtgattcgggagccccgcaactaatcgttgaagatctctgggaactgttacaatatcattgcacgacatacttcgataatcagactagtggcattccgccagctcgacacagatctggaaggccactaaagaccctatctcagaggctaaaggggaaggagggtcgatttaggagcaatttgtccggaaagagagttaacttctgtgctagaacagttatcagcccggacccaaatcttggaatcaatgaagttggagtccctgtgaagacggccaaagaacttacagtacctatcagagctacaagtagaaacagggaacaactcagacagatgatcctaagaggcccggatgttcatcccggtgttaactacatcatcagaggagataggtttagggttaggattacagatagaacgaagtatat

SEQ ID NO: 254997 - DNA, 193 bp, Unknown
  Bacterial polypeptide expressing nucleotide sequence isolated from the Sargasso Sea
atgactaatagcaatctacgtacggaaaatcattttgattatgtcaagatcaaactagcttcgcctgaaagagtaatggaatgggggcaaagaactttgcctaatggacaagtcgtaggagaagtcaccaagccagaaactataaattatcgaacactaaagcctgaaatggatggattattttgtgaaaaga

SEQ ID NO: 254998 - DNA, 334 bp, Unknown
  Bacterial polypeptide expressing nucleotide sequence isolated from the Sargasso Sea
tattaattttgatgaacctgaaattcaacaggacacctcttctcatgaaaaactttcatttaatcctaatttacttaaaaaagttgaggaactagagttatctgtaagatcagcaaattgtttaaaaaatgacaatataatttatattggtgatttagtccaaaaatcagaatcagaaatgttaagaactccaaattttggtcgaaaatctctcaatgaaattaaagaagtacttcaacaaatggagttaggtttaggaatttcagttcctgactggcctccagaaaatattgaagaacttgctaaaaaattcgaggatccgtttaataaataa

SEQ ID NO: 254999 - DNA, 796 bp, Unknown
  Bacterial polypeptide expressing nucleotide sequence isolated from the Sargasso Sea
tgacctgaagcttcatgaatgcggattgccaaagaaaatggctttagagctttttaaaccattcttgtatgcaagattaaataaattaggactagcctcaactattaagcaagcaaagaagttagttgagaaagaaaccaatgcagtctgggatgcattagagctgattgttagagaacatccagtgttacttaatagagccccaacgttacacagactaggagtgcaggcttttgaaccaaaattaattgagggtgatgcaattgaactccacccacttacatgtgctgcttttaacgcagattttgatggagatcaaatggcagttcatgtcccattaagtttagagtctcaattagaagctagaatattaatgttatctacaaataatattttatccccatctaacggaaaaccaataatagtcccaagtcaggatatgatcttaggaatatactatttatctcaagagccaattaccgacaagccttcagggtattttttagatgctgatcagattgaatttgctttatcgtcaggacaaataaaagttcatagtacaattatttcaagatttgaaactgttgatgaaaatggaaataaaaaatttgaaaaatatacttctactgctggaagatttttattagcaaatttgttacctaaaaataaggatattaatttttctttaattgatagactattaccaaaaaaagttgtttctgaaattattgatatagtttttagattttgtggtcaaaaaactacagttattttttgtgataagttaaaggaccta

SEQ ID NO: 255000 - DNA, 530 bp, Unknown
  Bacterial polypeptide expressing nucleotide sequence isolated from the Sargasso Sea
agaaccaccattggggcttatacctattgactcacttttcagtccagtaaaaaaagtttcttactccattagtacagcaagagaaggtaaagctcttgattatgacaaattaacaatggaagtagagacaaatggatcaatatcagcagaagacgccgttgcatattctgcaagaatatttcaagaccaactaggcatgtttgttaattttgacgaaccacaagaagttatagttagagaacagcctacagagccagaatttaataaaaatttattaagaaaagtagatgaactagagctatctgttagatcaatgaattgtttgaaaaatgataacataatttacattggtgacctagttcaaaaatctgaaggagaaatgttgagaactcctaattttggtagaaaatctcttaatgaaattaaagaagtcttaacaggaatgtctctgtatttaggaatggaaataccaaattggcctccagataatattgcagaattatctaaaaaacttgaggaagctatataat

SEQ ID NO: 255001 - DNA, 806 bp, Unknown
  Bacterial polypeptide expressing nucleotide sequence isolated from the Sargasso Sea
attattacccaaaagaaattcaataaaattactattgggtttatcatctccggaggttatccttggtaattccagaggagaggtattaaaacctgaaaccattaattatagaactcataagcctgaacgtgatggtttgttttgtgaacgaatttttggtcctgtaaaagattttgaatgtgcatgtggaaaatacaagcgtattcgttacaaaggtattgtttgtgatcgttgtggtgtagaagtaactgaaaagaaagtaagacgtgatagagtaggacatataaatttggttgttcctgttgctcacatatggtactttagatcattacctaacaagattggatacttacttggattaccttccaaaaagttagatatgataatttattatgagcgttatgttgttattcagcctggaaacaccaaaaattctgaaggagatcctatacaaatgatggattttttgactgaggaagaatatttaaatataatggagcagctgccaattgaaaatcagtttcttgaggacagtgatcctgaaaaatttattgctaagatgggagctgagtgtttgattgagttgctttccagaattgatttagaagctttatcttttgaattgagaaataaagctaacaacgaaacttcaaaacaaaggaaaactgaagcgttaaaaagattacaagtagttgaggctttaaaagaagctaatgaaaatagagaaaatttaccagaatggatgatcctaaaggtgattcctgttattccaccagaattaagaccgttggtaccattagatggag

SEQ ID NO: 255002 - DNA, 158 bp, Unknown
  Bacterial polypeptide expressing nucleotide sequence isolated from the Sargasso Sea
tatttttcttataggcgacttaattcatagatctgaatttgatttattaaaaacgccaaatttaggaaaaaaatctttaaatgaaatcaaagatgttttagcttccaaggaattgtcacttggaatgaatgtagaaaactggccaccagtaggataaa

SEQ ID NO: 255003 - DNA, 299 bp, Unknown
  Bacterial polypeptide expressing nucleotide sequence isolated from the Sargasso Sea
gcttggtgcgtttgttgatctagatgcaatagcagaacaagaggctaaaaaagatcaaaatgactttgatccaatcttattaagatcgattgaagagcttgagctaacagtaagatctactaattgtctcaaggcagagagtatttttcttattggcgacctaattcatagatctgagtttgatttattaaaaactccaaatctaggtaagaaatctttaaatgaaattaaagatgttttagcttctaaagatttatcgcttggtatgaatgttgagaactggcctccagtaggataaa

SEQ ID NO: 255004 - DNA, 562 bp, Unknown
  Bacterial polypeptide expressing nucleotide sequence isolated from the Sargasso Sea
aggatatgtcccagcttccatgaacaaaccagatgagcctccacttggtcttatcccaattgattcattatacagcccagttaaaaaagttacctattcagtaagtacagctagagaaggtaaagctttagattatgataaacttactatggaagtaaaaacaaatggatcgatttcagctgaggatgcggtagcatattcagcaaaaatatttcaggatcaattgaacatgtttgtgaattttgatgagcctcaggaagttattgtgcgtgaaaagccttctgaaccagaatttaataaaaatcttcttagaaaagttgatgaattagagttatcagttagatctatgaattgcttaaaaaacgataatattatctatataggcgatttagttcaaaaatccgagggtgaaatgttaagaacaccaaactttggtagaaaatcattaaatgaaattaaagaagttttaaatgggatgtctctatatcttggaatggaaatacctaattggcctccagacaatatcgctgagatgtcaaaaaaacttgaagaagctatctaa

SEQ ID NO: 255005 - DNA, 166 bp, Unknown
  Bacterial polypeptide expressing nucleotide sequence isolated from the Sargasso Sea
tatggaattaaataaaataaaatcatttaacaaaatttctattggattggcttctccggaaacaattcttgcatcatcacgtggtgaagttcttaaaccggaaacgattaattacagaactcataaacctgagagagatggattattttgtgagagaatcttcgga

SEQ ID NO: 255006 - DNA, 208 bp, Unknown
  Bacterial polypeptide expressing nucleotide sequence isolated from the Sargasso Sea
atgaccaacagcaacctccgcaccgagaaccacttcgattacgtcaagatcaccctcgcctcacccgaacgggtgatggagtggggccaacgcaccctgcccaatggtcaggtagttggtgaggtcaccaaaccggagaccatcaactacaggaccctcaagcccgagatggacgggctgttctgcgaaaagatttttggtccctcca

SEQ ID NO: 255007 - DNA, 907 bp, Unknown
  Bacterial polypeptide expressing nucleotide sequence isolated from the Sargasso Sea
ttatatgcaagattaaataagctaggactcgcctctacaatcaaacaagcaaaaaaattagttgaaagagaaagaaatgaagtttgggatgctttagaagaaattgttagagaacatcctgttatattaaatagagcaccgactttacatagacttggggttcaagcatttgaaccgaaacttatagaaggtgatgctatagagctacatccattaacttgtgcagcattcaatgccgattttgatggtgatcaaatggctgtacatgttcctttaagtttagaagctcaactagaagcaagagttttaatgatgtctacaaataatattttaagtccatccaatggaaaaccaataatagtacctagccaagatatgatcttaggtatttattatttatctcaacctccttatcaaacagaaaaaatagaaggatattttacaaacatatcagaaatcgaccatggtttagaaactggacaaataaaagtacattcaagaatagtatctagatttgaaactattgatgaaaatggtaacactaaatatgaaaagcatataagtacagcaggaagatttttattagcaaacctattaccaaaaaacattaataacaaattttctttaattgatagacttcttccaaaaagaactgtttctgaaataattgatcatgtgtttagattttcaggacaaaaatctactgtaatattttgcgataaattaaaaaatttaggtttcaaacatgcttttaaagcaggaatttcttttggaaaagatgatttagtaataccagaaaataaacagcaattaatagatgaaacaaaaaaattaatttctgaatacgaaacacaatactccgaagggttaattactagaggagaaaaatacaataaagttgtagacg

SEQ ID NO: 255008 - DNA, 265 bp, Unknown
  Bacterial polypeptide expressing nucleotide sequence isolated from the Sargasso Sea
atgatagaaaagaattggaaagaaattataaagccatctaagcttcaggttaaaagtgatgtagataatgagaacacatcaacaattattgcggagcctcttgaaagaggatatggggtaactttaggtaatgcccttagaagaattctattatcatcacttcaaggctcagctattacatctatgtatgttcaaggtgtgcttcatgagttttcttcaatacaaggtgttagagaagacctaacagacattatccttaattaaa

SEQ ID NO: 255009 - DNA, 380 bp, Unknown
  Bacterial polypeptide expressing nucleotide sequence isolated from the Sargasso Sea
tgacgcgctcgcattcgcggctaggatattgcaggatcaattgtcgatctttgtgaactttgatgagccggaagctgcaaatcaaaatgacgaagacgatggactggagttcaacccactactgcttaagaaggtagatgaacttgaactgtcagttcgatctgcaaactgtcttaaaaatgataacatcgtctacattggagatctgatccagaagactgaagctgagatgttaagaacaccgaattttggtagaaaatcccttaatgagataaaagaagtgttatccggtatgggtttacatcttggtatggatgtcgaggattggccccctgacaatatcgaagaactcgctaaaaagtttgaagataatttttaga

SEQ ID NO: 255010 - DNA, 774 bp, Unknown
  Bacterial polypeptide expressing nucleotide sequence isolated from the Sargasso Sea
accaacacttcataggcttggagttcaagcgtttgaaccaaaattaattgaaggagatgcaattgaattacatcctttaacttgtgcagcatttaatgctgacttcgatggtgaccaaatggcagttcacgttccattaagtttagaagctcaattagaagcaagaatattaatgttatctacaaataatattctttctccctcaaacggcaaacccattatcgttccaagtcaggatatgattttaggaatttactatctttcacaagagcctatatctgacaaacctgctggatactttacaaactcagatcaaattgaatttgcattatcatctgggcaaataaatgtacatagcactattatttcaagatacgagactgtagatgagcaggggaataagaaaatagaaaaatatacttctacagctggaagatttttattagcaaatttattacctaaaaatagtaacatcaagttctctttggtagatagattattacctaaaaaagtagtttcagaaataattgatgttgtatttagattttgtggtcaaaaaacaactgtaattttctgtgataagcttaaagatttaggatttaaacacgcatttaaagcaggaatttcgtttggaaaagatgatcttgtaatacctgagaataaaactcaattaattgatgatactaaaaaattaattgcagattatgaaactcaatatgctgaaggtttaattacaagaggtgaaaaatacaacaaagttgttgatgcttggtc

SEQ ID NO: 255011 - DNA, 901 bp, Unknown
  Bacterial polypeptide expressing nucleotide sequence isolated from the Sargasso Sea
gtttgcgctgctttcaacgctgactttgatggcgatcagatggctgtccatgttccgttgtccgtggaggcacagacggaagctagagtgttaatgatggcgaccaacaacattctctctccgtcaaacggcagcccaatcatagttccatctcaagatatggttcttggtatttattacatgtctagagagaaaccaaactgtaaaggcgaaggaatgattttcagtgatatagaagaagtctctaaagcttatcaatctaagcttatagatatgcatgcaaaaattaaagttagaatgaacataactgagcacgagggtgatcagctggttgaaaagacaaaaatcgtagatactactactggtagagcacttatctctgagatacttcctaaaaatattccatattcattcattgatcaggaccttaataaaaaagctatttcgaaattatttgatgttgcatatagattagccggcctcaaagacactgtgctttttgcagatcaaatcaaaaatatgggctttaaatattcaacgttagcaggtgtatctattggtgtcgatgacatggtaatacctaaagagaaaacaaccattactgctaaagcagaaaaagaagttaaggatatagaaaaacaatacaattcaggattattgactgctggagaacgctacaataaggtagtcgatatttggtcacatacaaatgaccaagtatctcaagcgatgatgaagcagctcggaactgaagtcacgaagacatcagatggcaaaaaagtggaacataaatcttttaattctatttatatgatggcagattctggagcgagaggttcagcagcacagataagacagttgtcaggaatgagagggctcatggcaaaacccagacggctct

SEQ ID NO: 255012 - DNA, 254 bp, Unknown
  Bacterial polypeptide expressing nucleotide sequence isolated from the Sargasso Sea
tagaaaagttgacgagttggaattatcagttaggtcaatgaattgcttaaaaaatgataatataatttacataggtgatttagtccagaaaactgaacctgaaatgttaagaactcctaattttggcagaaaatcactaaatgaaataaaagaagtcttaaattcaatgtccctttatttaggaatggaagtgcctaattggcctccagaaaatatctcagaattatcaaaaaaacttgaagataataattaat

SEQ ID NO: 255013 - DNA, 212 bp, Unknown
  Bacterial polypeptide expressing nucleotide sequence isolated from the Sargasso Sea
atcaattgaggagttagaacttacagttagatctacaaactgtttaaaagctgaaaatattttcctaattggagatttaatacaaagaagtgaaatggatttacttaaaactcctaaccttggaaaaaaatcattgaatgaaattaaggatgaattagcttctagaggactttctttaggcactgttcttaaaaattggccaccaatgtaaa

SEQ ID NO: 255014 - DNA, 886 bp, Unknown
  Bacterial polypeptide expressing nucleotide sequence isolated from the Sargasso Sea
aaagatgaatcatcagcgataattaaaaaatatacttccacatttaatccacgtctaacacatactgttagcaaatcattagaaagcgcaaaattaagtaaaaatggaattgagaaggttgcaaagaaaggtcttatgttatacaacaatgcaaaatctgaacctggtcaggcagtgggaattgtaactgcacaatcaattggtgagcctggaactcaaatgactttgagaaccttccactttgcaggaattgcagaacgaaacgtgactcttggtctcccaagattaattgaattagttgatgcacgaaaaaagcctgtaactccaactatggacatttatcttttaggtgatgcaaaaacagatcaaacaaaaacagttcagatagcacgtaatattttgcaaactactattaatgatctaatacttgatgctgaaactgattacaaatccaaaatcaccttgaatttaattgaacgaaaattatctgaccgtggatgcaccgtagatgatgtcgtgaccgcattggaatctaacaagaaattcaaaatggaaacaatgggtaactcaattgttctgaatttggttgatgaagaggctgatgctcctgctgtaattactatacgaaataaagttctaaaaacaactgtaaagggtgttcccgacatagcacgtgtaacaattgttaagaaaggtgatgaatatgttatacaaactacaggttctaacctttccaaagttttagaagttgaaggaattgacaaaaataatgttagaacaaataatgtctctgaaattgcagaaacactaggaattgaggcagcaagaaatgctcttatcaatgaattaagtaccactcttgaagatgcaggtcttgaagtgacca

SEQ ID NO: 255015 - DNA, 858 bp, Unknown
  Bacterial polypeptide expressing nucleotide sequence isolated from the Sargasso Sea
actggttcgaccatcaattactcttgacagtggtgaccgttctgaagatgatttgactcacaagttggtggacgtacttcgtatcaatcaaagacttagagagaatcgtgattctggtgccccacaactcatcgttgaggatttatgggaactccttcaataccacgttactacctacttcgacaaccagacgagtggaattcctcctgctcggcaccgttcgggacgtactctcaagacactgactcagcggcttaaagggaaggaggggcgcttccgaagcaatctctctggtaagcgtgtgaacttctgtgcacgaaccgtcatcagtccggatccgaaacttggtatcaacgaggtaggagttcctctacctacagcgaaagagttgacagttccaatccgagttacacctcgaaatatggagcagatgcgccaaatgattctccgcggtcctgatgtgcatcctggtgtaaactacatcgtacgtggagatagtttccgtgttcgtatcactgatcggaccaagtggatttgggccggcttccgttgtctaaatggtgaatgtgtatctggtgccagcgatgaagaaccatacactggtgctcgccctgatctcaacacatgtctccctgctccaaacttcttacctgggctagaaatccgcaagttacaacaccagactgattctggaactgtcgaagaaaagattgaggtcgatcttgaaaatacacttcgtaatttacgaggcgaagatgaacacggtctccctcttccagatactgatactcgtgctataatccaccaccgatggctctttgagaggaataaccccggtgaagcgttccctgaacatct

SEQ ID NO: 255016 - DNA, 847 bp, Unknown
  Bacterial polypeptide expressing nucleotide sequence isolated from the Sargasso Sea
acaaatgcagtttgggatgctttagaactaattgttagagaacacccagtaatattgaatagagctcctacacttcatagacttggagttcaagcatttgaaccaaaattaatagaaggtgatgctattgaattacatccgctaacatgtgcagcatttaatgctgactttgatggagaccaaatggcggtgcatattccattaagtttagaagcacaattagaagctagaattttgatgttatcaactaataatattctaagtccgtctaatgggaaaccaataattgtaccaagtcaagatatgatcctaggtatttattatctttctcaaccaccatttcaaacagaaaaaattgagggatatttcattaataattctgaaattgaacaagctttagaaacaggtgacataaaagttcattcaacaattatttctagatttgaaactattgatgaaaaaggaaatagaatatcagaaaaatatactagtactgcaggtagatttttgttagcaaatttattgccaaagaataaagatataaaattttctttgatagacagaatcttacctaaaaaagttgtttcagaaataattgatattgtattcagattttgtggtcaaaaacgtactgttattttttgtgacaaattaaaagatttaggattcaaacatgcatttaaggcgggaatttcttttggaaaggatgatttaattattccatctaacaaggaacaattaatagatgatacaaaaaaactaattgctgattatgaaaatcaatattctgagggattaattacaaggggtgaaaaatataataaagtagttgatgcctggtctaaat

SEQ ID NO: 255017 - DNA, 141 bp, Unknown
  Bacterial polypeptide expressing nucleotide sequence isolated from the Sargasso Sea
aacttctgtcccagttatacctccagaattaagacctttagggccattagatggcggaagaattgctacttctgatttaaacgatttatacagaagagtaattaacagaaacaatagattaaaaagacttttagatcttaa

SEQ ID NO: 255018 - DNA, 244 bp, Unknown
  Bacterial polypeptide expressing nucleotide sequence isolated from the Sargasso Sea
ttggaattatctgtaagatcagccaattgtctaaagaatgataatataatatacattggtgatttggttcaaaaatcagaatctgaaatgttaagaacgccaaactttggtagaaaatctttaaatgaaattaaggaagttttgcaacaaatggaacttaacttaggtatgtcagttcctgattggcctccagaaaatattgatgatctagctaaaaaatatgaagatccatttaataaataag

SEQ ID NO: 255019 - DNA, 169 bp, Unknown
  Bacterial polypeptide expressing nucleotide sequence isolated from the Sargasso Sea
ctgcctgagttaagaccattagtaccattagaaggcggacgttttgcaactagtgatcttaatgatttgtatcgtagggtgattcatagaaataatcgtcttaaaagactaatagaagtaagagcacctggaatcattgtaaaaaagaaaaaagaatgctacaagagtc

SEQ ID NO: 255020 - DNA, 662 bp, Unknown
  Bacterial polypeptide expressing nucleotide sequence isolated from the Sargasso Sea
agaagtagcagatatagaaattttaaacccagaattggttatatgtaatcttgatgaaaatacaaacttccatatggaaatgacagttggaagtggaaaaggttatgtttctgcagaaatgaataaacaagaagaaccacccttaggattaatacctattgactcactttttagccctgtaaaaaaagtttcatattccgtaagcacagctagagaagggaaagctttagattatgataagcttataatggaagttgaaacaaatggttcaatatctgcagaggatgcagtggcatattctgcaagaatctttcaagatcaacttggtatgtttgtaaattttgatgaaccaaaagaagtaattacaagagagaaaccatcagagccagaatttaataaaaatttacttagaaaagttgacgagcttgaactctcagtaagatcaatgaattgcctaaaaaatgataatataatttatattggagatcttgtgcaaaaatctgagggagaaatgctgagaacaccaaattttggaagaaagtctcttaatgaaattaaagaagtactaaataccatgtcattatatttaggaatggaaattccaaactggcctcctgataatattgttgaattatcaaaaaaacttgaagaagctatataat

SEQ ID NO: 255021 - DNA, 949 bp, Unknown
  Bacterial polypeptide expressing nucleotide sequence isolated from the Sargasso Sea
agattttgacggagaccaaatggctgtacatgtgccattgagcttggaagcacaaatcgaagcacgtgtgcttatgatgtcaacaaacaatattttaagtccatcgaacggtaagccgataattgtaccgagccaagatattgtacttggtatatattatttgtctcaacataaagaggattcaaatacaaaaccagttggtatcttctctaacgttgatgagattgagaacgccattgaaagaaaagatataagcgttcactctaagatagtttcgatatttaatacagtagacaaagacgggaacaaaatttcagagaaatatacaagtactgctggacgtttcctattagctaaaaccttacctaaaaatcacagaattaagtttgaactcgtaaacaaattattaacgaaaaaagcagtttctgaggtaattgacactgtttacagatattgcggtcaaaaagaaactgtgattttttgtgatcgaataaaagatttaggatttaaacatgcttttaaagcagggatttcatttggaaaaaatgatttgattattccaaaaactaaggaaaaattggttagtcaaactaaaaaacaaatagaagattatgaaaaacaataccaagatgggcttatcactaggggagagaaatataataaagtagtagatatttggtctaaatgcacagactcagttgcaaatgaaatgatgaaagaaatttcttcagctgaaaaaatttatccagacggtagaattgaaactaattcagtttttatgatggctgattctggtgctcgaggatcaccagcacagatgaaacaattggctggaatgagaggacttatagctaaaccatctggcgaaattattgaaacaccaataatttcaaactttaaagagggattaacagtattagaatattttaattcaactcacggagctaga

SEQ ID NO: 255022 - DNA, 348 bp, Unknown
  Bacterial polypeptide expressing nucleotide sequence isolated from the Sargasso Sea
aagaccaattaaataattttattaatttcgaagaaccagaggaagaagagaccccagaagttttagaggatcttccatttaataaaaacttacttagaaaagttgatgagttagaattgtctgtcaggtctgccaattgcttgaaaaatgataatattgtgtatattggtgatttggtgcaaagatcagaacctgaaatgttacgaacacccaattttggtagaaaaagtttaaatgaaatacgagaagttctaaaaattatgggattagaactaggaatggatgttgaaaattggccaccagaaaatatagaagagttagtcaagagaatagaagaaccattctaat

SEQ ID NO: 255023 - DNA, 93 bp, Unknown
  Bacterial polypeptide expressing nucleotide sequence isolated from the Sargasso Sea
gtaaggctattcagtgcatcccattagtttgttcagcttttaatgctgattttgatggcgatcaaatggctgtcatcttccactatctctgag

SEQ ID NO: 255024 - DNA, 898 bp, Unknown
  Bacterial polypeptide expressing nucleotide sequence isolated from the Sargasso Sea
gaacctttgttaatcgaaggtaaagcaattcagctccatccattggtatgtgtggcatataatgctgactttgatggcgaccaaatggctgttcatgttccattgacagtggaagctcaacttgaagcaagagcattaatgatgtccaccaataatattctttcacctgcagatggagcaccaattattaatccaactcaggatgtagttcttggcctttattacatgacaagagaaaaagtaaattctcacggagagggaagagtgttttcaaatccagatgaggttcaaagagcttttgaatctgaacaaatagatctacatgcaaaaataaaagtaagaatagagaatgctgaaaaaggagtatttattgaagatactaccgttggaagaacccttatttggagaatcactcctattgaggttggtttcgacaatgtcaataaaacacttgataaaaaagcagtttcatcacttatcgatctttcttatagaaaagcaggattaaaaaagactgttatttttgctgatcaattaatgtatttaggttttgacttctcaactagatcaggctcatcaattggcgttgatgattttgtaattccagaggagaaatatcaaattgtagataaagcagaagatgaagttaaggaaatagaaaatcaattctcatctgggctggttacaagaggagaaagatacaacaaagttgtcgatatttggtcaagagctaatgaaagagttgctaaggcaatgatggaaaaaattagtaaagatagtgttgaggattcagatggcaatgaagtagaacaagcatcttttaattctgtttacatatatgcagattcaggagctagaggatcacctgctcaaataagacagttatcaggtatgagag

SEQ ID NO: 255025 - DNA, 905 bp, Unknown
  Bacterial polypeptide expressing nucleotide sequence isolated from the Sargasso Sea
gttagagttatttaaaccatttttatatgcaagacttaataaattaggcttagcttcaacaattaaacaagcaaaaaaattagtagagaaagaaactaacgctgtctgggatgcacttgaattaattgttagagaacatccagtcttactaaatagagctccaacacttcataggttgggagttcaagcttttgaaccaaaattaattgagggagatgcgattgaattacaccctttaacatgtgccgcgtttaatgcagattttgatggtgatcaaatggctgttcacgttcctttaagtttggaggcacaacttgaggctagaatattaatgctatcaactaacaatattctttctccatctaacggaaagccaataattgtcccaagtcaggatatgattttgggaatttattatttatctcaagaaccagtcactgataagccagctggatattttttaaatgcagatcaaattgaatttgcgctttcttctggtcaaataaaagtccatagtacgattatttctagatttgaaacaattgatgaaaaaggtaatcaaaaatttgagaagtacacttctactgcaggaagatttttactagctaacttattaccaaaaaataataatattaagttttctttgatagatagaattttaccaaagaaaacagtttcagaaattattgatattgtctttagattttgtggtcaaaaaacaacagtcattttctgtgataaattaaaagatctaggctttaaacatgcatttaaagcaggaatttcttttggtaaagatgacttagtcattccggacagtaaaaataaacttattgatgatactaaaaaactaatagctgactatgaaactcaatattctgaaggactaattacaagaggagaaa

SEQ ID NO: 255026 - DNA, 808 bp, Unknown
  Bacterial polypeptide expressing nucleotide sequence isolated from the Sargasso Sea
ttctcgtcgatcccgggtgttcgcgaggacgtgaccgaccttgttctgaacctcaagggcgtggctgttcgcgtcgacgacgattcgccaaagcgcctgcgtcttgccgcagaaggccccgcgaccgtgaccgctggcatgatttccgaatctgcgggcgtcgagatcatgaatccggaccatgtactgtgccagcttgacaagggcgcgtccgtttcgatggaactgacagtaacctcgggcaagggctatgtcccagccggcagcatgcgcagcgaagattcgccgatcggcctcattccgatcgacgcgatctacagcccggtgcgccaggtcgcctacaaggttgacaatgcccgtgtcggccagatcaccgactatgacaaacttctcctgaccgtcgagaccgacggttcggtcacgcccgaggacgccgtcgcctatgctgcgcgcatcctgcaggagcagctccagcccttcatcaatttcgaagagccgaaggagcagccgagcgacgaggagaacgaggacctgccgttcagccgcaacctgcttcgcaaggtcgatgagctggagctttcggtccgctcggcgaactgcctgaagaacgacaacatcgtctatatcggcgatctggtgctgaagaccgagtacgaaatgcttcgcacgccgaacttcggccgcaagtcgctgaacgagatcaaggaagtcctcaagggcatgaatctggagcttggcatggatatcccggcctggccgccggaaaatgttgaggagcttgcccgccgcctggacgaaccgttctagg

SEQ ID NO: 255027 - DNA, 511 bp, Unknown
  Bacterial polypeptide expressing nucleotide sequence isolated from the Sargasso Sea
atagctatagactctctttacagcccagttaaaaaagtttcttatactgttagtactgcaagagagggaaaagctttagattatgataaattaactatgaacgtcgagacaaatggttcaatttctgcagaagacgcagtagcatattcagctagaatttttcaagatcaattaaaaatgtttattaattttgatgaacctgttgaagcaccagttaaagaagtatctacagaacctgaatttaataaaaatttattaagaaaagtagatgagctagaattatcagtaagatcaatgaattgcttaaaaaatgataatattatttatattggtgacttggttcaaaaatctgagggcgaaatgttgagaacacctaattttggaagaaaatcgctaaatgagattaaagaagttttaactggtatgtctttgtatttagggatggaaataccaaactggccaccagacaatatagcagaaatgtctaaaaaattagaggaagcgatttaat

SEQ ID NO: 255028 - DNA, 875 bp, Unknown
  Bacterial polypeptide expressing nucleotide sequence isolated from the Sargasso Sea
aatggcactagaattattcaaaccttttttatatgcgagactgaataaacttggtttagcttctacaattaaacaagctaagaaattagttgaaaaagaaacaaatgcagtttgggacgctttggaagtcattgtgagagagcatccggttatactaaatagagcacctactcttcatagactaggtgttcaagcttttgaacctaagttgatagaaggagatgcaattgaattacatcctttaacttgtgctgcgtttaatgcagattttgatggggatcaaatggctgttcatatacctttaagcttagaagctcaactagaagctagggttttaatgatgtctacaaataatattttaagtccatcaaatggaaagccaattatagttcctagtcaagatatgatacttggaatctactatttgtcacttccaccatatcaggagaaaaaagtcgagggttactttgtaaatgactctgaaattgagcaaggtttagagtctggaaaaatcaagatacactctagaattatatctagatttgaaacagttgatgaaaaaggtaatcaagtatttgaaaaacacactagtacagctggtagatttttgttggcaaatcttttaccaaaaaataaagatatcaaattttctttaattgacagagttttacctaaaaaagttgtttcagaaataattgattttgtttttagatatacaggtcaaaaaagtactgtaattttctgtgacaaattaaaagatttaggatttaaacatgcatttaaagcaggtatttcatttggaaaagacgatctaattatacctcaaaataaagaacagttgatagatgaaactctaacattaataaaagattatg

SEQ ID NO: 255029 - DNA, 813 bp, Unknown
  Bacterial polypeptide expressing nucleotide sequence isolated from the Sargasso Sea
gcttttaatgctgattttgatggtgatcaaatggctgttcacgttccattaagtctcgaggctcaattagaggcccgagttcttatgatgagtactaataatatactttctccatcaagtggaaaacctataattgtgccatctcaagatattgtcttaggaatttattatttatcgattatgcgaaataatcaaaaaggggaaggaagaaattttcttgatacaaacgaaatattaaaagcagttgatttaaaagatatcagcctgcactcaaaaataaatgtaagaattaaaaactttgacggctcattctccaaggtagaaacaactgcaggaaggatgttactggctgattctttacctaataatgaaaaaataaatttcagtttaattaataaaactttaactaaaaaagaagttagtaatttgattgatacagtttaccgtttctgtggacaaaaagaaacagttctttttgcagacagtataatgcaaataggttttaaatacgcagctattgcgggaatttcatttggaaaagatgatctgatcattccagaagaaaaacaaaaattacttgatgaaacacagtctaaagttcaagaatatgaaaatcaatatcaagatggtctaattactcaaggagaaaaatataacaaagtagttgatgcttggtcagaatgcacaaacagggtttctgataaaatgctagatgtaatttcaaaaccagaagatgataagccgattaattcagtatacatgatggctcattcgggagctcgtggttctgctgctcagttaaagcaacttgcg

SEQ ID NO: 255030 - DNA, 337 bp, Unknown
  Bacterial polypeptide expressing nucleotide sequence isolated from the Sargasso Sea
aatggcttttagaaacgatataaaaaaacaaagtagctttaactctattacaatttcattggcatctccagaagttgtccttgaaaattctagtggtgaagttttaaaacctgaaactattaattacagaacttataaaccagaaagagatggtttattttgtgagcgtatttttgggcctgtaaaggattatgaatgtcattgcgggaagtacaaaagaattcgatacaaaggaatcgtttgtgacagatgtggtgttgaagtaaccgagaaaaaagttagaagagagcgaatgggtcatatttcacttgttgtacctgtagctcacatatggtat

SEQ ID NO: 255031 - DNA, 389 bp, Unknown
  Bacterial polypeptide expressing nucleotide sequence isolated from the Sargasso Sea
cccagaagatgcaatagcatttgcagcaagaattatccaagatcaattacaatcgtttattaattttgaagaacctgaagagatacaggttgaacctgatactcttgaacctcaatttaataaaaacttactaaggaaggttgaagagttggagctttctgtaaggtcaatgaactgtttaagaaatgataatattatctatattggtgatttagttcagaaaagtgaaattgaaatgcttagaacacccaactttggaagaaaatctttaaatgaaattaaagaagttcttggcgttatgtctctatatttaggaatggaagttccaaactggccaccagaaaatattgaggagctagctagaaaagttgaggatccatataactaat

SEQ ID NO: 255032 - DNA, 949 bp, Unknown
  Bacterial polypeptide expressing nucleotide sequence isolated from the Sargasso Sea
aggggagcatccaatcttttaaatcgcgcacctactcttcatagacttggagtgcaagcttttgagcctaagttgatagaaggagatgcaatgaaccttcatcctttaacatgtgcagcttttaatgctgattttgatggcgatcaaatggcggttcatattcctttaagtttagaggcgcaactggaggcaagagttttgatgatgtcgacaaataatattttaagtccatctaatggtaaacctattatagtcccaagtcaggatatgatattagggatttactacctttctcaacaaccttatcaagaggaaagagttgagggttattttgtaaatacctctgaaatagaacatggtcttgaaacaggtcaaataaaagttcattctagaatcgtatctagatttgaaacattagatgaaaaaggtaaaacaaaatttgaaaaacatattagtactgctggtcgttttttattagctagtttgttaccaaaaaacgtaagtaataagttttcacttgtagatagattgttaccaaaaaaaattgtttctgaaattattgatcatgtatttagattttcaggtcaaaaaaatactgttatattttgcgataagttaaaagatttaggatttaaacatgctttcaaagcaggtatatcttttggtaaggacgatttaattattcctgataataaagagcaattaatcgatgaaactaaaaaactaattaaagattacgaaaatcaatactcagagggtttaataactcgaggcgaaagatataacaaagtagtagatgcatggtctaaatgcactgataaagttgcatctgaaatgatgaaaaaaatttcagcaacagaggctacgaaagatgggttaaaaattaattcggtatttatgatggcagatagcggcgcacgaggatcagctgctcaaatgaaacaattag

SEQ ID NO: 255033 - DNA, 240 bp, Unknown
  Bacterial polypeptide expressing nucleotide sequence isolated from the Sargasso Sea
gctgcaataccagattgaccgcatcgagcatcaagtggaagaggatcgctcccagagtggagtgttcctcatcggtccccttgagcggggtcaggcgaccaccctgggcaacgccctgcgacgcgtcctcatgggcggcctcgaaggcagtgccgtcaccgccattcggatcgctggtgtcaaccacgagtacgccactgtccccggtgtgcgtgaggacgttctcgacatccttctgaa

SEQ ID NO: 255034 - DNA, 379 bp, Unknown
  Bacterial polypeptide expressing nucleotide sequence isolated from the Sargasso Sea
atgcatgaatcccttatccatgggatcttaaaaaacgaacatggatcaatatcaaaagcagttacgcttattgagaatggcggaactgaaatagttcccttattaaacaatatacatgaatattcaacaaattcattacgtattggtattaccggtcctcctggtgcaggaaaaagcactataactaatgcgttaattgagatacttctaaaaaataaaaaaactgtaggagtcatagcagttgacccaaccagtccattttctggaggatctttattgggtgacagaattcgaatgaaccattatgcatgggatgatagggtctttgtgaggagtatggggagcaatggtgagttgggtggcctagcaagaaaatcac

SEQ ID NO: 255035 - DNA, 199 bp, Unknown
  Bacterial polypeptide expressing nucleotide sequence isolated from the Sargasso Sea
ctgattcaaaagaattggaaagaattaatttcacctgaaaacttgacaattgaaaaaggtgaagacccaaatcgtgaagcaacaattgttgccgaacctctggaaagagggtttggcttgacacttgggaatgctttgagaagagttttactttcttctcttcaaggtacagcagttacgtcagttcaaattgatggtg

SEQ ID NO: 255036 - DNA, 721 bp, Unknown
  Bacterial polypeptide expressing nucleotide sequence isolated from the Sargasso Sea
gatgtcaatttcaaaacccagaaaactacagtttgaaactgagaatcttaaatcagattatggtaaattcactcttgatcctctagaacctggttacggagttacaataggacattctttaagacgtgtacttctttcttcaatcaggggatcagctgttttcgcggttcagattgacggcgttacacacgaattcacaaatattcctggtattgtagaagacatgcttcaagtgatcctaaatattaaagagcttaagattgaacagtatgttgatgaaattattgaacttgaactcataggagaaggaccatgtgagataaaagcgggagaaatttcaacttttgaaaaagctgaaattttaaatcctgatctcactctggctacattacaaaaaggcgctactgtcagtatgaccatgtactcacgattcaacaagggatatgttacttcagaagataatcaaggggtagaattaccagttggtacaatttttctggattcaaaccactcacctgttagtcggataaactatgaaattgaaaattcaagagttgatcaaaaaacagactatgatcgcttaaattttgaattgtggacaaacggttctgtaaagcctgctgatagtctggcttatgctgcaaaaataattaaagaacatatggatgtatttattaactttgatgaaagtagtataaaggatgaaccatcagatgaagtg

SEQ ID NO: 255037 - DNA, 631 bp, Unknown
  Bacterial polypeptide expressing nucleotide sequence isolated from the Sargasso Sea
gatttagtaatttgtaatttagatgaaaataccagttttcacatggaaatgaatgttaacactggtaagggctatgttccagcagaacttaataaaccagaagaaccgcctctaggattaatagctatagactctttgtatagtcctgttaaaaaagtttcttattctgttagcactgcaagggaaggtaaggctttagactatgataaacttacaatggaagttgaaactgatggatcaatttctgctgaggatgcagttgcttattctgctagaatttttcaagaccaacttaaaatgtttattaattttgatgagccagtggaagcacctgttaaagaagtatcaacagaaccagaatttaataaaaatttattaagaaaagttgatgagctagaattatctgttcgatcaatgaattgtttgaaaaatgataatataatatatataggtgatttagttcaaaaatctgagggtgaaatgctcagaacacctaattttggaagaaagtcacttaatgaaattaaagaagtattgactggaatgtcattatatttgggcatggaaataccaaattggccaccagacaacatagctgaaatgtctaaaaaacttgaggaagctatataaa

SEQ ID NO: 255038 - DNA, 403 bp, Unknown
  Bacterial polypeptide expressing nucleotide sequence isolated from the Sargasso Sea
ttgcagacctcgcaaaagaagaagagtttaaattataaggagattaaagtgctacaaaaaaattggatggaattaattaagccaagtaaaatggatgtgaatgtccagaatgatagtaacaagaaaggtgtattaatagctgaacctttagaaagaggttttggacttacactaggtaatgcaatcagaagagtcttactttcgtctcttcaaggagcggcaataacttctgtaaaaataaaaggagtagtgcatgaattttcaacaatacaaggtgtcaaagaggatttaactgacattttacttaaccttaaatctgttgcagttaaagtgcactcaccaggattaaaaaaaatgtatattaaatcaactggttcaggtgaaataagagcaggaaacttga

SEQ ID NO: 255039 - DNA, 894 bp, Unknown
  Bacterial polypeptide expressing nucleotide sequence isolated from the Sargasso Sea
tttgtttatggcaaactcgaaaatagagagcttgcgacaactataaaagctgcaaaaaaattagtcgaaagagaaacaccagaagtttgggaagttctagaagaggtgattagagaacatcctgttttacttaatagagcgccgacgcttcatagactaggtttacaagcttttgagcctaaattaattgaaggtaaggcaatccaacttcatcctcttgtatgtgttgcatttaatgcagattttgatggagaccaaatggcagttcatgttccattaacgctcgaggctcaacttgaagcgagagcattaatgatgtcaaccaataatatactatctccagctgatggatccccaattattaatcccacccaagatgttgtgcttggtctttattatatgacgagggataatgctaatgcttcaggtgctggaagaacttttagtaatcctgatgaagtcttgagagcttatgaaacagagaatttagaaattcattcaccaataaaagtaagagttactcatgagaatggagaaacttcaatagagaatacaactgttggaagaatattaatttggagaataactcctactgaggttggttttaaaaacatcaataatgtattaaataaaaaatcagtttcaaaactagtagatacttcatatagaaaagccggcctaaagaaaactgtgattttcgcagaccaattaatgtatctaggttttgatttctctacaagatcaggatcatctattggagttaatgattttgttattcctgaaagaaaagcaaacattattgattcatctgaaaaagaagtaaaagcaatagaaaagcaatttgattcaggggctagtactaggggagaaaagatatacaagggtattgatatt

SEQ ID NO: 255040 - DNA, 421 bp, Unknown
  Bacterial polypeptide expressing nucleotide sequence isolated from the Sargasso Sea
gttgtctcttgacgttactaccgacggtacaattactccagaagataccgtagcttttgcagctcgtatacttcaggaccagtttcagttgtttgtaaattttgacgagccggctccagttgttgaggaagatgttgctgacgagttaccttttaataaaaatttattaagaaaggttgatgagttggagctatctgtgcgttcggcaaattgtttaaagaatgataatataatttatattggtgatttagttctaaaaagtgagtcggatatgttacgtaccccaaattttggtaggaagtctcttaatgagattaaagaggttttggggcaaatgagtcttcatttgggcatggaaataggcagttggccgccagagaacattgaagagcttgctaagaagttggaagaccctttttag

SEQ ID NO: 255041 - DNA, 499 bp, Unknown
  Bacterial polypeptide expressing nucleotide sequence isolated from the Sargasso Sea
ttatttagtccagtaaaaaaagtttcattcgcagttgaaaacacgcgagctggtagtgctctagattatgataaattacttatgacagttgaaacaaatggaactatagccgctgaggacgctatagcttactctgcaagaatatttcaagatcaactgtcaatgtttgtaaattttgaagatcctcaggaaattgtaaaagaagtaaaatcttctgaaccagaatttaacagaaatttacttaaacgtgttgaagaactagaactttctgtaaggtccatgaactgtcttaaaaacgataatataatttatattggagatttagttcagaaaactgaaccggaaatgttaagaacaccaaattttggaagaaaatcattaaacgaaattaaagaggtgttaaataccatgtctttatacttaggaatggaaataccaaattggcccccagataatatcgccgaattatcaaaaaaacttgaggaaaataattactaac

SEQ ID NO: 255042 - DNA, 346 bp, Unknown
  Bacterial polypeptide expressing nucleotide sequence isolated from the Sargasso Sea
atgaaagtagaaaatgttaatgttaaaaattggaagtcactgatcaaaccacctaaattagatgttcaattaagtgaagacaaatcatttgcaaaaataatagcagaaccattagaaaaaggttacggtttaactttaggaaactcgattagaagaatattactttcatctattagaggagcagcagttacctcaattcaaatagacggagttctgcatgaatttacgtcaattaaaggtgttagggaagatgttacagatatagttttaaatgtaaaatctcttgctctaaaaagtttgtctgatggaaataaaaaacttatattagatgttaagggtcctggta

SEQ ID NO: 255043 - DNA, 655 bp, Unknown
  Bacterial polypeptide expressing nucleotide sequence isolated from the Sargasso Sea
ttctgatattgaaatattaaatcctgatttagtaatatgtaatttagatgaaaacacaaattttcacatggaaatgacagtgagtaacggaaaaggttatgtcccagccgatatgaacaaacctgaagaaccaccattaggccttattcctatagattctctatttagtcctgtaaaaaaagtttcttattcagtaagtaccgctagagaaggtaaagcattagattatgataaattaacaatggaagtagagactaatggatcaatatctgctgaggatgcagtagcatattctgctagaatattccaagatcaacttggaatgtttgttaattttgatgaaccacaagaagttattgttagagaacagccaacagaaccagaatttaataaaaatctattaagaaaagtagatgaacttgaactttcagtgagatctatgaattgtcttaaaaacgataatataatttatataggtgatttagtgcaaaaatctgagggagaaatgttaagaaccccaaattttggaagaaaatcattaaacgaaataaaagaagtattaacgggtatgtcactatatttaggaatggaaatacctaattggccaccagacaatattgcagagttatcaaaaaaacttgaggaagccatttaa

SEQ ID NO: 255044 - DNA, 928 bp, Unknown
  Bacterial polypeptide expressing nucleotide sequence isolated from the Sargasso Sea
cagctacaaagatgaaatctctgacgcagttaaaaaatataccaaagaatttaacccaagattaacaaaatctgttacagatggatttgaaaattcaaaactcagcaaagatggaatagaaaaagttgccaaaaaaggattggaattatataataatgcaaaagcagaacctggtcaagccgttggaattgtaactgcacaatcaattggggaaccgggaacacaaatgacattgagaacttttcattttgcaggaatcgcagaaagaaatgtaacacttggtttaccaagacttattgaattagttgatgcacgtaaaaaaccagtgacaccaaccatggacatttatcttgataaagagtcaaaaaatgatcaggcaaaggcagtagaagttgctcgaaatatattagaaacatctgttaatgacttaattctagatgatccaactgattatgccacaaaaattactctgaatctaaatgaaaagaagatttctgatcgtggatgcacaattaatgatgttcaaaatgcattagagaataataaaaaattcaaggttgaagtgcttggcagttcattaatcttaaatcttgttgataaagaattagatgcaccaactgtaatcacattaagaaataaaatacgtaagacaactgtaaaaggtgtaaaagacattaagagagttacaattgttaagaaagataatgaatgggtaattcagactactggttcaaatctttctgatgtcctaaaggtttcaggcattgataaaaataatgttagaaccaataatgtttctgagattgctgaaactcttggaatagaagcagctagaaatgcattaattaatgagctttcttcaactcttgaagaccaaggtcttgaagttgatcagagatatcttatgttggtttctgatttaatgtgt

SEQ ID NO: 255045 - DNA, 847 bp, Unknown
  Bacterial polypeptide expressing nucleotide sequence isolated from the Sargasso Sea
agattaggcgttcaagctttcgagccaaaactaattgagggtaatgcgatagaactacatccattaacatgtgctgcatttaatgcagattttgatggagatcaaatggcagtacacgttccattaagtttagaagcacaattagaggctagagtattgatgatgtctacaaacaatattttaagtccatctaatggtaaaccaataattgtaccaagtcaggatatgatattaggtatttattatttatcacaaccaccagtgcaaacagagagaattgaaggatattttgtaaacacatctgaaatagagcatgcattagaaacaggtcagattaaagtgcattcaagaattgtttctagatttgaaactattgatgaaaaaggaaatgctaaatttgaaaagcatataagcacagcaggaagatttttattatcaagcataattccaaaaaatttaaataataaattttcattaatagatagattactgccaaagaaaattgtttctgaagtaatcgatcatgtatttagattttcaggtcaaaaaagcactgtaatattctgtgataaattgaaagatattggatttaaacatgcatttaaagctggaatttcatttggtaaagatgatcttctaattccagaaaataaggaacaattaattgatgaaacaaaaaaacttattgcagattatgagggtcaatatgcagagggcttaataactagaggagaaaaatataataaagttattgatgcatggtctaaatgtacagatagagtggcgtcagaaatgatgaaaagaatttcagccacagaagttaccgatgaaggattaaaaattaatt

SEQ ID NO: 255046 - DNA, 922 bp, Unknown
  Bacterial polypeptide expressing nucleotide sequence isolated from the Sargasso Sea
ttacaccctttaacttgtgcagcatttaacgctgacttcgatggtgaccaaatggcagttcacgttccattaagtttagaagctcaattagaagcaagaatattaatgttatctacaaataatattctttctccatcaaatggtaaaccaattattgttccaagtcaggatatgattttaggaatttactatctttcacaagagcctatatctgataaacctgctggatactttacaaattcagatcaaattgaatttgcattatcatctggtcaaataaatgtacatagcactatcatttcaagatacgagactgtagatgggcaagggaataagaaaacagaaaaatatacttctacagctggaagatttttattagcaaatttattacctaaaaatagtaacattaagttctctttggtagatagattattacctaaaaaagtagtttcagaaataattgatattgtctttagattttgtggtcaaaaaacaactgtaattttctgtgataagctgaaagatttaggatttaaacatgcgtttaaagcaggaatttcttttggaaaagatgatcttgtaatccctgaaaataaaactcaattaattgacgatactaaaaaattaattgcagattatgaaacacaatatgctgaaggtttaattacaagaggtgaaaaatataacaaagttgtagatgcttggtctaagtgtacagataaagttgctggtgaaatgatgaagggaatttcagcgacagaaaaaactgatgaaggattaaaaataaattctgtatttatgatggctgacagtggagctagaggatctgccgctcaaatgaaacaattagctggtatgcgaggtttgattgcaaaaccttcaggagaaattattgaaagccccaattatttcaaactttaaa

SEQ ID NO: 255047 - DNA, 245 bp, Unknown
  Bacterial polypeptide expressing nucleotide sequence isolated from the Sargasso Sea
aatggaaaacgctgaagtaaatattaaaaactggaagtctttaataaaacctacaaaattagatgttcaattaaatgatgataaatcatatgcaaaaattattgctgaaccgcttgagaaaggttacggtcaaacacttggaaattctttaagaagaattctactttcatcaatacgtgggacagctgtaacagcaattcaaattgatggagtattgcatgaatttacatctataaaaggtgtta

SEQ ID NO: 255048 - DNA, 532 bp, Unknown
  Bacterial polypeptide expressing nucleotide sequence isolated from the Sargasso Sea
tatgtttcttctcgaggaaaatagttcatcttcagatgttgattttatttctattgattctgtatttactcctattattaatgtgaagtatagtattgaaaatacaagagttgaacaaaaaactgattttgagaaattaattttagatattcaaactgatggttcaattcatcctgaggatgctttgaaaggatcagctcaattattaattaagcatttttatctattctctgataaagatatggagtttgcagaagataattctgatgaaatagaggttgttgatgaggaattacttcatatgagaaaacttctaaagacatcattaaacgatttagacttatcggtaagagcatataactgcttaaaagctgctgatattaaaacacttggagatcttgtaagtattgaaatttctgatatgatgaaatttagaaattttggtaaaaagtcattaacagagcttgaagaactagttgataataaagggcttaattttggtatggatctatctaagtataatttagattaa

SEQ ID NO: 255049 - DNA, 133 bp, Unknown
  Bacterial polypeptide expressing nucleotide sequence isolated from the Sargasso Sea
tatgcaaacatcagttattgatttattagtaccaaccgaaattcaggttgaggacatcaatgaaacaacttcaaagataacacttgagcctctagaaagaggttttggtcatacactaggcaatgccttaaga

SEQ ID NO: 255050 - DNA, 408 bp, Unknown
  Bacterial polypeptide expressing nucleotide sequence isolated from the Sargasso Sea
aatgagcagctcaaacaattcagcccgcgaattgctcggcttggaccgggtgaacctggtggattacgtgcaggtctccgtggcctcgccggaaaccatccgccgctggtccaagggcgaggtgaaaaaccccgagaccatcaactaccggaccttcaagcccgaaaagggcggcctcttttgcgaacgcatctttggccccgtaaaggactgggaatgttcctgtggtaaatataagcgcattaaatacaagggcgtggtttgcgaccgttgcggtgtggaggtgaccctcgcccgcgtgcgccgcgagcgcatgggccacatcgagctgtctgtgcctgtcacgcacatttggtttttcaaatgtatgccctcgcgtctgggcctgatgctggacatgaccggccg

SEQ ID NO: 255051 - DNA, 469 bp, Unknown
  Bacterial polypeptide expressing nucleotide sequence isolated from the Sargasso Sea
ttctcggtcgaaaatacacgagaaggtaaatccttagactacgacaaattagttatggttgttgaaactgatggttctgtaaatgctgaagatgctgtagcatatgctgcgagaatatttcaagatcaactttctttgtttgtaaattttgaggaacctaaagaaattgaacaaaaacctacgcctacagaacctcaatttaataaaaacttacttaaaaaagtagatgagttagaactctcagtcagatctatgaactgtcttaaaaacgataatatagtttatataggagatttagttcaaaagactgagccagaaatgttgagaactccaaattttggtagaaaatctctaaatgaaattaaagaagtattaaacggtatgtctttatatttaggtatggaaataccaaattggccacctgataacattgccgaattgtcaaaaaaacttgaagaaaatgtgtaat

SEQ ID NO: 255052 - DNA, 787 bp, Unknown
  Bacterial polypeptide expressing nucleotide sequence isolated from the Sargasso Sea
aaaaaaaatggcattagaactttttaaaccatttttatatgctagattgaataagttaggattagcctcaactataaaacaagctaaaaaattagtcgagaaagagacaaacgcagtttgggatgctttagaacttatagtaagagagcacccggtattgttaaatagagcaccaacacttcatagacttggagtgcaagcttttgagcctaaattaattgaaggtgatgcaatagagctacatcctttaacttgtgcagcttttaatgctgattttgatggagatcaaatggctgtgcatgttccattaagtttagaggcacaattagaagcaagaatattaatgttatcaacaaataacatattgtcaccatctaatggtaaacccatcattgttccgagtcaggatatgattttaggtatttattatttatctcaggaaccaataacagataaaccagtaggatattttttaaatgcagatcaaattgaattcgctttatcatctggtcaaattaaagttcatagtactataatttctagatttgaaacagtagatgaaaaaggtagaaaaaaatttgaaaaatacacttcaacagcagggagatttttattagctaatctattaccaaaaaacaaggatattaagttctctttagtagatagactattacctaaaaaagttgtttcagaagtgattgatattgtttttagattctgtggtcaaaaaacaactgtcatattttgtgataaattaaaagatttaggtttcaaacatgctttcaaa

SEQ ID NO: 255053 - DNA, 920 bp, Unknown
  Bacterial polypeptide expressing nucleotide sequence isolated from the Sargasso Sea
tgtcttgttaatagagcaccaactttacatagattaggtgtgcaagcttttgaaccaaaattaatagagggtgatgcgatagaactccatccattaacttgtgcagctttcaacgctgattttgatggagatcaaatggctgtacacgtcccgttgagtttagaagctcaattagaagcaagaatattaatgctatcaactaataacatcttatcaccgtcgaatggaaaacccataattgttccaagtcaagatatgatattagggatttattatttatcacaagagcctttgactgataaaccgatgggatattttttaaatgcagatcagatagagtatgctctatccttaggtcaattgaaggttcatagtacaattgtttcaagatttgaaactgttgacgaaaaaggtaataaaaaatacgaaaaatatacatctacagctggacgtttcttactagcgaacttattgccaaaaaataaagatataaaattttctttagtagatagattattaccaaaaaaagttgtttcagagattattgacattgtattcagattttgtggacaaaaatcaactgtaatattctgtgataagttaaaagatttgggtttcaaacatgcatttaaagccggaatttctttcggaaaggatgatttagtaatcccacaaaacaaaactcaattgattgacgatactaaaaaacttatttcagattatgagactcagtatgcagaaggtttaatcactagaggtgaaaaatataacaaagttgtagatgcttggtcaaaatgtactgatagagtagctggtgaaatgatgaaaggtatttctgctacagaaaaaacttcagaaggtctaaagattaattctgtatttatgatggcagatagtggtgcaagaggttcagcagctca

SEQ ID NO: 255054 - DNA, 775 bp, Unknown
  Bacterial polypeptide expressing nucleotide sequence isolated from the Sargasso Sea
acagatatagttttaaatgtaaaatcgctagctttgaaaagtaacatagaaggttcaaaaaaacttattttggatgccaagggtcctggagaaataaaagctgctgacataactgcagttactgacatagaaatattaaacccagaattagtaatttgtaatttagacgaaaaaactcattttcatatggaaatgacagttggcaatggtaaaggttatgttcctgccgatatgaataaacctgaagaaccaccacttggattaattccaattgattcattgttcagtcctgtaaaaaaagtttcttattcaataagcacagctagagaaggtaaggccttagattatgataaacttacaatggaagtagaaacgaatggttcaatatctgcggaggatgcagtagcttattctgctaggattttccaagatcaattgggtatgtttgttaattttgatgagcctcaagaagtagcaattagagaaaaaccatcagagcctgaatttaacaaaaatttattaagaaaagttgatgaactggagctttcggtaagatctatgaattgtttaaaaaacgataacatcatttatattggtgatcttgttcaaaaatcagaaggtgaaatgttaagaacacctaactttggtagaaaatcattaaatgaaataaaagaagtattaaatactatgtctctttatttaggaatggaaattccaaattggccaccagacaatattgcagaattgtcaaaaaaacttgaagagtcgatataat

SEQ ID NO: 255055 - DNA, 836 bp, Unknown
  Bacterial polypeptide expressing nucleotide sequence isolated from the Sargasso Sea
gcattaagaagagtattactttcatctttagaaggttttgcttttacatcaattaaaattgataatgtagagcatgaatttacctctttagctggcattgttgaagatgttacagaaattattttaaatcttaaacaagtaagacttaaaaggcaaattgaatctgtagacaatgaaactgtttcagtttctttaaatgctcaaaatcaattaaaagctggtgatttacaaaaatttatttctgggtttcaaattctaaatcctgaaacagttatttgtaatatggaaaaaaatgttaaggtaaattttgaacttaatattgataaaggaagaggatatgtttctgctgaagaaaataaaaaagtaggatttccaataggaactatttttatggattcagtttttacacctattaaaaatgtaaagtatacgattgaagactttagagttgagcaaaaaactgactatgaaaagttagtttttgaaatagttactgatggatcaattgatccaaaaaatgcattgactgaaggagctaaagttttaattcatcattttatgctattctctgatgaaagaatcactttggaagctgacgaaattgcgcaaactgagacttatgatgaagagtctttacacatgagacaattattaaaatcaaggttgattgatatggatctctcagttagagctcttaattgtttgaaagctgcagaagttgatacacttggtgatcttgtatcttttaataaatcagatttgatgaaatttagaaattttggaaagaaatcattaactgagcttgaagaattagttctagttaaaggattgaattt

SEQ ID NO: 255056 - DNA, 540 bp, Unknown
  Bacterial polypeptide expressing nucleotide sequence isolated from the Sargasso Sea
ataaaccagaggaaccacctttaggtttaattccaatagattcgttgtttagtccagtaaaaaaagtgtcttattcagtcagtactgcaagagagggaaaagcattagattatgataaattaacaatggaagttgagacaaatgggtcaatatctgcagaagatgctgttgcatattcagctagaatttttcaggatcaattaggtatgtttgttaattttgatgaaccacaagaagttattgttaaagaacaaccatctgagccagaatttaataaaaatttattgagaaaagttgatgaattagaactttctgtaagatcaatgaactgtctaaaaaatgataacattatttatataggtgatttagttcaaaaatctgaaggtgaaatgttaagaacacctaactttggaagaaagtctttaaatgaaattaaagaagtattaacaggcatgtcattatatcttggaatggaaattccaaactggccaccagataatattgctgaactatcaaaaaaacttgaggaagcaatctaat

SEQ ID NO: 255057 - DNA, 591 bp, Unknown
  Bacterial polypeptide expressing nucleotide sequence isolated from the Sargasso Sea
tttatatgctagattgaataagcttggtttagcttcaacaatcaaacaagctaaaaaattagttgaaaaagagactaatgctgtttgggatgctttagagctgatagtaagagaacatccagttttacttaacagagcaccaacacttcatagactaggtgttcaagctttcgaacctaagctaatagagggagacgctatcgaattacatccattaacttgtgcagcttttaatgctgactttgatggagatcaaatggcagtgcatgttccattaagtttagaggctcaactagaggctaggattttaatgttatcaactaacaatattctatcaccgtcaaatggtaagccaatcatagtaccaagtcaggatatgatattaggtatttattatttatctcaagaacctttaacagataaaccttcaggatattttgttaatgcagatcaaattgaatttgcattgtcttctggtgaaattaaagttcatagtactattatctcaagatttgaaacaatagatgaaaaaggcaataaaaaatttgaaaaatatacttcaactgctggaaggtttttattagctaattt

SEQ ID NO: 255058 - DNA, 332 bp, Unknown
  Bacterial polypeptide expressing nucleotide sequence isolated from the Sargasso Sea
aatagagcattctgcaactatttttcagcagcaattaagttcctttgttgacctcgatgcaattgcagagcaagaggccaagaaagatcaaaatgactttgatcctattttgcttagatcaatagaagagttggaattaactgtgcgatctacaaactgtctaaaagcagaaagtatattcttaattggagatctaattcatagatctgagtttgatcttttaaagaccccaaacttaggtaaaaagtctctaaatgaaattaaggatgtgttagcttcaaaagaattatctcttggaatgaatgtagaaaactggcctccagtaggataaa

SEQ ID NO: 255059 - DNA, 744 bp, Unknown
  Bacterial polypeptide expressing nucleotide sequence isolated from the Sargasso Sea
actgccaaaaaaaatggctcttgagttatttaaaccttttttatatgctcgtttaaataaattaggtttagcatcaacaattaagcaagcaaaaaaattagttgaacgagaaagaacagaggtttgggacgcattagagttaattgtaagagaacatcctgtaatattaaatagagctcccacattgcacagacttggtgtacaagcctttgagcccaagctcattgaaggtaatgctattgaactacatccattaacatgtgcagcatttaatgctgattttgatggagatcaaatggcagttcacgtacccttaagtttggaagcacagttggaagcaagagttttaatgatgtcaacaaataatatattaagcccatcaaatggtaaacctataattgtacctagtcaagatatgatacttggaatatattacttgtcacaaccaccagttcaaactgataaagttgacggatattttgtaaatacttctgaaattgaacatgcattagaaacaggacaaattaaagtacattcaagaatagtttctaggtttgaaactgtagatgataaaggaaaaactaagtttgaaaaacatataagcacagctggaagatttttattatcaaatataattccaaaaaatgtgaataataaattttctttaattgatagattgttgcctaaaaaagtagtttcagaggtaatagatcatgtctttagattttctggtcaaaaaagtac

SEQ ID NO: 255060 - DNA, 833 bp, Unknown
  Bacterial polypeptide expressing nucleotide sequence isolated from the Sargasso Sea
aatgaatagagaattagttaatatttttaatcaaaatcaaggtataaaaaattttaacagtttgaaggtctctattgccagtccagaagatattaggtcatggtcttttggtgaaattaaaaaacctgaaaccattaactatagaacatttaaacctgaaaaagacggattgttttgctcaagaatttttggcccagtaaaagactacgaatgtttatgtggtaaatacaaaagaatgaagtttagaggtatcatttgtgaaaaatgtggagtagaggtaacattatccaaggttagaagagatagaatgggtcatattgagttagcagcacctgtttctcatatttggttcatgaaatcattaccaagtcgcattgcaacccttcttgatatgacaataaaaaatttagaaaaggttctttattttgaacaattcattgtagttgagccagggcttacagatttaaaaaaaggcgaggtaatttcagaagatcagtacatagattatcaagatcagtttggtgaagactcatttaatgctgcaattggagctgaagcaattgaaaatatgttaatgaatatagatcttgaatcagaatttgaacattccaaaaatgaattagctgaaaccaagtctgaactaaaaaaaactaaattaactaagagaataaaactacttgaatcttttattgtttcaaaaaataaaccagaatggatgatactaagagttttacctgttattcctccagagttaagacccttagtccctctagatggaggaagatttgcaacaagtgatcttaatgatttgtatcgaagagtaataaatagaa

SEQ ID NO: 255061 - DNA, 195 bp, Unknown
  Bacterial polypeptide expressing nucleotide sequence isolated from the Sargasso Sea
cctgattcaaaagaattggacagaattaattacacctgaaaatttaacaattgaaaaaggtgaggacccaaatcgtgaggcaacaattgttgctgaacctttagaacggggttttggtttaacgcttggtaatgctttaaggagggtacttttatcttctcttcaaggtactgccgttacatcagtccaaattga

SEQ ID NO: 255062 - DNA, 940 bp, Unknown
  Bacterial polypeptide expressing nucleotide sequence isolated from the Sargasso Sea
agattttgatggcgatcagatggcagttcaccttccattaggccctgaagcaatattggaagctcaactacttatgctaggatcgcataatattcttaatcctgctaacgggtctccgattactgttccatctcaggatatggttttaggactatattatatgactaagtcaagaagatcatcagataatttaaagttaaaaggagagggctcaattttcttttctcctgaagaagtaacaatggcctataatgagaaaaaagttgatctaaatgccataattaagtgtagagttaaaacatctgacatagaaaattcttataaaattattgaaactactcctggtagagtattttttaatgaagtagttccttccaaagctggttactttaatgaagttcttacgaagaaaaatttgagagaaattattggtaaaattcttcaaaacacaagtgttcctgagactgctgaattccttgataaaataaaagatcttggttattcatttgctttcaaaggtggattgtcttttagtttaggtgacattattattcctcaacaaaagcaaaatttaattgatgatgccaacaatcaagttgatacaattataagtaattataatatggggctaattacaaataatgagaggtataatcaggtaattgatgtatggacatctgcaaatgcaacccttactgagcttgcaatgaagcaaataagtgaagatcaacaaggatttaattctgtctatatgatgcttgactctggagcaagaggttcaaaagaacaaattagacaacttactggtatgagaggtttgatggcaaaacctaaaaaatctaatgtaggtggaggagaaattattgaaaatcctatactttcaaacttcaaagaaggtctttcaattttagaatatttcatttcaactcatgagcaagaa

SEQ ID NO: 255063 - DNA, 838 bp, Unknown
  Bacterial polypeptide expressing nucleotide sequence isolated from the Sargasso Sea
caagcatttgagccgaaattaattgaaggtgatgcaattgaattacatcctttaacttgtgcagcatttaacgctgactttgatggtgaccaaatggcagttcatgttccattaagtttagaagcacaattagaggcaagaattttaatgttatctacaaataatattctttctccatcaaatggtaaaccaattatcgttccaagtcaggacatgattttaggaatttactatctatcccaggaacctatatctgataaaccagctggatactttacaaattcagatcaaattgaatttgcattatcatctggtcaaataaatgttcatagcactattatttcaagatatgagactgtagatgaacaagggaataaaaaaacagaaaaatacacttctacagctggtagatttctattagcaaatttactgcctaagaatagcaacattaaattctctttagtagatagattattacctaaaaaagtagtttcagaaataattgatgttgtatttagattttgcggtcaaaaaacaactgtaattttctgtgataagcttaaagatttaggatttaaacatgcgtttaaagcaggaatttcatttggaaaagatgatcttgtaatacctgcaaataaaactcaattaattaatgatactaagaaattaattgcagattatgaaacacaatatgctgaaggtttaattacaagaggtgaaaaatataacaaagtagttgatgcttggtctaagtgtacagacaaagttgctggcgaaatgatgaagggaatttcagctacagaaaaaactgatgaaggattaaaaataaattctgtat

SEQ ID NO: 255064 - DNA, 167 bp, Unknown
  Bacterial polypeptide expressing nucleotide sequence isolated from the Sargasso Sea
tatgcaaatatcagtaatagatttattagtaccaaccgagatacaagtcgaaaatgtttcagatactgtatcgaaggtaacgctagagccgcttgagagaggttttggtcatacgctaggtaatgccttaagaagaattcttctttcatcaatgcctggtgctgctg

SEQ ID NO: 255065 - DNA, 679 bp, Unknown
  Bacterial polypeptide expressing nucleotide sequence isolated from the Sargasso Sea
aaagcttctgatataacgtctgtttctgatattgaaattttaaatccagatttagttatctgtaatttagatgaaaatactaaatttcatatggaaatgacagttggaactggaaaaggatacgtttcagccgatatgaataaaccagaggaaccacctttaggattaattgcaatagattcattatatagtccagttaaaaaagtttcttactcagtcagtacggcaagagagggaaaagcattggactatgataaactaaccatggaagttgagacaaatgggtcaatctcagcggaagacgcagttgcatactctgctagaatattccaagatcaactaggaatgttcgttaactttgatgaaccacaagaagttattgtaaaagagcaaccttcagagccggaatttaataagaatttgttaagaaaagttgatgagttagagctttctgtaagatcaatgaattgtctaaaaaatgataatattatctatattggtgatttagtacaaaaatcagaaggtgaaatgttaagaacacctaattttggaagaaaatcattaaatgagattaaagaagtattaactggaatgtcattatatcttggaatggagattccaaactggccgccagataacattgctgaattatctaaaaaactagaggaagctatttaat

SEQ ID NO: 255066 - DNA, 457 bp, Unknown
  Bacterial polypeptide expressing nucleotide sequence isolated from the Sargasso Sea
cagagttggtcaggtaacagattatgataagctggtacttgaagttgagacaaatggagcagtgtcaccagatgatgcaatagctttagcttcaagaattttacaagatcaattacagccattcattaattttgatgaaccagaaattcagcaagaaactagtgctcaagaaaaactaccttttaatcataatttattaaaaaaagtagaagagttagaattgtctgtaagatctgcaaattgtcttaaaaatgataatatcgtttatataggagatttggttcaaaagtctgaatcagaaatgttaagaacgcctaactttggaagaaaatctttaaatgaaattaaagaggtacttcaacatatggaacttggactaggaatctcggttccagaatggccaccagaaaatatagaagagctggctaaacaatttgaagatccatttaataaataa

SEQ ID NO: 255067 - DNA, 520 bp, Unknown
  Bacterial polypeptide expressing nucleotide sequence isolated from the Sargasso Sea
tatggagatgaatgttggtacaggaaaaggatatgttccagctgtcatgaataagcccgaggaaccaccacttggattaatagcgattgattctttatacagtccagttaaaaaagtttcatatacaatcagcacagctagagaaggtaaagctttagattatgataaattgactatggaagttgaaacaaatggttctatctcagctgaagatgctgttgcttattcagctcgaatttttcaagaccaattaaacatgtttgttaattttgatgaaccagtagaagctccagttaaagaagtttcaacagaaccagaatttaataaaaacttattaaagaaagtcgatgaattagaattatctgtacgttctatgaactgtcttaagaatgataacattatttatattggtgatttagttcaaaaatcagaaggtgaaatgcttagaacacccaattttggaagaaaatctttgaatgaaataaaagaagttttaacaagcatgtcattatatcttgga

SEQ ID NO: 255068 - DNA, 577 bp, Unknown
  Bacterial polypeptide expressing nucleotide sequence isolated from the Sargasso Sea
aaaaaaatgtatataagaacaaagggtcctggagaaattagagcaggaaattttgaaactgactctgaaacagaaataatgaatcctgatcaaattattatgactcttgatagtaatgcagatattgagctagaggcaaatatagatactggaaaaggatatctttcagctgaagtagctgaagatgaagaaaaaatcattggagaaattaagcttgatgcaatgtttagtcctgtaaagagagcgtcttacaaggttgaaaatagccgtgtgggacaagtaactgattatgataaattaattttagaggtagaaacaaatggagctgtttcacctgatgatgcaattgcacttgcagcaagaattttgcaagatcaacttcaaccatttattaattttgatgaacccgaagttcaaatggaaacctcatctcatgaaaagttatcttttaatcctaatttactaaaaaaagttgaagaactagaattatctgttcgttctgctaattgtcttaaaaatgataatataatttatattggtgatttagttcaaaaaacagaatctgaaatgttgagaa

SEQ ID NO: 255069 - DNA, 821 bp, Unknown
  Bacterial polypeptide expressing nucleotide sequence isolated from the Sargasso Sea
acttggtgttcagcatttgaaccaaaattaattgagggagatgcaattgaacttcaccctttaacatgtgcagcatttaatgctgattttgatggcgaccagatggcggtgcacgtacctttaagtttagaagctcagttagaggcaagaattttaatgttatcaactaataacattctttcaccttcaaatggtaaacctattatcgttccaagtcaggatatgatcctagggatttattatctttcccaggagccagttactgataagccagctggatactttgttgactctgatcaaatcgaatttgcattatcttctggtcaaattaaagttcataatacaattatatctagatttgaaactgttgatgaaaatggaaataaaaaatttgaaaaatacacttctactgccggaagatttctactagcaaatttactaccaaaaaatagtaacataaaattctctttaatagatagattgttgcctaaaaaagtagtttcagaaattattgatattgtctttagattttgtggacaaaaaactacagttatattttgtgataagttaaaagacttaggtttcaaacatgcatttaaagccggaatatcgtttggaaaagatgatctggtaattcctgagagcaaaacacaactaattgatgatacaaaaaaattaattgctgactatgaaacacagtatgcagaaggattaattacaagaggcgaaaaatataacaaagttgttgatgcctggtctaaatgtactgataaagtagctggtgaaatgatgaagggtatttctgcaaccgagaaaacttc

SEQ ID NO: 255070 - DNA, 310 bp, Unknown
  Bacterial polypeptide expressing nucleotide sequence isolated from the Sargasso Sea
atgattgaaaaaaattggaaagaacttattaaaccagcgaaactttcagttaagaagaatgaaactaatccatttaaagccactataatagctgaaccgattgaaagagggtttggcgtaactattggtaattccctgagacgaatattactctcctctttacaaggtagctcgataacttctattcaaattcaaggtgttcttcacgagttttcctcggttccaggtgttagagaagatattacagatgtaattttaaacataaaaggcattaaagttaaaatggactcagacagttcaaaaaaattat

SEQ ID NO: 255071 - DNA, 223 bp, Unknown
  Bacterial polypeptide expressing nucleotide sequence isolated from the Sargasso Sea
gtagatgagcttgaattaactgtaaggtctgcaaattgtctgaaagcagagaatgccaactatatcggtgatctagttcagaaaaccgaagttgaattactccgtactccaaatttgggcaagaaatctcttaatgagatcaaggaagttcttgccagtcatgggctatcacttggaatggagttagataattggccgccaaaagaggcagttgtagactaat

SEQ ID NO: 255072 - DNA, 862 bp, Unknown
  Bacterial polypeptide expressing nucleotide sequence isolated from the Sargasso Sea
gcacccgttagtatgcactgctttcaatgcagattttgatggtgatcaaatggctgtacatgttccattaagtttagaagcacaattggaagctcgagtactaatgatgagcacaaataatatactatccccatcaagtggaaagccaattattgtaccttctcaggatattgtacttggaatttattatttatctataatgcgaaataatcaaaagggtgaaggtagaaatttcatagatactaatgaaatactaaaagcagttgagctaaaagatataactttgcattcaagaattaatgtaaggattaaaaattatgatgaaacttattctaaagttgaaacaactgcgggcagaatgttattagcagattctcttcctcaaaattcaaaaataaactttagcttgattaataaagtattaacaaaaaaagaagttagcaatctgattgatacagtttatagattttgtggtcaaaaagaaacagtgctatttgctgatagtataatgcaaataggttttaagtatgctgcaatagctggcatttcatttggaaaagatgatttaataattcctgaagaaaaacagaaactacttgatgaaactcaatcaaaagttcaagaatatgaaaatcagtatcaagatggacttatcactcaaggcgagaaatacaacaaagtagtagatgcttggtcagaatgcacaaacaaagttgcagataaaatgcttgatgtaatttccaatcctgaagatgataaacctataaattcagtttatatgatggcgcattcaggtgctcgtggatctgctgcacaactaaagcagttagcaggtatgagaggtttgatggccaaaccatct

SEQ ID NO: 255073 - DNA, 223 bp, Unknown
  Bacterial polypeptide expressing nucleotide sequence isolated from the Sargasso Sea
catgatccacaaaaactgggccgaattaataaaacccgcacaattagaagtaaaacaggcaattgatcctactcgtcaaggtactgtaatcgctgagcctcttgaacgtggttttggattaaccattggtaatgcgcttagaagagttttgatgagtagtcttcagggagctgcaataacaagtgtacaaatagataatgtattacatgagttttcttccgta

SEQ ID NO: 255074 - DNA, 147 bp, Unknown
  Bacterial polypeptide expressing nucleotide sequence isolated from the Sargasso Sea
tggattaactttaggaaattctttagaagaattttactttcttcaatcagaggtgcagcagtcacttctgtccaaatagatggtgttttacatgaatttacgtctataaaaggtgtacgagaagatgtaactgttattgtttttgat

SEQ ID NO: 255075 - DNA, 697 bp, Unknown
  Bacterial polypeptide expressing nucleotide sequence isolated from the Sargasso Sea
ttggatgcaaaaggacctggagaaataaaagcatcaaatatattaccggtaaccgatatagaaatactaaacccagatttagttatttgtaatttagacgaaaacacaaattttcatatggaaatgacagtcggaagtggcaaaggatatgcatctgctgatatgaataaaccggaagaaccacccattggtttaattcctatagattcattatttagccctgttaaaaaagtttcttattctgttagcactgctagagaaggtaaagcattagattatgataaattaactatggaagttgaaacaaatggctctatttcggctgaagatgcagtagcttattcagcaagaatttttcaagatcaattatcaatgtttgttaattttgatgaacctgaagaaaaagttattagtgaaaaacctagcgaaccagaatttaataaaaatttattaagaaaagttgatgaacttgagctttcagtaagatcaatgaattgtttaaaaaatgataatattatttatataggtgatttagttcaaaaatcagaaggagaaatgctaagaacacctaattttggaagaaaatctttaaatgaaatcaaagaagttttaactggcatgtcattatatttaggtatggaaattcctaactggccacctgataacatagctgaattatctaaaaaacttgaggaag

SEQ ID NO: 255076 - DNA, 592 bp, Unknown
  Bacterial polypeptide expressing nucleotide sequence isolated from the Sargasso Sea
tatggaattaatggtcagtactggcaaaggatacgttcaagctccaaaaaataaatctgaagatagccctctaggattaatatctatagattcactctttagccctgtaaaaaaagtttctttttctgtggaaaatactagagctggaagcgcattggattatgataaattaattatgacagttgaaactaacggtactgtagatgctgaagatgctatagcttactctgcaagaatttttcaagatcaactctctatgtttgtaaactttgaggaccctcaagaagttataaaagaggttaaaactactgagcctgaatttaatagaaatttattaaagagagttgaagaattagaactatcagtaagatcaatgaattgtttaaaaaatgataatataatctatattggagatttagtacaaaaaaccgagcctgaaatgttaagaaccccaaactttggtagaaagtcattaaatgaaatcaaagaggtattaaatacaatgtccttatatctaggaatggaaatacctaattggcccccggataatattgctgaactttcaaaaaaacttgaggaaaacaacttttaa

SEQ ID NO: 255077 - DNA, 541 bp, Unknown
  Bacterial polypeptide expressing nucleotide sequence isolated from the Sargasso Sea
aatggggcatttagagctcgcaagtccagttgcacatatttggtttttgaaatcacttccatcaagaatcggtctattgcttgatatgacactgagggagattgagagagttctttactttgaagcttatcttgttacagatccaggaatgacagatctcacccaaggacaaatgctatcagaagaacaatatatagaagcattagagatgtacggggatgatttttctgccgcaatgggcgctgaagcaatacatgatattctcaaagatttagatcttcaagaaagccttaatcaaattcaagaagatatggaggcaaccgcttcccagattaaaatcaagagatttcaaaagaggctcaaacttatagagtcactaatttcttctggaaatagacccgaatggatgattctaaaagttcttcctattttaccacctgacttaaggccactagttcctctagatgggggaaggtttgctacatcagagttaaatgacctttataggagggtgatcaataggaataatagacttcaaaga

SEQ ID NO: 255078 - DNA, 582 bp, Unknown
  Bacterial polypeptide expressing nucleotide sequence isolated from the Sargasso Sea
tatgggaggtctagaaggaagtgctgtaactgcagtaagaattgcaggaattaatcatgaatatgccactatcccaggtgttagagaagatgttcttgatattcttctaaattgcaaacaactttctcttaacagtacgaacccagagcttgaaattggaagattagttgttaacggtccaatggaagtcaaagcaaatgatatacaattttcgtctcaggttgaaattgttgatggagaaaagcctattgcaaccattcaggaagggcataatttagagcttgaaattcatgtagaaagaggtgtaggttacagacctgtagaccgcagaaatcaagaaactactcctatagatttgttgcaaattgatgctgtattcatgcttgtaaagagagttaatttcacgatagatgaaactgctgtggcagagggtgggactggtagagaaagattaaaaatggaagttgtaactgacggttcaactagtcctgatgatgcaattgcagaagcagcaaatcagttaattgaactctttcagcctcttgctactgttacaatggtcgaagaaattcctgaagagcc

SEQ ID NO: 255079 - DNA, 700 bp, Unknown
  Bacterial polypeptide expressing nucleotide sequence isolated from the Sargasso Sea
ggccctggtgaaataagagcaggtaatttcgaaacagattctgaaactgaaattatgaatagagatcaactaatcatgactcttgatactaatgcagatattgaaatcgaagcaaatattgaaacaggtaaagggtatgtgtctgcggaagttgcagaagatgaaaataaaattattggagaaataaaattagatgcaatgttcagtccagtaacaaaagcttcatataaaattgagaatagcagagttggacaggttacagattatgataaattaatttttgatgttgagacaaatggagttatatctccagacgatgctattgctttagcagcaaggattatacaagatcagcttcaacctttcattaattttgatgaacctgaaatacaacaagatcttagttctgcggaaaaactttcgtttaattcaaatcttctaaagaaagtagaagaacttgagctatcagtgagatctgcaaattgtcttaaaaatgataatattatatatattggtgatctggttcaaaaatctgaatcagaaatgttaagaacaccaaattttggaagaaagtctcttaatgaaataaaagaagttcttcaacaaatggagttaaatttgggaatgtctgtaccagaatggcctccagaaaatattgatgaacttgctaaaaaatatgaggatccatttaacaaataat

SEQ ID NO: 255080 - DNA, 723 bp, Unknown
  Bacterial polypeptide expressing nucleotide sequence isolated from the Sargasso Sea
aatttgaaagatttatctatagactcacagaggttgaagatgctgagttaaccataaataaatcaggtaccggagtggtaaaggctggagacattgagttacctaatggtgtagaggtaataaatccagatcaccatatagcaacattaaatgaagaaggttcattgagtatgactatgcgcgttactagaggaagaggttttgttccggtcaaagccttggctgaagaagaaggacaggaagccggtcttctgaggcttgatgcaacttactcgcccattaatagagtcacttatcaggtggataatgcaagagtagagcaaagaactaatttagatagattaactgttgatatagatactgacggaactttagatgcggaagaaatattaagaatttctgcaaccatactacaacatcaattatcagctttcgctgagttgggacgactggaggaagtgattgaagagaaagaagaggcaaaaattgatccaattatgttaaggcctgttgatgaattggagttaactgttaggtcagcaaattgtcttaaagctgaaaatattcactacataggtgacttagtaactagaatggaatccgatctgcttaggacccctaatttgggtaaaaaatctttaaatgaaattaaagaggttttgctttctagaggtttatctttagggttaatcttagataattggccacctgaaactaattagg

SEQ ID NO: 255081 - DNA, 655 bp, Unknown
  Bacterial polypeptide expressing nucleotide sequence isolated from the Sargasso Sea
gatattaaagttatgaattctgatctagtattatgtactctagatgaaaatatttcattcagaatggagttatatattaaaaatggaaatggttatgtctctgctgaagaaaatagaaatgaagatgatccaataggaatgattcctgttgacagcatttttagtcctgtaacaaatgtttcgtatgaaatagataacgcaagggaaggggaatatctagattacgatagattatcactgtctattgaaactgacggttctgttaagccagaggatgctcttgcattctcagctagaattttaattgatcaacttaacccattcattaattttgatgaacctgaagaagaagtagaagaagaaaacgaagacgaattagagtttaatatatcgcttcttaaaaaagttgatgaacttgagttatcagttagatctgctaactgcctaaagaatgataatattgtttatataggtgatttaattcttaaatctgaaaatgaaatgttaagaactccaaactttggtagaaaatctcttaatgaaattaaagaggtgttgagcgaaatgaatctttcgcttggtatggatataccaaactggcctcctgaaaatattgaagaattagctagaagatatgttgcggataaattttaat

SEQ ID NO: 255082 - DNA, 910 bp, Unknown
  Bacterial polypeptide expressing nucleotide sequence isolated from the Sargasso Sea
ccgcccaaatctgctgggcaagcgcgtggattactcgggccgttcggtaatcgtgatcggtcccgagctgaagctgaaccagtgtggtctgcccaagaagatggcgctggtgttgttcgagccgtttatcatccggcgcctgaaggagctgggctatgtgcacacggtgcgttcagcgaagaaactcattgagcgtcagacccccgaggtgtgggatgtgctggaagaggtgaccaaggatcaccccgtgttgctcaaccgcgcgcccacgctgcaccgtctgtccgtacaggctttcgaacctaagcttattgaaggtgaggccatccgtgtgcatccgttggtgtgcacggcgtacaacgcggactttgacggtgaccagatggcggtgcacgtaccgctgtcagttgaggcgcagatggaggcgcgcatgttgatgattgctactaacaatattttcagcccatccagcggcaagccgatcatgacgcccacgcaggacatcacgctgggctgttattatctcacggctaacccccgccaagcgccggcgaaaaatggcaaggccaaggctgagccgcgcaagccgatgtttgccagcaaggccgaggtgttttttgccttggatgagggtgatctccatcatcatacgccgattattttggcgaaccctgatcgcggtcaggaaacggtgtttggtgacagcgtagcagctgtgatcgagaccaccgcgggtcgcgtagtttttagtgaaatttggccggccgaattgggctttccgaattttgctgtgacaaagggccagctgggtgacttgatcgataaatcctataagcatgccggccacgaaaagaccgtggagatgctcgacaagctcaaagaattgggcttcaaggaagccactcaggcc

SEQ ID NO: 255083 - DNA, 103 bp, Unknown
  Bacterial polypeptide expressing nucleotide sequence isolated from the Sargasso Sea
tccaaatttaggtaaaaaatctttaaatgagattaaggatgttcttgcatcaaagggcttctctcttggaacgacattagagaattggccgccaatgggttaa

SEQ ID NO: 255084 - DNA, 301 bp, Unknown
  Bacterial polypeptide expressing nucleotide sequence isolated from the Sargasso Sea
agaagaagaaaacgaagacgaattagagtttaatatatcgcttctcaaaaaagttgatgaacttgagttatcagttagatctgctaactgtctaaagaatgataatattgtttatataggtgatttaattcttaaatctgaaaatgaaatgttaagaactccaaactttggtagaaaatcccttaatgaaatcaaagaggtgttgagcgaaatgaatctttcacttggtatggatataccaaactggccacctgaaaatattgaagaattagctagaagatatgttacggataaattttaa

SEQ ID NO: 255085 - DNA, 235 bp, Unknown
  Bacterial polypeptide expressing nucleotide sequence isolated from the Sargasso Sea
atcagttagatccgcaaactgtcttaaaaatgataatataatatatattggagaccttgttcaaaaatctgaatcagaaatgttaagaactcctaattttggaagaaaatctttgaatgaaatcaaagaagttttacagcaaatggatttaaatttagggatgtctgttccagattggcctcctgaaaatattgatgaacttgcaaaaaaatatgaagatccatttaataaataa

SEQ ID NO: 255086 - DNA, 773 bp, Unknown
  Bacterial polypeptide expressing nucleotide sequence isolated from the Sargasso Sea
gggatacaagcttttgagcctgtattggttgaaggaaaggctattcagttacatcctcttgtatgtaaagcattcaatgctgattttgatggagatcagatggcagttcatgttccactatcgattgaggcacagctcgaaagcagggcactgatgatgtcatcaaataatatactttcacctgcaaacggtgagccaattattgttccatcacaggatgtagttttaggtctctattacatgactagagagaaagtcaaggataaaggtgagggtggaatttttgcaaacattgaagaggtagaaagagcatttcacaacggattccttggtctgcatgctaaaattaaattaaagattgcaacacgaaatgaggaaaaaccgacagaaatcgtagagacgacttctggcagagccttattctcgaaaattgttcccgatgagataccattttctgtaataaataaaacaatggatagcaaagaaatttctagattgatcaatcgttgttaccgtgaagtgggactgaaggcaactgttatatttgcagataaactgatgtatctcggttttgagtatgcaacaaaatcaggagtatcaattgctctagatgatatggttgttccagaaaataaagaagaaattctcaatgatgctgaatcacaagttaaaagcattcagaaccagttcacatcgggtcttctaacgcaaggcgagagatataataaggttgttgatatttggtccagaacaaatgatcaagttgctaatgc

SEQ ID NO: 255087 - DNA, 625 bp, Unknown
  Bacterial polypeptide expressing nucleotide sequence isolated from the Sargasso Sea
gttatttgtaatttagatgaaaataccaattttcatatggagatgactgtaggtactggaaaaggatacatatcagcagaaatgaataaacctgaggaaccacctttgggtttaatacctatagactcattgtttagtcctgttaaaaaagtttcatactctgtaagcactgctagagaaggaaaagccttagattatgataaactaacgatggaagttgaaactaatggttctatatctgccgaagatgcagttgcttactcagctagaattttccaagatcaacttggaatgtttgtcaactttgatgaaccacaagaagttatagttagagaacaaccaactgaaccagaattcaacaaaaacttattgagaaaggtagatgaattagaattgtctgtacgatcgatgaattgtcttaaaaatgataatattatttatattggtgatttagttcaaaaatctgagggtgaaatgttaagaacacctaattttggaagaaaatcattaaatgagatcaaagaggttttaactgggatgtcactttatttaggcatggaaatacctaattggcccccagataacattgccgaattatctaaaaaacttgaggaagctatttaat

SEQ ID NO: 255088 - DNA, 889 bp, Unknown
  Bacterial polypeptide expressing nucleotide sequence isolated from the Sargasso Sea
gcaagacttaataaattaggattagcatctactatcaaacaagcaaaaaaattagttgaaaaagaaactaatgctgtgtgggatgctctagaattaattgtaagagaacatccagttttattgaatagagcaccaacattacatagacttggtgttcaagcttttgaaccaaaattaattgaaggtgatgctattgaacttcatccactaacttgtgcagcttttaatgctgattttgatggagatcaaatggctgttcatgttccactaagtttagaagcacaattagaagcaagaatattaatgttatcaactaataatattctgtcaccatctaacggaaaaccaattattgttccaagtcaggatatgattttgggaatatattatttatctcaagaacctctaactgataaatcggctgggtattttttagatgcagatcaaatagagtttgcattgtcctcaggtcaaataaaagttcatagtacaattatttctagatttgaaactgtagatgaaaaaggaaataaaaaatttgaaaaatatacttctacagcaggcagatttttattagcaaatttattacctaaaaattttaatattaagttttcattaatcgatagattattaccaaagaaaactgtttcagaaataattgatatagtttttagattttgtggtcaaaaaacaacagttatattttgtgataaattaaaagatctaggttttaaacacgcatttaaagcaggtatttcttttgggaaggatgatctagttatacctgaaagtaaaaacaaattgattgaagacactaaaaagttgattgctgattatgaaactcagtatgcagaaggtttaattactagaggtgaaaaatataataaag

SEQ ID NO: 255089 - DNA, 811 bp, Unknown
  Bacterial polypeptide expressing nucleotide sequence isolated from the Sargasso Sea
aatgcggttgccaaaaaaaatggcgttagaactatttaaaccatttctttacgcaagactaaataaactaggtttggcatcaacaattaaacaagcaaaaaaattagttgagagagaaagaaacgaagtttgggatgctttagaagaaattgttagagaacatccagttttattaaatagagctccaacactacatagactaggagttcaagcatttgaacctaaattaattgaaggcgatgctatcgaacttcatccattaacttgtgcagcatttaatgctgattttgatggagatcaaatggcagttcatgtgcctctaagtttagaagcacaacttgaagcaagagttttaatgatgtctacaaataatatattgagcccatctaatggtaaaccaataattgtcccaagtcaggatatgattttaggaatttattatctttctcaaccaccttatcaagaaaaaaaaattgaagggtattttacaaatatttcagagattgagcatgctatagaaattggtcaaataaaagtacattcaagaataatatcaagatttgaaacaatgaatgaagaaggaaaaataaaaattgaaaaatatactagcacagcaggaagatttcttttagcaaatatattaccaaaaaatataaataataaattttcattaatagacaggttattaccaaaaagagtggtttctgaaataattgatcatgtctttagattttctgggcaaaaagctacagtaatattttgtgataaattaaaaaatttaggattcaaacatgcttttaaagcaggaatt

SEQ ID NO: 255090 - DNA, 621 bp, Unknown
  Bacterial polypeptide expressing nucleotide sequence isolated from the Sargasso Sea
gatggaattaattaagccaagcaagatggatgttaatgttcaagagaatgatggtcgttttggaactttaattgccgaacctcttgaaagaggttttggtttaactttaggaaatgcgcttagaagaatactactatcatcattgcaaggtgctgcaataatatctgttaaatttaaaggagtagtccacgagtttaccacaatacctggtgttaaagaggatttaactgatattttgttaaatcttaaatcagttgatattaaagttcattccccaggtttaaaaaaaatgtatatcaatacaaaaggaccaggtgaaattagagcaggtaattttgaaactgactctgaaacagaaattatgaatccagaccagttaattatgacattagatagcaatgcagatattgaattagaagcaaatgtagatactgggaaaggttatttatcagcagaagttgccgaagatgaagataaaactattggagaaataaaactagatgctatgtttagcccagttaaaaaagcttcatataaggtagaaaatagccgtgttggtcaagtaactgattatgataaattaaatcttgaagtggaaacaaatggcgctgtatctccaga

SEQ ID NO: 255091 - DNA, 1252 bp, Unknown
  Bacterial polypeptide expressing nucleotide sequence isolated from the Sargasso Sea
aagttgggtttagcatcaacaataaaacaagcaaaaaaattagtagaaaaagaaacaaatgaagtttgggatgcattagaattaattgttagagaacatccggttattttaaacagagctccaactttacacagattaggtgttcaagctttcgaaccaaaattaatcgaaggaaatgcaatagaattacatccattaacttgtgctgcatttaatgccgactttgatggtgaccagatggcagttcatgttccacttagtttagaagctcaattagaagcaagagttttaatgatgtctacaaataatatattaagtccttcaaatggaaaacctataattgtaccgagccaagatatgattttggggatatattatttatcacaacctccatatcaatctgaaaaagtcgaaggctattttgttaatacatcagaaattgaacatgcattagaaattgggcaaataaaagtacattcaagaattgtttctagatttgaaacgattgatgaaaaaggaaatattaaatttgagaaacatataagtacagttggtagatttcttcttgctaatttgttaccaaaaaatattaataataaattttctctagttgatagattattaccaaaaaaaattgtgtcagaagttattgaccatgtatttagattttcaggccaaaaaagtactgttatattctgtgacaaactaaaggatcttggttttaaacatgcttttaaagctggaatttcttttggtaaagatgatttagttatacctgataataaacagcaattgatcgatgaaactaaaaaattaatttcagattacgaaaatcaatatgctgaaggtttaattacaagaggtgaaaaatataataaagttattgatgcgtggtcaaaatgtactgatcgtgttgcatctgaaatgatgaaaagaatttcagcaacagaaatgactgatgatggactaaaaataaattctgtttttatgatggccgatagcggtgccagaggttcagccgcacaaatgaaacaattagctggaatgagaggtttgatcgcaaaaccttcaggtgagattatcgaatctccaattacatcaaactttaaagaaggattaacagctctagaatactttaattcaacacacggagctagaaaaggtttggctgatacagcattaaaaacagcaagctcaggatatttaacaagaaggttatgtgatgttgcgcaagatctaacaataacaaaaa

SEQ ID NO: 255092 - DNA, 1279 bp, Unknown
  Bacterial polypeptide expressing nucleotide sequence isolated from the Sargasso Sea
tttgtatggtgaagatggaattgatgtagcaaaaagtgatcatggtgaagcatttaatgttgatagattaattgaatctgaaagcattgttgattctggaaaagccgcaacaaaggacgaaattgcaccaattatcaaaaaatacactagtgaatttaatcctcgtttaacaaatgctgtaagcaattccttagaaaattcaaaattaagtaaacaaggtgttgagaaagtagctaagaaaggattatcattatacaataacgcaaaggcagaacctggtcaggctgtaggaattgtaactgctcagtctattggtgaacctggaactcagatgactttgagaacattccactttgcaggaattgccgaacgaaacgttaccttgggtcttccaagattaattgaattggtagatgcaagaaagaaacctgtcactccaacaatggatatttacttgtccggtgatgcaaaaaccgatcaagcaaaaactgttgaagtcgctcgaaacatcttacaaactaccgttaatgatctaattcttgaagctgatactgattataaaacaaaaattacactcaacctaaatgaaagaaaactaactgaccgtggttgtactttagatgatgtcaaggcagcgctagaatctaataaaaaattcaaaatggaagataatggaattaattcagttgttctcaacttagttgatgaagaagctgatgctcctgctgtcattgtagtaagaaacaaggtgctaaaaacaaccgtaaaaggtgttcctgacattgctcgcgttacaattgtcaaaaagaatgatgaatatgttattcaaacaactggctctaatctttctaaagtattggaagttgaaggaattgataaaaataatgttagaacaaacaatgtttctgaaattgctgaaacacttggaatagaggctgcaagaaatgctttgattaatgaattaagtaatacactagaggatcaaggtctggaagttgaccaaagatatctaatgttagtatctgatttaatgtgtcatcgtggatatatgcaacaaattggacgtcatggaattgcaggtactaaagacagtgtattggctcgtgctgcatttgaaatcactgttccaacaattgcaggagctgcacgaactggtgaaactgaacaactaagaggaattacagaaaatgttattgtaggaagccaaattccaattggtagtggaactgttgatttgtacatgcaagttgcaaagaaacgtggttctgacaaatcctaa

SEQ ID NO: 255093 - DNA, 559 bp, Unknown
  Bacterial polypeptide expressing nucleotide sequence isolated from the Sargasso Sea
tacgttcctgcagagctaaacaaaccagaagagccaccattaggccttattgctattgattcactttatagtccagttaaaaaagtttcatactcagtaagtactgctagagaaggtaaagcactagattatgataagttaattatggaggttgaaaccaatggatcaatttctgctgaagatgctgtagcatattcagctagaatttttcaagatcagcttaaaatgtttataaattttgatgagccagttgaagcacctattaaagaagtttctacagaacctgaattcaacaaaaacttgttaagaaaagtcgatgagttagagttatctgtaagatcaatgaactgcttaaaaaatgataatattatttatataggtgacttggttcaaaaatctgaaggtgaaatgttaagaacacctaattttggaagaaaatcattaaatgaaattaaagaagttttaacaggaatgtctttgtatttaggcatggaaatacctaactggccacctgacaatattgcagaaatgtctaagaaattggaggaagcaatttaat

SEQ ID NO: 255094 - DNA, 2866 bp, Unknown
  Bacterial polypeptide expressing nucleotide sequence isolated from the Sargasso Sea
gcagactttgatggcgatcagatggctgtccatgttccattaacagttgaagctcaacttgaggctagagcgttaatgatgtctactaataatattctttctcccgctgatggagctccgattattaatccaactcaggatgttgttcttggtctttactacatgacaagagagaaagtcaattctcatggagaaggaagagtattttcaaaccctgatgaggttcaaagagcttttgagtctgaacaaatagatcttcatgcaaaaataaaagtaagaatagaaaatgctgagaagggtgtttttattgaagatactaccgttggaagaacccttatctggagaatcacaccaattgaagttggattcgacaatgtaaataaaacactagacaaaaaagcagtttcgtcgcttattgatctttcctacagaaaagctggtttgaagaagaccgtaatttttgccgatcaattaatgtaccttggctttgacttctcaactagatcaggctcatcgattggtgtcgatgattttgttattcctgaagagaaatatgaaattgtagacaaggcagaggatgaggttaaggaaattgaaaaccaattctcatctgggctggtcactagaggtgaaagatataacaaggttgttgatatatggtctagagcaaatgaaagagttgctaaggcaatgatggaaaaaatcagcaaagacagtgttgaggattctgatggtaatgaagttgaacaagcttcttttaattcagtatatatatatgctgattcaggagctagaggatcaccggctcaaattaggcagctatcaggtatgagaggactaatgtcaaaaccagatggctcaattattgagactcctattactgcaaacttcagagaaggtctttctgttcttcagtactttatctcaactcacggagcaaggaagggtctggcagatacagcattaaaaactgcaaactcaggctatttaacaagaagactatgtgacgtatcaatggattcagttattactgaagaggattgtggtacagaggattcaatagaaatgaatgcaattattgatggcggtgaaatcattcaagatctcactgacagaattcttggaagagtaattgctgaacctattcttgataatgaaggaaatgaacttttccctaaagatactctcattgatgaagatgcattgctgaagatcgaaccactaaatctttcaacgcttaaagttaggtcaccgatgacatgtgaatccagtttcggtgtttgtgctaaatgctatggaagagacttagcaagaggacatcttgttcacagaggtgaagctgtaggtgtggttgctgcgcaatcaattggagagccaggtacgcagttaactatgagaactttccatattgggggagctgcttcaagctcatccgaggatgattcaataattagcagaaacgatggatctgtaattttttcagatgatatcaaaagcgttaagaataaagataagctagaagttgttatttcaagaaattcaactttatcaatttctgataatcaaggaaagatcgttgagcagtacaagataccttatggttctactttattagttgctaacaatgctaaagttgagcttggacaaaaaattgctacatgggatccatatactcgtccaataatttcagaagcttctggaaaggtaaaatttgctgatatagaagaaggtgtatcagttagagcttcaactgatgaattaactggattaagtagtatcgaagttattgatggttctgaaaggccttcagctggtaaggatttagttccatcagtaagccttacagatggtagagggaaacaattaacacatcctgaaaataatcaaccatttacatatgctttgcctgcttcagcattattgaatcttgaagatggtcaaaaaataactgctggtgaagttattgcaaggattccactcgaaggatctaaaactaaagatattacaggtggacttccaagagttgctgacttatttgaagctagaacgccaaaagatgcggctgttctcgcagaagagtcaggaatggtttcctttggtaaagaaaccaaaggaaaagttagacttgttataacaccagatggagcctctaaaaagtctcaaaatgtagaaatgctaatacctaaacatagaacgctctcagtgtttgaaggtgagagagtagaaaagggtgacattgtcagtgatggtccttacagtcctcatgatattttaagacttaaaggcataccttctcttacaaatttcattgtaaatgagattcaacaagtctatagacttcaaggagtttctataaatgataagcacattgaaactattctcagacaaatgctaagaaaagcattaattgttgatggcggtgatacaaaattcattcaaggcgatcaagtggaatatgctgagttagttgaagctaataaaatggcagaatctaatgatcaacagccagcaacatatgaaagagttttattaggaattacaaaagcgtcccttgcaacaaattcatttatatctgcagcatctttccaagagacaacaagagtccttacagaagcagctgttactggaaagaaagatggtttaagaggcctaaaagagaatgttgttgttggaagacttatccctgctgggactggtatggatttccatgacaagctaaaaactaaatcacctgattcagatgaatatactctctcttcagatgatcttgaagcagctctcagacaggagattcaagatacaaatactgaggctgaagaacaatctgagcctgaatctgaaaaaccagttgacgataacgaatgag

SEQ ID NO: 255095 - DNA, 721 bp, Unknown
  Bacterial polypeptide expressing nucleotide sequence isolated from the Sargasso Sea
aataaaaaacttatattagatgcaaaaggtcctggggaaataaaagcatcaaacataactcctgttgctggcattgaaatactaaatccagaattagtaatatgtaatttagatgaaaaaactaattttcatatggaaatgcatgttggaactggaaaaggatatgtttctgctataatgaataaaccagatgaaccaccattaggattaattccaatagactcattattcagtccagtaaaaaaagtatcttactcagtaagtactgctagggaaggtaaagctctagattatgacaaattaacaatggaagtagaaactaacagatctatatctgcagaagatgcagttgcatactctgctagaattttccaagatcaattaggaatgtttgtaaacttcgatgaaccacaagaagttatagttagggaaaaaccatcagaaccagaatttaataaaaatttattaagaaaagttgatgagcttgaactatcagtaagatcaatgaattgtttaaaaaatgataatatcatttacattggtgatttagttcaaaagtcagaaggcgaaatgttaagaactccaaatttcggtagaaaatctttaaatgaaattaaagaagttttgactggaatgtctttatatttaggcatggaaataccaaattggccaccagataatattgctgaattgtcgaaaaaactagaagaagctatataat

SEQ ID NO: 255096 - DNA, 1403 bp, Unknown
  Bacterial polypeptide expressing nucleotide sequence isolated from the Sargasso Sea
tttggcatcgacaattaaacaagcaaaaaaattagttgaaaaagaaacaaatgctgtttgggacgcattagagttaatagtaagagaacatccagttcttttaaatagagcgccaacccttcacagattgggtgttcaagcttttgaacctaagttaattgagggggatgcaattgaactacacccactaacgtgtgctgcgtttaatgctgactttgatggtgatcaaatggctgtgcatgttcctttgagtttagaagctcaattagaggcaagaatattaatgctttctacaaataatattttatctccatctaatggtaaaccaattattgtacctagtcaggatatgatcttgggaatttattatttatctcaagaaccaataactgataaacctttaggatattttttagattctgatcaaatagagtttgcactatcttcaggacaaataaaagtacatagtacaattatatctagatttgaaaccgttgacgaaaaaggaaataaaaaatttgaaaaatacacttcaacagctggaaggtttttattagcgaatttacttccaaaaaataaagatattaaattttcattaattgacagattgttacctaaaaaaactgtttcagaaataattgatatagtttttagattttgcggtcaaaaaacaactgttattttctgtgataaattaaaagatttaggttttaaacatgcatttaaagcaggaatctcatttggtaaagatgatctagttattccagcaaacaaaactcaattaattgatgacaccaaaaaattaattgctgattatgaaacacaatatgctgaaggcttgatcacaagaggtgaaaaatataataaagttgttgatgcctggtctaaatgtacagataaagttgcaggagaaatgatgaaaggtatttcagcgacagaaaaaacttctgaaggacttaagattaattcggtatttatgatggctgatagtggagcgagaggatctgctgcacagatgaaacaattagctggtatgagaggattaattgctaaaccgtctggagaaatcattgaaagtccaattacttcaaatttcaaagaagggttaacagcacttgaatattttaattctactcacggagctagaaaaggattagccgatacagcacttaagactgcaagttcaggatatttaacaagaagactttgtgatgtcgctcaagatttaactgtaacaaaaaaagaatgtgactgtaaaaatccaggatttattgaactttctgaaattttagaaggtggtaatgttgtagtaagtttatcagaaagagccttaggaagaattacatttgatgatgtaaaaaatccacttacaggtgacattgtattaaaaaagcaacaatgat

SEQ ID NO: 255097 - DNA, 780 bp, Unknown
  Bacterial polypeptide expressing nucleotide sequence isolated from the Sargasso Sea
aatgaacgttttagcgcctgaagttgctaaagtagacgagttagataaaaacaatcttagagttgttttagagccttttgaaagaggttttggatacacaattggacatagtctaagaaggattatgctttcttacatgcctggtgcagctattacagaagtaaaaattgatggtgtgtctcatgaatatggaacaattgaaggaataaaagaagatattttagatgttctcttaaatcttaaagatttagccattaaattagatgggccagctgaagctgaattaaagttagacgttaaaacaccaaaaacgatcacagcatcagatttggaattacctgcaggagttgaagttatggatcctgatcatgtaattgctactctagttgaaccaaaaaagcttgttatgactttaaaagttgaaactggtacaggctatgtcccttcagaaaataacaagaacaagagtgttgattcattgcatcttgatgcaatattttctccagtaaagagagttaattataaagttgagaacacaagagttgagaatagaacagatctagataaattaatattagatttagaaactgacggaacaattgatccaaaacaagcagttaaatatgctgcaactattatgcagcatcaattagctgtatttgttgatgaagaattagtctcaagaaaagaaaagagaaaagataaatatgactttgatccacttcttttaagatcaattgaagagttagagcttactgtaagatctacaaactgtttaaa

SEQ ID NO: 255098 - DNA, 973 bp, Unknown
  Bacterial polypeptide expressing nucleotide sequence isolated from the Sargasso Sea
atgtcaaaaaaacttgaaattaaaataaaagctgaagataaaagtttaacaaaaacttttggtaagtttatagtaaaaccattagaaagagggtatggtatcacaattgggaatgcattaagacgtgttcttctaacctgtttgcctggtgctgcaattacaaatattaggatagatggtgttttacatgagttttcttcaattgaaggtgtccacgaggatgtttcggatattattcaaaaccttaaaggagttcgatttaaattagatgataacgatcctgaaaaaataagtattaagttggaaggaccttgcaagtttactgctgctgatattcaaaaagctacatcagagctaaaggttttaaataaaaaacattatatcacagaaataaatgaaggcactaagttagatatagaaataaaaattggtgttggtaaaggttatacaccgtctgaagaaaatgaacttccaaatgctcctttaggtactattgcgattgatagtatatttaatccagtaactaaagtaatgtttaatgtaactccagttccaggtgcaaaggaaccaattgaattgttatcattagaagtaacaactgatggatcaattgaaccccaggatgctgttagctattctgctacagtgctaatggatcaattacgaatagttgaatcaattagtaaacctgaggttcttgaaatttcagaaccagtaagcgaggaagtgttagaaatacgcaagttattgaatttaactattgatgagatggagttatcagtgcgaagtcataattgtctccaggctgcaggtataaaattcatttatgaattagtaagtaaagaagaaaatcaaatgcttaaatataaaaattttggtagaaaatcattaactgaactagttgaaaaacttgatgaaatgggccttagttttggtattgaagttgataaatatttaaaagaagaagtttaaa

SEQ ID NO: 255099 - DNA, 478 bp, Unknown
  Bacterial polypeptide expressing nucleotide sequence isolated from the Sargasso Sea
aatggcagttcatgttcctttagctttagaggcacaaactgaggcacgcatgcttatgttggctagtaacaatattttgtctcctgctactggtgaaccaattgtgactccatcacaagatatggttttaggatcttattatctgacggctttgcaaccgaattatcaacaaccagaattcggagaatacaagactacttttgcttcattagaagatgtgatttttgcttttgaagataaaagacttagcctgcacgaatgggtttgggttagatttaatggagaagttgaagatgaagacgaaatgcgtagtccacaaaaaactaaagagctagaagatggctcaagattagaaatctggaatttaagaagggacagatttgactctgacaataatttaataagtagatttgtgctgacaactgttgggagagttgttatgaactatacgatcatagattctgtatctaaaacgtaa

SEQ ID NO: 255100 - DNA, 589 bp, Unknown
  Bacterial polypeptide expressing nucleotide sequence isolated from the Sargasso Sea
atggaaatgaatgttagtactggaaaaggttatgtgccagctgatcttaataagccagaagagccaccgttaggattaattgctatcgactctctttacagtccagtaaaaaaggtttcattttctgtaagtaccgctagagaaggaaaagcccttgattatgacaaactaattatggaagttgaaactaacggatctatatcagctgaggatgctgttgcttattcagcaagaatttttcaagatcaattaaaaatgtttatcaactttgatgaaccagttgaagctccagtgaaagaagtatcaacagaacctgagttcaataaaaatttattaagaaaagtagatgagctagaactgtccgttagatctatgaattgtttaaaaaatgataatattatttatattggagatttagttcaaaaatctgagggtgagatgctaaggactcctaattttggaagaaaatctttaaatgaaattaaagaagttctaactggtatgtcattatatttaggtatggaaatacctaactggccaccagacaatattgcagaaatgtctaaaaaattagaggaagctatctaat

SEQ ID NO: 255101 - DNA, 672 bp, Unknown
  Bacterial polypeptide expressing nucleotide sequence isolated from the Sargasso Sea
ctgatataacttcagttgccgatattgaaattttaaatccagatttagttatttgtaatttagatgaaaatactaagtttcatatggaaatgacagtaggaactggaaaaggatatgtctcagcagatatgaataaacctgaggaaccacctctaggtttaattccaatagactccttatttagtccagttaagaaagtatcttactcggtgagcactgctagagaaggaaaggcattagattatgataaattaacaatggaagttgaaacaaatggatcaatttcagcagaagatgcggtagcttattcagcaagaattttccaagatcaactaggaatgtttgttaactttgatgaaccacaagaagttattgtgaaagagcaaccttctgagccagaatttaataagaatttgttaagaaaagttgatgagttagaactttcagtaagatctatgaactgcttaaaaaatgataatatcatctatattggtgatttagttcaaaaatcagaaggggaaatgttaagaacacctaattttggaagaaaatcgttaaacgagattaaagaagtattaacaggaatgtcattatatcttggaatggaaattccaaactggccaccagataatattgcagaattatcgaagaaactagaggaagctatctaat

SEQ ID NO: 255102 - DNA, 583 bp, Unknown
  Bacterial polypeptide expressing nucleotide sequence isolated from the Sargasso Sea
aatgactgttggtaatggaaaagggtatgtgtctgctgattttaacaaaccagaggaaccaccattaggtcttatacctatagactctttatttagtcctgttaagaaagtttcatattcagtcagtacagcaagagagggtaaggcactcgattacgataaattaactatggaagtggaaactaatggttcaatatctgcagaggatgccttggcttattcagcaagaatttttcaagatcaacttgctatgtttgtaaattttgacgagccgcaagaagtagcaattagtgaagcacctaaggaacctgaatttaacagaaatttattaagaaaagtagatgaactagaactttcagtaagatctatgaattgtttgaaaaacgataacattatatatataggtgatttagttcaaaaatcagaaggtgaaatgttaaggacaccaaattttggtaggaaatcattaaatgaaattaaagaaattttaaacggaatgtcactttatcttggaatggaaattcctaattggccaccagacaatatagcagaactatctaaaaaattagaagaaagcatctaa

SEQ ID NO: 255103 - DNA, 101 bp, Unknown
  Bacterial polypeptide expressing nucleotide sequence isolated from the Sargasso Sea
taacctaggaaaaaaatcattaaatgaaataaaagatgttttagcgtctaagaacctttcattaggtatgaatgtagaaaactggcctccagtaggataaa

SEQ ID NO: 255104 - DNA, 682 bp, Unknown
  Bacterial polypeptide expressing nucleotide sequence isolated from the Sargasso Sea
aattaaagcttctaatattgcgcctgtaacagatatagaaatattaaacccagaccttgttatttgtaatttagatgaaaatacaaattttcatatggagatgaatgtaaatactggtaaaggatatgtttcagcagatttaaataaaccggaagatcctccattaggtttaattccaatagactctttatatagtccagtaaaaagagtttcatattcagtgagcacagctagagaaggaaaagctttagattatgataaattaattatggaagttgagacaaatggttcaatttctgcagaagatgcagttgcttatgcagcaagaatttttcaggatcaattgggaatgttcgttaattttgacgagccacaagaagtaattgtcagagacaaaccaactgaacctgaatttaataaaaatttattaaggaaagttgatgaattagaattatcagtaagatcgatgaattgtttaaaaaatgataatattgtttatattggtgatcttgtccaaaaatctgaaggtgaaatgctgaggactccaaattttggtagaaaatcattaaatgagataaaagaggttttgactggtatgtcattatacttaggtatggaaattcctaactggcctccagataatatagctgaattatcaaagaaacttgaagaagcaatataa

SEQ ID NO: 255105 - DNA, 469 bp, Unknown
  Bacterial polypeptide expressing nucleotide sequence isolated from the Sargasso Sea
aatgcatgaatcccttatccatgggatcttaaaaaacgaacatggatcaatatcaaaagcagttacgcttattgagaatggcggaactgaaatagttcccttattaaacaatatacatgaatattcaacaaattcattacgtattggtattaccggtcctcctggtgcaggaaaaagcactataactaatgcgttaattgagatacttctaaaaaataaaaaaactgtaggagtcatagcagttgacccaaccagtccattttctggaggatctttattgggtgacagaattcgaatgaaccattatgcatgggatgatagggtctttgtgaggagtatggggagcaatggtgagttgggtggcctagcaagaaaatcacaggatgttggcgatgttttagcagctagtggaaaagatgttgtcctttatgagaccgtaggcgtggggcagagtgaacatgatattgta

SEQ ID NO: 255106 - DNA, 508 bp, Unknown
  Bacterial polypeptide expressing nucleotide sequence isolated from the Sargasso Sea
cctattgactcattatttagtcctgtaaaaaaagtttcttattctgtaagtacagctagagaaggaaaagcattagattatgataaactaactatggaagttgaaactaatggatcaatttctgctgaagatgctgttgcctattctgcaagaatatttcaggatcaattatctatgtttgtaaattttgatgaacctcaggaagtcttagtaagagaaaaaccaacagaacctgaatttaatagaaatttattgagaaaagttgatgaactagaactttcagtaagatcaatgaattgtttaaaaaacgataatataatttatattggggacttagttcaaaagtccgagggagaaatgttaagaactcctaattttggtagaaaatctttaaatgaaattaaagaagttttgaatggaatgtccttgtacttgggtatggagataccaaattggcctcctgataatatagctgaactatctaaaaaacttgaagaagcaatttaat

SEQ ID NO: 255107 - DNA, 88 bp, Unknown
  Bacterial polypeptide expressing nucleotide sequence isolated from the Sargasso Sea
aatgggtcttcatttgggcatggaagtgccaaattggcctcctgaaaacatcgaagaacttgcaaaaaaactagatgataatttctag

SEQ ID NO: 255108 - DNA, 1359 bp, Unknown
  Bacterial polypeptide expressing nucleotide sequence isolated from the Sargasso Sea
tgatttcgacggtgatcaaatggctgtacatgttcccttggcgttagaagctcaaatggaagctagaatgctaatgttggcgagtcataacatattacatcctgcaaatggtcagccaattgccgttccttctcaggatatggttttgggctgttattacttgacaaggccaaaggagggtgatcatggtgaagggaagatatttggttccattcaagaaggtttattagcctatgaaaataaagctgttggtttacacgctatagttgatgttcgcgataagggtaaatgggtaaaaaagactacagttggtagaattatttttaattcaatactaccagatgacgttgattttgtaaatgatattgttggtaaaaaaatgcttactaaaattgttaataatgcctatttggtttcagggaattttcaaactgttttgttccttgataggttgaaagatttaggttttggaatggcaactataagcggtgcatcaattgcaataagtgatgtaattattcctgatgagaaagatgaaatcttaagtttagcccaaaacgaagttgatgacataaaaagcaaatttgagaggcatattttaactgatggagaaagatataataaggttattgatgtctggacgcacactgctaaccaaatggcaatgactatgatgaatgcactcaagcaagatcgtcaaggttttaacccggtatttatgatggctgattccggagcaagaggatctcaagatcagattaagcagttagctggtatgagaggattgatggcgaagcctcaaaaatcaatgaaaggcggagttggggaaattattgaatcaccaattacatcaaacttcaaggagggtttatctgtattcgaatacttcatatctactcacggtgcaagaaaaggattagctgatactgcactaaaaactgcagatgcaggatatttaactaggaggttggttgacgttgctcaagatgttgtagtttacgaacctgattgcggtacaattaatggaattgtaattgcagatttgaaagagggtgaaaaaattgttgaaccactttcggatagaattttaggaagaacaatacttgatgatttcattgtaaagggtgaagtcgttgtgaaagctggttccgtaatatcagaaagtgaagcagagttgattggagatagtggggttgaaaatgttaggattagatctattctcacatgcgaagctaagagaggagtctgtgcgaaatgttatggttgggatctctctactcataaaattgtggataatggtactgctgtaggcattcgtgctgcgcaaagtattggagagcctggtactcaattgacact

SEQ ID NO: 255109 - DNA, 370 bp, Unknown
  Bacterial polypeptide expressing nucleotide sequence isolated from the Sargasso Sea
agagcttgaaactgacggcacattagatccaaagatggcaatagaacactctgcaacaattctgcaacagcagcttggtgcgtttgttgatctagatgcaatagctgaacaagaggctaaaaaagatcaaaatgactttgatccaatcttattaagatcgattgaagagcttgagctaacagtaagatctactaattgtctcaaagcagagagtatttttcttataggcgacctaattcatagatctgagtttgatttattaaaaactccaaatctaggtaagaaatctttgaatgaaattaaagatgttttagcttctaaagatttatcgcttggtatgaatgttgaaaactggcctccagtaggataa

SEQ ID NO: 255110 - DNA, 157 bp, Unknown
  Bacterial polypeptide expressing nucleotide sequence isolated from the Sargasso Sea
tattttcttaattggtgatttaatccaaagatctgaatttgatcttctaaaaacacctaatcttggtaaaaagtctcttaatgagattaaagatgtcctagcttcaaaaggactttctttgggtatggtgttagataactggccaccgatgggttaa

SEQ ID NO: 255111 - DNA, 994 bp, Unknown
  Bacterial polypeptide expressing nucleotide sequence isolated from the Sargasso Sea
atggcaacattcacatttcaaaaaccagataaagtaataatgattgactccacagattttgagggcaagtttgaatttagacccttggaacctggctatggattaactgtaggaaacgcattgagaagagttttactttcatctcttgagggttttgcatttacatcaataaaaattgaaaatgtagatcacgagtttacttcacttccaggcatagttgaagatgtaacagagattattttaaatctgaagcaaattagattaaaaagacaaatagattctgtagacaatgaaacagtttctgtttcagttaatgcccaaaatcaattaaaagctgctgatttacaaaaatttatttcaggatttcaaatattaaaccctgatgtagtcatatgtaatttggaaaagaatgttaagttaaattttgaacttaatattgaaaaagggagaggttatgtttctgctgaggaaaataaaaagctaggtgctccgttaggtactatttttatggattccgtatttactcctataaaaaatgttaagtacactattgaggactttagagttgaacaaaaaactgattatgaaaaattagtttttgaaattatgactgatggctctatagatccaaaaaatgcattaacggaaggtgctaaagttctaattcatcatttcatgctattttctgatgaaagaattactcttgaagctgatgaaattgctcaaactgagacttatgatgaagaatctttacatatgagacaactcttaaaaactagattaatagacatggatctttcagttagagctcttaattgtttgaaagctgctgaagttgataccctaggcgatttagtttcatttaataaatcagatttaatgaaattcagaaactttggaaaaaaatctttaacggagcttgaagagcttgtattggttaaaggtttaagctttggtatggatctttcaaaatataaattagataaggattaac

SEQ ID NO: 255112 - DNA, 775 bp, Unknown
  Bacterial polypeptide expressing nucleotide sequence isolated from the Sargasso Sea
agatatagtgtttaatattaagtccctatctttaaatatgcattctgaaggtgtcagaaaaatgaatctcaacgtaactggtccaggtgagattactgcgggtatgataaatacaccatctgaaattgatattataaatccagagctagttatctgtaatcttgatgacaatactgaatttaatatggagcttaccgtagccaaaggtaaaggttatgttgctgccgaacataataagccagaagattctgcaataggtctgattccgatagactccatatttagcccagttaaacaagtttcatacagtatagaaaatactagagaaggaaaagttttagattatgacaagttaacaatgtcaattgaaacaaatggatcagtatctcctgaggatgcaattgcttttgcagcacgaataattcaagaccaattgcaatcatttattaattttgaagaacctgaagagattcaggaagaacctgatgcattggaacctcaatttaataaaaatcttttaagaaaagttgaggagcttgaactttcagtgagatcaatgaattgcctaagaaatgataatattatttacattggagaccttgttcaaaaaagtgaaattgaaatgttgcgtacacccaattttggtcgtaagtctctaaatgaaataaaagaagtactaggcactatgtcactatatttaggcatggaagtacctaattggccacctgaaaatatcgaggaaatggcaagaaagattgaagatccatataactaa

SEQ ID NO: 255113 - DNA, 730 bp, Unknown
  Bacterial polypeptide expressing nucleotide sequence isolated from the Sargasso Sea
tatggagttaaataaaactaaaaaatttaataaaatatcaataggattagcttcaccagaaacaatccttgcttcatctagaggtgaagtccttaagcctgaaactatcaactacagaactcacaaacctgaaagagatggtttgttttgtgaaagaatattcggacctgttaaggattacgaatgtgcatgtggtaaatataaaagaataagatataagggtattgtttgtgatagatgtggggttgaggttactgaaaagaaagttagaagagatagagttggtcatattaatttggttgtacctgttgctcatatttggtatttcagatcacttccaaacaagatcggatacttattaggtttaccaacaaaaaaacttgatatgattatatattatgaaagatatgtagttgttcaaccaggtgctgctttggatgctgaaggaaatacatataacaaaatggactttcttacggaagaagagtatttaaatgttttagaaaaacttccacctgagaatcagtttcttgaggatagcgatcctgaaaaatttattgctaaaatgggagctgaatgcttaatcgagctattatccaggattgatttggatgagctttcatatgagctaagacacaaagctaataatgaaacttccaagcaaagaaaaactgaatcattaaaaagattacaagttgtagaatcattaagagaggcaaatattaataaa

SEQ ID NO: 255114 - DNA, 301 bp, Unknown
  Bacterial polypeptide expressing nucleotide sequence isolated from the Sargasso Sea
ttgcaataccagattgacagaatcgaccatcaaatagcagatgatcgctcccaaacaggaacttttttaattggccctttagaacggggacaagctacaactttgggtaattcccttaggagagtcctcatggggggacttgaaggaagtgcagttactgcagtaagaatatcaggaattaatcatgaatatgctactattcctggagttagagaagacgttttagatattctgctgaattgcaagcaactatcaataaatagttctaatccagagctagaaatcggtaggttagtagcga

SEQ ID NO: 255115 - DNA, 682 bp, Unknown
  Bacterial polypeptide expressing nucleotide sequence isolated from the Sargasso Sea
atgactactagatcatcatcagactttaattcaataagaatttcacttgcgtcgcctgatcaaattaaagcttggtcatatggagaagtaactaagcctgaaacaattaactatagaactcttaggccagaaaaagatggtctgttttgtgaaaaaatatttggaccaacaaaagattgggaatgttactgtggaaaatataaaaaaatacgatacaaaggcgtaatttgtgatcgatgtggagtagaggtaactagagctaaagtaagaagagaaagaatggggcatataaaattagctgctcctgtagctcatatctggttctcaaagagtactccttcaagacttgggcttcttttagatgtttcacctaaaaatttagaaagagttttatattttgcccaatacatagtaactgagattaataataacgaaaaattagatgctattaattttttcaaacaagatgctgaacaaaaaatagaagaaatcaaaactaggttagaagcagtacttgaatctaaagaatatcttgaagaactagaaagacttgagataaaagttaagaaaactgatgccaaaaaacctgaaaagttagaagagattgtaaaaactatttatgcagagttcatagatgaagaacaaaacaatacagaggaaacaattcaagaccttgaatctt

SEQ ID NO: 255116 - DNA, 280 bp, Unknown
  Bacterial polypeptide expressing nucleotide sequence isolated from the Sargasso Sea
gagttaacatttaatcccgctctattgaagaaggttgatgagttagaattgtccgttagatctgcgaactgcctaaaaaatgataatatagtttatatcggagatctgatactaaaatccgagtcagagatgttaagaacaccaaattttggaagaaaatccttgaatgaaattaaagaggtcctagcacagatgggtcttcatcttggaatgaatattccaaattggccacctgaaaatatcgatgatcttgcaaaaagatatgaggaaagctattaag

SEQ ID NO: 255117 - DNA, 228 bp, Unknown
  Bacterial polypeptide expressing nucleotide sequence isolated from the Sargasso Sea
atccacttcttttaaggtccattgaagaactagagcttactgtaaggtcgacgaattgcttaaaagcagaaaacatctttttaattggagatttaatacaaagaagtgaaatggacttattaaaaactcctaatcttggaaaaaaatcattaaatgaaattaaagatgaattagcgtcaagaggactttctatgggcactgtccttaaaaattggccaccaatgtaaa

SEQ ID NO: 255118 - DNA, 682 bp, Unknown
  Bacterial polypeptide expressing nucleotide sequence isolated from the Sargasso Sea
aataaaagcttcagatatagcttcagttgctgatatagaaatattaaatccagaattagttatctgtaatttagatgaaaatacaaattttcatatggaaatgacagttggaaatggaaaaggatatatcccagcagatatgaataaacccgaagaacctccattgggtttaattcctatcgactctctatttagtccagtaaaaaaagtatcatactcagttagtactgctagagaaggtaaagcgttggactatgataaattaactatggaagttgaaacaaatggatctatatccgcagaagatgcagttgcatattctgcaagaatttttcaagatcaacttggcatgtttgtaaattttgacgaaccaaaagaagtaattgtcagagaacaaccaacagaacctgaattcaataaaaatttattaagaaaagttgacgaattagaactttcggtaagatcaatgaattgcttaaagaatgataatattatttatataggagatcttgttcaaaagtctgaaggtgaaatgttaagaactcctaattttggaagaaaatcattaaatgaaataaaagaagttttaaatactatgtccttgtatttaggcatggaaatacctaattggccgccagataatattgcagaattatctaaaaaacttgaggaagcaatataa

SEQ ID NO: 255119 - DNA, 286 bp, Unknown
  Bacterial polypeptide expressing nucleotide sequence isolated from the Sargasso Sea
gatgaattagagttaaatgcatctcttcttaagaaagtgatgaaacttgagctatcagttagatctgctaactgcttaaaaaatgataatattgtatatattggtgatttaattcttaagtctgaaaatgaaatgttaagaactccaaattttggaagaaaatctctcaatgaaataaaagaagtgttaagtgaaatgaatttatcgcttggaatggatataccaaattggccacctgaaaatattgaagaattagcaaggaagcatgctgcagataaattttaat

SEQ ID NO: 255120 - DNA, 994 bp, Unknown
  Bacterial polypeptide expressing nucleotide sequence isolated from the Sargasso Sea
atggcaattttaaactttcaaaaaccagataaggttatcatgattgactcaacagagtcacatggtaaattcgaatttagacctttagaaccaggatatggtttaactattggtaacgcacttagaagagtattattatcttctttggagggtcatgcttttacatccgtaaaaattgatggtgtagatcatgaattttctactattaaaggtgttgttgaagatgtaactgaaatcatcttaaatataaagcagattagactaaaaagacaaattgatgatatagataatgaaactatcaatgttattgttggtaaccagaaggttttcaaagcttcagatcttcagaagtttatttcaggtttccaaattcttaatcctgatcttgttatatgtaatttagagaaagatgtaaagttaagtattgaattaaatattgagaagggaagagggtatgtcccagctgaagaaaataaaaagtataatgaatcagttggagtaattgctatcgactcaatatttactcctataaagaacgttaagtatgatatagaaaattacagggttgaacaaaagactgattatgaaaaacttatctttgaaattattacagatggatcgatacaccctaaagatgctctaactgaagctgcaaaaattcttattcatcactttatgttattctcagatgaattaattactcttgaagctgatgaaatcgcacaatctgaaacttatgatgaggaatctcttcatatgagacagttgctcaaaactaaacttatcgatatggatttatctgttagagcactaaactgtttaaaggctgcagaagttgatacactgggagatcttgtatcttttaataaaaatgatttaatgaagtttagaaactttggtagaaaatctttgacagagcttgaggaattagttattcttaaaggtctatcatttggtatggatcttactaaatataaattagataaagattaaa

SEQ ID NO: 255121 - DNA, 994 bp, Unknown
  Bacterial polypeptide expressing nucleotide sequence isolated from the Sargasso Sea
atggcaatattaaattttcaaaaaccagataaggttgttatgatagattcttcagattttgagggaaaattcgaatttcgacctttagaaccagggtatgggttaactatcggaaatgctttaagaagagtacttttgtcatccttagaaggatttgcaataacctcaattaagattgatgggattgaccacgaattttcaactattccgggaattgtcgaagatataaccgaaattgttctaaatttaaagcaaataagattcaaaagacaaattgatgatgttgaagatgagaaagtaaagctaaacgtgtctggtcaagatcagataaaggcagctgatcttcaaaaatttatttctggttttcaaatcttaaatcctgaacaagtcatatgtaatttagaaaaggctgttcaatttaattttgaattaacaattgaaaaagggagagggtatattccagccgaagaaaataagaatatagattctgcactaggattgatcgctatagattcaatttttactccagttaaaaatgtaaaatatacaattgaaaattacagagtagagcaaaaaacagattatgaaaagttggtattcgaaataattacagatggttctattcatccaaaagatgcattgaccgaagctgctaaaactttgattcatcactttttgttattttcagatgaaaggattactcttgaagctgatgagatcgctcaaactgaaacttatgacgaagaatcattacacatgcgacaattgttaaagactaagttaattgatatggatttatcggttagagcattgaattgtttaaaagcagcagaggtagatacacttggtgatttagtgtcgtataataaaaatgatttgatgaaatttagaaattttggaaaaaaatccctaacagaacttgaagagttagtcatactaaagggtctttcttttggaatggatttatctaaatataaattagatagagattaag

SEQ ID NO: 255122 - DNA, 640 bp, Unknown
  Bacterial polypeptide expressing nucleotide sequence isolated from the Sargasso Sea
tcctgatcaattaataatgactcttgattcaaatgcggatgttgagattgaggcaaatatagaaacaggaaaaggttacgtttcagctgaagtagccgaagatgaaaataaagtaataggtgaaattaagcttgatgccatgtttagtcctgtaataagagcatcttataaagtcgagaacagcagagtaggtcaggtaacagattatgataaattaatttttgaggttgaaactaatggtgtaattacacctgatgatgctatagctcttgcatcaagaattttacaagatcaattacaaccatttattaattttgatgaacctgaagctcaacaagatcaaactgcttctgaaaaactttcatttaactctaatcttcttaaaaaagttgaagaacttgagttatctgtaagatctgcaaattgtctaaagaatgataatattatatatattggtgacttagttcaaaagtctgagtctgaaatgctaagaacaccaaattttggaagaaaatctcttaatgaaatcaaggaagttttgcaacaaatggaactaaatttaggtatgtcggttccggattggcctcctgaaaacattgatgaacttgcaaaaaaatatgaggatcctttcaataaataa

SEQ ID NO: 255123 - DNA, 988 bp, Unknown
  Bacterial polypeptide expressing nucleotide sequence isolated from the Sargasso Sea
aattgtaactgctcagtctattggtgaacctggaactcagatgactttgagaacattccactttgcaggaattgcagaacgtaacgttaccttgggtcttccaagattaattgaactcgtagatgcaagaaagaaacctgtcactccaacaatggatatttacttgtctggtgatgcaaaaacagatcaagcaaaaactgttgaagttgctcgaaatattctacaaaccactgttaatgatctaattcttgatgctgatactgattataaaacaaaaatcacactcaacctaaatgaaagaaaactaactgaccgtggttgtactttagatgatgtcaaggcagcgctagaatctaataaaaaattcaaaatggaagataatggaattaattcggttgttcttaacttagttgatgaggaagctgatgctcctgctgttattgtagtaagaaacaaggtcttaaaaacaaccgtaaagggtgttcctgacattgctcgcgttacaattgtcaaaaagaatgatgaatatgttattcaaacaactggctctaatctttctaaagtattagaagttgaaggaattgataaaaataatgttagaacaaacaatgtttctgaaattgctgaaacccttggaatagaggctgcaagaaacgctctgattaatgaattaagtaacacactagaggatcaaggtctggaagttgaccaaagatatctaatgttggtatctgatttaatgtgtcatcgtggatatatgcaacaaattggccgtcatggaattgcaggtaccaaagatagtgtattggctcgtgctgcatttgaaatcactgttccaacaattgcaggagctgcaagaactggtgaaactgaacaactaagaggaattacagaaaatgttattgtcggaagccaaattccaattggtagtggaactgttgatttgtacatgcaagttgcaaagaaacgtggttctgacaaatcctaa

SEQ ID NO: 255124 - DNA, 295 bp, Unknown
  Bacterial polypeptide expressing nucleotide sequence isolated from the Sargasso Sea
attagctgtatttgttgatgaagaattagtctcaagaaaagaaaagagaaaagataaatatgactttgatccacttcttttaagatcaattgaagagttagagcttactgtaagatctacaaactgtttaaaagcagagaatattttcttaattggagatttaatacaaagaagcgaaatggatctattgaaaactccaaatcttggaaagaaatcattaaatgaaattaaagatgaattagcgtcaagaggactttctatgggaaccgtccttaaaaattggccgccaatgtaa

SEQ ID NO: 255125 - DNA, 820 bp, Unknown
  Bacterial polypeptide expressing nucleotide sequence isolated from the Sargasso Sea
aatgaaagcattgctcgacctattccgtcaggtacagcaagaagagcagtttgacgcgatcaagatcggcctcgcgtcgcctgagaaaatccgttcgtggtcgttcggcgaagtcaagaagcccgagaccatcaactaccgcacgttcaagcccgagcgtgacggtctgttctgcgccaagatcttcggcccgatcaaggactacgagtgcctgtgcggcaagtacaagcgcctgaagcaccgtggcgtgatctgcgagaagtgcggcgttgaagtgacgctggccaaggtgcgccgtgagcgcatgggtcacattgaactggctgcgccgaccgcgcacatctggttcctgaagtcgctgccgtcgcgtctgggcatggtgctcgacatgacgctgcgcgacatcgagcgcgtgctgtacttcgaagcattcgtcgtggttgagccgggcatgaccgcgctcaagaagagccagatcatgtcggaagacgactacctggccaagtgcgacgagtacggcgaaggcgaattcgtcgccatgatgggcgccgaaggcattcgcgagctgctgcgcggcatcgacatcgagaagcagatcgagacgatccgcgccgagctgcaagctacgggctcggaagccaagatcaagaagttcgccaagcgcctgaaggtgctcgaggcattccagcgttcgggcatcaagccggactggatgatcctcgaagtgctgccggtgctgccgcccgagctgcgtccgctggtgccgctggacggcggccgtttcgccacgtcggacctgaacgacctgtatcgccgcgtg

SEQ ID NO: 255126 - DNA, 441 bp, Unknown
  Bacterial polypeptide expressing nucleotide sequence isolated from the Sargasso Sea
aacaaacagattatgataaactgctttttgatattgagacagatggtactgtaactccagaagatgctattgcatttggagcaagaattttaactgaacaactaaaaccgtttataaactttgatgaaccagaaccagaaattgaagaagatttggagagtgttctaccttttagtagaagtttgttaaagaaagtggatgaattagagttaagcgttaggtcagctaattgcttgaagaatgataatatagtttatattggagatttagttcaaaaaactgaacctgaaatgcttagaactcctaattttgggaggaaatcattaaatgaaattaaagaggttcttaaaatgatgtccttagaattaggaatggatgtagaggggtggccccctgaaaatattgaagaattagcaaaaaaacatgaagatccatattaaa

SEQ ID NO: 255127 - DNA, 271 bp, Unknown
  Bacterial polypeptide expressing nucleotide sequence isolated from the Sargasso Sea
ttagttcaaagaaaagaaaagagaaaagacaaatatgattttgatccacttcttttaaggtccattgaagaactagagcttactgtaaggtcgacgaattgcttaaaagcagaaaacatctttttaattggagatttaatacaaagaagtgaaatggacttattaaaaactcctaatcttggaaaaaaatcattaaatgaaattaaagatgaattagcgtcaagaggactttctatgggcactgtccttaaaaattggccaccaatgtaaa

SEQ ID NO: 255128 - DNA, 241 bp, Unknown
  Bacterial polypeptide expressing nucleotide sequence isolated from the Sargasso Sea
tatgagtcaaaaagaatataaacttaaaattaaaacagaaaaaaaatcattaacaaatacatatggaaaatttgttatacagccacttgaaagaggctatggtattacgcttggaaatactttaagaagagtattgctaacaagtttacctggagctgcaataactaatgtaaaagtagaaaatgttttacatgaattttcaactatacctggcgtaaaagatgatatgtctgaaatcatt

SEQ ID NO: 255129 - DNA, 547 bp, Unknown
  Bacterial polypeptide expressing nucleotide sequence isolated from the Sargasso Sea
aatgaaagtaacaagaggcagaggctttgtacctgttagacctcttgacgaagacgaaggccaagagactggacttctaagattagatgcaacttactcacctatcaaaagagtgacataccaggtagataatgccagggttgagcaaagaactaatttagatagacttacagtagatattgatacagatggaactttagaagctgaagagattttaagaatatcggcaaccattcttcaacatcaactatccgcttttgctgaacttggaagattagaagaggttattgaagaaaaagaggaagcaaagatagatccaatcatgttaagacctgtagacgaactagaactcacagttaggtccgcaaattgcttaaaagctgagaatatacattacataggtgatttagttaccagaatggaatctgatcttttgagaactccaaacttaggaaagaaatccttaaatgaaattaaagaagttctcttgtctagaggtctttcgttaggtttaattctagacaactggccaccagaaaataattaa

SEQ ID NO: 255130 - DNA, 274 bp, Unknown
  Bacterial polypeptide expressing nucleotide sequence isolated from the Sargasso Sea
catggaatttcagaaaaactggcttggtcttcataggccaaaatctattcaaatagatcaaaagtcaaaaactgatgattatgcgaagtttacttgtcagcctttagaaaaaggttatggtgttactatagggaatactcttagaagaatcttgctctcatcaattcaagggcctgcaattacaaaagttaaaatagatggagtaatgcatgaattttcaacaattcctggtgttacagaggatgtcacggagattattttaaatttaaagcaa

SEQ ID NO: 255131 - DNA, 985 bp, Unknown
  Bacterial polypeptide expressing nucleotide sequence isolated from the Sargasso Sea
agaacttcatccattaacttgtgctgcttttaatgcagattttgatggtgatcaaatggcagttcacgtaccactaagtttagaggcacaattagaggcaagagttttgatgatgtcgacaaataatattttaagcccgtcaaatggaaaacctataatcgtacctagtcaagatatgattttaggaatttattatttatcacaaccaccagtgcaaacagagagagttgatgggtattttgtgaatacttctgagatagaacatgcattagaaacagggcaaattaaagtacattcaagaatagtttctagatttgaaactgtagatgaaaaaggaaaaactaagtttgaaaaacatataagtacagcaggaaggtttttactatcaagtataattcctaaaaatctaaataataaattttctttgattgatagattgttaccaaaaaaaattgtttctgaagtaattgatcatgtttttagattttcaggtcaaaaaagtactgtaatattttgtgacaaattaaaagatattggatttaaacatgcgttcaaagctggaatttcatttggaaaagatgatcttttaataccagataataaagaacaattaattgatgaaactaaaaaacttattgctgactatgaaggccaatatgcagagggactaataactagaggtgaaaagtacaacaaagttatagatgcctggtctaaatgtacagatagagttgcatcagaaatgatgaaaagaatatctgcaacagaagtcacagatgatggattaaaaattaattcagtttttatgatggcagatagtggtgctagaggatcagcagcacaaatgaagcaattagcaggaatgagaggtttaatagccaaaccatcaggagaaattattgaaactcccatcacttccaattttaaagaaggtcttacagctttagaatattttaattcactcatggcgcaaggaaggggttag

SEQ ID NO: 255132 - DNA, 424 bp, Unknown
  Bacterial polypeptide expressing nucleotide sequence isolated from the Sargasso Sea
aatggtaaaaaataacgaattattgacacaaaaaaagtttaatacgatttcaatcggtttatcttcacctgaggtaatccttggtaactccagaggagaggttctaaagcctgagactattaattatagaactcataaacctgaaagagatggtttattttgtgagagaatctttggccctgtcaaagactatgaatgtgcatgtggaaaatataagaggataagatataaaggtatagtttgtgacagatgtggtgttgaagtaacagaaaagaaagtaagaagagacagagtaggtcatattagtcttgttgtgcctgttgcacacatctggtattttaaatctttgccaaataaaataggatatcttctaggactgccttcaaagaagttagatatgattatttattatgaaaggtatgtt

SEQ ID NO: 255133 - DNA, 1230 bp, Unknown
  Bacterial polypeptide expressing nucleotide sequence isolated from the Sargasso Sea
tttaagccttttttatatgcaagacttaataaacttggtttagcttcaactattaaacaagctaaaaaattagttgaaaaagaaacaaatgccgtttgggatgcattagaattaattgttagagaacatccagtattacttaacagagcacctactttacatagattaggagttcaggcttttgaacctaaattaattgaaggtgatgctatagaattacacccattaacttgtgcagcttttaatgctgattttgatggagaccaaatggcagtccatgttccattaagtttggaagcacaattagaagcgagaattttgatgctttcgacaaataatattttatctccatcaaatggtaaaccaatcattgtaccaagtcaggacatgattttaggtatttattatttatctcaagaacctttaactgataaaccaatgggatattttttagatgcagatcaaatcgaatttgctttatcatcaggtgatataaaagtgcataatactataatctcaagatttgaaactattgatgaaaaaggaaataaaaaatatgagaaatatacatccacagcaggaagatttttattagctaatttattgccaaaaaatcacaatattaaattttctttaattgatagattattaccaaaaaaagttgtttcagaagtaatcgatatagtatttagattttgtggtcaaaaaactacagttattttctgcgataaattaaaagatttaggatttaaacatgcattcaaagctggtatttcctttggtaaggatgaccttgttattccagaaagtaaaactcaactgatagaagatacaaaaaaattaattgcagattatgaaacacaatattcagaaggtttaattaccagaggtgaaaaatataataaagttgttgatgcctggtcaaaatgtactgataaagttgcaggagaaatgatgaaaggtatttcagctactgaaaagacatctgagggattaaaaattaattcagtatttatgatggcagatagtggagcgagaggttcagctgcacagatgaagcagttagcaggaatgagaggattaattgcaaaaccatctggagaaattattgaaagtccaattatatctaattttaaagagggattgactgctttagagtattttaattcaactcaaagagctagaaaaggtttagctgatactgctttaaaaacaagcaagctcaggata

SEQ ID NO: 255134 - DNA, 1248 bp, Unknown
  Bacterial polypeptide expressing nucleotide sequence isolated from the Sargasso Sea
tttatacgcaagactaaacaaacttggactcgcgtctacaattaaacaggcaaaaaaattagttgaaagagaaagaaatgaagtttgggatgcattggaagaaatagttagagaacatccagtaatattaaatagagcaccgactttacacagactgggagttcaggcatttgaacctaaactaatagaaggtgatgctatcgagcttcaccctttaacttgtgcagcattcaatgcagactttgacggtgatcaaatggctgtacacgtacctttaagcttagaggcccaattagaagcaagagttttaatgatgtctacaaataatattttaagcccttctaatggcaaaccaataatagtacctagccaagatatgattttaggaatttattatttatcacaagctccttaccaaacagataaaatagaaggatattttacaaacatatcagaaattgatcatggtttagaaagtgggcaaataaaagtgcattcaagaatagtttctagatttgagactgttgatgaaaatggcaaaattaaatatgaaaaacatataagcacagctgggagattcttattagcaaatcttttaccaaaaaatataaataacaaattttctttaattgatagactgctaccaaaaagaacagtttcagaaataattgatcatgtgtttagattttcaggacaaaaatctacagttatattttgtgataaattaaaaaatttaggttttaaacatgcttttaaagcaggcatatcattcggaaaagatgatttagtaatacccgaaaataaacagcaattaatagatgaaactaaaaaattaatttctgaatatgaaacgcaatattctgaagggttgattacaagaggtgaaaaatataacaaagtagttgacgcttggtctaaatgcactgatagagtggctgctgaaatgatgaagaaaatttcagctacagaaataactaaagaaggacttaaaattaattctgtttttatgatggcagacagtggagcaagaggttctgcagctcaaatgaaacaactagctggaatgagaggattgattgctaaaccttcaggtgaaattatagagtcacctattacgtctaattttaaagagggtcttactgcacttgagtattttaactcaacacatggagcaagaaaaggattagctgatacagcattaaaaactgctaattctggatatcttacacgaagattgtgtgatgtagc

SEQ ID NO: 255135 - DNA, 271 bp, Unknown
  Bacterial polypeptide expressing nucleotide sequence isolated from the Sargasso Sea
aatgacaaacagcaacttaagaactgaaaatcactttgattacgtcaaaatttcgatagcttctccacaaagaataatggattggggtcagaggacattgcccaatggacaagtagttggtgaagttacgaaacctgaaactatcaattacaggacacttaaaccagaaatggatggattattttgtgaaaagatttttgggccatctaaagattgggaatgccatttgtggaaagtacaaaagggtaagacatcgaggcatcgtttgtga

SEQ ID NO: 255136 - DNA, 496 bp, Unknown
  Bacterial polypeptide expressing nucleotide sequence isolated from the Sargasso Sea
gggcaacgccctgcgacgcgtcctcatgggcggcctcgaaggcagtgccgtcaccgccattcggatcgctggtgtcaaccacgagtacgccactgtccccggtgtgcgtgaggacgttctcgacatccttctgaactgtaaggagctctccgtaaacagccggtcgcctgagctcgagatcggtcgtcttgttgtggctggtcccgctgaggtgaccgccaaagacctgcagttctcctctcaggttgaggtggtagacggcaatcgttccatcgccaccgtggccgatggttacagcctcgagcttgaggtccacgtggaacgcggcgtgggttaccgacctgtggatcgccacagcgaggacaccagcgccatcgacctgcttcagatcgatgcggtgttcatgccggtgatccgggtgaatttcaccatcgatgaaaccgccgtcgccgaggggggatccgcccgagagcgtctgcgaatggagatcgtcacc

SEQ ID NO: 255137 - DNA, 864 bp, Unknown
  Bacterial polypeptide expressing nucleotide sequence isolated from the Sargasso Sea
tttagagttattcaagcctttcatctacggtaagttagaagcccgcggtttagccactactattaaagcggctaaaaagatggttgaacgtgaagaaggcgctgtatgggacgttctggacgaagtgatccgtgaacatccggtgctgttaaaccgtgctcctacattgcaccgtttaggtattcaggcattcgaacctgtactgatcgaaggtaaggctatccagttacacccattggtgtgtgctgcatacaacgccgacttcgacggtgaccagatggccgttcacgtgcctctgaccattgaagctcagttagaagcccgtgcgctgatgatgtcgacaaacaacgttctgtcgccagcgaacggtgaaccaatcatcgttccttcacaggacgttgtattgggtctgtattacatgacgcgtgatgcggtaaacgccaaaggcgaaggcatgatctttaaacatgccaaggaagctgaaaaagctttccgtgccggtgttgccagcttacacgcccgtgtcaaagtacgtatcactgaagtgactattgccgaagacggtacccgttcttcagtaacagcagtacgcgacactacagtaggccgtgccattctgtactccatcatgccggaaggcttagcctttgattcaatcaaccaggctatgggtaagaaacagatttcacgtttactgaacggctcttaccgtcgtattggtctgaaaaacaccgttattttagcggaccagatcatgtacacaggtttccattacgccatgttgtctggtgtgtctgttggtattgacgatatggtcatcccggcagcaaggttgatatcatttctgctgcaaaagcagaaggt

SEQ ID NO: 255138 - DNA, 889 bp, Unknown
  Bacterial polypeptide expressing nucleotide sequence isolated from the Sargasso Sea
tgtatcatcaggaaataagccagaatggatgattttaacgtctgttccagttatacctcctgaattaagaccgcttgttccattagacggaggtagatttgccacatcagatttaaatgatttgtacagaagagttataaatagaaataaccgtttaaaaagactgctagatcttaaagcacctgacattattgtaagaaatgaaaaaagaatgctccaagaatctgttgatgcattatttgataacggcagaagaggaagagtaataacaggaactggtaaaagaccgctaaaatctttagcggaaatgcttaaaggaaaacaaggtaggttcagacaaaatttattaggaaaaagagttgattactcaggaagatcagtaattgttgttgggccagaactaaaattacaccaatgcggcttaccaaaaaaaatggccttagaactattcaagccatttttgtatgctagattagataaactaggactagcaacaacaataaaacaagcaaaaagattggtagaaaaagaaaaaagtgaagtatgggactcgttagaacatataattagagaacaccctattttactaaacagagctccaaccttacacagacttggtgttcaggcctttgaagctaagcttattgaaggaaatgcaattgaactacatcctttagtttgtgcagcctttaatgcagattttgatggtgatcaaatggcagttcatattcctttaagcttggaagctcaattagaagcaagagttttaatgatgtcaacaaataatattttaagcccatcaaatggaaaaccaattattgtaccaagtcaggatattgttttaggaatatattatttatctcaagcagacaaagaggataaaaaacca

SEQ ID NO: 255139 - DNA, 763 bp, Unknown
  Bacterial polypeptide expressing nucleotide sequence isolated from the Sargasso Sea
catgcaaatatctttatcagactttcttacgccacaagtaatacaagttgatgaatacgataactgccactcgaaagtagtgttagaaccgctagaaaggggttttgggcatactcttggaaatgcattaagaagaattttgctttcttctatgccgggtagcgcaatagaggaagttgaaattgatggagtggtgcacgagtacagcacgatcgagggtgtcggtgaagatgtcatcgagatactgctcaatttaaagggcttagcggtcgtattaaacgaaagggatgaagctatcctttcgatttccaagaagggttctggagttgttacagcagcggatattcaagaagatcacgatgtagatatcattaatccagaccacgttattgcgaatcttaatagcaatggagaacttaatatgagactcactgtccgaaaggggagagggtactcgccagcagacagccgcctaaaaacggatgacgagactcgctccgttgggaagctacttttggatgcctcttatagtccagtagttcgcgtctcttattctgttgagaatgctcgtgtggagcaaaggactgatttagacaaactgataatcgacttagaaaccaacggaaccattgagccggaagaagcaatccggcgtgccgccacaattcttcaacaccaactaagtgtgtttgttgaccttcaaagcgagattattgctgagcctgaagaaagggaagctgagattgacccaatcctacttcgg

SEQ ID NO: 255140 - DNA, 966 bp, Unknown
  Bacterial polypeptide expressing nucleotide sequence isolated from the Sargasso Sea
caatgtggattaccaaaaaaaatggcattagagctattcaaaccatttgtctacggaaggttggagcataaagagctagcaacgacaattaaagctgctaagaggcttgttgaaagagagaccccagaggtttgggaagctctagaagaagttatcagggagcatccagttctattaaatagggctccaacattgcatcgtcttggtattcaggcatttgaacctctattaattgagggtaaggctatacaacttcatccattggtatgtgttgcttataatgcagactttgatggcgatcagatggctgtccatgttccattaacagttgaagctcaacttgaagctagagcgttaatgatgtcgactaataatattctttctcccgctgatggagctccgattattaatccaactcaggatgttgttctcggtctttactacatgacaagagagaaagtcaactctcatggagaaggaagagtattttctaaccctgacgaagttcaaagagcttttgagtctgaacaaatagatcttcatgcaaaaataaaagtaagaatagaaaatgctgagaagggtgtttttattgaggatactaccgttggaagaacccttatctggagaatcacaccaattgaagttggattcgacaatgtaaataaaacactagacaaaaaagcagtttcgtcgcttattgatctttcctacagaaaagctggtctgaagaagaccgtaatttttgccgatcaattaatgtaccttggctttgacttctcaactagatcaggctcatcgattggtgtcgatgattttgttattcctgaagagaaatatgaaattgtagacaaggcagaggatgaggttaaggaaattgagaaccaattttcatctgggctggtcactaaaggtgaaagatataacaaggtagttgatatatggtctagagcaaatgaaagagtgcta

SEQ ID NO: 255141 - DNA, 970 bp, Unknown
  Bacterial polypeptide expressing nucleotide sequence isolated from the Sargasso Sea
actgaggtctgggatattttagaagaagtcattagggagcacccagttttattgaatcgtgctccaactctccacagacttggaattcaagctttcgaaccagttcttatcgagggtaaagcaatacagttgcatccacttgtctgtgctgcttttaatgctgattttgatggagatcagatggctgtacatgtgcctttatcactagaagcacaacttgaagcaagagttttgatgatgtccacaaataatattttacatcctgcaaatggagatccaattattgttcctagtcaagatatcattttaggcttgtactatttatctcaaatgaaacaaaatgagccaggagaaggaagacattttgacgatataaacgagattgaatttgcattagaaaataaagatataactctccactcaaaaataagttttagatttaacacagatgatggttataaaaaatttgatacaacacctggtaggattttaatttctaaagaattacctaaaaatgaaaatatttctttcgaaattgtgaataaacttttaacaaaaaaagaaatttctaggatgatagatgatgtttataggcattgtggtcagaaagaaactgttattttttgtgatcatattatgaaattaggttttaaacatgcgtgtaatgccggtatctcatttggtaaagatgatatgattattcctgaagaaaaagttaacctaattaatgatactaatgaattagttaaagaatttgaacaacagtatattgatggatttataactagaggcgaaaaatataataaagttgttgatgcatgggcaaaatgtactgataaagtcgaagataaaatgatggatataatttcttcatctcaaattaatgaagacaccgagagagaagatccaattaattcaatatatatgatggctcattcaggcgctagaggttcagccgcgcaaatgaagc

SEQ ID NO: 255142 - DNA, 691 bp, Unknown
  Bacterial polypeptide expressing nucleotide sequence isolated from the Sargasso Sea
atgatccacaaaaactgggccgaattaataaaacccgcacaactagaagtaaaacaggcaaatgaccctactcgtcagggtactgtaatcgctgagcctcttgaacgaggtttcggtttaacaattggtaacgcacttaggcgagttcttatgagtagtctccagggtgctgctataaccagtgtgcaaattgataacgttttacatgaattttcatcagttgctggggtcagagaggacgtgacagatattgttctcaacttaaaaggcgtttcacttagcatggaagttgaaggaccgaagcgacttactgtttcatcaaagggtcctggcgtcgtaacagcgggtaatattgaagaaactgctggcattgaaattttgaataaagatcacgtaatttgtcatttagacgatggggctgacttgaacatggagctaaccgtcaatactggaaatggctatgttgctgcagaaaaaaataagcctgaagatgcgccaatagggttgatccccattgatgctatttattctccggtcaaaaaggtatcatacgacgttcaacctactagagaaggtcaagttctagactatgataaattgactatgaatatcgaaactgatggctcagtttcgcctgatgatgcactcgcattcgcggctaggatactgcaggatcaactgtcgatctttg

SEQ ID NO: 255143 - DNA, 1048 bp, Unknown
  Bacterial polypeptide expressing nucleotide sequence isolated from the Sargasso Sea
gatgattttaaccacgataccagtaattcctcctgagttaagaccattagtaccattagatggaggtagatttgctacttctgatttaaatgatttatatagaagagttataaatagaaataaccgtttaaaaagattaatggaccttaaagctccagatataattgtgagaaatgaaaagagaatgcttcaagagtctgtagatgcattatttgataatggtagaagaggaagagtaatcacaggtacaggtaaaagacctctaaaatctttagcagagatgttaaaaggtaaacaaggaagatttagacaaaatttattgggtaaaagggtcgattattctggaagatcagtaatagtagttggaccagacttaaaattacacgaatgcggtttgcctaaaaaaatggctttagaattatttaaaccatttttatatgcaagattaaataaactcggattagcatctacaatcaagcaagctaaaaaacttgttgaaagagagagaaatgaagtttgggatgccttagaattaatcgttagagaacatccagttatattaaatagagcaccaacactacatagactaggtgttcaggcatttgaaccaaaattaattgaaggaaatgcaattgaattacatccactaacctgtgctgcattcaacgcagactttgatggtgatcaaatggcagttcacgtaccattaagtttagaggcacaattagaagcaagagttttaatgatgtctacaaacaatattttaagcccatcaaatggaaaacctataattgtcccaagtcaggatatgattttaggtatatattatctttctcaaccaccatatcaaactgatagagtcgagggatattttgtaaatacctcagagatagaacatgctctagaaatcggtcaaattaaagttcattcaagaattgtctcaagatttggaacagttgatgaaaatggtaatactaaatatgaaaaacatattagtacagctggaagatttttattagcaagcttaattccaaaaaaatataaataa

SEQ ID NO: 255144 - DNA, 826 bp, Unknown
  Bacterial polypeptide expressing nucleotide sequence isolated from the Sargasso Sea
aatggaaagtactgaagtaaatccaaaaaattggaaaacattaatcaaaccagcaaaacttgatgtacaattaagtgatgataaatctcaggctaagataacagccgaacctttagaaaaaggttatggattgacacttggtaattctttaagaaggattttactttcttcaattagaggaactgctgtaaccgcaattcaaatagatggtgttttacatgaatttacatctattaaaggtgtaagagaagatgtaaccgatatagttttgaatgttaaatcacttgccttaaaaagtagttctgatgcacaaaaaaaattaatcttagatgcaaaaggtcctggtgaaataaaagcttctgatataacacaaattgccgatgttgaaatactaaatcctgaactcgttatttgtaacctagatgaaaatacaaattttcatatggaaatgatcgtaggacatggaaaaggatatgtttcagctgacatgaataaaccagatgaaccacctttgggacttatacctatagactcgttatttagcccagttaaaaaagtttcttattctgtaagtactgctagagagggaaaagctctagactatgataaactgatcatggaagttgaaactaatggttcaatatctgcagaagatgctgttgcatattcagcaagaatttttcaagatcaattaggtatgtttgttaactttgatgaaccacaagaggttattgtaagagagcaatcaacagaacctgaatttaataaaaacttattaagaaaagtagacgaattagaattgtcagttagatcaatgaattgttga

SEQ ID NO: 255145 - DNA, 757 bp, Unknown
  Bacterial polypeptide expressing nucleotide sequence isolated from the Sargasso Sea
aagaaaaatcaattgttaggagaagaagagctaataaaatatcaagatgattatggtgaagaagcattcacagctggaataggagctgaggctatactagaaattcttaaatctataaatttagaagaagaaagagatcttctaatcaaaaatattaaagaaacaaaatcaaaagttaatgaggaaagatcaattaaaagattaaaattaattgaatcatttattgaaacgggaaataagccagagtggatgatattaacaacagtaccggttattccaccagaattaagaccactagtaccattagatggtggtagatttgctacttctgatttgaatgatttatatagaagagtgataaatagaaataatagattaaaaagattaatagatttaaaggcaccagatattatcgtcagaaatgaaaaaagaatgctgcaagagtccgtagatgcactttttgataatggaagaagaggaagggtgattactggaactggaaaaagaccactaaaatctcttgctgagatgttaaaaggtaagcaaggtagatttagacagaatttattaggaaagagagtagattattcaggaagatcggtaatagttgttggcccagatcttaaattgcatgaatgtggacttcctaagaaaatggctttagagctatttaaaccatttctttatgcaagattaaataaattaggcctagcctcaactattaaacaagctaaaaaattagttgagaaagagagaa

SEQ ID NO: 255146 - DNA, 676 bp, Unknown
  Bacterial polypeptide expressing nucleotide sequence isolated from the Sargasso Sea
ggtaagggaccagttctagcatctgatatagaagatcatccaaacctagaaattaaaaatcctgatttttgcattgcaaacatgacgaatgataagaccgaacttgtaattaatctattaatttctaaaggaaaaggttaccagccagcagtaaaaaggaagtttaatgaattagatgatttaggaattggtaaaatgcaaattgatgcctcgttcacacctgtagagaaagtttcatatagtgttgataatgccagagtgaaacaaaaagctgatcttgataaactaattattgagcttgagacaaatgaaacgatagagcctgaagatgcaataagaactgctggtaaaattcttagagaacaattagaagtatttagtcatttagaaattaaaaacgatacactagatgaagttgatgagaatcatattgatccagtcttgctaaggcctgttgatgatttagagctaacagtcagatctgcaaattgtttgaaagcagaaaatattcactacattggtgatttagtccaaaggagtgagaatgaactattaaaaactcccaatcttggaaaaaaatcactaacagaaataaaagatgtgttatcaactcatagtttaacccttggccagacaatagaagactggccacctaaaaatattgaaaaaagataat

SEQ ID NO: 255147 - DNA, 705 bp, Unknown
  Bacterial polypeptide expressing nucleotide sequence isolated from the Sargasso Sea
aatggaaactagcaatgtaaatttaaaaaattggaaatctttaataaagccttcaaaaattgatgttaatcagaatgaagacaaaacttttgctaaagtaatagctgaaccacttgagaaaggctatggtttaactataggaaactctcttagaagaattttactttcttcaataagaggaactgctgttaccgcgatacaaattgatggtgtacagcatgagtatagttcaattaaaggagtaagggaggatgttacagatatagttcttaatataaaatcacttgcattaaaaagtgattttgaaggtaataagaaattgattttagatgctaaaggccctggtgaaattaaagcgtcacaaattacacaaataacagatattgaaattttaaatccagatttagtaatttgtaatttggacgaaaatacaaattttcatatggaactttttgtaggcaatggaaaaggttacgtttcagcagaattaaataaaccagaagaaccgcctctaggtttaattccaattgattcattatttagcccagttaaaaaagtttcttattcagtaagcaccgctagagaaggaaaagccttagattatgataaattaacaatggaaattgaaaccaacggatcgattacagccgaagatgctttagcatattcagcaagaatttttcaggaccaattaggcatgtttgt

SEQ ID NO: 255148 - DNA, 966 bp, Unknown
  Bacterial polypeptide expressing nucleotide sequence isolated from the Sargasso Sea
tagcaaaagttagaagggaaagaatgggtcacattgatcttgctgcgccagttgcacatatttggttccttaaatctttaccatcaagaattggtttgttacttaatgtgactttaagagaaatagaaagagtcttatattttgaaagctatatagtaactgaccctggacttactgaattagaaaaaggacagatcctcaccgaagaggagtgggtagaaaaatatgaagagtttggagatgaattttctgctggaatgggtgctgaagcagtgcaaatactgcttgaagaacttgatatagatgatgagattagaattattagagaagaaattccacaaacaaattcagaaacaaaactaaagaaattttcgaagagattaaaattattagaagcttttaaaaattccggaaataagcctgaatggatgattatgaatgttcttccagttttaccaccagatttaagacctttagtacccttagaaggtggaagatttgcaacctctgatctcaatgatctttatagaagagttattaatagaaataatagattaaaaagattattggaactgaatgctccagaaattattgttagaaatgaaaaaagaatgcttcaagagtcagttgacgctctattagataatggacgaagaggaagagttataacaggtacaaataagagacctttaaaatctcttgctgacatgatcaaaggaaaaggcggaagatttagacaaaacttacttggaaaaagagttgattattctggaagatctgtaattgttgctggccctaatttgaaattacatcaatgcgggttacctaagaagatggcattagaattattcaaaccttttgtctatggaaagttagataatagggagcttgcaactacaattaaagctgcaaaaaaacttgtgaaagagaaactccagaagtttgggaagtgctcgaagaagtaat

SEQ ID NO: 255149 - DNA, 931 bp, Unknown
  Bacterial polypeptide expressing nucleotide sequence isolated from the Sargasso Sea
tttggtttttaaatcattaccaagtagaatttcattagcaattgatatgaaattaaaagaagttgagaaagttctttattttgaaagttttattattgtagagcctggtttaacaaatttaaaaaaaggtcaattaatttcagaggaagctttattaagagctcaagatgaatttggggaagatgcttttacagcaggaatcggcgcagaagccgtaagagaaatactggtaaatttagatctaaaaaaagaacaacaaaaattaagagaatccttaaaagatattaaatcaaaagtaactgaggaaagaacgatcaaaagattaaaactaatagaatcgtttataaattctggaaacaaaccagagtggatgattttaacttctgttccagttataccaccagaacttaggcctttggtcccacttgatggtggaagatttgcaacatcagatttaaatgatttatatagaagggtaattaacagaaataatagacttaaaagactattagatttaaaagccccagatattatcgtacgaaatgagaagagaatgcttcaagagtctgttgatgcgttatttgacaatggaagaagaggaagagttataacaggaaccggaaaacgtccgcttaaatctttagcggaaatgctcaaaggaaaacaaggaagatttagacagaacctattaggtaaaagagtagattattcaggtagatcagtaattgttgttggaccagaactaaaattacatcaatgtggattaccaaaaaaaatggctttagaattattcaaaccatttttgtacgcaagattagacaaattaggtctcgcaaccacaatcaaacaagcaaaaagattagttgaaaaagaaaaaagtgaagtttgggactctcttgaacatataattagagaacatcctatactttaa

SEQ ID NO: 255150 - DNA, 1104 bp, Unknown
  Bacterial polypeptide expressing nucleotide sequence isolated from the Sargasso Sea
caaagggcaaaagagggcaaagcttataaaaaggataagagttattgataatttcattgcgactaatgcaaaaccagaatggatggttttagatgcaataccagtcatacctcctgatctaagacctatggttcagcttgatggaggaagatttgcaacttcagatttaaatgacttatatagaagagttattaatagaaacaatagactagctaggcttcaagaaattttagctcctgaaattatagtaagaaatgaaaaaagaatgcttcaggaggcagttgatgcccttatagataatggaaggagagggaggactgttgttggagcaaataatagagctcttaaatctctaagtgacataattgaaggaaaacaaggaagatttagacagaatcttcttggaaagcgtgttgactattcaggaagatctgtaatagttgtgggtcctaaattaaaaatgcatcagtgcgggctcccaaaagaaatggcaatagagctctttcagccttttgtaatccatagattgatacgacaaaatattgtgaataatattaaagctgcaaaaaaattaatacaaaaagctgatgatgaagttatgcaagtactccaagaagttattgaaggccatccaattctcttaaatagagctcctacgcttcaccgtttgggaattcaagcttttgagccgaaattagttggaggtagagcaatacaactgcatcctttagtttgtcctgcattcaatgctgactttgatggagatcaaatggcagttcatgttcctttagctttagaggcacaaactgaagctcgcatgcttatgttagctagtaataatattctctctcctgctactggggaaccaattgtgactccatcacaagatatggttttaggatcttattatctgactgctttgcaaccgaattatcaaaaaccagaattcggacacaataatactacttttgcttcattagaagatgtcattattgcatttgaagataaaagactcagcctgcatgaatgggtttgggttagatttaatggagaagttgaagatgaagacgaaatgcgtagcccactaaaaactcaagatctgaa

SEQ ID NO: 255151 - DNA, 951 bp, Unknown
  Bacterial polypeptide expressing nucleotide sequence isolated from the Sargasso Sea
taataagttagatatcaccagtaacgatgacaagagtgttgcaaaagtagttgcagaaccactagaaaaaggttttggtcaaactattggaaattctctcagaagaattttgttatcatctatacaaggtgcagcagtcacagcaattcaaatcgacggtgttttacatgaattttcatctataaaaggagtacgtgaagacgtaacagatattgttttaaatgtaaaaaatttagctattaagtcttcgtcttctaatcctaaaaaaatagttttagatataaaaggacctaaagaggtaaaagcaaaagatataacattagttcctgaagtaaagattttaaatccagaacaaacaatttgcaatttagatgaaaaaactaattttcacatggaattaatggtaagcactggaaaaggatacgttcaagcaccgaaaaataaatctgacgatagccctcttggtttaattgctattgactctctgtttagtccagtaaaaaaagtctctttttcagtagaaaacactagagcaggtagcgctcttgactatgataaacttgtaatgactgttgaaactaacggaacagtagatgctgaagatgcaatcgcatactcggcaagaatttttcaagatcaattatcaatgtttgtaaattttgaagatccacaagaagttgtgaaagaagtaaagtcttcagaacctgaatttaatagaaatcttctaaaaagagttgaggaactagagctttctgtgagatcaatgaattgtttaaaaaatgacaatataatttatataggtgatctagttcaaaaaacagagccagaaatgttaagaacacctaactttggtagaaaatctttaaatgaaataaaagaagtgttaaatacaatgtcattatatttaggtatggaaatacccaattggccgcctgataatattgctgaatt

SEQ ID NO: 255152 - DNA, 885 bp, Unknown
  Bacterial polypeptide expressing nucleotide sequence isolated from the Sargasso Sea
cctgaaatcactgccaagccgtatcggtttgctgttagatatgacattacgtgatatcgaacgtgtactgtattttgaatcttatgttgtgaccgaaccaggcatgacgtctttagagcgtcgtcagatgctgactgaagaagagtatctggatgtgctggaagagcacggcgacgagttcgaagccaaaatgggtgcagaagcaattctggacattttacgtggcatcgatctggcaacagagatcaaacaaatgcgtgaagagttgccaaccataaactctgaaaccaaacgtaagaagatcagcaaacgtctgaaactgatggaagcattccacacttctggtaataaaccagagtggatgatcatgacagtactgccagtactgccaccggatctgcgtcctttagttccattggacggtggccgttttgctacctctgatctgaacgatttataccgccgtgtgatcaaccgtaacaaccgtctgaagcgtcttttggacctgtcagctcctgatatcatcgtacgtaacgaaaagcgtatgttgcaggaagctgtcgatgcgttgttagacaacggtcgtcgcggtcgcgctatcacgggttcaaacaagcgtcctctgaaatctttggccgatatgatcaaaggtaaacaaggtcgtttccgccagaacttgttaggtaagcgtgttgactactcaggccgttctgtaatcacagtaggtcctactttacgtctgcatcagtgcggtttaccaaagaaaatggctttagagttattcaagcctttcatctacggtaagttagaagcccgcggtttagccactactattaaagcggctaaaaagatggtgaacgtgaagaaggcgctgtatgggacgtt

SEQ ID NO: 255153 - DNA, 963 bp, Unknown
  Bacterial polypeptide expressing nucleotide sequence isolated from the Sargasso Sea
aatgcaatccacatcaaatattatagacaaaaattggaaagctttaataaagcctaacaaattagaaatcacaagcaatgaggataaaactattgcaaaggttatcgcagaacctttagaaaaaggatttggtcagactataggaaattcattaaggagaattttgctatcttctatacaaggcgcagcagtaacagcaatacaaattgatggtgttcttcacgaattttcatctattaaaggtgttagagaagacgtaacagatatagttttaaatgttaaaaatttagctataaaatcttcttcaacaagccctaaaaaaattattctagatattaaaggaccaaaagaagttaaagcaaaagatatttctcttgttcccgaaatagaaattttaaatcctgagcaaactatttgcaatttagatgaaaaaactaactttcatatggagcttatgattagtactggcaaaggttatgttccagctccaaaaaatagatctgaagataatcctttaggattaatctcaatagactcattatttagccctgtaaaaaaagtatcatttgcagtcgaaaatactagagcaggaagcgcacttgactacgataaacttgtaatgtcagttgaaacaaatggaacagtagctgcagaagatgcagtagcttattcagcaagaatattccaagatcaattatcaatgtttgtaaattttgatgatcctaaagaggtagtaaaagaagtaaaatcatcagagccagaatttaatagaaatttacttaaacgagttgaagaacttgaactttctgttagatcaatgaattgtctaaagaatgacaatataatttatattggtgatttagttcaaaaaactgagcctgaaatgttaagaactccaaattttggtagaaaatcattaaacgaaattaaagaagttttaaatacgatgtcgttgtatttagg

SEQ ID NO: 255154 - DNA, 921 bp, Unknown
  Bacterial polypeptide expressing nucleotide sequence isolated from the Sargasso Sea
aatggaaacaactgaagtaaaaattaaaaattggaaatcattaatcaaaccaccaaaattggatgtaaatttaagtgatgataaaacttatgcaaagattgtggctgaaccacttgaaaaaggatatggattaactttaggaaactctttaagaagaattttattatcatctattagaggtactgctgttactgctattcaaatagatggagttttacatgaatttacatctattaaaggtgtaagggaagatgtaacagacatagttttaaatgttaaatcacttgctctaaaaagtaattctgaaaccacaactaaattaattttggatgcaaaaggcccaggtgaaataaaagcctcaaatataacaacttcaggagatattgaaattttaaatccagatttagttatttgcaatttagacgaaaatactaattttcacatggaaatgacagttaataatggaaaaggttatgtctcagctgacatgaacaagccagaagaaccacctttagggcttattcctattgactcactcttcagtccagtaaaaaaagtttcgtattccattagcactgcgagagaaggaaaagctcttgattatgacaaattaacaatggaagttgaaacaaatggatctatatctgcggaagacgcagttgcttattctgcaagaatatttcaggatcaactcggtatgtttgttaactttgacgaacctcaagaagtaatagttagagagcaacctacagaacctgaatttaataaaaatttattgagaaaagttgatgaattagagctttctgttagatctatgaattgtctaaaaaatgataacataatttacattggagacttggtttcaaaatctgaaggagaaatgttaagaacacctaattttggaagaaatctcctcatgaa

SEQ ID NO: 255155 - DNA, 568 bp, Unknown
  Bacterial polypeptide expressing nucleotide sequence isolated from the Sargasso Sea
atggaaaatttaaatattatagataaaaactggaagacattaacaaaaccttcaaaactagaaattacaagtaatgaagataagtctatagctaaagttgtggctgaaccactcgaaaaaggttttggtcaaactataggtaacgcactaagaagaatattattatcatcaatacaaggtgccgccgtaactgcaattcaaatcgacggagttttacatgaattttcatcaataaaaggtgtgagagaagatgttacggatattgttttgaatgtaaaaaatttagcaattaaaataaattctgccggatccaaaaaattagtgttagatgcgactggaccaaaagaagtgaaagcaaaagatataacgttggtttcaggtgtcgaaattttaaatttagaccaaacaatatgtaatttggatgaaaaaacaaaatttcatatggaatttatagttaattctggaagaggatatgttttagcacaaaaaaataaaactgatgatactccattgggacttattgcgatcgattctcttttcagtccagtaaaaaaagtttcatacaaaa

SEQ ID NO: 255156 - DNA, 993 bp, Unknown
  Bacterial polypeptide expressing nucleotide sequence isolated from the Sargasso Sea
tgcgctaagatttttggtccaatcaaagattatgagtgtctttgtggtaaatataagagattaaagcacagaggggtagtgtgtgaaaaatgtggtgtcgaggtaactttatctaaagttagacgcgaacgtatggggcatattgaactggcgacaccaattgctcatatttggtatttaaaatctttaccatccagaatgggattaatgcttgatatgacattacgtgaaattgaaaggattctgtatttcgaagcctatgtcgttgttgagcccggaatgactgatcttgagcgtggtcaaatgctaactgaagaaaattatcttgaggcgctagaaaattatggagatgatttcgaggccaaaatgggtgccgaagcaattcgtgaattgcttttatctattgatttagagaccgaggtgcaggacctaagagaagaaattccaaatacaaattcagagacaaaattacgaaaattaactaagagattaaaattactagaagcatttatgaattccggtaataaaccagagtggatggtgatgaaagttttaccagtgttgccaccggaattacgacctttagtaccgttagatgggggtcgctttgctacttcggatctaaatgatttgtatagacgcgttatcaatagaaataatcgcttaaaacgtttactagatttgaatgctcccgacattatagtccgtaatgaaaaacgtatgttacaggagtctgtagatgcattgcttgataatggtagacgtggccgagctattactggtacaaacaaacttcctttaaagtcacttgccgatatgatcaaaggtaagcaaggacgctttagacaaaatttattagggaaaagagtcgattactcgggtcgttccgtaattgtagttggtcctacattacgtttacatcaatgcggcataccaaaaaaaatggcgttagaattatttaaaccatttatatttagcaaactagaaagacgt

SEQ ID NO: 255157 - DNA, 976 bp, Unknown
  Bacterial polypeptide expressing nucleotide sequence isolated from the Sargasso Sea
attattgtgagaaatgaaaaaagaatgtgcaaagaagctgtagatgcgttgcttgataatggtcgtcgtgggcgagctatgtcgggttcaaataagcgtccactgaagtcattaaccgatatgattaaaggtaagcaaggtcgttttagacaaaatttattaggtaagcgtgtggattattcaggtcgttctgtgatcgttgtcggtcctgagctcaagcttcatcaatgcgggctacctaaaaaaatggcgctggagctgtttaagccttttatttttagtttgttgcaacgtagagagtttgctacaacaatcaaagcagcgaaaaagttagtcgacagtgagtcaccggaagtctgggatattcttgatgaggtgattcgtgagcacccggtgcttttaaaccgagctcctacattacaccgcttaggtattcaagcgtttgagcctgttttggttgaaggtaaggcgattcaattacaccctctggtatgtgctgcttataacgcggactttgatggtgaccaaatggctgttcacgtgcctttgacattagaagctcagttagaagcgcgttcgttgatgatggcaacaaataatgtgctgcatcctgcgaatggtgaaccgattattgttccaagtcaggacgtggttcttggtttgtattacatgacgcgtgaagcggctaatgaaccgggcgaaggctctatttttagtaataccgaccaagtaaaaatggcttatgacaacgatgctgtgagtcttcagtctaagattgttgtgcgagtgactgaatatcaaaaagatcctgatacgggttccctctcatcgaatgtccgacgtgtagagacaacagtgggccgcgctttggtttgggaaatagtccctaaaggtctgagttatgacattgttaacaagacattaactaaaaaagaaatatcaaaccttcttaatgtcagttatcgccatctaggct

SEQ ID NO: 255158 - DNA, 1140 bp, Unknown
  Bacterial polypeptide expressing nucleotide sequence isolated from the Sargasso Sea
aaattcagaaatttcagaagcacaaaattttaatagcattaagatttctctagctagtccagaaaaaataaaatcttggacatatggtgaaataaaaaaaccagaaacaataaattacagaacttttagacctgaaaaagatggtcttttttgtgcaagaatattcggtccaataaaagattacgaatgtttatgtggaaaatataaaagaatgaagtttagaggtataatttgtgaaaaatgtggagttgaagttacaaaatctaatgtgagaagagaaagaatgggccatataaatttagcgactccagttgcacatatttggtttttaaaatctcttccaagtagaatagctttggcagtagacatgaagcttaaagagatagaaagagttttatattttgaaaattttattgttgttgagccaggtttaacaggtttacaaaaaaaccaacttttaaatgaagaagaacttgctaagtatcaagatgaatatggtgaagaagcttttacagcaggaataggagctgaggcagtgctagaaatgttgaaaaatttagatttagaaaatgagagaaaaaatttatcaatttatattaaagagactaaatcgaaggtaaatgaggaaagagcgataaaaagattaaaattaattgaatcttttatagaaactggtcaaaaaccagaatggatgattatgacagttgttcctgttattccaccggagttaagacccttagttccattggatggaggaaggtttgctacatctgatcttaacgatctttatagaagagtgataaatagaaataatcgtttgaagagattaatggatcttaaagctccagatataattgtaagaaatgagaagcgtatgttgcaagagtctgttgatgcgttatttgataacggaagacgtggaagagtaataactgggactggtaaaagacctcttaaatcacttgcggagatgcttaagggtaagcaaggtagatttaggcaaaacttattaggaaaaagagttgattactccggtagatcggtaatagtcgttggacctgatttaaaattacatgagtgtggtttaccaaaaaagatggctttagagttatttaaaccatttttatacgcaagactaaa

SEQ ID NO: 255159 - DNA, 910 bp, Unknown
  Bacterial polypeptide expressing nucleotide sequence isolated from the Sargasso Sea
tttaaaacttctgaaatatcagaggctcaaaattttagtaaaattaaaataactttagcaagtcctgaaaaaattaaatcttggacttatggtgaaattaaaaagcctgaaacaataaactatagaacatttagacctgagaaagatggtttattttgtgcaagaatttttggaccaattaaagattatgaatgtttatgtggaaaatataagagaatgaaatttagaggaataatttgtgaaaaatgtggtgttgaagtaaccaagtcaaatgtaagaagagaaagaatgggacatataaatttagctactcctgtagctcatatatggttcttaaaatcattaccaagtagaatttctttagcaattgatatgaagctcaaagaagttgaacgtgtactatattttgaaaatttcatagttattgaaccaggtcttacaggattaaaaaaaaatcaattattaaatgaggaagagcttaacaagtatcaagatgaatatggtgaagaagcatttactgcaggaataggagcagaagctatacttgaaatattaaaatcaattaatctagaagaagaaagagacttattaaaaaaaacaattaaagaaacaaaatcaaaagttgctgaagaaaggtcaataaaaagacttaaattaattgattcatttattgaaaccggcaacaagcctgaatggatgattttaacaattgttccagtaataccacctgagttaagacctctagttccattagatggcggaagatttgctacatcagatttaaatgatttgtatagaagagtaataaatagaaacaacagactaaaacgtctgatggatcttaaagctcctgatattatcgtaagaaatgaaaaaagaatgttacaagaatctgttgatgctttattta

SEQ ID NO: 255160 - DNA, 997 bp, Unknown
  Bacterial polypeptide expressing nucleotide sequence isolated from the Sargasso Sea
aggaattgtgtgtgacagatgtggagttgaagtgactgaaaaaaaggtaagaagggatagagttggtcacatcaacttagttgttcctgtagcacacatatggtactttaaatctttacctaataaaatcggctatttactgggtttaccaaccaaaaaattggacatgattatatattatgaaagatatgttgttgttcaaccaggtgccgcgactgatgcagagggaaatccatttaataaaatggattttttaactgaagaagaatatttaaatgttctcgaaaaacttccacctgaaaatcaatttttagaagatagtgatccagaaaaatttatagcaaaaatgggagcagagtgtctaattgaactgctatcaagaattgatttagatgagctttcttatgaattaagacacaaggcaaataatgaaacatcaaaacaaagaaaaactgaatcactaaaaagattgcaagttgttgaatcttttagagaggctaatattaataaggaaaataagccagaatggatgatattaaaagctattcctgttattccgccagaactgagaccattagttccacttgatggtggaagatttgccacctctgatttaaatgacttatatagaagagtaattattagaaacaatagattaaaacgtttagttgaaattaaagctcctgaagtaattcttagaaatgaaaaaagaatgttacaagaatctgtcgattcattatttgataataccaggaagtcatctgctgtaaaaactgaagcaaatagaccattaaaatctctttctgactcacttaaaggaaaacaaggtaggttcagacaaaacctgctaggtaagagggttgactattctgcaagatcggttatcgttggtggtccaactctgaaattatatgagtgcggtcttcccaaagatatggcagctgagctgtacaaaccatttattgttaaaaagctcattgagagagggattgtaaaa

SEQ ID NO: 255161 - DNA, 841 bp, Unknown
  Bacterial polypeptide expressing nucleotide sequence isolated from the Sargasso Sea
cggattcaaattgatggtgtattacatgagttttcttcaatttcaggagttagagaagatgtcattgatattgcattgaatattaaaaaaataatatttggagctgattttaatggtagtaaaattctaacaattgaaaaaacaggccctggagttgtagttgcaggcgatatatctacaactgatgatattgaggttatgaattctgatttagtcttatgtactcttgatgaaaatatttcttttagaatggaattatatattagaaatggaaatggttatgtttctgctgaagaaaatagaaatgaggatgatccaataggcatgattcctgttgatagtatttatagtccagttacaaatgtttcatatgaggtcgataatgctagagagggagaattccttgattatgatagattatcattatcaatcgaaactgacggctctgttaaacctgaggatgcacttgcattttctgccagaattttaattgatcaacttaatccttttatcaattttgatgaaccagaagaagaaatcatagaagatagcgaagatgaattagagtttaatgcatcccttcttaagaaagttgatgaacttgagctatctgttagatctgctaactgcttaaaaaatgataacattgtatatatcggtgatttaattcttaagtctgaaaatgaaatgttaagaactccaaattttggaagaaaatctctcaatgaaataaaagaagtattaagtgaaatgagtttatctcttggaatggatataccaaattggccgcctgaaaatattgaagaattagcaagaaagcataatgcagataagttttaat

SEQ ID NO: 255162 - DNA, 961 bp, Unknown
  Bacterial polypeptide expressing nucleotide sequence isolated from the Sargasso Sea
aaatcaaacgttcgtagagaaagaatgggtcacatcaatcttgccacacctgtagctcatatttgttttttaaaatcattgcctagtagaatttctttagcaattgatatgaaacttaaagaggttgaaagagttttatattttgaaaattttatagttattgaacctggtttaacaggtttaaaaaaaaaccaattgttaggtgaggaggaattaattaaatatcaggatgattatggcgaagaagcatttacagctgggataggagcagaagcaatattagaaattctaaaatctataaatttagaagaagagagagatacacttataaaaagcataaaagagactaagtctaaagtatcagaggagagatcaataaaaagactaaaactaattgagtcattcattgaaactggaaataaaccagagtggatgatattaactactgtaccagttattccacctgaattgagacctttggtaccattagatggaggtaggttcgctacatctgatttaaatgatttatatagaagggtaataaacagaaataacagactaaaaagacttatagacttaaaagcacctgacataattgtcagaaatgagaaaagaatgctacaagagtctgttgatgcgctatttgataatggtagaagaggaagagtaataacaggaactagtaagagaccacttaaatcacttgctgaaatgctaaaagggaagcaaggaagattcagacaaaatctattaggaaaaagagtagattattcaggaagatcagtaatagttgttggtccagatttaaaattacatgaatgtggattaccaaaaaaaatggctttagagttatttaaaccattcttatatgctagattaaacaaattaggactagcatctactattaaacaagcaaaaaaattagtgaaaaggaaagaaccgaagtttgggatgcactaga

SEQ ID NO: 255163 - DNA, 999 bp, Unknown
  Bacterial polypeptide expressing nucleotide sequence isolated from the Sargasso Sea
tatgggtgctgaagcagtaagagaattagttcagcatgttgacttaaaagctgaaatggaaaaattagaaacagacttagaatctaagtcagctcaaagacgccaaagagctatccaacgtatgaaagttattaagccttttgcagacggaaaaaatcctcctgaagcaatgatactcgaagtagttcctgtaattcctcctgagcttcgccctatggttcagttagatggtggtagatttgctacttcagatcttaatgatttatacagaagattaattaacagaaacaacaggctgaaaaaacttattgagcttggagcaccagacataattatcagcaatgaaaaaagaatgttgcaagagtctgtagatgccctgtttgataacggtagaagagggcgtgctgttgcgggtgcaggtggacgtggacttaagtcactttcagatatgcttaaaggaaaacagggaaggtttcgtcagaacctacttggtaaaagagttgattactcagcaagatctgtaattgtagttggtcctcatttagaacttcaacaatgcggtcttcctaaaatgatggcgcttgagttattcaagccattcgtcatgaagaggcttgttgagcttgggcttgctcaaaatataaaatctgcgaaaagaatggttgaaagagcaagggctcaagtctgggatgtactagctgaagtaattgaagaacacccagtccttttaaacagagcacctaccttacacaggcttggtattcaggcatttgaaccaatccttgtagaaggaaaggctattcaggtccacccactggtttgtgaagcgtttaatgctgattttgatggagatcaaatggcagtccatgttccactttcagcagaagcacaagctgaagcaagagttcttatgatgtctacaaataatgttttgtccccagcttctggaaaccctattgtttcacaagccaagacatggttattgggctttattacatt

SEQ ID NO: 255164 - DNA, 946 bp, Unknown
  Bacterial polypeptide expressing nucleotide sequence isolated from the Sargasso Sea
actggctgcacctgtatctcacatttggtttatgaaatctttgccaagtagaatagccactctactagatatgacaataaaaaatttagaaaaggttttatactttgaacagtttatagttgttgaaccaggactaactgacttaaagaaaggtgagataatttcagaagaacagtatattgattatcaagatgaatatggtgaagattcttttagtgcatctattggcgcagaagcaattgaacaaatgttgctaaatatagatttagaggcagattataatcaattaaaaattgaattaactgaaactaaatctgaacttaaaaaaaccaaaattacaaaaagattaaaacttattgagtcatttatggtttcaaaaaataaaccagaatggatgattttgagagttttacctgttataccgccagaattaagaccacttgtgcctttggatggtggaagatttgcaactagcgatttaaatgatttgtatagaagagtaataaatagaaataacagattgaaaagactaatagatttaagagctccggacattataattagaaatgaaaaaagaatgcttcaggagtctgttgacgcactatttgataatggaagaagaggaagagtaataacttctacaaacaaaagaccactcaagtcattatcagacatgttaaaaggtaaacaaggtcgttttagacaaaatctactcggaaaaagagtcgattattctggcagatcagtaattgttgttggaccaaatttaaaacttcatcaatgtgggcttcctaaaaaaatggcattagaattatttaagccttttatttttcataaattagatatttatggttgggctaatactattaaagctgcaaaaaaacttgtagaaaaagaagacccaagagtatgggatattcttgaagaagttatcagagaacatcca

SEQ ID NO: 255165 - DNA, 952 bp, Unknown
  Bacterial polypeptide expressing nucleotide sequence isolated from the Sargasso Sea
caatcgattaaagagacttatagatctaagagcacccgacataattattcgtaatgaaaaaagaatgcttcaagaatctgttgacgcactatttgataatggaagaagaggaagggtaattacatccactaataaaagaccccttaaatcattatctgatatgcttaagggtaaacagggaagatttagacaaaatcttcttggtaaaagagttgattattcaggaaggtctgtaattgtagtaggaccaaaccttaaattgcaccaatgtgggattccaaagaaaatggcccttgaattgtttaaaccatttattttccataaacttgatatatatggttgggctaatacaattaaagcagcaaaaaaacttgtagaaaaagaagatcctagagtttgggatatattagaggaagtaattagagagcatcctgttcttttaaatagagcaccaacacttcatagattgggtattcaggcatttgaaccaattctcattgagggtaagtcaatccaacttcatccactagtatgtacagcatttaatgctgactttgatggtgatcaaatggcagttcacgttcctttaagtttagaggctcaacttgaggcaagagtgctgatgatgagtacaaacaacattctacacccagcaagtggcaaaccaattatcgttccttctcaagatattattttaggaatttattatttatcaataatgagagaaaaacaaattggagagggtcgaagttttgttgatttaaatgaaatattaaaagctttagaaaataatgacattacacttcattctaaaatcctagcaagaatagaaacatctgaaggaaacttgttaaaagcagaaactactcctggaagaatgatattaggaaatattttaccaaagaataaaaatataaattatgaaatgataaataaagtacttacaaaaaag

SEQ ID NO: 255166 - DNA, 896 bp, Unknown
  Bacterial polypeptide expressing nucleotide sequence isolated from the Sargasso Sea
cagagcacctactttacataggcttggaattcaagcatttgaaccaatacttgtagaaggtaaagctattcaagtccatccgttagtttgtgaagcatttaatgctgattttgacggtgaccaaatggcagttcatgttcctttatcagctgaagctcaagctgaagccagagttttgatgctagcaacaaataacgttttatcaccagcttcgggtaatcctatagtatctccaagtcaggatatggtaataggtctatattatattactgagtgtcatgacgagctagatactgctgagtatgcatttgctgacttaaacgaagcgcaactagcttatgaagcaggtcatatttctttacaaacaccaatcaaagtaagggttggaaatttagctggatcagaagacatatataaaaagataaaaaatagattttctgaactacttactccagaatatgtttctggtgacacgttaactaacacaacattaggaagaatgcattttaactctatattgcctgatgactttccatatattgaggcatcagtaagaaaaccggaaatgaaaaaaatcatatctgaggtaatagaaacatataacaaagctgagttgagacagtttttagattcaatgaaaaaagttggctttaattttggtgcaaaggctggcttgtctgtcgcaatgacagatgtcaaaacaccaccaacaaaaaatcaaatacttgaaaagtatgaaaatgaagctgaaaaagtagaaaaactttatacagatgacattattactgaaaccgaaagaaaacaaaaaattatcgaaatatggaatgaagctacagaccaggttcagtatgcaatgagtgcagaattagaatctgaaagattcaatccccgttgat

SEQ ID NO: 255167 - DNA, 832 bp, Unknown
  Bacterial polypeptide expressing nucleotide sequence isolated from the Sargasso Sea
gctgaatcaatccacgatattcttaaagacctagatcttcaagacagcctcaatcaaatacaacaagacatggaagcaactgcttcgcagatcaagatcaagcgttatcagaagagattaaaactcatagagtcgttgatttcatctggaaataggcctgaatggatgattctaaaagtgcttccgattttaccaccagacttaagacctctggttcctcttgatgggggtagatttgctacatcggatcttaatgatctctatagaagggttattaataggaacaatagactccaaagattactggatctgaatgctccagatatcatcgtcagaaatgaaaaaaggatgttgcaaaaatctgttgacgctctgcttgataacgggagaatgggaagagccgtaacagggtcaaataaacgaccacttaagtcgcttgcggatatgatcaaaggaaagcagggcagattcagacagaatttgttaggaaaaagagtagattactctggtagatcggtgattgtagttgggccaactttgaagcttcatcaatgtggtattccaaagaaaatggcattggagctattcaaaccatttgtcttcagtaaattgatttatcaaggtgaggcatccacaatcaaatctgcaaaaagacttgtagagcttgaagggcctgagatttgggatattctagatggtgttataagacaacaccctgtgctcctgaatcgtgctccaacccttcataggctcggaatacaagcttttgaacctgttttggttgaaggtaaagcgattcaattacacccgcttgttgcaaggcatcaatgcc

SEQ ID NO: 255168 - DNA, 988 bp, Unknown
  Bacterial polypeptide expressing nucleotide sequence isolated from the Sargasso Sea
cggaattccaaaaaagatggcgctcgaattatttaagccatttatttatgctaaattagaactttatggaatggctacaactattaaggctgcaaaacgtatggttgaaaaagacaggcctgaagtttgggatatacttgaagaggtgattagagaacacccagtattgttaaacagagcaccaactttgcatagacttggtgttcaagcttttgaaccaattttagttgagggtaaagcgataagattgcaccctctcgtttgtactgcatttaatgctgattttgatggtgatcaaatggctgtgcatgttccgctatctatagagtctcagctagaagctcgtgtattgatgatgtcaacaaataatattttatcgccagcaaatggaaagccaataatcgttccatctcaagacataattcttggtttatattttatgacgatggaaagagacaacgaaaaaggtcaaggcatggaatttgccgataaggctgaagttttaatggctcttaatacaaatgtcatatcattacatgctaaaattaaggctagaatgaattatccatcagaggatggtaaacataaagtaaagttggttaatacaactcctggtagagtaaaattatctgaaattttacctgataatgcatcagttaattttgacgttttaaatcaactaatgactaaaaaacaagttactaatgttattgattatatttatcgacattgtggtcaaaaagatacggtcatattcgctgataaaatgatgtctttaggattcaatcaagcatgtcaatcgggtatatcttttgggattagtgatttgacaacgccagttaaaaaagatgggatggttaaagatgctgataataaagtcaaagaatttgagcaacagtatttagatggattaataacaaagagagaaaagtacaataaagttatagatttatggacgaatgtctcagataatcttgctgctgaaatg

SEQ ID NO: 255169 - DNA, 943 bp, Unknown
  Bacterial polypeptide expressing nucleotide sequence isolated from the Sargasso Sea
atgaacgttttagcgcctgaagttgctaaagtagacgagttagataaaaacaatcttagagttgttttagagccttttgaaagaggttttggatacacaattggacatagtctaagaaggattatgctttcttacatgcctggtgcagctattacagaagtaaaaattgatggtgtgtctcatgaatatggaacaattgaaggaataaaagaagatattttagatgttctcttaaatcttaaagatttagccattaaattagatggaccagctaaagctgaattaaagttagacgttaaaacaccaaaaacgatcacagcatcagatttggaattacctgcaggagttgaagttatggatcctgatcatgtaattgctactctagttgaaccaaaaaagcttgttatgactttaaaagttgaaactggtacaggctatgtcccttcagaaaataacaagaacaagagtgttgattcattacatcttgatgcaatattttctccagtaaagagagttaattataaagttgagaatacaagagttgagaacagaacagatctagataaattaatattagatttagaaactgatggaacaattgatccaaaacaagcagttaaatatgctgcaactattatgcagcatcaattagctgtatttgttgatgaagaattagtgtcaagaaaagaaaagagaaaagataaatatgactttgatccacttcttttaagatcaattgaggagctagaacttactgtaagatctacaaattgtttaaaagcagaaaatattttcttaattggagatttaatacaaagaagcgaaatggatctattaaaaactccaaatcttggaaaaaaatcattgaatgaaattaaggatgaattggcttcaagagggctttctttaggcactattcttaaaaattggccaccaatgtaaa

SEQ ID NO: 255170 - DNA, 726 bp, Unknown
  Bacterial polypeptide expressing nucleotide sequence isolated from the Sargasso Sea
acagattgattcgtcagaacattgttaataacatcaaggcggcaaagaaattgatacagaaagctgatgatgaagtaatgcaggtattgcaggaagtcatagatggtcatcctatacttctcaaccgtgcccctactttgcaccgattgggtattcaagcttttgagcctaaattagttgctggacgagctatacagctacatccattggtatgtccagcttttaacgctgattttgatggagatcaaatggctgttcatgtgcctttagcgattgaggctcaaacagaagcaagaatgttaatgctcgcaagtaataacattctttctcccgcaactggggatccaatagttaccccatctcaagatatggttttgggttcttattacttaaccgcaattcagcctcatgcaaatcagcctaaattcggagatcatgcgcatacatacgcatcacttgaagatgttttacaagctctcgaagataaaaggatagatttacatgattgggtttgggttcgattctctggtgaaatcgaggatgacgatgagttgcagaaaccgcgaaagtcggagactttaaaagatggtacacgtattgaggaatggacatatcgacgagatcgattagatgaagagggaagtttaattagtcgctatatcttgactactgtcggtcgagtcgtaatgaaccatacaattattgatgctgtggcagccacctaat

SEQ ID NO: 255171 - DNA, 529 bp, Unknown
  Bacterial polypeptide expressing nucleotide sequence isolated from the Sargasso Sea
ttgcaataccagattgacagaatcgaccatcaaatagcagatgatcgctcccaaacaggaacttttttaatcggccctctagaaaggggacaagctacaactttgggtaattctctcagaagagtccttatgggaggacttgaagggagtgcagttactgcagtaagaatagcaggaattaatcatgaatatgctactattcccggagttagagaagacgttttagatattcttctcaattgcaagcaattgtcattaaatagttctaatccagagctcgaaataggcaggttagtagctagtggtccaatggacgttaaggcgaatgatattcaattctcctctcaagttgaaattgttgatggcgaaaaacccattgcgactattcaggagggccataacttagagctggaaatccatgttgaaagaggtgttggatataggccggtagaccgtaagagtgaagagacaaatgctattgacttgcttcaagtagatgctgtatttatgcctgtaaagagagtgaatt

SEQ ID NO: 255172 - DNA, 791 bp, Unknown
  Bacterial polypeptide expressing nucleotide sequence isolated from the Sargasso Sea
ttttgtgccagaattttttggaccaacaaaagattatgagtgcttgtgtggaaaatataaaagaatgaagtttaaaggcattacttgtgaaaaatgtggtgtcgaagttacactctctaaagttagaagagagaggatggctcatattgaattagcagctcccgttgctcacatatggtttttaaaatcactacctagtagaattgggcttgcccttgatataacgcttaagaatcttgaaaaggttttatattttgaaagccacattgttattgatcccctaatgtctggtttaagccataatcaacttcttaatgatgaagaattagatgaagctattgatcaatttggtgaggactcttttaagcatggaataggtgcagaggctgttcaagaaattttatcaaaaattaatttacaaactgaaatagaaaaacttgttgaggaaagtgaagctacctcatctgaaacaaaaaagaaaaaaattcttaaaagaatgaaagttatggagggctttaaaaactccaatataaaacctgagtggatggttttaaaagtacttccagttattccaccagagttgagaccacttgttcctttagagggagggcgtttcgcaacatctgacttaaatgacttgtatcgtagggttattaacaggaataatagattaaaaagacttttagatttaagagccccagacattattgtcaggaatgaaaaaagaatgcttcaagagtctgtcgatgctctatttgataatggaagaagaggaagagttattacaagca

SEQ ID NO: 255173 - DNA, 889 bp, Unknown
  Bacterial polypeptide expressing nucleotide sequence isolated from the Sargasso Sea
gaaccaaatttaaatgaaagtaaagctattcaattacatccactagtttgtacagcatttaatgcagattttgatggtgatcagatggctgttcatatacctctaagccttgaagcccaattagaggcaagagtattaatgatgagcactaataacattctttcaccatcaagcggaaaaccaattattgttccaagtcaagatatagttttgggtatttactatttatcattgattaatgaaaaagaagacgcaaagaagtattattcacacgtaggagaagtagaatttgcattagaaaataaaactattgagcttcatacaccaatattatttaggactaaagtttacaatttggaaacagatagttttgagcataagaaatttaaaacttccgcaggtagagttatactctttaaaacagttcctcaaaacaaaaacttaccatttgatgtaattaataaagttcttacaaaaaaagatattagtaatcttttagatagcgtttacagatttacaggacaaaaggcaacctgcatattcgttgatcaaatcatgaatgttggttttaaatacgccgcaaaagcaggtatctcatttggaaaagacgatttagttattcctgatgaaaagaatgttttaattcaagatacacaaaaattagtaaatagtcttgaaaatcaatatcaagaaggtctaattactgaaagagaaaaatataacaaagttgtaggtttgtggtctacttgtactgacaaagtagcaaaagcaatgatgaaaaccgtttcatcaaataaagatagtcaaattaattctgtatatatcatggcagactctggtgctcgtggatctgaggctcagttaaagcagttagctggtatgagaggtt

SEQ ID NO: 255174 - DNA, 856 bp, Unknown
  Bacterial polypeptide expressing nucleotide sequence isolated from the Sargasso Sea
aatgaaagatttattaaagttattcaaccaaggcgaacaagaagatttcaatgctatcaaagcaggtttggcttcacctcaacaaataagatcatggtcttttggggaagtaaaaaaaccagaaacaataaactacagaacatttaagcctgaaagagacggtcttttttgcgcaaagattttcggtcccataaaggattacgaatgcatttgtggcaaatacaaaaggatgaagcataggggagtagtttgtgaaaaatgtggagtagaagtcacattagctaaagttagaagagagagaatggggcatattgaactagctgcgcccgttgctcacatttggtttctaaaatctctgccttcgagaattgctctacttttagatatgacgttaagagaattagaaagaattctatattttgaatcttttgtagttactgatccaggaatgacagatcttgaaagctgtcagattttagacgaagaagagtattacgaagctcttgaaaattatggtgaagaattcagggcaggaatgggagctgaagcagttaagacactgctaattgagatggatttagaagaggaaattgctttgattgaacaacaaatgacagaaactaagtctgaagcaaaaataaaaaaactttctaaaagaatgaaaatcataaaatcatttagtaattcttctaataagcctgaatggatgatcctcgatgtgttgcctgtattgcccccagacttaagacctttggttcctcttgaaggaggaagatttgctacttcagatctcaacgacttatatagaagagtgataaacaggaacaataggcttaaaagactaatggaacttaat

SEQ ID NO: 255175 - DNA, 873 bp, Unknown
  Bacterial polypeptide expressing nucleotide sequence isolated from the Sargasso Sea
aatgttaaaaggtaaacaaggaagatttagacaaaatcttttaggaaaaagagtagattattctggaagatcagtaattgttgtaggtcccgagcttaaacttcaccagtgtggtcttccaaaaaaaatggctttagaattattcaaaccttttttatatgctcgtttggataaattaggatttgcgacaactataaaacaagcaaaaagaatggttgaaaaacagaaaagtgaagtatgggacgctttagagcacatcataagagaacacccggttattttaaacagagctcctacgttgcatagattaggtgttcaagcttttgaagcaaaattaattgagggtaatgctattgaactgcatcctttagtttgcgctgcttttaatgctgattttgatggtgatcaaatggcagttcatgtcccactaagtttagaagctcaaatagaagcacgtgtactaatgatgtcaacaaacaatattttaagtccatctaatggtaaaccaataatagtacccagccaagatatcgttttaggaatatattatttatctcaacataaagatgatacaaaatctaaacctgttggaattttttctgatgttgatgaaattgaaaatgctattgaaagaaaagatattagcgttcactctaaaatagtttcagtatttaatactatagacaaagatggtaataaaatttcagaaaaacacacaagtacagcagggagatttctattatcaaaaaccttaccaaaaaaccataaaataaaatttgatttagtaaataaactacttacaaaaaaagcagtttccgaaactatagacaccgtctacagatattgcggtcaaaaagaaacagtaattttttg

SEQ ID NO: 255176 - DNA, 784 bp, Unknown
  Bacterial polypeptide expressing nucleotide sequence isolated from the Sargasso Sea
aaatgaaaaaagaatgctgcaggagtcagtagatgcattatttgataatggaagaagaggaagagttataacttcaactaataaacgtccattaaaatctttatcagatatgcttaagggtaagcaaggtagatttagacaaaatcttttaggcaaaagagttgactactcaggacgatcggtaattgtagttggtccaaatttgaaattacatcaatgcggtatcccaaaaaaaatggctttggagctatttaaaccctttatttttcataaactagacatttatggttgggctaacaccataaaggctgcaaaaaaattagtagaaaaagaagatccaagagtatgggatatacttgaagaagtcattagagagcatcctgttttattaaacagagctcctactttacacagactaggtatccaggcttttgaaccagttttaattgaaggaaaatcaatacagttgcatccacttgtgtgtactgcctttaatgcagattttgatggtgatcagatggctgttcatgtgcctttaagtcttgaggctcaattagaggctagggttttaatgatgagtacaaataacatactttctccttcaagtggaaagccaattattgttccatctcaagatattgtattggggatatattacctttctgttatgagaaataatcaaaaaggtgaaggtagaaattttttagacaccaatgaaatattaaaggcagttgaattaaaagatataactcttcactcaaaaattaatgtaagaattaaacaa

SEQ ID NO: 255177 - DNA, 775 bp, Unknown
  Bacterial polypeptide expressing nucleotide sequence isolated from the Sargasso Sea
tcagcaattagagttagcaaatactattaagctagcaaaaagaatggttgatagagaagaaccagaagtttgggacatattagacgaagtgattcgagagcatcctgttatgcttaatagagctcccaccttgcacaggctaggtattcaggctttcgaacctgttctagttgaaggaaaggcaatacagttgcatcctctggtatgtaaggcctataacgctgatttcgatggcgaccaaatggctgtgcatgtacctctaactcttgaagctcaattagagtgcagagccttgatgatggcaactaataatattctatctccttcaaatggtaagccaatcattgatccttctcaagatgtagtcttagggctttattatatgtcgagagagaaagtcaatgatcttggagaaggtcgtattatgtcttcaccagacgaggtgaatagagcctactattcaaggactgtaggtcttcaagcaaagataaaagtcagattaaagccaaataaacttgatgacgaaccttctgaaatagttgagacaactactggtaggactctactttacgaattgcttcctgaaggaatgtcttttgacctagtgaataaaactttagacagcaagcaaatatcttctctgattgactttgtctacagaaaagctggtttaaaaagaacagttatttttgctgatcgattaatgtatttaggctacgaattctctactaaatcaggttcatcaattggtatcgatgatttttgtcattcctga

SEQ ID NO: 255178 - DNA, 884 bp, Unknown
  Bacterial polypeptide expressing nucleotide sequence isolated from the Sargasso Sea
aatgggccatataaatcttgctacaccagtagcgcatatatggtttttaaaatcactacctagtagaattgcgcttgctgtagatatgaagcttaaagaaatagagagagttctttactttgagaattttattgtcatagaacctggtttaactggtctacaaaaaaatcaattattaaatgaagaagaattagcaaaatatcaagatgagtttggtgaagagtcgtttactgcaggaataggtgctgaagctgttcttgagatgcttaagaatttagatttagaacaagagagaaaaaatttagttaattttattaaagaaacaaaatcgaaagttaatgaagaaagagctattaaaagactaaaacttgtagagtcatttattgaaactggtcaaaaaccagagtggatgattatgacagttgtacctgtaattccaccggaattgagaccacttgttccattagatggtggcagatttgcaacttccgatctgaacgatctttatagaagagtaatcaacagaaataatagattaaaaagattaatggatcttaaagctccagatattattgttcgaaacgaaaaaagaatgctccaagagtcagttgatgcattatttgacaacggacgaagaggaagagtaattactggtacaggaaaaagacctcttaaatcccttgctgaaatgcttaaaggtaagcaaggcagatttagacaaaacttattgggaaaacgtgtagattactccggtagatctgtaatagttgttggtccagatttaaaacttcatgaatgtggattaccaaaaaaaatggctttagaattatttaaaccatttttgtacgcaagattaaacaaactaggtttagcctcaacattaa

SEQ ID NO: 255179 - DNA, 868 bp, Unknown
  Bacterial polypeptide expressing nucleotide sequence isolated from the Sargasso Sea
aatggcaaaaaatataataaaaaacgagacaaataatttacaagaaaaaagcttcactagtataatgattactctagcgagcccagaaaaaataaaatcatggtcatttggagaaataaaaaaaccagagactatcaattatagaacctttagacctgaaaaagatggtctattctgtgcaagaatattcggtccagtcaaagattatgagtgtctgtgcggaaaatacaaaaggatgaaatttagaggaatcatatgtgaaaaatgtggagtagaaattacaaagtcaaatgttagaagagagagaatgggccatattgagttagcttgtcctgttgcccatatttggttcttaaaatcattaccaagtcgaatttctttagctatagatatgaaacttaaagaagtagaaaaggttttatattttgagagttttattgttatagagccaggtcttacaacattaaaaaaaggtcagttattaactgaagaagcattaattaaagcgcaagaagaatttggtgaagacgctttttctgctggtattggagcagaagcagtgagagaaatcttattaaacttagatctacaaaaagagcaaaaaaaattaagggattctctaaaagaaattaaatcaaaagtaacagaggagcgaactgtaaaaagattaaaattaatagaatcatttattaattctggcaataagcctgaatggatgatcttaactactgttccagtaataccacctgaattaagacctctagtacctttagacggaggtagatttgcgacttcagatcttaacgatctttatagaagagtaataaatagaaacaatagattgaaaagattattagatctaaaagcc

SEQ ID NO: 255180 - DNA, 697 bp, Unknown
  Bacterial polypeptide expressing nucleotide sequence isolated from the Sargasso Sea
tttgagtattgaaaaaaattggcgagaattacttaaacctaatgtagtaaatatggagtctggctcagatcctctaaagaaatctacattagtagttgagccactggaaagaggatatggaataactctaggcaatgcattaagaagagtgcttttatcttctcttcaaggatctgcagtttatggatttaaaattgatggtgtattgcatgagttttcttcaatttcaggagttagagaagatgtcattgatattgcattgaatattaaaaaaataatatttggagctgactttaatggtagtaaaattctcacaattgaaaaaacaggtcccggagttgtagttgctggagatatatctacaactgatgatattgaggttatgaattctgatttagtcttatgtacccttgatgaaaatatttcttttagaatggaattatatattaggaatggaaatggatatgtttctgctgaagaaaatagaaacgaagatgatccgataggcatgattcctgtcgacagtatttatagtccagtaacaaatgtttcatacgaggttgataatgctagagaaggggaatttcttgattatgataggttatcgttatcaattgaaactgacggatcagttaaacctgaagatgcgcttgcattttccgctagaattttaattgatcaacttaatccttttatt

SEQ ID NO: 255181 - DNA, 301 bp, Unknown
  Bacterial polypeptide expressing nucleotide sequence isolated from the Sargasso Sea
aatgacaaacagcaacttaagaactgaaaatcactttgattacgtcaaaatttcgatagcttctccacaaagaataatggattggggtcagaggacattgcccaatggacaggtagttggtgaagttacaaaacctgaaactatcaattacaggacacttaaaccagaaatggacggcttattttgtgaaaagatttttgggccatctaaagattgggaatgccattgtggaaagtacaaaagagtaagacatcgaggcatcgtttgtgagagatgtggggttgaagtaactgaaagtaga

SEQ ID NO: 255182 - DNA, 429 bp, Unknown
  Bacterial polypeptide expressing nucleotide sequence isolated from the Sargasso Sea
aatggaaacagaaaatgtaaatataaaaaattggaaatcactaattaaacctgcaaaactagaagttaaaatgagtgatgatcttgttaatgctaagatagtagcagaacctcttgaaaaaggttttggtttaaccttaggtaattcattaagaagaattttattatcatcaataagaggtgctgcagttacatcaattcaaatagatggggtattacatgaattcacatctataaaaggtgtgagagaagatgttacagacatagtcttaaacgtcaaatcattagcattgaagtgttcttctgagggagcaaagaaactaatacttgatgcaaaaggacctggtgaaattaaagcttctgatattacacccgtagctgatgttgaaattttaaatccagatttagtaatttgcaatcttgatgaaaa

SEQ ID NO: 255183 - DNA, 263 bp, Unknown
  Bacterial polypeptide expressing nucleotide sequence isolated from the Sargasso Sea
tatgatccataaaaattggcaagaattgattagaccctctagtgtttccattaaaccaggtggtgactcaaagagcaaagcaactattgttactgaacctcttgaaagagggtttggattaactttaggtaatgcccttagaaggatattgttatcttcattacagggtgcctcaatagtttctgtacaaatagatggtgttttgcatgaattttcttcattagccggtgtaagggaagatgtaacagacatcattcttaatt

SEQ ID NO: 255184 - DNA, 874 bp, Unknown
  Bacterial polypeptide expressing nucleotide sequence isolated from the Sargasso Sea
attgagccaggtttaacaggacttaagaagaaccagcttttgggtgaagaagaacttataaaaagtatcaagatgagtatgggtgaagaatcatttactgcaggaattggagctgaagcaattttagaaatattaaagtcgatagatttagaacaagaaaaagaattactgattaagtcaattaaggaaactaaatcaaaagtttcagaagaaagatctattaaaagattaaaattaattgagtcatttattgagactggaaataaacctgaatggatgattttaacaacaattccggttattccacctgagttaagaccattagttcctttagatggaggaagatttgctacatctgatttaaatgacctatatagaagagttataaatagaaacaatcgtttaaaaagattaatggatttaaaagctccagatataattgtaagaaatgaaaaacgaatgcttcaagagtcagttgatgcattgtttgacaatggtagaagaggaagagtaattacaggtacaggtaaaagaccactaaaatctttagcagagatgttaaaaggtaaacaaggaagatttagacaaaatttattgggtaaaagagttgattattcaggaagatcagtgattgtagttggacctgacttaaaattacatgaatgtggtctgccaaagaaaatggctttagaattattcaaaccctttttatacgctagattaaataaacttggattagcctctacaataaaacaagcaaaaaaacttgttgaaagagaaagaaatgaagtctgggatgctttagaattaattgttagagagcatccagtaatattaaatagagctccaactctccacagattaggtgttcaag

SEQ ID NO: 255185 - DNA, 758 bp, Unknown
  Bacterial polypeptide expressing nucleotide sequence isolated from the Sargasso Sea
aatgacaaacagcaacttaagaacagaaaatcactttgattacgtaaaaatttcaatagcttccccacaaagaattatggattggggacagagaacattacctaatggacaagtagtcggtgaagttacgaaaccagaaacaattaattacaggacccttaaaccagaaatggatggtttgttttgtgaaaagatttttggtccctctaaagattgggaatgccattgtggcaagtataaaagagttaggcatagaggcattgtttgtgagcgatgtggtgttgaagtaacagagagtagagttagaagacataggatgggctatataaaacttgctgcgccagtatcccatgtttggtatttaaaaggtattcctagttacgttgccattcttttggatattccgcttagagatgtagaacaaattgtttactttaattgttatgttgttttagatccaggtgatcataaagaactcaaatataagcaattacttactgaggacgaatggttggaaattgaagatgaaatctatgctgaagattcaactattgaaaatgagccttttgttggtattggtgctgaggcactaaaacaattacttgaagaccttgatttaaatcaagttgctgaggaactcagagaagaaattacaaatagcaagggtcagaaaagagcaaaacttataaaaaggataagagtcatagataattttattgcaaccaaatgcgaaaccagaatggatggttttagacgcg

SEQ ID NO: 255186 - DNA, 907 bp, Unknown
  Bacterial polypeptide expressing nucleotide sequence isolated from the Sargasso Sea
gtaaacaaaagacctttaaaatcattatccgacatgcttaagggcaagcaaggtagatttagacaaaatttattaggtaaaagagttgattattctggtcgttcagtaattgtcgtaggacctgaactaaaattacatcaatgtggtttgccaaagaagatggctttggaattattcaagccatttatatattcaaaattagagctttacggattagcaaatactattaaggccgcaaaaagaatggtagaaaaagaaaggcctgaagtttgggatattttagaagaagtcataagagaacatcctgtccttctaaacagagctccaactttacatagattaggtattcaggcatttgagccagttttgattgaaggtaaagctgttaatttacaccctcttgtttgtacagcattcaatgcagattttgatggcgaccaaatggccgttcatgtgccattatcattagaagctcaattggaagcaagagttcttatgatgtccacaaataatattctttcaccatctagtggaaaaccaataattgtgccctcacaagatattattcttggtctgtattatctttctatgttgaaaaataaggccaagggtgagaatatgatatttgcatcttctgatgaagccttaattgctcttgatcatggtaaagtagatttacaagcaaaagtaaaaattagaatctcttctgttgatgaaaatggaaacaaaaatatcaaactagttgaaacttctcctggtagagcaaaactatcaaaaattcttccaaaccactcatcaattacttttgaaattttaaataaattgatgacgaaaaaggaagttacaaatgttatagattatgtttatagacattgtggacagaaagaaactgtgatttttttgtgat

SEQ ID NO: 255187 - DNA, 898 bp, Unknown
  Bacterial polypeptide expressing nucleotide sequence isolated from the Sargasso Sea
tgtgctagatccgggagattctgaacttgaaacattggaattggttgaagaagatcaatatcgtgaattggaagaaaaccatcctgatttaaagttgggaatgggagcagaggctatacagaccctccttagaagaattgaactggaagagctcgaaaatcagctacaaatagaaatgcgtgaagttaattcggaaacgcgtcgcaaacggatagcaaaaagactcaatgtaatcagccgacttttaaagtccggtaatgctgtagattcaatgataattgataatttacctgtgcttcctcctgaacttagacctttggttcctcttgaaggtggaaggtttgcaacaagtgaccttaatgatttgtaccgtcgagttattcacagaaacaatcgtctcaagcgccttatcgaactgcgtgcaccagcaataatagtcaaaaatgaaaaacgtatgcttcaggaatctgtagacgcgctttttgataatggacgtcgtggtcgtccaatggtgggttcaaacaaaaggccactcaagtctatcagtgatatgctgaaaggcaaacagggacgtttccgacaaaacctgctgggtaaacgtgtagattactccggacgtactgtaattgtagtaggtcctgagttaaaacttcatcaatgtggtttgcctaaaaaaatggctttggagcttttcaagcctttcatttttcataaattgatcgattaccaggaaattcatacaataaaaaatgccaagaaagtactggaggaaaatcctcctgaagtctgggccatccttgaagaagttgtcagagaacatcctgttttacttaaccgtgctccaactcttcatcgcctcggaatccaggcatttgaaccaattttgatcgaaggtaaa

SEQ ID NO: 255188 - DNA, 588 bp, Unknown
  Bacterial polypeptide expressing nucleotide sequence isolated from the Sargasso Sea
tatgcaaatatcagtaatagatttattagtaccaaccgagatacaagtcgaaaatgtttcagatactgtatcgaaggtaacgctagagccgcttgagagaggttttggtcatacgctaggtaatgccttaagaagaattcttctttcatcaatgcctggtgctgctgtaacagatgttgtgatcgatggtatttctcatgagtattcaacaattgagggtgttagagaggacgtaatagatattctattgaatcttaaagatatgccagtgaaactgattgaaggaaatgaagcagaacttaaactatctgttaatgggccatgcgaagtaacatcttcttcatttgaggctcctggaaatgttgagttaacagatgccgatcaccatgttgtttcacttgtagataaaattaaattaaatatgtcagtttttgtaagaactggaagaggttatgagcctgcagatattagagatgatgaaaataatactgtaggaggtttaaaagtagatgcttcatttagtccagttaaaagagtttcttattctgtagagaatgcaagatttgagaaaagaacagacttagacaa

SEQ ID NO: 255189 - DNA, 430 bp, Unknown
  Bacterial polypeptide expressing nucleotide sequence isolated from the Sargasso Sea
aatggaagtcgaaaatgtaaatataaaaaattggaagtcattaattaagccatcaaaactagatgtgcaaataagtgatgacttaactcatgcaaaaatagttgctgaacctttagaaaaaggttttggattaactttaggtaactcacttagaagaattttactttcttcaataagaggaactgcagttacatcaattcaaatagatggtgttcttcacgaatttacctcgattaaaggtgttagagaagatgttacagatattgttttaaacgtgaaatctttagcgttaaaatccagttcagagggtacaaaaaaattagttttagacgctaaaggaccaggtgagattaaagcatctgatattatgcaagttgctgatgttgaaattttaaaccctgacttagtaatttgtaatcttgatgaaaaa

SEQ ID NO: 255190 - DNA, 758 bp, Unknown
  Bacterial polypeptide expressing nucleotide sequence isolated from the Sargasso Sea
tgttcctgttattccacctgaacttagacctctggttcctttagatggaggaagatttgcgacttctgatcttaatgatctttatcgtagagtaataaatagaaataatagattaaaaagacttttagatttaaaggctccagaaattattgtcagaaatgaaaaaagaatgttgcaggaatcggttgatgcactatttgataatggaagaagaggaagagttataactgggaccggtaaaagaccgttaaagtctttagctgaaatgttaaaaggaaaacagggaagatttagacaaaatttattaggaaagagagtggattattctggtagatcagttatcgttgttggacctgagttaaaacttcatcaatgtggtttaccaaaaaaaatggcattagaactttttaaaccatttttgtatgcaaggttggccaaattaggtttagcaacaacaattaaacaagcaaagagaatggttgaaaaacagagaagtgaagtatgggattcattagaacatattattcgagagcatccaattttacttaacagagcaccaactcttcacagattgggagtacaagcttttgaagctaaactaatagagggtaacgcaatagaattacatccgttagtttgtgctgcttttaatgcggattttgacggagatcaaatggcagttcatatacctttaagcttggaagcacaactcgaggcccgtgtattaatgatgtcaacaaataatattttaagtcctt

SEQ ID NO: 255191 - DNA, 549 bp, Unknown
  Bacterial polypeptide expressing nucleotide sequence isolated from the Sargasso Sea
aatgcagggttctgtcaccgaattccttaagccgagattagttggtatcgaaaaaatcaacccaactcgtgccaaagttactttggaaccacttgagcgcggtttcgggcataccttgggcaacgcgttacgtcgcatccttttatcgtcaatgccaggttgtgcagtgacggaagtggaaatcgacggcgtgcttcatgagtacagcgccaaagaaggcgtgcaagaagatatcatcgatatccttttgaacctgaaaggcttagccgttcgtctggaagacaaagatgaagtcactctgactttaaccaaaaaaggtgctggccctgtaactgctggtgatatccagcgtggcgatggtgtagtcatcgttaaccctgagcacgttatttgtaacctgactggcgagactgagttcagtatgcgcctgaaagttcaacgtggtcgtggttatgtgcctgcatctgctcgtgtctcctctgaagatgacgaacgtccaattggtcgtttgttacttgacgcgtctttcagccctgttgagcgtattgc

SEQ ID NO: 255192 - DNA, 910 bp, Unknown
  Bacterial polypeptide expressing nucleotide sequence isolated from the Sargasso Sea
cctattaaagattatgaatgtttatgtggaaaatataaaagaatgaagtttaggggaattatttgtgaaaaatgtggagttgaagttactaaatctaatgttcgtagagaaagaatgggtcatattaatctagctactccagtagctcatatttggtttttaaaatctttacctagtagaattgctttagccgtcgatatgaagttgaaagaaattgaacgtgtattatattttgagaactttattgtgattgaacctggtttaacaggattacaaaagaatcaacttctgaatgaggaagaattagcaaaatatcaagatgaatttggtgaagaagcattcactgctggaattggagctgaggcagttcttgaaatgttaaaaaatttagatttggaattagaaagaaaaaatctaacaaactatataaaagaaacaaaatcaaaagttaatgaagagagagctatcaaaagattaaaacttatagagtcatttattgaaacaggccaaaaacctgaatggatgataatgactgttgttccagtaattccacctgaattaaggcctttagttcctttagatggtggtagatttgctacttcagatttaaatgacttatataggagagttatcaatagaaataatcgtttaaaaagattaatggatcttaaagctcctgacataattgtaagaaatgaaaaaagaatgttacaagagtcggtcgatgctttgtttgataatggtcgaagagggagagtaataactggaactggtaaaagaccattaaaatctttagcagaaatgttgaagggtaaacaaggtagatttagacaaaatcttttaggaaagcgtgtagattattctggaagatctgagattgttgttggacctgacttaaaattgcatgagt

SEQ ID NO: 255193 - DNA, 308 bp, Unknown
  Bacterial polypeptide expressing nucleotide sequence isolated from the Sargasso Sea
catgaccaacagcaacctccgcaccgaaaaccacttcgactacgtcaagatcaccctcgcttcaccggagcgggtgatggagtggggtcagcgcaccctgcccaacggccaggttgtgggtgaggtcaccaaaccggagaccatcaactaccgcaccctcaagcccgaaatggacgggctgttctgcgagaagatttttggtccctccaaggactgggagtgccactgcggcaaatacaagcgagtgcgccaccgtggcatcgtctgcgagcgttgcggcgttgaggtcaccgagagccgcgttcgcc

SEQ ID NO: 255194 - DNA, 970 bp, Unknown
  Bacterial polypeptide expressing nucleotide sequence isolated from the Sargasso Sea
attccaccagaacttagaccacttgttcctcttgatggtggaagatttgctacaagcgaccttaatgatttatatagaagagttataaataggaataatagattaaaaagattaattgatcttagagcaccagatataattatacgaaatgagaaaagaatgcttcaagagtcagttgatgcactatttgacaatggaagaagaggaagggttataacctcaactaacaaaagaccattaaaatccctgtctgatatgctaaaaggtaaacaaggtagatttagacaaaacttactaggaaaaagagttgattactctggtagatcagtgattgtagtaggtccaaatcttaaattacaccaatgtggaattccaaaaaaaatggctttagagctattcaaacctttcatttttcacaaacttgatatttatggctgggctaacactataaaggcagctaaaaaacttgttgagaaagaagatcctagggtatgggatatacttgaagaagttattcgagaacatcctgttcttttaaatagagcaccaactcttcatagacttggtatacaagcatttgagcccacacttattgaaggaaaatcaattcaacttcatccactagtgtgtactgcatttaacgcagattttgatggtgatcaaatggcagtccatgtaccgttaagccttgagtcacaattagaggctagggttttaatgatgagcactaataacatcttatctccttcaagtggtaaacctataatagttccttcacaagatatagtcttaggaatttattatttgtcaataatgagatctaaccaaaaaggagaagctcgtaactttgttgacttaaatgaagtattaaaagctcttgaaaataatgatgttacattgcattcaaaaatcttagcaagaattagaaataatgatggtagcttttctaaaactgaaaccactccgggca

SEQ ID NO: 255195 - DNA, 578 bp, Unknown
  Bacterial polypeptide expressing nucleotide sequence isolated from the Sargasso Sea
catgctagatatttttaaatcttttctaacacctaataacattcaggtgcagatgttttcaccgacgcactctaaaattgtgttagagccactagagcgtggttttggtcacacgctgggtaacgcattacgacgaattctgctttcttcaatgcctggtgctgccatcactcaagttaaaattactgatgttttacatgaatatggttctatagatggtattcgtgaagacgttgttgatattctaatgaatctaaaaggcattgctatcaatcttcacgaccgtgaagaggttgttttgcatttgagaaaatcaggtgaaggcgttgttactgcaggtgatatcacgctagagcaggatgttgagatcattaatcccgaccacgtgattgcgcacatgacagagtctggttctcttgaaatgcagctagtggttcgtacaggcagaggttatcagcctgtgaatcgaatgcttccggatgagacttcacgtgaaattggagcactattgcttgatgcttcttacagccctgttagtcgtgtaacttattctgtagagaatgcacgtgttgagaatc

SEQ ID NO: 255196 - DNA, 878 bp, Unknown
  Bacterial polypeptide expressing nucleotide sequence isolated from the Sargasso Sea
tctggcaactgaaatcaagcaaatgcgtgaagagctgccaaccatcaactctgaaaccaagcgtaagaaaatcagcaagcgtctgaagctgatggaagcgttccatacctctggtaacaagccagagtggatgatcatgacagtgctgccagtactgccgccggatttacgtccgttggtaccactggacggcggtcgtttcgccacctcagatctgaacgatttataccgtcgcgtgattaaccgtaataaccgtctgaagcgtctgctagacctgtcagcaccggatattatcgtgcgcaacgaaaagcgtatgttgcaagaagccgtagatgccctgttagataacggtcgtcgtggccgtgctatcacgggcagcaacaagcgcccgctgaaatctttagcggacatgattaaaggtaagcagggtcgtttccgtcagaacctgttgggtaaacgtgttgactactcaggccgttcggttattaccgtaggtcctacgctgcgtttacaccagtgtggtctgccgaagaaaatggcactggaactgttcaagccgtttatctatggcaagctggaagcccgtggtttagctaccaccatcaaagccgccaagaaaatggtagagcgtgaagaaggcgcagtatgggacgtgctggatgaagttatccgtgagcatccggtattactgaaccgcgcaccaacactgcaccgtctgggtattcaggcgtttgaacctgtactgatcgaaggtaaagcgattcaattacacccgttagtgtgtgcggcctataacgccgacttcgacggtgaccagatggcggtacacgtaccgttaacgttagaagcacagttagaagcgcgtgcgctgatgatgt

SEQ ID NO: 255197 - DNA, 1012 bp, Unknown
  Bacterial polypeptide expressing nucleotide sequence isolated from the Sargasso Sea
agagttattactggtacaaacaaaagaccacttaagtcattagcagatatgataaaaggaaaaggtggaagatttagacagaaccttcttggaaaaagggttgattattctggaagatctgtaattgttgctggccctaatttgaaacttcatcaatgtgggttgcctaaaaagatggcattagaattatttaaaccatttgtttatggaaaacttgaaaatagagagcttgctacgactataaaggctgcaaaaaagttagttgaaagagagacaccagaggtttgggaagttctagaagaggttattagagaacatcctgttttacttaatagagcaccgacacttcatagattaggtttacaagcttttgaacctaaattaattgagggtaaggctatccaacttcatcctctagtatgtgttgcatttaatgcagattttgatggagaccaaatggcagttcatgttccattaacactcgaggcacaattagaggcaagagcattaatgatgtcaactaataatattttatctccagctgatggatcaccaattattaatcctactcaagatgttgtgctcggtctatattacatgactcgtgataatgctaatgcaataggcgcaggaagaacttttagtaatcctgatgaagtcttaagagcttatgaaacagagaatttagaaattcattcaccaataaaagtcagagttactcatgaaaatggagaaacttctatagaagatacaactgttggaagaatattaatttggagaatcactcctgctgaggttgggtttaaaaacattaataatgtattaaataaaaaattagtttcaaaattagtagatacttcatatagaaaagctggtctaaagaaaactgtaatttttgcagaccaactaatgtatttaggttttgatttctctacaagatcaggatcatcgattggagttaatgattttgttattcctgaggaaaaagcaaaaattattgatttcatctgaa

SEQ ID NO: 255198 - DNA, 844 bp, Unknown
  Bacterial polypeptide expressing nucleotide sequence isolated from the Sargasso Sea
agaaagaggttttggtttaacattaggcaatgctttaagaagagttatgttatcgtctctacaaggagccgctataacttcagtaaaatttaagggagttgttcatgagtttacaactattccaggtgtaaaagaggatttaacagatattttactgaatttaaaatcagtagctgttaaagtttattctccaggattaaaaaaaatgtatattaaaacttcagcctcaggagagataagagcaggtaattttgaaacagattctgagacagaaattatgaatcctgatcaactaataatgactctagatgataacgccgatgttgaaattgaagcaaatattgaaacaggcaaaggttatgtctctgctgatgtggcagttgaagaggataaaacaattggtgagatacaattagatgctatgtttagccctgttaaaaaagttacttacaaagttgataacagtagagtaggtcaagttactgattatgataaattggttatggaagttgaaacgaatggttcgattcctccagatgatgcaatagcattagcatcaagaatacttcaagatcagttacagccatttattaattttgatgaacctgagatccaacaagatacatcagcacatcaaaaactttctttcaatccaaacttattaaaaaaagtagaagagttagaattatctgtccgctcagccaattgtttgaaaaatgataatattatttatattggagatcttgttcaaaaatctgaatctgaaatgttaagaacgcctaattttggtagaaaatctttaaatgaaatcaaagaagtgcttcagcaaatggaattaaactta

SEQ ID NO: 255199 - DNA, 886 bp, Unknown
  Bacterial polypeptide expressing nucleotide sequence isolated from the Sargasso Sea
gaaggaaacgcaatagaacttcatcctttagtttgtgcggcatttaatgctgattttgatggagaccaaatggctgttcatattcctttaagtttagaagcacagttagaggctagagttttaatgatgtcgacaaataatattttaagtccatcaaatggaaaaccaattatcgtacctagccaagacatgatattaggaatttattatctttcacagccaccactccaaacaaagagaatagacggatattttgtcgataactctgaaatagaacatgctttggaatctgggcaaataaaagttcactcaagaataatttcaagatttcaaactgtggatgaaaaaggaaatactaaatatgaaaagtatacaagtactgctgggagatttttacttgcaaacctgttgccaaataataaaaatattaatttttcattgattgatagatcattacctaagaaggttgtttcagaaataattgatattgtttttagatttactggccaaaagaaaacagttattttttgtgacaaattaaaagatttaggatttaaacatgcatttaatgctggtatttcctttggaaaagacgatttaattatacccgacaataaagaattattaataaatgaaacaaaaaaattaatctctgattatgaaacacaatattcagaaggattaataacaagaggtgaaaaatacaataaggttgttgatgcgtggtctaaatgtacagataaggttgcgggtgaaatgatgaaaaaaatttctgaaacaaaagttataaatgaagaattgaaaattaattctgtatttatgatggctgatagtggagcaagaggctcagctgctcaaatgaaacaactggctggtatgagagggt

SEQ ID NO: 255200 - DNA, 604 bp, Unknown
  Bacterial polypeptide expressing nucleotide sequence isolated from the Sargasso Sea
gatggaaactactaatgttaatataaaaaattggaaatcacttatcaaacctgcaaaacttgatattcagcttagtgatgataaatcctatgcaaaaattatagctgaacctttagagaaagggtatggtcttactttaggtaactctttaagacgaatcttattatcctcgatcagaggtacagcggtaacttctatacaaatagatggtgttcttcatgaattttcatcaattaaaggtgtcagagaagatgttactgatattgttttaaatgtaaaatcacttgctttaaaaagcaatatagaaagcagcaaaaaacttatacttgatgctaagggtccaggtcaaataaaagcttcagatatatcttcaattgcagatatagaaatacttaatccagatttagttatttgtaatttagacgaaaacacaaattttcatatggaaatgactgttggaagtggaaaaggatacatccctgcagacatgaataaacccgaagaacctccgttaggtttaattccaattgattcactttttagtccagttaaaaaagtatcatactcagttagtacagctagagaaggaaaagctttggattat

SEQ ID NO: 255201 - DNA, 674 bp, Unknown
  Bacterial polypeptide expressing nucleotide sequence isolated from the Sargasso Sea
ttcagatatagcaccagttgcagatgttgagattttgaatcctgatttagttatttgtaatctagatgaaaatactacttttcatatggagatgaatgttaatacaggtaaaggatatgttcctgcagaactaaataaacctgaagagccaccattaggtcttattgctatagactcactttatagtccagttaaaaaagtttcatattcagtaagtactgctagagaaggtaaagcattagattatgataaattaataatggaagttgaaactaatgggtcaatttctgctgaagatgcagtagcttattcagctagaattttccaggatcaacttaaaatgtttataaactttgatgagccagttgaagctcctgtaaaagaagtttctacagagcctgaatttaacaaaaacttactaagaaaagtagatgagttagagttatcagttagatcaatgaactgcttaaaaaatgataatattatttatatcggtgacctagttcaaaaatctgaaggtgaaatgttgagaacacctaattttggaagaaaatcattaaatgaaataaaagaagttttaacaggtatgtctttatatttaggaatggaaattcctaattggccacctgataatattgcagaaatgtctaagaaattggaggaagcaatttaat

SEQ ID NO: 255202 - DNA, 747 bp, Unknown
  Bacterial polypeptide expressing nucleotide sequence isolated from the Sargasso Sea
tttctgtgcaagaatttttggacctataaaagattatgaatgtttgtgtggaaaatataagaggatgaaattcagagggataatttgtgaaaaatgtggagtagaagtaacaagatctaatgtaagaagagatagaatgggtcatatagagctagcaacacccgtagcacatatttggtttttgaaatcacttccaagcagaatatcagcagcaattgatatgaaacttaaagatgttgaaaaagttttatattttgaaagttttttagttatagagcctgggcttacaaaattaaagaaaaatcagcttcttacagaagaagaatatgtaaaagcccaagaagaatatggtaccgactcattcgaagcaggtataggagccgaagcaataagagaaattttattaaaactagatttaaaagaagaaaaagaaaagctaagattaatattaaaagacattaaatcaaaagtttctgaagaaagagctattaagagattaaaattaattgaatcatttatagattctggaaataaacctgaatggatgattttaacatgtatacctgttattccgcctgaacttagacctttggttccattagatggcggtagattcgcaacatccgatttaaatgatttatatagaagggtaattaatagaaacaatagattaaaaagattaatagacttaaaagctcctgatattattgttagaaacgaaaaaagaatgttgcaagaatcagttga

SEQ ID NO: 255203 - DNA, 871 bp, Unknown
  Bacterial polypeptide expressing nucleotide sequence isolated from the Sargasso Sea
gaacaaggtttcggacataccttaggaaatgctcttagaagaattatattatcttctatgcctggtacagctgtatcagaggttaagattgatggtgtgcttcatgaatatagcactatagagggtgtacaagaagatgtcatagatatcttattaaacctaaaagacctctcagtaagattaaccgaagtagaagatgctttactaactctatcaaagtccggaagtggagtggtaaccgcggccgatatagaactttctacaggtgtagaagtcatcaatccagatcatcatattgctactctaaatgaagaaggctctataaatatgacaatgaaagtaacaagaggtagaggctttgtgcctgttagacctcttgacgaagatgaaggccaagaaactggccttctaagattagatgcaacttactcacctattaaaagagtgacataccaagtagataatgccagggttgagcaaagaactaatttagataggcttacagtagatattgatacagatggaactttagaagctgaagagattttaagaatatcggcaaccattctccaacatcaattatccgcttttgctgaacttggaagattagaagaggttattgaagaaaaagaggaagcgaagatagatccaattatgttaagacctgtagacgaactagagcttacagttagatctgcaaattgcttgaaagctgagaatatacactacataggtgatttagttaccagaatggaatcagatcttttgagaaccccaaatttaggaaagaaatccttaaatgaaattaaggaagtcctcttatccaggggcctttcgttaggtttaattctcgataactggccaccagaaa

SEQ ID NO: 255204 - DNA, 661 bp, Unknown
  Bacterial polypeptide expressing nucleotide sequence isolated from the Sargasso Sea
atgcaaccatcaaatattatagataaaaattggaaagctttaataaagcctagtaaattagaaatcgttaacaatgaagataaatcaatagctaaagtgatagcagagccattagaaaaaggatttggtcaaactattggaaattcattaagaagaattttattatcttcaatacaaggcgctgcagtaacagcaattcaaattgatggtgtcttgcacgaattttcatcgattaaaggtgttagagaagatgtgactgatatagttttaaatgttaaaaatcttgctattaaatctgagactactagttcaaaaaaaattattttagatgtaaaaggcccaaaagaggttaaagctaaagatattactttagtagcaggtgtagaaattttaaatccagaacaaacgatttgtaatttggatgaaaaaactaattttcatatggagttatttgtgaactctggtaaaggatatatgcctgctccaaaaaacaaatctgatgaaagtcctttaggtttaattgctttagactctttgtttagcccagtaaaaaaagtttcttttataattgaaaatactagggctggtagtggttttgactatgataaattagtaatgacagttgaaaccaatgggacagttgcagctgaggacgctatgc

SEQ ID NO: 255205 - DNA, 655 bp, Unknown
  Bacterial polypeptide expressing nucleotide sequence isolated from the Sargasso Sea
ttgcaataccagattgaaagaatcgatcatcaaatagcagatgatcgctcccaaacaggaacttttttaattggtcctctagaaaggggacaagctacaactttgggtaattctcttagaagagtccttatgggaggacttgaagggagtgcagtgactgcagtaagaatagcaggaattaatcatgaatatgccactatccctggagttagagaagacgttttagatattcttcttaattgtaagcaactatcaatcaatagttctaacccagagctcgaaatcggcaggttagtagccagcggtccaatggaggtgaaggcgaacgatattcaattctcctctcaagttgaaattgttgatggcgaaaaaccaatcgcaactattcaggatggtcataacttagagttggaaatccatgttgaaagaggtgttggatacagacccgtggaccgaaagagtgaagagacaactgctatcgatttacttcaaatagatgctgtatttatgccagttaagagagttaattttacgattgatgaaactgctgtagcagagggcggaactgggagagaaagattaaaaatggaagtagtaactgatggctctacaagtcctgatgatgctattgctgaagctgcaaatcagttaatag

SEQ ID NO: 255206 - DNA, 836 bp, Unknown
  Bacterial polypeptide expressing nucleotide sequence isolated from the Sargasso Sea
atgtgggttgccaaaagatatggcggcagagttatacaagccatttattattagaaagctcattgaaagaggaattgtcaaaacagtgaaatctgcaaaaaaaatcattgacagaagagaaccagttgtatgggatatattagaaaatgtcttgaaagggcaccctgtattacttaatagagctcctacattacacagacttggaatacaagcgtttcagccaaaacttattgaaggtaaagctatccagcttcacccattaacatgtactgcatttaacgctgactttgatggtgatcaaatggcagttcaccttccattgggtccagaggctattttagaggcacaactgttgatgcttggttcccataatatattaaatcctgctaatggttctccaattacagttccttctcaggatatggttttaggtctttattatatgacaaaatcaagaaaatcttctgaatcacttcaacttaagggtgaaggattgactttctattctcctgaagaggttaatatggcgtataatgaaaaaattgtagatttaaatgctataattaaatgtaaggtaaagacatctaaatctgatgaatcctatgaaattatagagactactccaggaagaatattctttaatgaagtagttccagtaaaagcagggttctttaatgaagttcttactaagaaaaatcttagagaaattattggtcagattctttactcaacatccgttcctgagactgccgaattccttgataaaataaaagatcttggttatacatttgcatttaaaggtggattatcttttagcttaggtgatattattatac

SEQ ID NO: 255207 - DNA, 724 bp, Unknown
  Bacterial polypeptide expressing nucleotide sequence isolated from the Sargasso Sea
tctattaaatattaaagacatgccaataaatctaattgaaggagactcggctgaagtaacgttggatgtaaaaggtccttgtgatgtattagcttcatcctttgatgttcctggaaatgtagagcttgttaatcaagattttcatatcgctactattgttgataaggttaatctcaaaatgactttaactgttagaaatggaagaggttatgagccagctgacttgagagaagacgaagatagggtagttggagctcttaaagtagacgcatcatatagtcctgttagaagagtttcttacacagttgataacgcaagatctggaaaaagaactgacttagataaattagttctagagcttgaaactgacggcacattagatccaaagatggcaatagaacactctgcaacaattctgcaacagcagcttggtgcgtttgttgatctagatgcaatagctgaacaagaggctaaaaaagatcaaaatgactttgatccaatcttattaagatcgattgaagagcttgagctaacagtaagatctactaattgtctcaaagcagagagtatttttcttataggcgacctaattcatagatctgagtttgatttattaaaaactccaaatctaggtaagaaatctttaaatgaaattaaagatgttttagcttctaaagatttatcgcttggtatgaatgttgaaaactggcctccagtaggataa

SEQ ID NO: 255208 - DNA, 847 bp, Unknown
  Bacterial polypeptide expressing nucleotide sequence isolated from the Sargasso Sea
atggaaaaaaacttaactaaaaatattttaaacagattaccagaaaataattttagcaatattaaaattactttagctagtcctgataaaattaagtcatggtcttttggagaaatcaaaaaaccagaaacaataaattatagaacatttagacccgagaaagacggtctattttgtgcaagaatttttggtccagtgaaagattatgaatgtttatgtggcaaatataaaagaatgaagtttagaggaattatatgtgagaaatgtggagtagaaattactaaatctaatgtaagaagagaaagaatgggtcatatcgatttagcatgtccagtggctcatatatggttcttaaaatcgcttccaagtagaattgccctaactatagacatgaaactaaaagaagtcgaaaaagtactttattttgaaagtttcatagttatagaaccaggtttaacaaatttaaaaaaaggtcaacttctaactgaagaagaattaactaaagcacaagatgaatttggagaagactcttttactgcagggataggagcagaagcagtaagagaaattctaataaatttagatttactagctgaacaaaaaaaattaagaagttcgttaaatgaaattaaatctaaagttacagaagaaagaacaattaaaagattaaaattagtagagtcattcatttcatcaggcaacaaaccagagtggatgatacttaccacggttcctgtaattcctcctgagctaagaccattagtaccacttgatggaggaaggtttgctacttctgatcttaatgatctttatagacgagtaataaatagaaacaacaggttaaaaa

SEQ ID NO: 255209 - DNA, 499 bp, Unknown
  Bacterial polypeptide expressing nucleotide sequence isolated from the Sargasso Sea
tataggccggtggaccgtaagagtgaagagacaaatgctattgacttgcttcaagtagatgctgtatttatgcctgtgaagagagtgaattttacgattgatgaaaccgctgtagcagaaggcggatcaggaagagaaagattaaaaatggaagtagtaacagatggctcaacaagccctgatgatgctattgctgaagcagcaaatcagttaattgaactttttcagcccctcgctactgtcacaatggttgaggaaattcctgaggaacctgaaccatctcctgaagctcaaattcctcttgaggaactaaacttgtctgttagagcatataattgtttgaaacgggctcaagttaactcagtttcggacttaatgggcttcagttatgaagatcttcttgaaattaagaactttggctctaaatccgcagatgaggttattgaagctcttgagcgcataggcatttctatcccacaaagcagaacatctgtttaac

SEQ ID NO: 255210 - DNA, 741 bp, Unknown
  Bacterial polypeptide expressing nucleotide sequence isolated from the Sargasso Sea
gctactactattaaacaagcaaaaagattggttgaaaaagaaaaaagtgaagtatgggactcattagagcacataattagagagcatccgatacttctaaatcgtgcacctacattacatagacttggtgttcaagcttttgaagccaaacttatagagggtaacgctattgaattacatcctttagtttgtgctgcttttaatgcagattttgatggagaccagatggcagttcacattccattaagtttagaagcacaactagaagcaagggttttaatgatgtctactaacaacatattaagcccatctaatggtaaacctattatcgttcctagtcaggatattgttctaggaatttattatttatctcaatcagaagataatgataaaaagcctaaaggaattttttcaggtattgaagaaattgagcaggggcttgaaaacaaatcaattagcttacactcaaaaattacttcaatttttaaaactattgatgaaaaaggtgctgttattatagaaaaatatactagtactgctggtagatttttattagcggatgttttaccaaaaaattcaaacattaaatttagcttaataaatagactattaacaaaaaaaaatgtttctgaagttattgacacaatatttagatattgcggacaaaaagaaacagttattttttgtgataaaattaaaacacttggattcaaacatgcatttaaagcgggaatttcgttt

SEQ ID NO: 255211 - DNA, 837 bp, Unknown
  Bacterial polypeptide expressing nucleotide sequence isolated from the Sargasso Sea
gattcattgctttgataatacaagaaaatcttctgcagttaaaacagaatcaaataggccattaaaatcattatctgattcattgaaaggaaagcaagggagatttagacaaaacttattaggtaaaagggtagattattctgctaggtcagtaattgttgtaggccctgaattaaagttgtatgaatgcggacttcctaaagatatggcagcagaactatataaaccttttataattagaaaacttattgaaaggggtatcgtaaagactgtaaagtctgccaaaaaaattattgacagaagagagcctattgtatgggatatacttgaaaatgttcttaagggtcacccagttcttcttaatagagctccaactcttcatagacttggaatacaggcatttcaacctaaattaatagaaggaaaagctattcaacttcacccattaacttgtaccgcatttaatgcagatttcgatggagaccaaatggctgttcatcttcctttaggtcctgaagcaatccttgagtcacaattattaatgttaggatctcataatattcttaaccctgctaatggttctccaattactgtcccatctcaagatatggtccttgggctttactatatgactaagtcaagaaagtctgacgataagaaaaaattagttggtgagggacttacattttattcatcagaggaagttaagatggcttataatgaggagaaagttgaattaaatgctatcattaaatgtaagatttcaaattatgacaatgaattagatcagactacttttaaaattattgaaactactcccggtagaatcttctttaa

SEQ ID NO: 255212 - DNA, 739 bp, Unknown
  Bacterial polypeptide expressing nucleotide sequence isolated from the Sargasso Sea
aatggaagttgaaaacgttaatataaaaaattggaaatcattaatcaaaccatctaaattagatgttcaaattagtgaagatttaacacatgcaaaaattgtagctgagcctttagaaaaaggttatggattaactttaggaaactctttaagaaggattttattatcatcaataagaggagccgctgtaacatctattcaaattgatggtgttttacatgaattcacttcaataaaaggtgttagagaagatgttactgatatagttttaaatgtaaaatcattagcattaaaatgtaattctgaaggtgcaaaaaagcttgtattagatgctaaaggcccaggtgaaattaaggcatcagatatcacacctgtttcagacgttgaaatattaaatcctgacttagtaatctgtaatttagatgaaaatacaaattttcatatggagatgaatgtcaacacaggaaaaggttatgttcctgcagaattaaataagcctgaagaaccaccacttggtcttatagccattgattcattatatagtcctgtgaaaaaagtttcttattctataagtacagcaagagagggaaaagcattagattatgataaattaataatggaagttgaaacaaatggttctatttcagcagaagatgctgttgcttactcagcgagaatttttcaagatcagttaaaaatgttcataaattttgatgagccagttgaagctcctgtaaaa

SEQ ID NO: 255213 - DNA, 787 bp, Unknown
  Bacterial polypeptide expressing nucleotide sequence isolated from the Sargasso Sea
aaaaaattagtagaaaaagaaagacctgaggtttgggatgttttagaagaagttataaccgaacatcctgttttattaaatagggcaccaactttacatagacttggcatacaagcatttgagcctatgttaatagaaggaaaagcaatccaactacatcctttagtttgtacagcttttaatgctgattttgatggtgatcaaatggcagttcacgtacctctttctttagaagcacaacttgaagcccgagttttaattatgtctactaataatatattaagtccttcaagtggcaaaccaataattgttcctactcaagatatggttttaggaatttattatttaagtttaatgtttgaagatgatataggttcgggaatggcatttactgacattgctgaaatagaacacgctttgttggcaaaaaaaattacattacattctaaaattaaatgtagatataaatttttaaatgatgatctgaaggaagaaagttcaatagctgaaaccacagcaggaagaatgatgatttatgagattttaccaaaacatcaaaaaataggattagatttaataaataagattttaacaaaaaaagaagtaagtaatgttatagatgcaatttacagacattgtggacaaactgaaactgttaaattttgtgataaaattatggttttaggttttgaacatgcatgcactgcaggtatttcttttggaaaagatgatcttattatacctaaagaaaaagaccaattagtaagtgaggcaaaaaaagatataa

SEQ ID NO: 255214 - DNA, 467 bp, Unknown
  Bacterial polypeptide expressing nucleotide sequence isolated from the Sargasso Sea
aactgcgattgatttactccaaatagatgctgtatttatgccagtgaagagagtgaattttacgattgatgaaactgctgtagcagaaggcggaactggaagagaaagattaaaaatggaagtagtaactgatggctcaacaagtcctgacgacgctatcgctgaagctgcaaatcagttaatagaactctttcaaccacttgctactgtcacaatggttgaggaaattcctgaagagcctgaaccatctcctgaagctcaaattcctctcgaggaactaaacttgtccgttagagcatataattgtctaaaaagggcgcaagttaactcagtttcggatttaatgggcttcagctatgaagatcttcttgaaattaagaactttggctctaaatctgcagatgaggttattgaagctcttgaacgcattggcatttctattccgcaaagcagaacatctgtttaac

SEQ ID NO: 255215 - DNA, 961 bp, Unknown
  Bacterial polypeptide expressing nucleotide sequence isolated from the Sargasso Sea
aatgaaaaaagaattaacagatttatttaggggcagcgaaatttcagaggctcaaaattttaatagtattaaaatttcacttgcaagccctgagaagattaaatcctggacatttggtgaaattaaaaagccagagacaattaattatagaacatttagacctgaaaaagatggtttgttctgtgcaagaatttttggaccaattaaagattatgagtgtttatgcggtaagtataaacgaatgaaatttagaggaattatatgtgagaaatgtggagttgaggtaacaaaatcaaatgtgagaagagaaagaatgggccatattaatcttgctactccagtagcacatatttggtttttaaaatctcttccaagtagaattgctttggcggtagatatgaagctaaaggaaattgagagagttctttattttgaaaacttcatagtaatagaaccgggccttacgggtttacaaaaaaatcaacttttaaacgaggaagaactcgcgaaatatcaagatgaatttggtgaggaaagttttacagctggaatcggcgcagaagctgtccttgagatgcttaagagtttagatttagaattagaaagaaaaaacctcgtcagcttcattaaagaaactaaatcaaaagttaatgaagaaagagccattaagagattgaaattaatcgagtcatttattgaaacaggccaaaaacctgaatggatgattatgactgtagttccagttataccacctgaattaagacctttggttcctctagatggtggaagatttgctacttcagatcttaacgatttgtacagaagagtaattaacagaaataacaggttaaaaagattaatggatcttaaggctccagacattattgtaagaaatgaaaaaaggatgcttcaagagtctgtagatgctctatttgataacggtagaagaggcagagtgatt

SEQ ID NO: 255216 - DNA, 418 bp, Unknown
  Bacterial polypeptide expressing nucleotide sequence isolated from the Sargasso Sea
atgactgtcaacatgaagaactggcaggaattgaagaagcccaacgcgctggaaatcaagccaaccagcgacggtaagcgcaaggcgaccttcgttgccgagccgctggagcgcggtttcggcttgacgcttggcaacgcgctacgccgggttcttctttcctcgcttcagggcgcggcggtcacctcgatcaagatcgagaacgtcctgcatgaattctcgtcgctcgctggcgtgcgtgaagatgtcaccgacatcgtcctcaacatcaagcaggtcgccctgcggatggaaggcgatggtcccaagcggcttcagctgtcggctaccggtcctgccgtggtcaaggctggcgacatcagcgtcgtcggcgacatcgaagtgatgaacccggacctggtgatctgtcacctcgacc

SEQ ID NO: 255217 - DNA, 754 bp, Unknown
  Bacterial polypeptide expressing nucleotide sequence isolated from the Sargasso Sea
aatggaaacggctaatgtaaatttaaaaaattggaaatcattaattaaacctggaaaattagacattaatttaaatgatgataaatcatacgcaaaaattgtcgctgaaccgcttgaaaaaggttatggtttaactttaggtaactcattaagaaggatcttgttgtcttcgataagaggtactgccgtaacagcaattcaaattgatggagtacttcacgagtttacttctattaaaggggtaagagaagatgtaaccgatattgttcttaatgttaaatcattagcattaaaaagcacttctgaaggttcaaaaaaattagtgcttgatgcaaaaggcccgggcgtaattaaagcatcagatattacaaaagttaatgaaatagaaattttaaatcctgatttggtaatttgtaatttagatgaaaatacaaatttccatatggagatgacaataggaaatggaaaaggttatgtgcctgctgaactaaacaaaccagatgaaccaccattaggtcttatacctatagactcactttttagtccagttaaaaaagtttcatattctgttagtactgcaagagaaggtaaagctttagactatgacaaattaacgatggaaatagaaactaatggctctatctcagcagaagacgcattagcttattcagctaggatttttcaagatcaattaggaatgtttgttaattttgatgaacctcaagaagttactataactgaaaaaccaagtgaa

SEQ ID NO: 255218 - DNA, 817 bp, Unknown
  Bacterial polypeptide expressing nucleotide sequence isolated from the Sargasso Sea
ttcagacaaaacctattaggaaaaagagtagactattcaggtcgttcagttatcgtggttgggcccgaattaaaactacatcaatgcggtcttccaaagaaaatggcacttgaactttttaaaccttttttatacgcgagacttgctaagctcggtttagcaacaaccattaagcaagctaaacgaatggtagaaaaacaaagaagtgaggtttgggactcattagaacacattattcgtgagcatccagttatattaaacagagcaccaactttacacagattaggagtccaagcttttgaagcaaagttaattgagggtaatgctatagaattacatccattagtttgcgcagcatttaatgctgattttgatggagatcagatggccgttcatattccattgagtttagaagcacagcttgaagcaagagttttaatgatgtcaacaaacaatatattaagcccttcaaatggaaaaccaattattgtgccaagtcaggatattgtattaggaatatattatttatctcaatcaaaagaagccgaggatgaaaagccaaaaggtatttttcttaatgtagatgaaattaacaatgctttagaaagaaaactaattagtgttcattcgaaaattatttcccaattttcctcagtcgataaagatggaaataaaattatcgaaaaacatcaaagtacagccggcaggtttctattagcagaaacgttaccaaaacatcataaaattagtttttctcttgtaaataaactactcaataagaaatcggtatctgaaataatcgacactgtttacagat

SEQ ID NO: 255219 - DNA, 745 bp, Unknown
  Bacterial polypeptide expressing nucleotide sequence isolated from the Sargasso Sea
ggaagagtaattactggaacaggcaaaagaccattaaaatctctagcagaaatgcttaaaggaaaacaaggtcgatttagacaaaatttattaggaaaacgagttgattactcaggaagatcagtaattgttgtaggccctgacttgaaacttcatgaatgtggtctaccaaaaaaaatggctttagagttatttaaaccatttttatatgcgagattaaataaattaggattggcttcgacaataaagcaggctaaaaaattagttgataaggaaacaaatgcagtatgggatgcattagaattaattgtaagagaacaccctgtaatattaaatagagcacccacacttcacagacttggcgttcaagcatttgagcctaaacttatagaaggagatgctattgaattacatcctttaacatgtgcagcttttaatgctgactttgatggcgatcaaatggctgttcatatcccactaagtttagaagcgcaattagaagctaggattttaatgatgtcaacaaacaatattttaagtccatcaaatggaaaaccaattattgttcctagtcaagatatgattttaggaatttattatttgtctcaaccaccatatcagacagaaaaagtagaaggttattttgtaaataattcagaaattgaacaaggtttagagtcaggcagtataaatgtacactctagaattatatcaagattcaaaactgctgataaagaaggtaaat

SEQ ID NO: 255220 - DNA, 895 bp, Unknown
  Bacterial polypeptide expressing nucleotide sequence isolated from the Sargasso Sea
aataaaaaaacctgaaacaataaattatagaacatttagacctgaaaaagacggtcttttttgtgcaagaatatttggaccaattaaagattatgagtgtctctgcggtaaatataaaagaatgaagttcagaggcataatatgtgaaaagtgtggtgttgaagtgactaaatctaatgtgagaagagagagaatgggtcatattaatctggctacacctgtcgcacatatttggtttttaaaatccttaccaagtagaatatcacttgctatagatatgaaattaaaagaagtagaaagagtattatactttgaaaatttcattgttattgaaccaggattaacaagtctcaaaaaaaatcagcttctaggtgaagaagaattaattaaatatcaagatgaatatggtgatgaagcatttactgctggaattggtgctgaagctattttagaaatactaaaatctataaatctagaggaagagaaatcaaaacttgtaaatgcaattaaagagacgaaatcaaaagttgcagaagagagatctataaagcgacttaagttaatcgaatctttcattgagactggaaataagccagaatggatgatattgactactataccagtaatacctccagaattaagacctctagtgccattagatggtggaaggtttgctacatcagatttaaacgatctatacaggagagtaataaacaggaataatagattaaaaagattaatggatttaaaagctcctgatattattgttagaaacgaaaaaagaatgttgcaggagtcagtcgatgcactttttgataatggaagaagaggaagagtaattactggcacaggtaaaagacctcttaaatctttagcggagatgctaaaaggaaaa

SEQ ID NO: 255221 - DNA, 745 bp, Unknown
  Bacterial polypeptide expressing nucleotide sequence isolated from the Sargasso Sea
acaactagaagtaaacaggcaaatgacccgactcgtcagggcactgtaattgctgagcctcttgaacgtggtttcggtttaacaatcggtaacgcacttagacgagttcttatgagtagtcttcagggtgctgccataaccagtatacaaatagataacgttttacatgaattttcatcagtggctggggtcagagaggacgtgacagacattgttctaaacttaaaaggcgtttctcttaatatggaagttgaaggaccgaagcgacttactgtttcatcaaagggtcccggagttgtaacggcgggtgatattgaagaaactgctggtattgagattttgaataaagatcacgtgatttgtcatctagacgatggggctgacttgaacatggagctaaccgtcaacactggaaacggctatgttgctgcagaaaaaaataagcctgaagatgcaccaataggactgatcccaattgacgcaatttattctccggtcaaaaaggtgtcttatgacgttcaacctaccagagaaggccaagttttagactatgataaactgactatgaatatagaaactgatggttctgtatcgcccgatgatgcgctcgcgttcgcggctagaatactgcaggatcaactgtcgatctttgttaactttgacgaaccggaagctgcaaatcaaaatgacgaagacgatggtttggagttcaacccattactacttaagaaggtagatgaacttg

SEQ ID NO: 255222 - DNA, 877 bp, Unknown
  Bacterial polypeptide expressing nucleotide sequence isolated from the Sargasso Sea
cctcagatggttagatcttggtcttttggtgaagtgaagaaaccagaaaccattaactataggacatttaaaccagaaagagatggtctcttttgcgcaaagatttttggaccgattaaggactatgaatgtatttgcggtaaatataaaagaatgaagcataggggagtggtatgtgaaaaatgtggagtcgaagttactctcgcaaaagttagaagagaaagaatggggcacattgagttagcagctcctgtagctcatatatggttcctaaaatcgcttccttcacgaattggcctacttctagatgtaacactaagagaaattgaaagagttttatattttgaaagcttcattgtaactgatccaggaatgactgatttagaaactggagacatccttacagaagaggaatatattgaagcttatgatcaatatggagatgagttcaaagcgggaatgggtgcagaagcagtcaaattacttcttgaagagcttgatattgaagaggagataaggattcttagagaagaaatcccacaaacaaactctgaaacaaaacttaagaagatttctaaaagattaaagcttcttgaggcatttaaggcttccggtaataaaccagagtggatgataatggatgttcttcctgtgctacctccagatcttaggccgcttgtgccgctcgaaggtggaagatttgctacctctgatttaaatgatctatatagaagagtaatcaatagaaacaatagattaaaaagattattggagctcaatgcgcctgatattattgtaagaaatgaaaaaagaatgcttcaagaatcagtagatgcacttcttgataatggaagaagaggaagagttataacaggca

SEQ ID NO: 255223 - DNA, 940 bp, Unknown
  Bacterial polypeptide expressing nucleotide sequence isolated from the Sargasso Sea
cgtatgaaatttagaggaatcatttgtgaaaaatgtggcgtagaaattaccaaatctaatgtaagaagagaaagaatgggtcatattaatctcgcaacacccgttgctcatatttggtttttaaaatctttaccaagtagaattgcattagcagttgatatgaaattaaaagaaattgagagagttctatattttgaaaactttatagttatagaacctggattaacaggtttacaaaaaaaccaacttttaaatgaagaagaattagcaaaatatcaggatgaatttggtgaagaagcttttaccgcaggtataggggcagaggcagttcttgagatgcttaaaaatttagatttggatcaagaaagaaaaaacttggttaattatatcaaagagacaaaatcaaaagttaacgaggaacgagcgataaaaagattaaaactaatcgagtcatttattgaaacaggtcaaaaacctgaatggatgattatgactgtagtgccagtaattccacccgagctaagaccattggttcctctagatggaggaagatttgctacctctgatcttaacgatttatacagaagagtaataaatagaaataatcgtttgaaaagattaatggatctcaaggctcccgatatcatagttagaaatgaaaaaagaatgcttcaagagtcagttgatgcattatttgataacggtagaagaggaagagtaattactggaactggtaaaagacctttaaaatctttagcagaaatgcttaaaggtaaacaaggtagattcagacaaaacttactagggaaacgtgtagattattcaggaagatcagtaatcgttgttggacctgatttaaaacttcatgaatgtggtcttacaaaaaagatggctttagaattatttaaaccattcttatatgctagattaaataaatagg

SEQ ID NO: 255224 - DNA, 253 bp, Unknown
  Bacterial polypeptide expressing nucleotide sequence isolated from the Sargasso Sea
agttcttattgatccaattatgcttagacctgtagatgagcttgaattgaccgtgcggtctgcaaattgtctaaaagcagaaaatgcaaactatattggtgatcttgttcaaaaaactgaggttgaattacttcgtactcctaatcttggtaagaaatcacttaatgagatcaaggaggttcttgctagccatggactttcacttggaatggaattagaaaactggccaccaaaagaagcagttgtagactaa

SEQ ID NO: 255225 - DNA, 573 bp, Unknown
  Bacterial polypeptide expressing nucleotide sequence isolated from the Sargasso Sea
ttcaagcttttgagccgaaattggtaggaggtagagcaattcaacttcatcctttagtttgtcctgcattaaatgccgactttgatggagatcaaatggcagttcatgttcctttagctttagagtctcaaactgaagcacgcatgcttatgttggccagtaataatattctttctcctgctactggggaaccaattgtgactccatcacaagatatggttctaggatcttattatctgacggccttgcaaccaaattatcataaaccagaattcggagattataagactacttttgcttcattagaagatgtgatttttgcttttgaagataaaagactgagcctacacgaatgggtttgggttagatttaatggagaagttgaagatgaagacgaaatgcttaacccacaaaaaactcaagagctagaagatggctcaaaattagaaatctggaattttaggagggacagatttgattcttataataacttaataagtagatttgttcttacaactgttgggagagtagttatgaactataccatcattgattctgtatctaaaacgtaat

SEQ ID NO: 255226 - DNA, 481 bp, Unknown
  Bacterial polypeptide expressing nucleotide sequence isolated from the Sargasso Sea
ggaaggacgaagagcaaccgctattgatttacttcaaatagatgcagtatttatgccagtgaagagagttaatttttcgattgatgaaactgctgtagcagagggtggttcaggtagagaaagattgaaaatggaagtagttactgacggctcaatgtctccggatgatgctattgcggaagctgcgaaccagttaatagaactatttcaacctctcgctactgttacaatggtagaggaaatacctgaagagcctgaaccatctcctgaagctcaaattcctttggaagaactaaacttgtccgttagagcatataattgtctaaaaagggcacaagttaactcggtttctgatttgatgggtttcagctacgaagatcttcttgaaatcaagaactttggctcaaaatctgcagatgaggttattgaagctcttgaacgaatagggatctctattccacaaagcagaacttctgtttaa

SEQ ID NO: 255227 - DNA, 805 bp, Unknown
  Bacterial polypeptide expressing nucleotide sequence isolated from the Sargasso Sea
tatgggtggtgaggctataaaagaaatgcttacaagaattagtattatggatttaaaaaaagaacttgaggatattgtaaaaacttctaagtctaagcagaaaagaacagatgctcttaagagacttaaggttgcatattcatttgttccagatccaacaaaaaaacgcctcaacaagccagagtggatgattgtttctatccttcctgttattcccccagagttaaggcccttggtaccccttgaaggaggcaggttcgcagctagcgatttgaatgatttgtacaggagaataataattcgaaataacaggttaaagcagttaatggagattaaagctcctgatgtaattcttagaaatgagaagagaatgcttcaagagtctgttgatgcactatttgataatagccgtcgtaaaactgcaattagaagcggttcccgtcgacctttaaaatcactatctgatatgcttagaggaaagactgggcgttttagacaaaacttactggggaagagagttgactattctggtaggtcagttattgtggttgggccgcaactgaagctgcaggaatgtgggttgccaaaaaatatggctcttgaattatttaagccgcacatgatccgtgaactaatgagccgcggctatactcagacacctagaagtgctaagttgatgattgagaatactgaacctgttgtatacaaagtactcgaatatgttgttaaagaccaccctgtaatgcttaatcgtgctcctactttgcatagattagggatacaggccttttcacccctgtcttag

SEQ ID NO: 255228 - DNA, 490 bp, Unknown
  Bacterial polypeptide expressing nucleotide sequence isolated from the Sargasso Sea
tgaaaataatactgtaggaggcttaaaagtagatgcttcatttagtccagtaaaaagagtttcttattctgtagagaatgcaagatttgagaaaagaacagacttagataaattaatacttgagttggagacagatgggactatcgatgcaaaaatggctatagagcattctgcaactataatgcagcaacaacttgcagcctttgttgatttagaagcaattgcagaacaagaagctaaaaaagagcaaaatgactttgatccactactcctaaggtctatagaagaacttgagttaactgtaagatcaacaaattgtttaaaagcagaaagtattttcttaattggtgatttaattcaaagatctgaatttgatcttcttaaaacgcctaatcttggtaaaaagtctcttaatgagattaaagatgtcctagcttcaaaaggactttctttgggcatggttttagataactggccaccgatgggttaa

SEQ ID NO: 255229 - DNA, 891 bp, Unknown
  Bacterial polypeptide expressing nucleotide sequence isolated from the Sargasso Sea
tttatgaatgtctttgtgaaaaatataaaagaatgaaattcagaggaattatatgtgaaaaatgtggtgtagaagttactaaatcaaatgtaagaagagagagaatgggtcatataaatttagccactcctgttgcccatatttggtttttaaaatccctgcctagtcgaatatcacttgcaatagatatgaaacttaaggaagttgaaagagttctgtattttgaaaattttattgtaattgaacctggtttaactggacttaaaaaaaatcaacttctttcagaagaagaactattaaaatatcaggatgaatttggtgaagagtcattttccgctggaattggtgcggaggcgatattagaaattcttaaatcaatcgatttagcagaagaaagaaagaatttagtaaaatctattaatgagactaagtcgaaagtttcagaagaaagatcaattaaaagattaaagttaatcgagtcatttgtagagactggccaaaaaccagaatggatgattttaactgttataccagttataccacctgaacttagacctttggttccattagatggtggaaggtttgcaacatcagatttaaacgacctttatagaagagtaataaacagaaataatcgtctaaaaaggttaatggatttaaaggctccagatataatcgtgagaaatgaaaaaagaatgcttcaagaatcggttgatgcattatttgataatggaagacgtggtagagttattacaggtactggaaaaagaccactcaaatctttagctgaaatgcttaaaggtaagcaagggcgttttagacaaaatttgttaggtaaaagagtagattattcagggagatctgtaattgttgtaggaccagattcttaaa

SEQ ID NO: 255230 - DNA, 493 bp, Unknown
  Bacterial polypeptide expressing nucleotide sequence isolated from the Sargasso Sea
cttctcgcctgttagaaaggttgcctataaggttgataatacacgagtaggccaggtgacagatcacgataaattatcgattgatgtgaccactaacggagccgtaaatccagaggatgcagtagcactagctgcacggatccttcaggaccagttaaatttgtttgttaattttgaagaaccagaagacgaggtcagcgaggcggataaagaggaattaccttttaataaaaatctccttcgtaaagtggacgagctagagctttctgtgagatcagcaaactgcctaaagaatgataatattttatatatcggagatcttgtgcaaaaaagtgagtcagatatgcttcgaactccaaattttgggcgaaaatcactgaacgaaataaaggaagtcttgggtcagatgggtctaaatttaggaatggatgttcaaagctggcccccagaaaatattgagaacctagttaaacgaatggaggaccctttttaa

SEQ ID NO: 255231 - DNA, 941 bp, Unknown
  Bacterial polypeptide expressing nucleotide sequence isolated from the Sargasso Sea
acaaaaaaatcaattactcaatgaggaagaattagccaagtatcaagatgaatttggagaagaagcttttacagctggaattggagcagaagcggttctagagatgttaaaaaatttagatttagaattagaaaaaacaaatttagtaaaatacatcaatgaaaccaaatcaaaggtaaacgaggaaagagcaataaaaagattaaaacttatagagtcatttatcgaaactggtcaaaagccagaatggatgattatgactgttgttccagtaataccaccagagctaagaccattagtgcctcttgatggaggacgttttgctacttctgatttaaatgatctttatagaagagtaataaatagaaataatagacttaaaagattaatggacctaaaagcaccagatattatagttcgaaatgaaaaaaggatgcttcaagagtctgtagatgcattatttgataatggaagaagaggaagagttattacaggtacgggtaagagaccattaaaatctcttgctgaaatgttaaaaggtaaacaaggtaggtttagacaaaacttattaggtaaaagagtagattattctggaagatctgtaattgttgttggtccagacttaaaacttcatgaatgtggtttgccaaaaaaaatggccttagaattgtttaaaccttttttgtatgcaagattaaataaacttgggctagcttcgactataaagcaagcaaaaaagttggttgaaaaagaaacaaacgctgtttgggatgctcttgaattgatagttcgagaacacccagtgctattaaatagagctccaactcttcatagattaggagttcaagcttttgaaccgaagttaatagaaggggatgcaattgaattacatccttttacttgtgcagcgtttaatgcagattttgatggtgatcagatgg

SEQ ID NO: 255232 - DNA, 888 bp, Unknown
  Bacterial polypeptide expressing nucleotide sequence isolated from the Sargasso Sea
aattggaaagcgttaataaaacctaacaaattagatattacaagcaatgaagataaaactgtagctaaagtcgtagctgagcctttagaaaaaggttttggacaaacaattggtaactcattaagaagaatactgctatcctcaattcaaggggcagcagttacagcaatacaaattgacggcgtgcttcatgaattttcatctattaaaggtgtgagagaagacgtaactgatatagtgcttaatgtaaaaaatttagcaataaaatcatcttcttcgaacccaaagaaaataattttagatattaaaggccctaaagaggtaaaagctaaagatataactttagttccagaaattgaaattttaaatcctgaacaaacaatctgtaatttagatgaaaaaacacattttcatatggaactaatggtaagtacaggaaaaggttatgtccaagcaccaaaaaataagacagaagatagtcctcttggtttaatttctatagactcattattcagccctgtaaaaaaagtttccttttcagtagaaaacactagagcgggtagtgcattagactacgataaattgatcatgactgtagaaaccaatggtacagtcgatgcagaagatgcaatagcttactcagcaaggatttttcaagatcaattgtcaatgttcgttaattttgaagatcctaaagaattagtaaaagaggtaaaatcatctgaaccagaatttaatagaaatttattaaaaagagtagaagaattagagctgtctgtaagatctatgaactgtcttaaaaatgataacataatttacattggtgatttagttcaaaaaactgaaccagaaatgttaagaacacctaatttcggaagaaaatcactc

SEQ ID NO: 255233 - DNA, 850 bp, Unknown
  Bacterial polypeptide expressing nucleotide sequence isolated from the Sargasso Sea
ggaaaaattaagaagttccttaaaagaaattaagtcaaaggtaacagaggaaagaactttaaaaaggttaaaattaattgagtcgttcattgattctggaaacaagcctgaagatatgattctaacaacaataccagttataccacctgaacttagacctttagttcctcttgacggaggaagatttgcgacatcagatcttaacgatttatatagaagagtaattaacagaaataatcgtctgaagagactgatggatttaaaagctccagacataatagttagaaatgaaaaaagaatgttacaggaatctgttgacgccttatttgataacggacgaagaggtagagtaataaccggaacaggtaaaagaccacttaaatctctagctgaaatgttaaaaggaaaacaaggtagatttagacaaaatctattaggcaaaagagtagattactcaggcagatctgtaatagttgtaggtccagaattaaaattacatcaatgtggattgcctaaaaaaatggctttagaactttttaaaccttttttatatgcaagattagataaattaggtcttgcaacaacaatcaagcaagcaaaaaaaatggttgaaaaacaaaaaccagaagtttgggacgcattagaacatataattagagaacatccgattttacttaacagggcaccaactttacacagattaggtgttcaggcatttgaagcaaaacttatcgaaggaaatgcaattgagctacacccattagtatgcgcagctttcaacgctgactttgatggtgaccaaatggcagttcatataccattaagtttagaggcacaaattgaagctaga

SEQ ID NO: 255234 - DNA, 799 bp, Unknown
  Bacterial polypeptide expressing nucleotide sequence isolated from the Sargasso Sea
aacaatagattaaaaagattaatagatctaagagctcctgacataatcattagaaatgaaaaaaggatgttacaggaatcagtagatgctctttttgacaatggaagaaggggtagagtaattacatcaactaacaaaagaccattaaaatctctttcagatatgcttaaaggaaagcaagggagattcagacaaaatttactaggtaagagagttgattattctggaagatctgtaatagttgtagggccaaacttaaaacttcatcagtgcggtattcctaaaaaaatggctcttgagttatttaaaccatttatttttcataaattagatatttatggatgggctaatacaataaaggcagcaaaaaaattagtagaaaaggaagatcctagagtttgggatatattagaagaggtaataagagaacatccagttttattaaatagggcaccaacattacatagattgggtattcaagcttttgagcctgttctaatagaaggtaaatccatacaattacaccccttagtttgtacagcttttaatgctgattttgatggtgatcaaatggccgtccatgttccattaagtttagagtcacaacttgaggctagagttttaatgatgagtacaaataatattttgtcaccttcaagtggtaaaccaataattgttccttcgcaagatattgtattaggaatatattatttgtctataattagagaaaaccaaaaaggtgaaaatagatttttcttagatataaatgagatttacaaagctcttgaaaataaagatc

SEQ ID NO: 255235 - DNA, 888 bp, Unknown
  Bacterial polypeptide expressing nucleotide sequence isolated from the Sargasso Sea
aattacatcaatggtggtttaccaaaaaagatggccttggaactattcaaaccatttttatatgcaagattagataaattaggatttgcaacaaccattaaacaagcaaaaaggatggttgaaaaacaaaaaagtgaagtatgggatgctcttgaacacataataagagagcacccggttatattaaatagggcaccaacattacatagattgggtgttcaagcttttgaggcaaaattaatagagggaaatgcaattgaattacatcctttagtctgtgccgctttcaatgcagattttgatggagaccaaatggccgtacatgtaccattgagtttagaagctcaaatcgaagcacgtgtgcttatgatgtcaacaaacaacattctaagtccatcgaacggtaagccaataattgtaccgagccaagatattgtgcttgggatatattatttgtctcaacacaaagaggattcaaatgcaaaaccagttggtatcttctctgatgtagatgagattgagaacgccattgaaagaaaagatattagtgttcactctaggatagtttcgatatttaatacagtagataaagatggaaacaaaatttcagagaaatacacaagtactgctggacgtttcctattgtctaaaaccttacctaaaaatcacagaattaaatttgaactcgtaaataaattattaacgaaaaaagcagtttctgaggtaattgacactgtttacagatactgtggtcaaaaagaaactgtgattttttgtgatcgaataaaagatttaggatttaaacacgcttttaaagcagggatttcatttggaaaaaatgatttgattattccaaaaactaaggaaaaattggttagtcaaactaaa

SEQ ID NO: 255236 - DNA, 892 bp, Unknown
  Bacterial polypeptide expressing nucleotide sequence isolated from the Sargasso Sea
agtattaaaattacattagcaagtcctgaaaaaattaagtcatggacttttggtgaaataaaaaaaccagaaacaattaattacagaactttcagaccagaaaaagatggtttattttgtgctagaatttttggccctataaaggactatgagtgtctgtgtggaaagtataaaagaatgaaattcagaggtataatttgtgaaaaatgtggagtagaagtcacaaaatcaaatgtccgtagagaaagaatgggacacattaatttagcaactcctgtagctcacatttggttccttaaatctctccctagtagaatttcacttgtcgttgatatgaaattaaaagaagttgaaagagttttatattttgaaaattttatagttatagagcctggtttaacaaatttaaagaaaaaccaattacttagtgaagaggagttgatcaaatatcaagatgactatggtgaagaggcatttacagctggcattggagctgaagcaattttagaaatattaaaatctattaatttggaagaagaaagagaattattaattaaaaatattaaagaaacaaaatcaaaagttaatgaagaaagatcaattaaaagattaaaattaattgagtcgtttattgaaacaggtaataagccagaatggatgatattaactactgttcctgtaatacctcctgaattaagaccacttgttccacttgatggaggtcgattcgcaacatcagatttaaatgatttatatagaagagtaataaatagaaataataggttaaaaagattaatagatttaaaagctcctgacattatcgttagaaacgaaaaaagaatgctacaagagtctgtagacgctctttttgataatggaagaagggggtaga

SEQ ID NO: 255237 - DNA, 628 bp, Unknown
  Bacterial polypeptide expressing nucleotide sequence isolated from the Sargasso Sea
atggaagtagaaaacgttaatgttaaaaattggaaatctttaattaaaccatctaaattagatgttcaaattagtgacgacttaactcatgctaagattatagctgaacctttagaaaaaggctatggattaacccttggaaactctttaagaagaattttgctttcttcaattagaggagctgcagttacgtcaattcaaatagatggcgttctgcatgaatttacatcaattaaaggtgtaagagaggacgtaacagatattgtattaaatgttaaatcattagccttaaaatgtaattctgaaggaacaaaaaaattagttttagatgcaaaaggtccgggtgaaataaaagcttcagatattaattccgtaacagatgtagaaatattaaatccagaattagtaatatgtaacttagatgaaaatacaacttttcacatggaaatgaatgtaaacactggaaaaggttatgttccagctgagctaaacaaaccagaggagccaccattaggtttaattgcaattgactctttgtatagccctgtaaaaaaagtttcttactcagttagcactgcaagagaaggtaaagctcttgattacgacaagattaacgatggaagttgaa

SEQ ID NO: 255238 - DNA, 946 bp, Unknown
  Bacterial polypeptide expressing nucleotide sequence isolated from the Sargasso Sea
gatgaaatttaggggaataatttgtgaaaaatgtggagtggaggtaactaaatcaaatgtaagaagagagagaatgggtcatatagacttagcttgccctgtggcgcacatttggtttctaaaatctttaccaagtagaatttctttagcaatagatatgaagctaaaagaagttgagaaagtattatattttgaaagtttcattgttgtagaacctggattaaccacattaaaaaaaggccaacttatatcagaagaggctttaattaaagctcaggaagagtttggtgaagacgcttttacagcgggcattggtgcagaggcggtaagagaaattttagtaaacttagacctaaaaaaggagcaacaaaaattaagagaggcattaaaagaaattaaatctaaagtaactgaagaaagaacaataaaaagactaaagttaattgagtcattcattaattcaggaaataaacctgagtggatgattttaacatctgttccagttataccgcctgaattaagaccactagttcctcttgatggcggtagatttgctacttctgatttaaacgatttgtatagaagagttataaatagaaataacagacttaaaagactattagatttaaaagctccagatataatagttagaaatgaaaagagaatgctccaagagtccgtggatgcgttatttgataatggtagaagaggaagagtaataactggaactggtaaaagaccattaaaatccttagcagaaatgcttaaagggaaacaaggtagatttaggcaaaatttattagggaaaagagtagactactctggacgatctgtgattgttgttggtccagaattaaaattacatcaatgtggtttaccaaaaaaaatggctttagaattatttaaaccttttctgtatgcaaggttggataaattaggtttagca

SEQ ID NO: 255239 - DNA, 439 bp, Unknown
  Bacterial polypeptide expressing nucleotide sequence isolated from the Sargasso Sea
ccaaaacttgttaggcaagcgtgtcgattattcgggtcgttcggtgattgttgttgggccggaacttcggctacatcaatgtgggctgccaaagaaaatggcccttgagcttttcaagccatttatctactcgaaactagaactttactcattggcaagcactgtgaaaatggccaagcgtatggtggaaaaggaacgtccagaagtttgggacattctagaagaggtaattcgtgaacatcccgttatgttgaaccgagcgccaaccttgcaccgtttaggtattcaggcgtttgaacctgtgctcgtcgagggcaaggcaatacaacttcacccgctcgtttgcacagccttcaacgccgattttgacggtgaccagatggccgttcatgtgccgttgtcattggaggcccaattagaggcccgggttttgatgatg

SEQ ID NO: 255240 - DNA, 889 bp, Unknown
  Bacterial polypeptide expressing nucleotide sequence isolated from the Sargasso Sea
ctagaagaagaaagagaagcattaattaaaagtattaaagaaactaaatctaaagtctcagaagaaagatcaataaaaagattaaaattaatagagtcatttattgaaacaggaaacaagcctgagtggatgatattaactacagtgccagttattcctccagaattaagaccacttgttcctttagatggtggacgttttgcgacctctgatttaaacgatttgtatagaagagttattaatagaaataataggttaaaaagacttatagatcttaaggccccagatataatagttagaaatgaaaagaggatgctacaggaatcagtagatgctctctttgataacgggagaagaggcagagttatcaccggtactggaaaaagaccacttaaatctcttgcagagatgcttaaaggtaaacaaggaagatttagacaaaatttattgggtaaaagagtagactattctggaagatccgtaatagtagttggacctgatttaaagttacatgagtgcggactaccaaaaaaaatggcattagaattatttaaaccatttttgtatgctaggctaaataaattaggattagcttcaactattaaacaggcaaaaaaattagttgaaaaagagagaaatgaggtatgggatgcactcgagctgatagtaagggagcatccagtgatattaaatagagctccaacactacatagattgggtgtacaagcttttgagcctaaactaattgagggtaacgcgattgaactgcatccattaacttgtgctgcatttaatgctgactttgatggtgaccaaatggcagtgcatgtaccattaagtctagaggctcaattagaagcaggagttctaatgatgtcaacaaaataac

SEQ ID NO: 255241 - DNA, 378 bp, Unknown
  Bacterial polypeptide expressing nucleotide sequence isolated from the Sargasso Sea
aaactaatgcaacaatagaaccagaagatgccattagaaaagctgggaaaattctaagagaacaactagatgtatttacacacttagaagttaaagaagaagaaatagaggctgctgatggaccacaaatagatccagtgctattaagacctgtagatgatttagaattgactgttaggtcagcaaattgtttaaaagcagagagtatttattacataggtgacttagtccagaggagtgaaaatgagcttttaaaaacacctaatcttggcaagaaatcattaactgaaataaaagatgtgctagcaacgcatagtttatcgctgggtatcaaattagaagattggccaccaaaaaatatggaaaaaagaacatgag

SEQ ID NO: 255242 - DNA, 792 bp, Unknown
  Bacterial polypeptide expressing nucleotide sequence isolated from the Sargasso Sea
gtagaagaggcagagttataacttcaactaacaaaagacctcttaaatccttatctgatatgcttaaaggtaaacaaggaaggtttagacagaacttactaggaaaacgtgtagattactcaggcagatcagtaattgttgttggaccaacattaaaacttcatcaatgcggaattccaaaaaaaatggcattagaattattcaaacctttcatttttcataagttagatacttatggttgggcgaacacgatcaaatcagctaaaaaacttgtagaaaaagaagatccaagagtttgggatatattagaagaggttatacgtgaacatcctgtgttattaaatagagctccaaccttacatagattaggtattcaagcttttgaacctctcctaattgaaggtaaatcaattcaacttcacccacttgtttgtacagcttttaatgctgattttgacggagatcaaatggcagttcatgttcctttaagtttagaagctcaacttgaagctagagttttaatgatgagtactaataatatcctatcaccctctagtggaaagccaataatagttccatctcaagatattgttttaggaatatactatctttcaataatgagagaaaatcaaaagggtgaaaatagattttttttagatattaatgaaatcctaaaagctcttgaaaacaaagatgttactctccatactaaaattttatgtagaataaaaaactttgaagataatattttaaaagtagaaacaactccatggaagaatgattcttgctaat

SEQ ID NO: 255243 - DNA, 877 bp, Unknown
  Bacterial polypeptide expressing nucleotide sequence isolated from the Sargasso Sea
aaatttaacaaaaaactttaataataatcttttagtacctgaaaataattttaatagtataaaaattactttagcaagtccggaaaaaattaaatcatggtcatatggtgaaataaaaaagcctgaaactattaattatagaacattcagacctgaaaaagatggtttattttgttcaagaatatttggcccagtaaaagattacgagtgcttgtgcggtaaatacaaaagaatgaaatttagaggaattatttgtgagaagtgtggtgtagaagtaactaaatctaatgtaagaagagaaagaatgggtcatattgatcttgcctgcccagttgcacatatttggttcttaaaatctttacctagcagaatatctttagctattgatatgaagcttaaagaagtcgagaaagtattatattttgagagttttattgtaatcgagccaggattaacaaatttaaaaaaaggtcagctattatcagaagaggctctaactaaagcacaaaacgaatttggagaggatgcttttacagcagggattggagcagaatctgtaagagaaattttaattaatttagatttgaaaaaagaacaaaaaaaacttagagactcattagctgaaattaaatctaaagtaactgaagaaagaaccataaaaagacttaaactaatagaatcttttatatcctctggcaataaacctgaatggatgatattaacatctgttccagtaatacccccagaactgagacctcttgttcctcttgatggaggtagatttgctacttcggatcttaatgacctatatagaagagtaataaatagaaataatcgattaaaaagattattagaccttaaggctccagatataatt

SEQ ID NO: 255244 - DNA, 784 bp, Unknown
  Bacterial polypeptide expressing nucleotide sequence isolated from the Sargasso Sea
atcaaatgtaagaagagagagaatgggccacattaatcttgcaactcctgttgcacacatttggttcttaaaatcattaccaagtagaattgcacttgctgtagatatgaagttgaaagagatcgagagagttctttattttgaaaactttatagtaatagagccaggattaactggtttgcaaaaaaaccaacttttaaatgaggaagaattagcaaaatatcaagatgaatttggagaagaaacctttactgcaggtattggcgcagaagctgttcttgagatgttaaaaaatcttgacttagaattagaaagaaaaaatcttgttagctttattaaagagaccaaatctaaagttaacgaagaaagagcaatcaagagattaaaattaattgagtcatttattgaaactggtcaaaaaccagagtggatgattatgactgtagttccagttattccaccagaattaagacctttggttcccctagatggtggtagatttgctacttcagatcttaacgatctatacagaagagttattaacagaaataatagattaaaaagattaatggatcttaaagctccagacatcattgttagaaatgaaaaaagaatgcttcaagagtctgtcgatgctctttttgacaatggaagaagaggtcgtgttattactggaacaggtaaaagaccacttaaatctcttgcagaaatgcttaaaggtaagcagggtagatttagacaaaacttattaggaaaaaagggtagattactctggaagatccag

SEQ ID NO: 255245 - DNA, 835 bp, Unknown
  Bacterial polypeptide expressing nucleotide sequence isolated from the Sargasso Sea
tctgtttgataacggaagaagaggtagagtaattacaggaactggtaaacgtccattaaaatcattggccgaaatgctaaaaggtaagcaaggtaggttcagacaaaatttattaggtaaaagagtagattattcaggaagatctgtaattgtagctggtccagaattaaaattacatcaatgcggattgccaaaaaaaatggctgtagaactttttaaaccttttttatatgcaagattagataaacttggtttggctacaacaattaaacaagccaaaaaaatggttgagaaggaaaaaccagaagtttgggatgctttagaaacaataattagagagcatcctgttatattaaatagagcgccaactttacatagacttggggtacaagcattcgaagctaaattaatcgaaggaagtgctatagaacttcatcctttagtatgttctgcttttaatgctgattttgacggagaccagatggctgttcatgtgcctttaagtttagaatctcaaattgaagcaagagttcttatgatgtcaacaaataacatattaagtccgtcaaacggaaaaccaattatagtacctagtcaagacatggttcttggtatttattatttatcacaatcatctgaaataaaacaagagaaagatgaaacaaagggatattttacaaatgttacagaaattgaacaggccatagagtcaggaagcataagtttacatacaaatgtaattggcagatttgaatcaattgatgaaaaaggaaatatgattttagaaaaacacaaaagtacagcaggaagatttattttatcaagcattttacca

SEQ ID NO: 255246 - DNA, 901 bp, Unknown
  Bacterial polypeptide expressing nucleotide sequence isolated from the Sargasso Sea
atgaaaaaagaattaacagatttatttaagggaagcgaaatttcagaagctcaaaattttaatagcattaaaatttcacttgctagtccagagaaaattaaatcctggacattcggtgaaataaaaaaacctgaaacaattaattatagaacttttagacctgaaaaagatggtttgttttgtgcaaggatttttggaccaataaaagattatgagtgtttatgcggtaagtataaacgaatgaaatttagaggaattatatgtgagaaatgtggtgttgaggttactaaatcaaacgtaagaagagaaagaatgggccacataaatctcgctactccagtagcacatatttggttcttaaagtctcttccaagcagaattgctttggcggtagatatgaagttaaaggaaattgagagagttctttattttgaaaactttatagtaatagaaccgggtttaactggtttacaaaaaaaccagcttttaaatgaggaagaattagcaaaatatcaagatgaatttggtgaagagagctttacagcaggaattggagcagaagctgttctagagatgctgaaaaatttagatttagaattagaaagaaaaaatcttgttagctttattaaagaaaccaagtcaaaagttaatgaagaaagagcgatcaaaagattaaaactaatcgagtcatttattgaaactggtcaaaaacccgagtggatgattatgacagtagttccagttataccacctgaattaagacccttagttcctctagacggtggaagatttgctacttcagatcttaacgatttatacagaagagtaattaatagaaataacagattaaaaagactaatggatcttaaagctccaagatatcattgtaagaaagaaaaaa

SEQ ID NO: 255247 - DNA, 804 bp, Unknown
  Bacterial polypeptide expressing nucleotide sequence isolated from the Sargasso Sea
tatgaatgtctgtggtggaaaatataaacgaatgaagtttagaggaattatatgtgaaaaatgtggagttgaagttactaaatcaaatgtacgtagagagagaatggggcatataaatttagcaactccagttgcccatatttggtttttaaaatctttacctagtagaatttcattagcaattgatatgaaattaaaagatgttgaaagagttttatactttgaaaattttatagtaatcgaacctggattaacaaatcttaaaaaaaatcagttattgtctgaagaagagatgataaaatatcaagatgaatatggtgacgaggcatttactgctgggattggtgccgaagcaattttagaaatactcaaatcaataaatttagaggaagaaaaacaaaatttaattaaatctataaatgaaacaaaatctaaagtagctgaggaaagatccataaaaagattaaaattaattgaatcatttatagagactggaaataagccagagtggatgatattaacaacaataccagttattcctcccgaactaagaccgttggttccattagacggaggaagatttgcaacatctgatcttaatgatttatacagaagagtaataaatagaaacaatagattaaaaagattaatggatcttaaagctccagatataattgtaagaaatgaaaaaagaatgttacaggagtcagtagatgcattatttgataacggcagaagaggaagagtaataacaggaactgggaaacgacctcttaaatctttggcagaaatgttaaaaggtaa

SEQ ID NO: 255248 - DNA, 883 bp, Unknown
  Bacterial polypeptide expressing nucleotide sequence isolated from the Sargasso Sea
gaattaagacctttggttcctcttgatgggggtagatttgctacatctgacttaaacgatctatatcgaagagttattaatagaaataacagattaaaaagactaatcgatctgaaagccccagatataattgtaaggaacgagaaaagaatgcttcaagagtcagtagatgctttattcgataatggaagaagagggagagtcataacaggtactggtaaacgtccacttaaatctcttgccgaaatgttaaaaggtaaacatggaagatttagacaaaatttattaggtaaacgcgtagattattcaggaagatcagtaattgttgcaggacctgaattaaagcttcatcaatgtggtttaccaaaaaaaatggccgtggaattatttaaaccttttctatatgcaaaattagataaacttggtttagctacaactattaaacaagcaaaaagattagttgaaaaagaaaaaagcgaagtttgggatgctttggagaccataatacgagagcaccccgttatattaaatagagcaccgacattacatagacttggcgtacaagcatttgaggctaaattaattgaaggaaatgccattgaattacatcctttggtttgcgcggcatttaatgctgattttgatggagaccaaatggcagttcatattccattaagcttagaagctcaactcgaagctcgtgttttaatgatgtccacaaataatatattaagtccatcaaatggaaaacctattattgtaccgagtcaagatatggttttggggatatattatttatcacaatcttctgaaggtcaaaatgataaaaaagcaaaaggttatttttcagatgtttctgaaattgaacaagctttagaaacaa

SEQ ID NO: 255249 - DNA, 543 bp, Unknown
  Bacterial polypeptide expressing nucleotide sequence isolated from the Sargasso Sea
aatgacaaacagcaacttaagaactgaaaatcactttgattacgtcaaaatttcaattgcttctccacaaagaattatggattggggccagaggacattgcccaacggacaaatagttggtgaagttactaaacctgaaactatcaattacaggacacttaaaccagaaatggatggattgttttgtgaaaagatttttgggccatctaaagactgggaatgtcattgcggaaagtacaaaagagtaagacatcgtggcattgtttgtgaaagatgtggggttgaagtaaccgaaagtagagtcagaagacataggatgggatatataaaactcgctgcgccagtttcccatgtttggtatttgaaaggaatccctagttatgttgcaatactcttggatattccgcttagagatgtagagcaaatagtttattttaattgttatgtcgttctagacccaggtgatcataaagaacttaaatataagcaattactaactgaggatgagtggctggaaattgaagatgaaatttatgctgaaga

SEQ ID NO: 255250 - DNA, 893 bp, Unknown
  Bacterial polypeptide expressing nucleotide sequence isolated from the Sargasso Sea
taaagattatgaatgtctatgtggtaaatataaaagaatgaaatttagaggaattatatgtgaaaaatgtggagtagaagtaaccaaatcaaatgttcgaagagaaagaatggggcatattaatttagctacacctgtagctcatatttggtttttaaaatctttacctagcagaatttcactagttgtagatatgaaactaaaagaagttgagcgagttttatattttgaaaactttatcgtaatagaacctgggttaactggtttgaaaaaaaatcaattgttgggagaagaagagcttattaaataccaagatgattatggtgaagaagcctttacagcaggaattggagctgaggcaatacttgagattcttaaatcaattaatcttgaagaagaaaaagaactattaattaaaaatattaaagagactaaatctaaagtaaatgaggagagatcaatcaaaagattaaaattaatcgagtcttttatagaaactggaaataagccagagtggatgatattaacaactgtccctgttatcccaccagaattaagacctctcgtaccattagatggtggtagatttgctacatcagatttaaatgatctttatagaagagttattaataggaacaatagattaaaaagactaattgatcttaaagcccccgatatcattgtccgaaatgaaaaaagaatgttgcaagagtctgttgatgcactttttgataatggaagaagaggaagagtaataacaggaacagggaaaagaccgctaaaatctcttgcagaaatgttaaaaggtaaacaaggtagatttagacaaaacctcttaggtaaaagggtagattattctggaagatctgtaattgttgtaggcccagactaaa

SEQ ID NO: 255251 - DNA, 772 bp, Unknown
  Bacterial polypeptide expressing nucleotide sequence isolated from the Sargasso Sea
atacaaacgaatgaaattcagaggaattatttgtgaaaaatgtggtgttgaagtaacaaaatctaatgttcgaagagaaaggatgggtcatattaatttagctacacctgtagctcacatttggtttttaaaatcgttacccagcagaatagctttagctgttgatatgaagcttaaagaaattgaaagagttttatattttgaaaactttatcgtaattgaacctggtttaactggattgcaaaaaaatcaacttcttaatgaagaagaactagcaaaataccaagatgaatttggtgaagaggcatttacagctggtataggtgctgaagctgtacttgaaatgttaaaaaatctagatctagaattagaaaaaaaaaatcttgttagctttattaaagaaacaaaatcaaaagttaatgaggaaagagcaattaaaagattaaaactagtagagtcatttattgagactggtcaaaaaccagaatggatgattttaactgtagtaccagtaatccctcctgaattaagacctttagtaccgctagatggtggtagatttgctacttcagatttaaatgacctttatagaagggttattaatagaaataatagattgaaaagattaatggacctaaaagccccagatattattgttagaaatgaaaaaagaatgcttcaagaatctgtcgatgcattatttgacaatggtagaagaggtagagtaataactggaactggtaagagacctcttaaatctttagcagaaatg

SEQ ID NO: 255252 - DNA, 538 bp, Unknown
  Bacterial polypeptide expressing nucleotide sequence isolated from the Sargasso Sea
atggaaacttcgaatgtaaatatcaaaaattggaaatcattaattaaacctgcaaaacttgatattaaattaagcgatgataaatcatatgcgaaaattatagctgaacctttagaaaaaggttatggattgactttaggtaattctttaagaagaattttactttcttcaataagaggaaccgctgttacagcaattcaaatagatggtgtacttcatgaattttcatcaattaaaggtgtcagagaagatgttactgatattgttttaaatgttaaatcacttgcattaaaaagtaatagtgaaggaacgaaaaaacttattttagatgcaaaaggtcctggtgaaataaaagcttctgatattgctcaagttgcagacatagaaatacttaatcccgatcttgtaatatgtaatttagatgaaaaaactaactttcatatggaaatgaatgttggaaatggaaaaggatatgtatctgcagatatgaacaaacctgaagaaccacctttagggttaattccaattgattcacttt

SEQ ID NO: 255253 - DNA, 756 bp, Unknown
  Bacterial polypeptide expressing nucleotide sequence isolated from the Sargasso Sea
tactagtgacttaaatgatctttacagaagagttataaataggaacaatagattaaaaagactaattgatttgagagcacctgatataattattaggaatgaaaaaagaatgcttcaagagtctgttgacgcattatttgataatggaagaagaggtagagttatcacttcaactaacaagcgtccactaaaatctctatctgatatgcttaaaggtaaacaaggtagattcagacaaaatctcttaggtaaaagagtagattattctggaagatcagtaattgtcgtaggtccaaatatgaaattacatcagtgtggtattcctaaaaaaatggcattagaattatttaagccttttatttttcataaattggatgtttatggttgggccaacactattaaagcagctaaaaaacttgttgaaaaagaagacccacgagtttgggatatattggaagaagttataagagagcaccccgttctccttaacagagcacctacattgcacagattaggaatacaagcttttgagcctgtattaattgaaggtaaatcaatacagttgcacccattagtatgtactgcatttaacgctgattttgatggagatcaaatggcagttcatgttcccttaagtcttgaagctcaattagaagctagagttctaatgatgagtactaacaacatactctcaccatcaagtggaaaaccaattatagtaccctctcaagacattgttctggggaatatattatt

SEQ ID NO: 255254 - DNA, 916 bp, Unknown
  Bacterial polypeptide expressing nucleotide sequence isolated from the Sargasso Sea
ctttaaatctttagctgaaatgcttaaaggaaaacagggaagatttagacaaaatttattaggcaaaagagtagattattctggaagatcagtaattgttgtggggcctgaacttaaattacaccaatgtggattaccaaagaaaatggctttagaattatttaaaccatttttatatgcaagattagataagttaggtttagcaactactataaaacaagctaaaagacttgtagagaaagaaaaaagtgaagtgtgggatagtcttgagcaaattattagagaacatcctatactacttaatagagctccaactttacatagattaggtgttcaagcgtttgaagcaaaattaattgaaggaaatgctatagaactacatcctttggtttgcgctgcatttaatgctgattttgatggtgaccaaatggcagttcatatacccctaagtttagaggctcaattagaagcaagagttttaatgatgtctacaaacaacattttgagtccatcaaatggaaaaccaattattgttccaagccaagacatagttttaggaatatattatttatctcaagcagaggaaaatgataaaaaacctaagggtattttttcaagtgtagatgaaattgagcaagctcttgaaagtaaatcgataagtttgcattcaaaaattgtatccgtttttaaaacaattgacgataatggcgctaaaaaagttgagaaatatacaagcactgctggtcgttttttattagcagatttactaccagtaaatcaaaatattaaatttagtcttataaatagactattaactaagaagaatgtctcagaagtaattgatacaatattcagatattgtggacaaaaagaaactgttttattttgtgatagaataaaaactttaggatttaaa

SEQ ID NO: 255255 - DNA, 394 bp, Unknown
  Bacterial polypeptide expressing nucleotide sequence isolated from the Sargasso Sea
tatgagtataattaataattggcaagcactaataaaaccttcaaaattaagattgattaatgatgaagagtctcagtacaaagcaacacttgttgctgaaccacttgaaagaggttttggcctaacgcttggtaatgctttaagaagagtattgctctcttcattacaaggaacagctgttacagcaattaaaattgataacgtgctacatgaattctcatcaattgacggtgtaagagaggacgtcacagatatagtacttaatattaagtcacttgcacttaatatgcactcagagggtattcgaaaaatgaacttaaatgttaccggacctggtgagattactgctgggatgattaatacaccttcagaaattgatataattaaatcctga

SEQ ID NO: 255256 - DNA, 517 bp, Unknown
  Bacterial polypeptide expressing nucleotide sequence isolated from the Sargasso Sea
tttgggcaccttcacctctaattggccaccagcgtcccctggcggtgggagagtaaaaggggtgaaggtgcccaatttggacgatttgggcaccttcacctctaattggccaccagcgtcccctggcggtgggagagtaaaaggggtgaaggtgcccaatttggacgatttgggcaccttcacctctaattggccaccagcgtcccctggcggtgggagagtaaaagggttgcaggtgcataatttggacgctttgggcaccttcacctctaattggccaccagcgtcccctggcggtgggagagtaaaaggggtgaaggtgcccaatttggacgatttgcgcaccttcgcctctaattggccaccagcgtcccctggcggtgggagagtaaaaggggtgaaggtgccgaattgggacgatttgggcaccttcacttgtaattggccaccagcgtcccctggcggtgggagagtaaaaggggcgaaggtgcataatttggacgctttgggcaccttc

SEQ ID NO: 255257 - DNA, 274 bp, Unknown
  Bacterial polypeptide expressing nucleotide sequence isolated from the Sargasso Sea
atggaaacatctgaagtaaatgtaaaaaattggaaatctcttattaagccaccaaaacttgatgtgaacataagtgaggacaaatcttacgctaagataatagctgaacctctcgaaaaagggtacggactgactttaggtaattctctaagaagaatattattatcatcaataagaggtacagctgtaacagcaattcagattgatggggtgttacatgaatttacttcaataaaaggtgttagagaagatgtaaccagatatagttttaaac

SEQ ID NO: 255258 - DNA, 937 bp, Unknown
  Bacterial polypeptide expressing nucleotide sequence isolated from the Sargasso Sea
agaacacccagttttgctgaatagagcgccaacacttcacaggcttggtattcaagcgtttgagccaattttaatgaagggaaagtcaattcaactgcatcctttggtatgtacagcttttaatgctgattttgatggtgatcaaatggctgttcatgttcctttgagtttagaagcacagctagaagctagagttttaatgatgagtactaataatattctatcaccatcaagtggtaagcctataatagtaccttctcaagatattgttttaggtatttattatctttcaatcatgagagaaaatcaaaaaggagaaaatagattcttcctagatataaatgaaattttaaaagctcttgaaaataaagatgttatgcttcacacaaaaattaattgcagaataaaaaattttgatggagtaacgacaaaagttgaaactaccccaggtagaatgatactagctaactctcttcctaaaaatgaaaatattaatttttcgttaattaataaaacccttacaaaaaaagaagttagtaacattatagatactgtttatagattttgtggccaaaaagagacagtattgtttgctgatcatataatgcaaataggattcaagtatgcagcaattgccggtatttcttttggtaaagatgaccttataattcctgaggaaaaacaaaaattactcgaagatactcaaagtaaagttcaagaatatgaaaaccagtaccaggatggtctaataacccaaggtgaaaaatataataaagttgttgatgcatggtcggaatgtacaaataaagtagcagataaaatgttagatgttatttctaaaccagatgatgataaacctattaattctgtatttatgatggctcattctggagcaagaggatcagcagctcaattaaaacagctagctggtatgaga

SEQ ID NO: 255259 - DNA, 871 bp, Unknown
  Bacterial polypeptide expressing nucleotide sequence isolated from the Sargasso Sea
tttgttgtcatctattagaggtgcagctgttacttccatccaaatagacggagttttacatgaatttacttcaattaaaggagttagagaagatgtaactgatatagtattaaacgttaaatccttagctttaaaatgtaattcagaaggtactaaaaaattagttttagatgccaaagggcctggtgaaattaaagcttctgatatagctccagtagctgatgttgaaatcctaaatcctgatttagtcatatgtaatcttgatgaaaataccaatttccatatggaaatgaatgtcaatactggaaaaggatacgttcctgcagatttaaataaaccagaggaaccaccgttgggacttattgctatagactcattatatagcccagttaaaaaagtttcatactcaattagcactgcaagagaaggtaaagcattagactatgacaaattaactatggaagttgaaactaatggagcaatttcagcagaggatgcggtagcttattctgcaagaatttttcaagatcaattgaaaatgtttgttaattttgatgagcctgtagaagcaccggttaaagaagtttcgacagaacctgagtttaataaaaatttactgagaaaagttgatgaacttgaactatcagttagatctatgaattgtcttaaaaatgataatattatttatattggtgatttagttcagaaatctgaaggtgaaatgttaagaacaccaaattttggaagaaaatctttaaatgaaataaaagaagttttaactggtatgtctctttacctaggtatggaaataccaaattggccaccagataacatagctgaaatgtctaaaaaattagaggaagctatctaa

SEQ ID NO: 255260 - DNA, 591 bp, Unknown
  Bacterial polypeptide expressing nucleotide sequence isolated from the Sargasso Sea
actgcctaagcaaatggccctagagcttttcgagcccttcattgtgaagcgccttaaagagcttaaccatgtctatacgattcgctcagcgaagaagatgattcaaagacaagaccctgttgtttgggatgtccttgaagatatcatccgtaagcaccctgtacttcttaaccgtgcgccaacgctgcaccgtttgggtatccaggcatttgagcctactttgattgaaggtaaagcgatccgcgtacacccacttgtctgtcaggccttcaacgccgactttgacggtgaccagatggcggttcacgtgcctctttctgtagaagcacagattgaagcaaaagtccttatgatggctccagataacatcttcttgccatcctctggaaaacctgttgctatgcctgaccaggatatgactctaggtctctactacttgatgcacgatcctgtatacgatcctgagaaggaaggtaaaaaggttaaagcatttgctaaccgtgaagaagtattacttgctctaagccctgctggagatatctacaaccgtaaagatctaaactgggctggttgtgagcgtcatgataacac

SEQ ID NO: 255261 - DNA, 310 bp, Unknown
  Bacterial polypeptide expressing nucleotide sequence isolated from the Sargasso Sea
atgacagataattatgacattattaaagactttttaactccaactgaaatagttgtcgaagaatctggtcctaacagatctaagatagttcttgagcctctagagcaaggatttgggcatacattaggaaatgcactcagaagaattatattatcttcaatgccagggacagcagtatctgaggtaaaaattgatggcgtgcttcatgaatatagtactattgaaggagtacaagaagatgttattgatatccttttgaatttaaaagatttatcagtaaggctaacggaagtgaagacgccgagttaat

SEQ ID NO: 255262 - DNA, 781 bp, Unknown
  Bacterial polypeptide expressing nucleotide sequence isolated from the Sargasso Sea
tttagaaattttaaaatctattgatttagaacaggaaaaagaagtcttaattaaatcaattaaagagaccaaatcaaaagtttcagaagaaagatcaattaaaagattaaaattaatagagtcttttattgagactggaaataaaccagagtggatgattttaactacgataccagtaatcccacccgagctaagaccattggttccattagatggtggtagattcgctacatcagatctgaatgacttatatagaagagttattaatagaaataatcgtttaaaaagattaatggatttaaaggctcctgacataattgttagaaatgaaaaacgaatgcttcaagagtctgtagatgcattatttgacaatggtagaagaggaagagtaattacgggaacaggtaaaagacctctaaaatctttagcagagatgctgaaaggtaaacaaggaagatttagacaaaatttacttggcaaaagagtagattattctggaaggtctgtgattgttgttggaccagatttaaaattacatgagtgtggattaccaaaaaaaatggctttagaattatttaaaccatttttatatgctagattaaataaacttggacttgcttcaacaataaaacaagcgaaaaaacttgttgaaagagagagaaatgaagtttgggatgcattggaattaattgttagagaacatccagttatattaaatagagctccaacactacatagactaggtgtccaagcttttgaaccaaaattaattgaaggtaat

SEQ ID NO: 255263 - DNA, 933 bp, Unknown
  Bacterial polypeptide expressing nucleotide sequence isolated from the Sargasso Sea
aaaagccggaaacaattaattataggacctttaaaccagaaagagacggtctgttctgtgctcgtatttttggcccgactaaggactacgaatgtttgtgcggtaagtataaaagaatgaagtacagaggcgtagtgtgtgaaaaatgtggagttgaagttacacttcagaaagttagacgggagcgaatggggcatattgagctagcttccccagtagcgcatatatggttcctgaaatccttaccctctcgaattggtctgatgcttgatatgaccctcagagatttagagagagttctttactttgaaaattatgttgtaattgagccaggtttgaccgacctaacatatggtcaaatgatgagtgaagaagagttcatggatgctcaagatacctacggaatggatgcatttactgcaaacattggagcagaagctattcgcgaaatgcttgctgcaattgatttggaggcggaagcagagcaactcagagttgatttaaaggaagcaactggcgagcttaaaccaaagaaaataattaaacgtttgaaggttgtcgagagctttcttgaatcaggaaatagacctgagtggatgattttgactgttgtacctgttataccacctgaacttagacctcttgtcccattagatggcggccgtttcgcaacttctgatttaaatgacctttatcgtcgagtgattaatcgtaataatcgcttgaaaagattaattgaattgagagcaccagatattattgttcgaaacgaaaaaagaatgctccaggagtcggtcgatgccttatttgataatggacggcgcggtcgcgttattactggagctaataaacgaccattaaagtctttatccgatatgttaaagggtaaacaaggacgttttagtcaaaaccttcttgggaaaaggagttgat

SEQ ID NO: 255264 - DNA, 529 bp, Unknown
  Bacterial polypeptide expressing nucleotide sequence isolated from the Sargasso Sea
aatggaaaatatagacgtaaatattaagaattggaaatcattaattaaacctccaaaattggatataaaactaagtgatgataaatcttttgcgaaaattattgctgagcccttggaaaaagggtatggcctaacacttggaaattcattaagaagaattttattatcttcaattagaggagctgcagtaacatcaattcagattgatggggttttacatgaatttacttcaattaaaggagtaagagaagatgtaacagatatagttttaaatataaaatcattggctttaaaaaacttagcagaaggaaaaaaaaaattaattttagatgcaaaaggaccaggagagataaaagcttcagacataaccaatattccagacatagaaatattgaatccagatttagttatttgtaatctagatgaaaatactcattttcatatggaaatgaatgttgggactggaaaaggttatgtttcagcgaatatgaacaaacctgaagagccaccactaggattattccaatag

SEQ ID NO: 255265 - DNA, 822 bp, Unknown
  Bacterial polypeptide expressing nucleotide sequence isolated from the Sargasso Sea
tatggaaaatgcaaaaattcctgagccagaaatccaaattagaaaaaaagaagttgaaaaagaaataaagcaaaaaaaagttaagtctgatgctgaaatcaaagttatcgaagaagcattttctaccttaaaaacacttaagccaaaaacgctcatagaaaatgatgttttgtggcgtgaaatgattgacaagtatgatgagtattttactggtggcatgggagctgaagcagtaagagagttggtgcagcttgttgacttaaaatctgaaatggaaaaattagaaacagatttagactctaagtcagctcaaagacgccaaagggctattcaacgtatgaaagttataaagccatttgcagatggaaaaaatcctcctgaagcaatgatccttgaagtagttcctgttattcctcctgaacttcgtcctatggttcaattagatggaggtagatttgctacttcagatcttaatgacttatataggagattaattaatagaaacaacagattgaaaaaactaattgaattaggagctcctgacatcattatcagcaatgaaaaaagaatgttgcaagaatctgtagatgctttatttgataacggtagaagaggtcgtgctgttgctggtgctggtggacgtggtctcaaatcactttcagatatgcttaaaggaaaacagggtagatttcgccaaaacctacttggtaaaagagttgattactcagcaaggtctgtgattgtagtcggtcctcatttagaactacagcaatgtggactccctaaaatgatggcactagagttatttaaaccatttgtcat

SEQ ID NO: 255266 - DNA, 787 bp, Unknown
  Bacterial polypeptide expressing nucleotide sequence isolated from the Sargasso Sea
attaatcgagtcatttatagaaaccggcaataagcctgagtggatgatactaactgtaatacctgtcatacctcctgaattaaggccattagttccattagatggtggtaggttcgcaacatcagatcttaatgatttatatagaagagttattaatagaaataatcgtttaaaaagattaatagatttaaaagccccagatattattgtcagaaacgaaaaaagaatgctacaggagtcagttgatgctttatttgataacggaagaagaggtagagtaataactggaactggtaaaaggcctctaaaatcattagcagaaatgctaaaaggtaaacagggtagattcagacaaaatttattagggaaaagagtagattactctggtagatctgtaattgttgttggtccagatttaaaattgcatgaatgtggtttaccaaaaaaaatggcgttagagctatttaaaccgtttctttatgcaagattaaataaacttggattagcatcaacaattaaacaggcaaaaaaattagttgagaaggaaagagatgaagtttgggacgcgttagaaattattgtaagagaacatccagttattttaaatagagccccaacgttacacagattgggtgttcaagcttttgaaccaaaacttatagaaggaaatgctatagagttacatccattgacatgtgcagcgtttaacgctgactttgatggagaccaaatggcagtacatgtaccattaagcttagaagctcaattagaagctagagtattaatg

SEQ ID NO: 255267 - DNA, 733 bp, Unknown
  Bacterial polypeptide expressing nucleotide sequence isolated from the Sargasso Sea
taattctgaaggtacaaaaaaattaatacttgatgctaaaggaccaggggaaattaaggcttctgatatatcacctgttactgatgtagaaattttaaaccctgatctagtaatatgtaatctagatgaaaatactaattttcacatggaaatgaatgttaatactggaaagggatatgttcctgctgaacttaataaaccagaggaaccaccattaggactaatcgcgattgactcactatatagccctgttaaaaaagtttcatattctgttagtacagcaagggaaggaaaagctttggactacgataaattgacaatggaagttgaaacgaatggttcaatttctgctgaggatgcagttgcttattcagcaagaatttttcaggaccaacttaaaatgtttataaattttgatgaacccgttgaagctcctgttaaagaagtttctaccgaaccagaatttaacaaaaatttgttaagaaaagtagacgaactagaattatcagtaagatcaatgaattgtttaaaaaatgataatataatctatatcggtgatctagttcaaaaatcagagggagaaatgttaagaactcctaattttggaagaaaatctctgaatgaaattaaagaagttttaactggaatgtcgctatatttgggcatggaaattccaaattggcccccagacaatatagcagaaatgtctaaaaagttagaggaagctatttaa

SEQ ID NO: 255268 - DNA, 904 bp, Unknown
  Bacterial polypeptide expressing nucleotide sequence isolated from the Sargasso Sea
tttatatacaataaattgggagtcctatggttttgcctcaacactaaaatctgcaagaaaaatggtagagtctgagagaccagaagtttgggatatcttagatgaagtaattagagagcatccaattcttttaaatcgtgcaccaacactccacagattaggtattcaagcatttgaaccaattttaattgaaggtaaagctatccaacttcatcctttagtttgtactgcgttcaatgcagactttgatggtgaccaaatggcagttcacatacctttgagtcttgaagcacaattagaagcgagagttttaatgatgagtacgaataatattctctctccttcaagtggaaagcctattatcgtaccaagtcaagatattgtgttgggtatatattatttatcattgataaatgaaaaagaagatccaaagaaatattattcacatgtcggtgaggtagagtttgctttagaaaacaaaactattgaacttcacacacccattctttatagaactaaagtttacaactcagaaaaagatagctttgaatataaaaaatatactacctctgcaggtagagttatcctttttaaaacagtccctgagagcaaaaacttatcttttgatgtagttaataagactctcacaaaaaaagatataagtaacttattagataatgtttacagatttacaggtcaaaaggcgacttgcatatttgttgatcaaattatgacagttggttttaagtatgctgcaaaagcaggtatctcctttggtaaagatgatttagtcatacctgatgaaaagaatattttaatccaagatactcaaaaattagtgaatagccttgaaaaccaatatcaagaaggacttataactgaaagagaaaaatataataaagtt

SEQ ID NO: 255269 - DNA, 796 bp, Unknown
  Bacterial polypeptide expressing nucleotide sequence isolated from the Sargasso Sea
tgtaaatgttcaaaatgatagtaataaaaagggcacgttaatagcagagcctttagaaagaggttttggattaactttaggtaatgcaattagaagagttttactttcatcattacaaggagcagctataacatctgtaaaaattaaaggtgttgttcatgagttttcaactataccaggtgttaaagaggatttgactgatatattattaaatataaaatctgttgcagtaaaagtacattctcctggtttaaaaaaaatgtatgttaaatcatctggttctggtgaaataagagctggaaattttgaaacagactcggaaactgaaattatgaatcctgatcaattaataatgacacttgactccaatgccgatgttgaaattgaagctaatatagaaactgggaaaggttatgtttcagcagaagtagctgaagatgaagataaagtaattggagaaattaaattagatgctatgttcagtcctgtaattagagcttcatacaaagttgagaatagtagagtaggtcaagtaactgattatgataaattaatatttgatgttgaaactaatggcgtcataacacctgatgatgctatagcacttgcatcaagaattttacaagatcaattgcaaccatttataaattttgatgagccagaaattcagcaagatcaagcatctgcagaaaaactttcatttaattcaaatcttcttaaaaaagttgaagagttagagttatcagtaagatctgcaaattgtctcaagaatgataatattatctacattgggtga

SEQ ID NO: 255270 - DNA, 840 bp, Unknown
  Bacterial polypeptide expressing nucleotide sequence isolated from the Sargasso Sea
atgaaatatggtgatgaatcttttactgccggtattggagcagaagcaattttagaaatacttaaaagtattaatttagaacaagaaagagaaatacttgtaaaaaacattaatgaaacaaagtctaaagtttctgaggaaagatcaatcaaaaggttaaagctaattgattcatttataaagacagggaataaacctgagtggatgattttaacagttatacccgttatcccgccagaactaagacctttagtgccactggatggaggtagatttgccacttcagatttaaatgatttgtatagaagagtaataaatagaaataatcgtcttaaaagattaatggatttaaaagctccagatattatagttcgaaatgaaaaaagaatgttacaagagtcagttgacgcactctttgataacggtagacgaggaagagtaatcactggaacaggaaaacgcccacttaaatctttagcagaaatgcttaaaggtaaacaaggaagatttagacagaatcttttaggaaaaagggtagattattcaggtagatcagtaatagtagttggaccagatctaaaacttcatgaatgtggtttgccaaaaaagatggctcttgaattattcaaaccatttttatatgcgagattaaataaacttggtttagcctctacaattaaacaagctaagaaactagttgaaaaggaaactaatgctgtatgggatgctttggaagttattgtaagggagcatccagttatacttaatagagcaccaacacttcatagactaggtgttcaggcttttgaacctaaattgatagaaggagatgcaattgaa

SEQ ID NO: 255271 - DNA, 913 bp, Unknown
  Bacterial polypeptide expressing nucleotide sequence isolated from the Sargasso Sea
aatggttgagaaagaacgtccagaagtatgggatgtactagaccgtgtaattagagagcatccagtaatactaaacagagcaccgactttacatagactcggtgtacaggcttttgagccagttttaattgaaggtaaggcaatccaacttcatcctttagtatgtactgcgttcaacgcagactttgatggcgatcagatggctgtacacgtgcctttaagtttagaagcccagcttgaggcgagagttcttatgatgtcaacaaacaacatacttaatcctgcaaacggaaaaccagtcattgttccaagtcaggatatcgtcttaggtatttattatctatcgcaagaaaaagaaaatgagccaggacaaggatctgtatttaaagatatttatgaagtacagcaagctcttgaaaataatgcaacaaccgtccatgcaaaagttcatgctagaattaatttcattgatccagaaggtaacaaaaaactaaaaagaattgagacaacaccaggtagaatgttgctttggaacctcgtcccgcagcataaagatcttgatcctaaactagtaaataggcttttaggtaaaaaagaaatatcaggccttattgatactgtttatagatattgtgggcaaaaagatacagtgatattcgctgatcaattaatggctttgggctttcattatgcatacaaggcaggtatttcttttggtaaagatgatatgataattccggagacaaaagaaaaacttgtttctgaaacagctggtcaaattgaaaaatatgaaaaacaatacaatgatggtcttattactaatcgggagaaatataataaagtaattgatgcttgggctaaatgtactgatcgtgttgctcaggaaatgatgaatgaaatatcatccaaaaaa

SEQ ID NO: 255272 - DNA, 931 bp, Unknown
  Bacterial polypeptide expressing nucleotide sequence isolated from the Sargasso Sea
actattaattacagaacacataaacctgaaagagatgggttattttgtgagagaatttttggacctgttaaagactatgaatgtgcctgtggaaaatataaaaggattagatataaaggtatcatttgtgataggtgtggagttgaagtaactgaaaagaaagtaagaagagatagagttgggcacataaacctagttgttccagttgcgcacatttggtattttaaatctcttcctaacaaaattggttatttattaggtttaccttctaaaaagcttgatatgataatatattatgaaagatatgtcgtaatccagccaggggaggcaaaaaatgctgaaggagaaccaattaataaaatggacttcttatctgaagaagagtatctcgcaattatggagacaattccagttgacaatcaatttcttgaagactctgatgagagaaaatttattgcaaaaatgggagcagagtgtttaattgacttgctctcaagaattgatcttgaggaactatcatatgagttaagacacaaagcaaataatgaaacatctaaacaaagaaagacagaggcattgaaaagacttcaagttgtagaatcatttagggaaggtaatgaaagaaaagaaaacttgccagagtggatgcttgtgaaagtaatacctgtaatacctccagagctaagacctcttgttcctctggatggtggaagatttgcgacttcagatctaaatgatctgtacagaagagttattatacgaaataatagacttaagaggcttgttgaaataaaggctcctgaagttattctcagaaatgaaaaaagaatgcttcaagaatcggttgattctttatttgataataccagaaaatcatctgcagtgaaaacggaatccaatagaccattaaatctttatcggattcactaaa

SEQ ID NO: 255273 - DNA, 892 bp, Unknown
  Bacterial polypeptide expressing nucleotide sequence isolated from the Sargasso Sea
aagttatcaaatgaaaataactttagtagtataaaaatcactttagcaagtccagaaaagatcaaatcttggtcatttggagaaataaaaaaacctgaaacaattaattatagaacttttagacctgaaaaagatggtcttttttgttctagaatattcggacctgtaaaagattatgagtgtttatgtggtaaatacaaaagaatgaagtttcgaggaattatttgtgaaaaatgcggagtagaagtaactaaatcaaacgtaagaagagaaagaatgggtcacatagagctttcttgcccagtagcacatatttggtttttaaaatctttacctagcagaatatctttggcgattgatatgaaacttaaagaagtagaaaaagttctttattttgaaagctttattgttattgagccaggattaactaaattaagcaaaggacaacttctttcagaagaggacttggtaaaagcacaagatgaatatggagaagacgcatttaccgctggtataggtgctgaagcagttagagagattttaattagccttgatttaaaaaaagaacaaaaaaaacttagagactcattaaaagaagttaaatccaaagtaaccgaagaaagaatgattaaaagactaaaacttatagagtcttttataacatcaggaaataaaccagaatggatgattttaacaacagtccctgtaattcctcctgagttaagacctttggtcccgttagatggaggcagatttgccacatcagatttaaatgatttatacagacgagttattaatagaaataatcgattgaagagattgatggagcttaaagctccagacattatcgtaagaaatgaaaaaagaatgttacaagaatctgttgatgcat

SEQ ID NO: 255274 - DNA, 715 bp, Unknown
  Bacterial polypeptide expressing nucleotide sequence isolated from the Sargasso Sea
gaaagttcgtttacatgctgttgggccaggtcaagttactggtagtcagattgaacttgggcatgatgtggagctaatgaacccttctcatgtaatatgtacacttgatgaaggtgcttcaattagaatggagatgactattgaaaatggcaaaggttatgtagctgctgaccttgaaaaatcagaagatcagccaataggccttgttcctgttgatgcagtttatagtcctgttcgtcgtgtttcctataaagtagacaataccagggaaggtcaaaaacttgattatgataaattaaccttaaaagtgctaaccaatggtactatatctccagaagatgctgtggcatttgctgcaagaattcttcaagagcagtttcaactatttattaactttgaggaaccaaaacctgatgtgcctgaggaaagtggttctgagccagagataaatccaaatttacttaggaaagttgatgaactggagctttctgttaggtcggcgaattgtcttaaaaatgataatcttgtttatataggtgatttgattcaaaaaacagagggtgagatgctaagaacacctaattttggtcgaaaatcactaaatgagataaaagaagttttagcacagatgggtcttcatttaggaatggaagtgccaaattggcctcctgaaaacattgaagagcttgcaaaaaagttagatgataacttttag

SEQ ID NO: 255275 - DNA, 864 bp, Unknown
  Bacterial polypeptide expressing nucleotide sequence isolated from the Sargasso Sea
ttcagagactaaacttaaaaagttatccaaaagactgaacttattagaggcttttaataattctggaaataagcctgaatggatgattatgaatgtattacctgttttaccaccagatttaaggcctcttgtacctctcgaaggaggtaggtttgcaacatcagatttgaatgatttatatagaagagttattaataggaataataggctaaaaagattattagaattaaacgcacctgaaataattgttagaaatgagaaaagaatgttgcaagaatctgttgatgctttattagataatggaagaagaggcagagttattactggcactaataagaggcctttgaaatcattagcagacatgattaagggtaagggcggacgatttagacaaaacttattaggaaaaagagtagattactcaggaaggtcagttattgttgctggccctaatctaagattgcatcaatgcggactgccaaagaagatggctttagagttattcaaaccttttgtttatggaaagcttgaacaaagagagcttgctacaactataaaaggtgctaagaaattagtagaaagagaaactccagaagtatgggaagtgctagaagaagtgataagagagcatccagttttactaaatagagctccaactctccatagacttggcttgcaagcatttgaaccaaaattaatagaaggcaaggcaattcagttacatccattagtatgtgttgcttttaatgcagactttgatggtgaccaaatggcagttcatgtcccacttactttagaagctcaattagaggcaagagcattaatgatgtcaactaataatatactttcaccagctgatggatc

SEQ ID NO: 255276 - DNA, 879 bp, Unknown
  Bacterial polypeptide expressing nucleotide sequence isolated from the Sargasso Sea
gctacatctgatttaaacgatctatatagaagagttataaacagaaataacagattaaaaagacttatagacttaaaagcaccagatattattgttagaaatgagaaaagaatgttgcaagagtctgttgatgcgctttttgacaacggaagaagaggacgagtaataactggaacaggtaaaagacctctaaaatctttagcagaaatgttaaaaggtaaacaaggaagattcagacaaaatttattaggaaaaagagtagactattcaggtagatcagtaatagttgtgggtccagatctaaaattacatcaatgtggattgccaaaaaaaatggcattagaattattcaagccatttttgtacgcacgtttaaataagttaggattggcatcaacaataaaacaagcaaaaaagttagttgagcgagaaagaacagaagtttgggatgcattagagttaattgtgagagaacatcctgtaatattaaatagggcacctacactgcacagattaggagtacaagcatttgagcccaaacttattgaaggtaatgcaattgaacttcaccctttaacttgtgctgcatttaatgcagattttgatggagatcagatggcagtacacgtacctttaagtttggaagcacaattagaggcaagggtattgatgatgtcgacaaataacattttaagcccatccaatggtaagccaattattgtacctagtcaggatatgattttggggatctattatttatcacaaccaccagttcaaactgatagaattgatggatattttgtaaatacctctgaaattgaacatgcattagaaactggacaaattaaggtacactcaagaatagtttcaagatttgat

SEQ ID NO: 255277 - DNA, 895 bp, Unknown
  Bacterial polypeptide expressing nucleotide sequence isolated from the Sargasso Sea
gaagagtatttaacaattatggaatctctcccagctgataatcagtttttagatgattctgatgaaaggaagtttattgcaaaaatgggagctgaatgtctaattgaattgctttctagaattgatttagaagaactttcatatgagttaagacataaagcaaataatgagacttcaaaacaaagaaaaacagaagcattaaaaaggcttcaggttgtggaatcatttagagagggtaatgaaagaaaggaaaatctaccggaatggatggtagttaaggtgattcctgttatcccacctgaattaagacctcttgttccactagatggaggaaggtttgctacttctgaccttaatgatctttacagaagggtaattattagaaataatagattaaagagattagttgaaattaaagctccagaagtaatattaagaaatgaaaaaaggatgcttcaagagtctgtagattctttatttgataatacaagaaaatcttcagcagttaagactgaatctaacagaccattaaaatcgttatctgattctttaaaagggaaacaaggacgttttagacaaaatcttcttggaaaaagagtagattactcagctagatcagtaattgttgttggtccagaattaaaattatacgaatgtggtttgcccaaagatatggcagctgagttatacaaaccttttataattagaaaacttattgaaaggggaatagttaaaacagttaaatctgcgaaaaaaatcatagatagaagagaacctgttgtatgggatatattagagaatgtattgaaaggtcaccctgttttacttaatagggctcctactcttcatagactagggatacaggcatttcaaccaaaaacttatgaaggaaaag

SEQ ID NO: 255278 - DNA, 559 bp, Unknown
  Bacterial polypeptide expressing nucleotide sequence isolated from the Sargasso Sea
tatgtgcctggtgataagcatagagatgaagatgtagctataggtttgatatcggtcgatgcgatgtactcacctgttaaaaaggtctcctacaaagtagactcgacacgtgaaggacaggtgcttgactatgataaactatccttgtctatagagacagacggctccgtgagcccagaagatgcaatagcatttgcagcccgaatattacaggatcaactcactatatttgttaattttgatgagcccgaggcggaagaaattgcaggcgaggaagatgagttagctttcaatcctcttctgttgaaaaaagttgaagagcttgagctgtcagttaggtcggcaaattgcttaaagaacgataatatagtctatattggagacttaattttgaaaacagaatcagagatgttaagaactccaaactttgggagaaagtctctcaacgaaattaaggaagttctcacgtcaatggggctacatttgggcatggatgtaagcgagtggccacctgagaacattgaagaattagcaaaaaagcatgaagatcaatattgaa

SEQ ID NO: 255279 - DNA, 885 bp, Unknown
  Bacterial polypeptide expressing nucleotide sequence isolated from the Sargasso Sea
gatgattttaaccacaattcctgtaataccaccagagttacgaccacttgtaccattagatggtggaagatttgccacttcagatcttaacgatttatatagaagagtaattaacaggaacaacagattaaaaagattaatggatcttaaagctcctgatataattgttagaaatgaaaaaagaatgttacaagaatcagttgatgcattatttgataatggaagaagaggtcgagtaataacaggaactggtaaacgtccacttaaatctttggcagaaatgttaaaaggtaaacaaggaagattcagacaaaatctcctaggaaaaagagttgattattcaggaagatctgtaattgttgttggtccagatttaaaattacacgagtgtggtctgccaaaaaaaatggcactggagttatttaaaccgtttctttacgcaagattaaacaaacttggactcgcatcaactattaagcaagcaaaaaaattagtagagcgtgaaagggaagaagtttgggatgcactggagaacattgtcagagaacatcctgtaatcttgaacagagctccaacacttcacagattaggtgttcaagcgtttgaacctaaattaatagaaggggatgctattgaacttcatcctttaacatgtgctgcatttaatgctgattttgatggtgatcaaatggcagttcacatacctttaagcttagaagctcaattagaagctagagttttaatgatgtcaactaacaacatacttagtccatcaaatggaaaacctataattgtacctagtcaagatatgattctaggtatttattatctttctcaaccaccttatcaatcagataaaatagaaggatattttatagataattc

SEQ ID NO: 255280 - DNA, 514 bp, Unknown
  Bacterial polypeptide expressing nucleotide sequence isolated from the Sargasso Sea
aatgcaaacaacgagtaacgttatcgacaaaaactggaaagcattaattaaaccaaataaactagacattacaagcaatgacgataaaacaattgcaaaagtagttgccgaacctttagagaaaggatttggacaaacaattggaaattctctaagaaggatattattatcttctatacaaggcgcagctgttacagcaattcaaattgatggagttcttcacgagttttcatcaatcaaaggtgttagagaagatgtaactgacattgtcttaaatgttaaaaatttagctatcaaatcttcatcatcaagttcaaaaaaaataatattggacattaaaggcccaaaagaagttaaagctaaagatattacgttagttcctgaaatagaaattctcaatcccgaacaaacaatttgtaatcttgatgaaaaaactaattttcatatggaattaatggtaagcacaggcaaaggttatgttcaagctcctaaaaataaaactgaggatagccca

SEQ ID NO: 255281 - DNA, 956 bp, Unknown
  Bacterial polypeptide expressing nucleotide sequence isolated from the Sargasso Sea
tatgaaacttaaggaggttgaaaaagttctttattttgaaagttttatagttattgagcctggtttaacaacgttaaaaaaaggccaattaatttctgaggaagctctactaaaagcgcaagaggagtttggtgaggatgcttttacagccggtattggtgccgaagcagttcgtgaaattcttttaaacctagatttaaaaaacgagcaaaaaaaactaagagattcacttaaagagataaaatctaaagtcacagaagaaagaacaatcaaaagattaaagttgattgagtctttcatatcatctggaaataaacctgaatggatgattcttacctccgtacctgtcatccctccagaactaagacctttagttcctttagatgggggtagatttgctacttcagatcttaatgacctttataggagagtgataaatcgtaacaaccgtttaaaaagacttttagatttaaaagctcctgacattattgtcagaaatgaaaagagaatgttgcaagagtccgtcgatgcattatttgacaatggaagaagaggaagagttatcactgggacaggcaaaaggcctttaaaatctttagctgaaatgcttaaaggtaagcaaggtagatttagacaaaatttattaggcaaaagagtggattattccggcagatctgtaatagttgttgggccggaattaaaacttcatcaatgcggcctaccaaaaaaaatggctttagaattatttaagccttttttatatgctagattagacaagttaggtttagcaacaacaattaaacaagctaagagactggttgaaaaagaaaaaagtgaagtatgggattctcttgagcatataattagagaacatcctgtgttattgaatagagctccaacactacataggcttggggtgcaggcgtttgaggcaaaattgattgaaggaaatgcta

SEQ ID NO: 255282 - DNA, 347 bp, Unknown
  Bacterial polypeptide expressing nucleotide sequence isolated from the Sargasso Sea
aatggaaaatacaaatatttttgataaaaattggaagtcattgacaaaaccaagcaaactcgaaattgaaagcaatgaagataaaacaattgcaaaagttgtagcccagcctttagaaaaaggttttggccaaacaattggaaattcattaagaagaattttgctttcatctattcagggagctgcagttacagcaattcaaatagatggagttttacacgaattttcttccataaaaggtgtgagagaagatgttactgacatagtattaaatgttaaaaatttagcaataaaattagattctgacggacctaaaaaattagttttagattctgtttgggccaaaa

SEQ ID NO: 255283 - DNA, 418 bp, Unknown
  Bacterial polypeptide expressing nucleotide sequence isolated from the Sargasso Sea
atggaaactgaaaatgtaaatgtaaaaaattggaagtcactaattaaaccaactaaattagatgtaaaaattagcgatgatctaactcgtgcaacaataatcgctgagccacttgaaaaaggctatggtttaacattgggcaattcattaagaagaattctattatcttctataagaggtgctgctgttacttctttacaaattgatggagtattacatgaatttacatctataaaaggtgtaagagaagatgttacagatatagttttaaatgttaaatccttagcactaaaatgtaattcagaggttacaaaaaaattagttttagatgtaaagggtccaggtgaaattaaagcatctgacataacatatgtgccagatgttgagatattaaatcctgatttggtaatctgtaatc

SEQ ID NO: 255284 - DNA, 681 bp, Unknown
  Bacterial polypeptide expressing nucleotide sequence isolated from the Sargasso Sea
aatggaaattgaaaatgttaatgttaaaaattggaaatcattaatcaagcctacaaagttagatgtaaaaatgagtgatgatctttcttatgcaaaaataattgctgaaccattagaaaaaggctatggattaacattaggaaattctttaagaagaatccttctttcttcaattcgtggagcagcagtaacatctattcaaatcgatggagtattacatgaatttacatctattaagggtgttagagaagatgtcacagatatagtattaaatgtaaaatcattggcattaaaaagttcatcagagggtacaaaaaaattaattttagatgccaagggtcctggtgaaataaaagcttcagacataacagcagtaactgatgttgaaatattaaatccagatttagtaatatgtaacttagatgaaaatacaaattttcatatggagatgaatgtaaatactggaaaaggctatgttcctgctgaactcaataagccagaagaaccaccattaggattaatagctattgattccttatatagtcctgttaaaaaagtttcatactctgttagcactgccagagaaggtaaagctttagattatgataaactaataatggaagtagaaactaatggttcaatttcagctgaggatgctgttgcatattctgcaagaatttt

SEQ ID NO: 255285 - DNA, 760 bp, Unknown
  Bacterial polypeptide expressing nucleotide sequence isolated from the Sargasso Sea
tagagtatgggatattttggaagatgtaattagagagcaccccgttttacttaacagagctcctactttgcatagattaggaattcaagcatttgaacccatactaatagaaggaaaatctattcaacttcatccattagtctgtacagcatttaatgcagatttcgatggtgatcagatggctgttcatgttccacttagtttagaagcgcaacttgaagcaagagtactgatgatgagtactaataatattttatctccatctagtggtaagccgattatagttccttcacaagacatagttttaggtatttactatttatcaataattagggaaaatcaaattggtcaagggagaaattttattgatttaaatgaaattgaaaaagcattagagagtggagatattacactacatacaaaaatttatgcaagaattttagacaacaataatcaattaatcaaagttgaaactactccgggaagaatgatcttaggaaatattttgccaaaaaataaaaatataaattttgatattattaataaggtacttactaaaaaggaagtcagtaacattattgattctgtatatagattttgtggtcaaaaagaaaccgtactttttgcagatcatattatgcaaataggttttaaatatgcagcaattgcagggatttcatttggtaaggatgatctaataataccatcagaaaaagatgatcttttaaatcaaacacaggcaaaagttcaggaaatatga

SEQ ID NO: 255286 - DNA, 799 bp, Unknown
  Bacterial polypeptide expressing nucleotide sequence isolated from the Sargasso Sea
ctgcagtaccagattgatcgcattgagcatcaggtatccgaggatcgcgcccaatcgggtgtgttcctgattggtccgcttgaacgtggccaggcaacgaccttgggcaacgcgctgcgtcgcgtgctgatgggtgggcttgaaggcagtgccgtgaccgcgattcgtattgctggagtcaatcacgaatacgccacggtgcctggtgttcgtgaggacgtgctcgacatcctcttgaactgcaaggagctcactgtcaacagccgctctggcgagctcgagatcggccgcctcgttgtggctggtcctgctgaagtcaaggcctgcgaccttcagttttcctcccaggtccaggttgtcgacaccgatcgtccgatcgcgactgtggccgatggacacagccttgagctggaagttcatgtggaacgcggcgtcggctatcgcccggttgatcgttacaacgaagaaaccagtgcgattgatctgctccagatcgatgctgtgttcatgcccgtaacccgggtcaacttcaccatcgacgaaaccgccgttgccgaaggaggctcagcacgggagcgccttcggattgagatcgtcactgacggttccataacccctgacgacgccctggctcaatcagccaatcaactgatcgagctgttccagccgctggccacggtcactcttgttgaggaagtccctgctgagccggagccttcggcagaagcacagattccgctggaagagttgaacctttcggttcgtgcctacaactgcctcaagcgcgctcaggtcaact

SEQ ID NO: 255287 - DNA, 848 bp, Unknown
  Bacterial polypeptide expressing nucleotide sequence isolated from the Sargasso Sea
gtctaaagttgctgaggaaagatcaataaaaagattaaaattaattgaatcttttttagaaactggcaataaaccagaatggatgattttaacagttatacctgttataccccctgaattaagacctttagttccattagatggtggaagatttgcaacatcagatttaaatgatttgtataggagagtaataaatagaaataatcgtctaaagagacttattgatttaaaagctccagatataattgttagaaacgaaaaaagaatgttacaggaatctgttgatgcacttttcgacaatggaagaagaggaagggtaattacaggtactggaaaaagacctcttaaatcactagcagaaatgttaaaaggtaaacaaggaagatttagacaaaatttacttggtaaaagagtagactattcaggaagatcagtgattgtagtcggtccagatctaaaattacatgaatgtggattacctaaaaaaatggctttagaattatttaaaccttttctgtatgccagactaaataagctaggacttgcttcaactatcaaacaagcaaaaaaattagttgaaaaagagagagatgaagtttgggacgctctagaaattatagttagagaacatcccgtcattcttaatagagctccaacactacatagactaggtgtacaggcatttgaacctaaattaattgagggtgaagcaatagaattacatcctttaacatgcgcagcatttaatgctgattttgatggtgatcaaatggcagtacatattcctttaagcttagaagctcaattagaagcaagagttttaatgatgtctacaaataatattttaa

SEQ ID NO: 255288 - DNA, 457 bp, Unknown
  Bacterial polypeptide expressing nucleotide sequence isolated from the Sargasso Sea
gatttacttcaaatagatgcagtatttatgccagtgaagagagttaatttttcgattgatgaaactgctgtagcagagggtggttcaggtagagaaagattgaaaatggaagtagttactgacggctcaatgtctccggatgatgctattgcggaagctgcgaaccagttaatagaactatttcaacctctcgctactgttacaatggtagaggaaatacctgaagagcctgaaccatctcctgaagctcaaattcctttggaagaactaaacttgtccgttagagcatataattgtctaaaaagggcacaagttaactcggtttctgatttgatgggtttcagctacgaagatcttcttgaaatcaagaactttggctcaaaatctgcagatgaggttattgaagctcttgaacgaatagggatctctattccacaaagcagaacttctgtttaac

SEQ ID NO: 255289 - DNA, 879 bp, Unknown
  Bacterial polypeptide expressing nucleotide sequence isolated from the Sargasso Sea
atcaattacttttcggaagaagagctacttaaaaatcaagaagaatttggagatgaagcttttacagcaggtattggcgcagaagctatattagaaatattgaagtcgttaaatttagaagaagaaaaaaaagctttagttaaaaatattaacgaaaccaagtctaaagtttctgaagaaagatcaattaaaagactaaagcttattgagtcatttattgaaactggacaaaaacctgaatggatgattttaacagttataccagttattccaccagaactaagacctttggtgcctcttgatgggggaagatttgcaacatcagatttaaacgatttgtatagaagagtaattaatagaaataatcgtttaaaacgattaatggatcttaaagctccagatataattgtaagaaatgaaaaacgaatgcttcaagagtcagttgatgctttatttgataatggaagaagaggaagagtaataactggaactggaaaaagaccattaaaatctctagctgaaatgcttaaaggtaagcaaggaagatttagacaaaatttattaggtaaaagagtcgattattctggaagatcagtgattgttgttggtcctgatctaaaacttcatgaatgtggattacctaaaaaaatggctttagaattatttaaaccttttttatacgccagactgaataaacttggcctagcatcaacaattaaacaagcaaaaaaattagttgaaaaagaatctaatgcagtgtgggatgctttagaattaattgttagagagcatcctattttattaaatagagcaccaacattacatagattaagtgtacaagcttttgagccgaaattaatagaagggcgatgctattga

SEQ ID NO: 255290 - DNA, 862 bp, Unknown
  Bacterial polypeptide expressing nucleotide sequence isolated from the Sargasso Sea
atttatgcaccagccatcatagttcataatgaaaagcgaatgttacaggaagctgttgatgcacttattgataatggaaaacgagggcgaaaagctttaggtgctcataatagagcgttaaaatctctatcagatatcattgaaggaaaacacggtcgatttagacaaaatttactaggtaaacgggtagactattccggccgttctgtaattattgtaggaccctcattaaaactaaaccaatgtggtttaccacatgaaattgctcttgaattattccaaccatttataattcatcaattaattattcatggcctggcaagtaatatgaaattagcaaaaaagttaattcagactggggaacctataatttggacaattttagaaaatattttaaaagagcatccaattttattaaatcgggcacctacattacatagactaggaatacaggcatttgaaccaatattagtagaaggacgtgcgatacaattacacccattagtttgcccagcttttaatgccgattttgatggagaccaaatggcaattcatgtgccactttcaattgaagcacaattagaagctaaaactttaatgttagccccaaataattttttatcaccagcaacaggtgatccaattattttacctagccaagatatggtactaggctgttattacttaacagtagataatccaacagcgaaagaaaatagcaatcattactttgcaaattatgatgatgttattttagcttatgagcaaaaaaagattacggttcatacacccgtatgggtaaaaactctagatgtagatactaataattcaatagatcttgagaattcaagaaactcagaat

SEQ ID NO: 255291 - DNA, 890 bp, Unknown
  Bacterial polypeptide expressing nucleotide sequence isolated from the Sargasso Sea
gatgatcttgacatctgtaccagttatacctcctgaattaagacctctcgttccacttgatggcggcagatttgctacctcagaccttaacgatttgtacagaagggttataaatagaaataatagattaaaaagactattagacctaaaagctccagatatcattgttagaaatgaaaaaagaatgctgcaagagtctgtagatgctctttttgataacggtagaaggggaagagtaataactggaactggtaaaagaccattaaaatctttagcagaaatgttaaaaggtaaacaaggtagatttagacaaaatttgttaggtaaaagagttgattattctggaagatcggtaattgtagttggaccagagcttaaacttcatcaatgcggattaccaaaaaaaatggctttagaattatttaaaccatttttgtacgcaagattagataaattaggattagctacaacaattaaacaggcaaaaagattagttgaaaaagagaaaagcgaagtttgggactccctagaacatatcattagagaacatccaatacttttaaacagagctccgactttacacagattaggagttcaggcatttgaggcaaaattaattgagggaaatgcaattgaacttcaccctttagtttgtgcagcgtttaatgctgattttgatggtgaccaaatggctgttcatataccgttgagcttagaagcacagttagaagcaagagtattaatgatgtctactaataatatcttaagtccatcaaatggaaaacctattattgtgccaagtcaggatattgttttaggtatttattatctttcccaagcttctgaagaagatagcaaaccaaaagggagtttttcaagtgtagaagaaa

SEQ ID NO: 255292 - DNA, 874 bp, Unknown
  Bacterial polypeptide expressing nucleotide sequence isolated from the Sargasso Sea
tttaatagcctaaaaatatctattgcaagtccagatgacattagatcatggtcatttggtgaaattaaaaaaccagaaacaattaattacagaacatttaaacccgaaaaagacggtttattctgctccagaatttttggaccagtaaaagactacgagtgcttatgtggtaaatataaaagaatgaagtttagaggaataatttgtgaaaaatgtggagttgaagttactttatcaaaagttagaagagatagaatgggtcatatagaattggccgctccagtttctcatatatggtttatgaagtctttacctagtagaattgcaacacttttggatatgacaattaaaaatctcgaaaaagttctctatttcgaacagtttattgttgttgaaccaggtctaacagatctaaataaaggtgaaataatatctgaagaacaatacattgactatcaagatgagtatggtgaagactcatttagcgcagctattggtgccgaagctattgaacaaatgcttcttagtattgaccttgaatcagattataatcaattaaaaattgatcttactgagactaaatctgaattaaaaaaaactaaaattacaaaaagactaaaactcatagaatcttttattatttcaaaaaataaacctgagtggatgattatgagagttttacctgtaattccacctgagttaagacctttagtcccactcgatggtggcaggtttgcaactagtgatttaaacgacctttataggagagtaatcaatagaaataacagactaaaaagattaattgatttaagagctccagatataattataaggaatgaaaaaagaatgcttcaagaatctgttgatgcattat

SEQ ID NO: 255293 - DNA, 969 bp, Unknown
  Bacterial polypeptide expressing nucleotide sequence isolated from the Sargasso Sea
aatgatttatatagaagagttattattagaaataacagattaaaaagattagttgaaatcaaagctcctgaagttattctaagaaatgaaaaaaggatgcttcaagaatcagttgattcattgtttgataatactagaaagtcatctgctgttaaaacagaatcaaatagaccacttaagtctctatcagattctttgaaaggaaagcaaggtagatttaggcaaaacttgttaggtaaaagagtagattattctgcaagatcagtaattgttgttggacctgaattaaaactatatgaatgtggtcttcctaaagatatggctgctgaattatacaaaccttttataatcaggaaacttattgaaagaggtattgttaaaactgttaaatctgccaaaaaaataatagatagaagagagcctgttgtttgggatattttagaaaatgttcttaaaggccaccctgttttattaaatagagctccgacactacataggcttggtattcaagccttccagccaaaattaattgaaggaaaagcaattcagttacatcctttgacttgtacagcttttaatgcagactttgatggtgatcaaatggcagttcaccttcctcttgggccagaggctattctagaagcacaacttttaatgctaggatcacataatattctaaacccagctaatggttctcctattactgtcccttctcaggacatggttttaggtctctattatatgacaaaatcaagaaagtcatctgaaaatcttaaactaaaaggtgaaggttctatatatttttcagctgaagaagttaatatggcatacaacgagaaaaaagttgacttaaatgcaattattaaatgtagaatcaaaacctctgacttagaagattcctatgagataatagaaactacaccgggaagaatattttttaatgaggtggtaccagtaaaagctggattt

SEQ ID NO: 255294 - DNA, 349 bp, Unknown
  Bacterial polypeptide expressing nucleotide sequence isolated from the Sargasso Sea
aatgactgataattacgacataatcaaagattttcttgtaccaactgaaattttggtagaggaactagggcctacaagatcaaagataattcttgaacccttggaacaaggttttgggcatacattaggaaacgctttaagacgtatcatgctttcatcaatgccaggaactgctgtatcagaagtaaagatagatggtgttttgcatgaatatacaacaattgaaggagtacaagaagacgttatagatattcttctaaacctaaaagaactgtcagtaaggttattggaatctgaggaatcggagttaaaggtttctaagaaatctaaagggaagttagttgctgga

SEQ ID NO: 255295 - DNA, 790 bp, Unknown
  Bacterial polypeptide expressing nucleotide sequence isolated from the Sargasso Sea
tcctgttatgctgaatagggcgccaacattacacaggctaggtattcaagcttttgagcctgtgcttattgaaggaaaagctattcagttacacccactggtttgttctgcatttaatgctgattttgacggtgatcaaatggcagttcatgtaccattgagcttagaggcacaattagaagcccgggtattaatgatgtctacaaataacgtgctttcgcctgccaatggtgcgccaattatcgttccgtctcaagatatgattttaggcctttattatactacgatcatgcgagagggcatgaaaggcgagggtatgatctttggatcaatcgaagaggtacaatatgctctggacaacggtgatgtgcatttgcatgcaaagattactgcccgtataccgcaaattgatgagcatggtacagagattgaaaagcgttttgaaacaacaccaggcagggtgcgtataggctctttactcccaaaaaatgcgaaagctccatttgaacttgttaataatttacttagaaaaaaagacgttcaaaacgtaattgatacggtctatcgctactgtggacaaaaagagtcagttattttctgtgatcaaattatgtctatgggttttcgtgaggctttcaaggcaggtatctcgtttggtaaggatgatatggtgatacctgagaccaaatgggacattgtaaatgatacaaggggccaagttacggattttgaacagcaatacatggacggacttatcactcagggcgagaaatataataaggtcgtggat

SEQ ID NO: 255296 - DNA, 778 bp, Unknown
  Bacterial polypeptide expressing nucleotide sequence isolated from the Sargasso Sea
ttaccaaaaaaaatggctttagaactatttaaaccttttttgtacgcaagattagataaattaggtttagccacaacaattaaacaagcaaaaagattagtagaaaaagaaaaaagtgaggtttgggactctttagaacatataattagagagcatccaattttattaaatagagctcctactttacatcgattgggagttcaagcttttgaagctaaacttatagaaggaaatgccattgaacttcacccgcttgtatgtgcagctttcaacgctgactttgatggcgaccaaatggcagttcacgtaccactaagtttagaggcacaacttgaggcaagagttttgatgatgtcaactaacaacatattaagtccatctaatggaaaacctataattgtgccaagtcaagatattgtattaggaatttattatctttctcaatctaacgagatagatgacatcaaacctaaaggactattttcaaatgttgaagaaatagagcaagccttagaaaacaaatctataagtttacactcaaaaataatttcaaaatttaatactatagataatgatggaaaaaagatttcagaaaaatatactagtacagctggaagatttcttttagcgaacattcttccaataaatcacaatataaagtttagtttggttaataaacttttaacgaaaaaaaatgtttcagaagtaatagatactatttttagatattgtggtcaaaaagaaacagttatcttttgtgatagaataaaaactttag

SEQ ID NO: 255297 - DNA, 817 bp, Unknown
  Bacterial polypeptide expressing nucleotide sequence isolated from the Sargasso Sea
aattacagaacatttagacctgaaaaagatggtttattttgtgccagaatatttggtcctattaaagattatgaatgtctttgtggaaaatataaaagaatgaaattcagaggaattatatgtgaaaaatgtggagttgaagttacaaagtcgaatgtacgaagagaaagaatgggacatataaatttagctacacctgtagcacacatatggtttcttaaatcacttccaagcagaatttctttagttatagatatgaaattaaaagatgtagagagagtcttgtattttgaaaattttatagttattgagcctggattaactggtcttaaaaaaaaccaacttcttggagaagaagaacttattaaatatcaagatgagtatggtgaggaagcattcactgcaggaataggagcagaagcagttcttgagattttaaaatcaataaatctggaggatgagaaaagtttattaattaaaaatataaaagaaacaaaatcaaaagtttcagaagagagatcaataaaaaggttaaagttaatagagtcattcatagaaactggaaacaaacctgaatggatgattttaacaacaataccggtaatacctcctgaattaagacctcttgtacctcttgacggtggtcgttttgctacttcagatttaaatgatttatatagaagagtgattaacagaaataatagacttaaaagattaatagatcttaaagctcctgatataattattagaaatgaaaaaagaatgcttcaagagtcggttgatgctttatttgacaatggaagacgaggaagagtta

SEQ ID NO: 255298 - DNA, 682 bp, Unknown
  Bacterial polypeptide expressing nucleotide sequence isolated from the Sargasso Sea
atcaaagcttctgatattgcacctgttgctgatgttgaaatattaaatccagaattagtaatttgtaatctagacgaaaagacttcttttcatatggaaatgaatgttagtactggaaaaggttatgtgccagctgatcttaacaagccagaggagccaccgttaggattaattgctatcgactctctttacagtccagtaaaaaaggtttcattttcagtaagtaccgctagagaaggaaaagccctggattacgacaaactaattatggaagttgaaactaacggatctatatcagctgaagatgctgttgcttattcagcaagaatttttcaagatcaactaaaaatgtttatcaactttgatgaaccagtagaagctccagtgaaagaagtttcaacagaacctgagttcaataaaaatttgttaagaaaagtagatgagctagaactgtctgttagatctatgaattgtttaaaaaatgataatattatctacattggagatttggttcaaaaatccgagggtgagatgctcaggactcctaattttggacgaaaatccttaaatgaaattaaagaagttttaactggcatgtcattatatttaggtatggaaatacctaactggccaccagacaatattgcagaaatgtctaaaaaattagaggaagccatctaat

SEQ ID NO: 255299 - DNA, 394 bp, Unknown
  Bacterial polypeptide expressing nucleotide sequence isolated from the Sargasso Sea
tcgatcacgcccgatgacgccgtggcctttgccgcgcgcatcttgcaagatcagctgtcgatcttcgtgaatttcgaagagcccgaatccgccacccgcgcggacgaggatgatggccttgaattcaacccgctgctgctcaagaaagtggacgagttggaattgtcggtgcgttcggcaaactgcctcaagaacgacaatatcgtttatatcggcgacctcattcagaagaccgaagcagaaatgctgcgcacgccgaactttggccgcaagtcgctcaacgagatcaaagaagtgctttcgggcatgggtttgcacctcggtatggacgtcgaagattggccgccagagaacatcgaagatctggcgaagaaattcgaagaccagttctaaa

SEQ ID NO: 255300 - DNA, 836 bp, Unknown
  Bacterial polypeptide expressing nucleotide sequence isolated from the Sargasso Sea
tttgaggaatgaaaaaaggatgttacaagagtcggtagattcgttatttgataatactagaaaatcttcagcagttaaaacagaatctaatagacctttaaaatcattatccgattctttaaaaggaaagcaaggacgtttcagacaaaatcttttaggtaaaagagttgattactctgctagatctgttattgttgttggacctgagctgaaattatatgaatgtggactaccaaaagatatggcagcggagctatataagcctttcatcataagaaagcttattgaaagggggatagtaaaaacagtaaaatctgcaaaaaaaatcattgatagaagagaacctgttgtatgggatatattagagaatgttttaaaagggcaccctgtcttattaaatagggctcctacattacacagacttggaattcaagcatttcagccaaagcttattgaaggtaaagctatccaattacatcctttaacatgtactgcatttaatgctgactttgatggtgatcaaatggcagtccatcttccactagggccagaggctattttagaggcacaactattaatgctaggttctcataatatattgaaccctgctaatggttcaccaattactgttccttctcaggatatggttttaggtctttattatatgacaaaatcaagaaaatcttctgagtcacataagcttaaaggtgaaggattgactttttattctccggatgaggttaatatggcttacaatgaaaaaatagtagatttaaacgctataatcaaatgtaggataaagacatatgagtctgatgattcatatgaaattatag

SEQ ID NO: 255301 - DNA, 811 bp, Unknown
  Bacterial polypeptide expressing nucleotide sequence isolated from the Sargasso Sea
tgagggtgttcgagaagacgttactgatattataatgaacttaaaaaatgttacttttaactctaaaagtaaccatcctcaaaaattaagtttaaatataaaaggccctaaagaggtactttcttcagattttgatgaaaacccagaagtcgaaatagttgataaagatgctgttattatgaacgttgactctaatagagaagtaaatttagaaatatttttagatgtaaataaaggttatgtatctgcagaaaaaaacaaagataatgaaaataaaagtgttggacaaattattttagacgccacttatagccctgtaaaaagagtttcttttaatgttgaaaactcgcgtattggccaagatactgaatttgataaacttattttagatatagaaactaatggaactgtatctccagatgatgctgctgccttagctgcaagaatacttcaagatcaactcaagccatttatcaattttgaagagcctacagaagatgaaagaaaaaaattacaatcatcaaacgaacctcagtttaataagaacttacttaagaaagttgatgaacttgagttatctgtaagatcagcaaattgtttaaaaaatgataatattttttacataggtgatttagtacaaaaaactgaaggagaaatgttaagaacaccaaactttggtagaaaatctcttgatgagataaaagaagtgctctcatcaatgagcctttcgatgggaatggatttaccaggctggccaccagagaacatagaagaattgtctaaaaaatacgaagacccattcaaagtataa

SEQ ID NO: 255302 - DNA, 751 bp, Unknown
  Bacterial polypeptide expressing nucleotide sequence isolated from the Sargasso Sea
caattagaaatggctagtactattaaactagccaagaaaatggttgaaagagaagatccagaagtttgggatattttagctgaagtcataagagaacatcctgttcttcttaatagagctccaaccctgcatagattaggaattcaagctttcgagccagttctagttgaaggaaaagctatccaattacatcctttagtgtgtaaagcctataacgctgactttgatggagatcagatggctgttcatgtgcctttaactattgaggcacagttagaatgcagagctttgatgatggcaacaaataatattctttcaccagctaatggtaagcctatcatcgatccttctcaggatgttgttttaggtatttactacatgacgagagaaaaaataaatgcaaaaggagagggcagtattctctcttctcctgaagaagcaaataggtcttttcagttagatgctattgatgtccatgcaaaaatcaaagttagactaagacctaataaactccctgaagaaaaaactgaaatagttgaaactactttaggtagaaccttactttatgaacttttaccggaaggcatgccttttgaattgattaataaaacattagacagcaaatctatttcagagctaatagatgtaagttacagaagatctggtctaaagaaaaccgttatctttgcagacagaataatgtatatgggttatgaattctcaacaaaatcaggctcttctctttgcgtag

SEQ ID NO: 255303 - DNA, 388 bp, Unknown
  Bacterial polypeptide expressing nucleotide sequence isolated from the Sargasso Sea
aatggagacagaaaatgtaaatttaaaaaattggaaatcactaataaaaccgtcaaagttagatgtaaaaataagtgatgatctatctcatgcaacaattattgcagaacctttagagaaaggttatggtcttacattaggtaattctttaagaagaatattgctttcttcgataagaggcgcagcggtaacttcaattcaaattgatggtgttttacatgaatttacatctattaaaggtgtaagagaagatgttactgatattgtattgaatgttaagtcattagcacttaaatctgcatctgaaggaacaaaaaaacttatattagatgctaaaggtccaggtgaaataaaagcttcagacataacatcaatcccagatgttgag

SEQ ID NO: 255304 - DNA, 873 bp, Unknown
  Bacterial polypeptide expressing nucleotide sequence isolated from the Sargasso Sea
ctagttgagggtagtgcgataaggttacaccccctagtatgccctgcatttaatgccgactttgatggtgatcaaatggcagtgcatgttcctttatctcaagaagcaattcaagaatgtagaagtttaatgttaagttctgaaaacatgttaagtccaggatctggaacccctattgttgctccaaccttagacctagttttaggaaattactatcttactgaatttgatgaagatcaagttgttaaagataaagatatcaaaaaatttagttctactgaagatgctatatattcatatgaagttggaacaataaaattgaaagaaaaaatagaaatactcgctttaagtgatggcaagaatccattttttacttcagttggaagagtaattttcaacgaaattcttcctgattcaattaatttcattaatgagaccattaataaaaaaagattacaagaaattgttgttcaatgccatgaaaatgagagcactgataccacaacaaaattgcttgataatttaaaattacttggttttaaatactccactaaatctggaacaactattgcaataaaagatattgttgtcccaaaaactaagaataatttgcttaaaaacgctgactcaaaaattgataaacttgaacagttgtttaaagatggtttggtaaatgatgaaaatgaaagataccaaaaaactgttgatgtatggactgaaacgaatgaaaaattaacacaagcagttaaagaaaccctaccttactttggcggtgtatatgcaatgtccgaatctggcgcaaaaggtaatattgaacagataaggcaaatggctggaatgagagggttgatgtcagaccctaaaggtagaatt

SEQ ID NO: 255305 - DNA, 568 bp, Unknown
  Bacterial polypeptide expressing nucleotide sequence isolated from the Sargasso Sea
ggaagaagaggacgagttataactggaacaggcaaaagaccacttaaatctttagctgaaatgcttaaaggaaaacaaggaaggttcagacaaaatcttttaggaaaaagggttgattattctggaagatcggtaattgttgttggtccagatttaaaattacacgagtgtggattgccaaaaaaaatggctttggagctatttaagcctttcttatacgctagattaaataaactaggtttagcctccactattaaacaagcaaaaaagttagtcgaaaaagaaagaactgaagtttgggacgcattggaactaatcgtaagagaacatccagtaatattgaatagagcaccaacactacatagattaggtgttcaagcctttgaaccaaaactaattgaaggtaatgcaatagaacttcatccattaacctgtgctgcatttaatgctgatttcgatggtgatcaaatggcagtacacgtgccattaagtttagaagctcagttagaggcaagagtactaatgatgtcaacaaataatattttaagtccatctaatggcaaaccta

SEQ ID NO: 255306 - DNA, 778 bp, Unknown
  Bacterial polypeptide expressing nucleotide sequence isolated from the Sargasso Sea
agaatgcttcaagagtctgtagatgcactatttgataacggtagaagaggcagggtaataacaggaactggtaagcgaccacttaaatctcttgctgaaatgttaaaaggtaaacaaggaagatttagacaaaatttattaggtaaacgagttgattattctggaagatcagtaatcgttgtcggtcctgatttaaaattacatgagtgtggattaccgaaaaaaatggctcttgagttatttaaaccatttttatatgcaagattaaataaattaggcttagcatcaactattaaacaagcaaaaaaattagttgaaaaagaaacaaatgcagtttgggacgctttagaattaattgttagagagcatccggttctattaaatagagctccaacacttcatagacttggagttcaagcatttgagccaaaattaattgagggagatgcaattgaattacaccctttaacttgtgcagcatttaacgctgacttcgatggtgaccaaatggcggttcacgttccattaagtttagaagctcaattagaagcaagaattttaatgttatctacaaataatattctttctccatcaaatggtaagccaattattgttccaagtcaggatatgatcttaggaatttactatctttcacaagaacctatatctgacaaacctgctggatattttacaaattcagatcaaattgaatttgcactatcttctggtcaaataaatgtacatagcaccataatctctagatatgaaacagaagatg

SEQ ID NO: 255307 - DNA, 432 bp, Unknown
  Bacterial polypeptide expressing nucleotide sequence isolated from the Sargasso Sea
acaaattaatatttgaagttgaaacaaatggtgtaataacacctgatgatgcaattgctttagcagcaagaatccttcaagatcagcttcagccatttattaattttgatgaacctgaggttttacctgatcaatcgcaagtagaaaaactttcttttaattctaatcttctcaaaaaagttgaggaattagaactttctgtaagatctgctaactgtttaaaaaatgataatataatttacattggtgatcttgttcagaaatcagagtcagagatgttaaggactccaaactttggaagaaaatctctaaatgagataaaagaagttcttcaacaaatggaattaaatttaggtatgtctgttccagattggccaccagaaaacatagatgaattagcaaaaaaatacgaagatccctttaataaataaa

SEQ ID NO: 255308 - DNA, 810 bp, Unknown
  Bacterial polypeptide expressing nucleotide sequence isolated from the Sargasso Sea
tatttggtttctaaagtctttaccttcaagaattggattaatgctggatcttactttaaaagatctggaaagagttctttattttgaaaattatattgtagttgatccgggcttaactgcattgaaaagatatcaggttttaacagaggatgaataccttgctgctcaagatgaatatggtcaggatgattttgaggctggtattggagctgaggctatcagaaaacttcttgagaatttagatttagacagagaaaggcaaaatataagaaaagaattagctgaaactacatccacagtaagaccaaaaaaattaattaaaagattaaaattagttgaagcatttatttcatcaggtaataggcctgagtggatgatactaacagttatacctgtaatcccacccgacttgaggccactggtgccgcttgatggtggaaggtttgctacgtcagatcttaatgatctctacagaagggtcataaacagaaacaacaggttaaaaagattaattgaccttcgtgctcctgacataatcatcaggaatgaaaaaagaatgcttcaggaatcagttgatgcactttttgataatggtcgaagaggaagagtaattactggaacgaacaaaagaccgcttaaatcactcgcagatatgttgaaaggtaagcaaggaaggtttagacagaatttattaggtaaaagagtcgactattctggtaggtctgtaattgttgtggggccagaattaaaattgcaacaatgtggtttgccaaaaaaaatggcacttgagttatttaaaccctttgtcta

SEQ ID NO: 255309 - DNA, 961 bp, Unknown
  Bacterial polypeptide expressing nucleotide sequence isolated from the Sargasso Sea
aaattgggaagcataattaaaccaattaaattagaaattaatagtaatgatgataagagtgtagctaaagttacagttgaaccgttagaaaaaggatttggtcaaacaattggtaactctttaagaagaattctactgtcttctatacaaggtgctgcagttacatctattcaaattgatggtgtacttcatgaattttcttcaattaaaggagtaagagaagatgttacagatatcgttttaaatgtaaaaaatttagctataaaatcctcaacatcgaatcccaaaaaaattatcctagatattcaaggccctaaagaagtgaaagctaaagatataactttagttccagaaattgaaattttaaatccagagcaaattatatgtaatttagatgaaaaaactcatttccatatggaattaatgataagtactggaaaggggtacgttcaagcaaaaaaaaataaatcagaagatagtccgctagggttgatttcaattgactcactttttagtccagtaaaaaaagtttcattttctgttgaaaacactagggcagggagcgctctcgattacgacaaactactcatgacagttgagactaatggcactgtagatgcagaggatgctatagcttatgctgcaagaatttttcaagatcaactttctgtgtttgtcaactttgaagatcctcaagaaactattaaagaaacaaaatctgctgagccagagtttaataggaatttattaaaaagagttgaggagctagagttatcagttagatcaatgaattgcttaaaaaatgataatataatttatattggtgatttagtccagaaaactgaacctgaaatgcttagaacaccaaattttggtagaaaatctcttaatgagatcaaggaagttttaaacactatgtctttatatcttggtatggaggtgcctaactggccaccagata

SEQ ID NO: 255310 - DNA, 972 bp, Unknown
  Bacterial polypeptide expressing nucleotide sequence isolated from the Sargasso Sea
atatgtgaaaaatgtggtgtgagggttacaaaatcaaatgtagaagagaaagaatggccatattaccctgctacaccggtagcacatatttggttctggaagtctcttccaagtagaattgctttagcagtagacatgaaattaaaagagatagagagagttctttattttgaaaactttatagtaatagaacctggtttaactggtttacaaaaaaatcaactcttaaatgaggaagaattagcaaaataccaggatgagtttggtgaagaaagttttacagcgggaataggagcagaagccgttcttgagatgctgaaaaatttagatttagaattagaaagaaaaaatcttgttagctttattaaagaaaccaaatcaaaagttaatgaagaaagagcaattaaaagattaaaattaatagagtcatttattgaaacaggtcaaaaacctgagtggatgattatgactgttgtaccagttataccaccagaattaagaccattagttcctctagacggtggaagatttgctacttcagatcttaacgatttatacagaagagtaattaacagaaataacagattaaaaagattaatggatcttaaagctccagatatcattgtaagaaatgaaaaaaggatgctccaagagtctgtagatgcactatttgataacggtagaagaggcagggtaataacaggaacaggtaagcgaccacttaaatctcttgctgaaatgttaaaaggtaaacaaggacgatttagacaaaatttattaggtaaacgagttgattattctggaagatcagtaatcgttgttggtcctgatttgaaactacatgagtgtggtttaccgaaaaaaatggctcttgagttatttaaaccatttttatatgcaagattaaataaattaggcttagcttcaacaattaaacaagctaaaaaattagtgaaaaagaaacaaatgcag

SEQ ID NO: 255311 - DNA, 426 bp, Unknown
  Bacterial polypeptide expressing nucleotide sequence isolated from the Sargasso Sea
attgattgagaataattggataactttggttaaaccaaacaaagttgattataaaataagtgataataagaaattcggaactgtagttatcgaacccctggaaaaaggttttggcactacattgggtaatgcactaagaagagttcttctttcatcattacaaggtacagccatctcctctataaaaattaatggtgttttgcacgaattctcaaccatagaaggtgtcagagaagacgttactgatattattatgaatctaaaaaatgttacctttagctctaaaagtaataaccctcaaaagttaagtttaaatgtaaaaggtcccaaagaagttctttcttcagatttcgatgataatcctgaggtagagataattgacaaagaggcagttattatgaatgttgactcaaatagagaggtaaa

SEQ ID NO: 255312 - DNA, 577 bp, Unknown
  Bacterial polypeptide expressing nucleotide sequence isolated from the Sargasso Sea
aatgacaaacagcaacttaagaactgaaaatcactttgattacgtcaaaatctcaatagcttctcctcaaagaataatggattggggtcagaggacattgcccaatggacaagtagttggtgaagttacgaaacctgaaactatcaattacaggacacttaaaccagaaatggatggattgttttgtgaaaagatttttgggccatctaaagattgggaatgccattgtggaaagtacaaaagagtaagacatcgcggcattgtttgtgagagatgtggggttgaagtaactgaaagtagagtcagaagacataggatgggctacataaaactggctgcgccagtttcccatgtttggtatttgaaaggaatccctagttacgttgcaatacttttggatattccgcttagggatgtagaacaaatagtttattttaattgctatgtcgttttagatccaggggatcataaagaacttaaatataagcaattactcactgaggatgagtggctggaaattgaagatgaaatttatgctgaagattcaactatagagaatgaaccttttgttggaatt

SEQ ID NO: 255313 - DNA, 866 bp, Unknown
  Bacterial polypeptide expressing nucleotide sequence isolated from the Sargasso Sea
actattatcaagaattgatttagataatctttcatatgagttaagacataaagccaacaatgaaacttctaaacaaagaaaaaccgaagcactcaaaagattgcaagttgtggaatcttttagagaaggtaacctaaacagagaaaacctgcctgaatggatgattatgaaggctattcctgttataccaccagagctaagacctttagttccattagatggtggtagatttgccacatctgatttaaatgatttatacagaagggtaattataagaaataacaggttaaagaggttaattgagataaaagccccagaggttattctaagaaacgaaaaaagaatgcttcaagaatcagttgattctttatttgataacacaagaaaatcatcggccgtaaaaacagaatcaaacagacctcttaaatcactctctgattcattaaagggtaagcaaggaaggtttagacaaaatttattaggtaaaagggttgattattcagcaagatctgtaattgttgtaggtcctgatttgaagctctttgaatgtggtttgccaaaaaatatggcagctgaactatataagccttttatcatcagaaaattgatggaaagaggaattgtaaaaacagtaaaatctgcaagaaaaattattgacagaagagatcctgtggtttgggacatcctagaaaatgtacttagaggtcatcctgtattactaaacagagctccaactctccatagacttggaattcaagcctttcaaccaaaattaattgaaggtaaagcgatacagcttcacccattagtttgtactgcatttaatgctgattttgatggtgatcaaatggctgttcatttaccac

SEQ ID NO: 255314 - DNA, 883 bp, Unknown
  Bacterial polypeptide expressing nucleotide sequence isolated from the Sargasso Sea
agagttttaaatagaaataacagattaagaagactaattgaattaaatgcacctgatataataataaaaaatgaaaaaagaatgttacaagaagctgtagatgcactttttgataatggaagaagaggaagggctattttaggatcaaataaaagacctctaaaatctttatctgaaatgttgaaaggaaagcaaggtagatttagacaaaatttacttggaaaaagagtcgattattcaggaagatcagttattgtgccagggcctcatttattattacatcagtgcggaatcccaaaaaaaatggccatagaactttttaaaccatttatttattctaaactagagcagtatggtttatctaatacaataaaaacagctaaaaaattagtagaaaaagaaagacctgaagtttgggatgttttagaagaagttattaaagagcacccagttttgctaaatcgtgcaccaactctacatagattaggaattcaagcttttgaacccatgctaattgaaggtaaggcaattcaattacatccacttgtttgtacagcatttaatgcggactttgatggtgaccaaatggctgtgcatgtaccgctttctctagaagctcaattagaagctcgtgtactaattatgtcaacaaataatattttaagtccttctagcggcaagcctataattgtgccaacacaagatatggttctagggatttactatttaagtttaatgtttgaaaatgatattggtacagggatggcttttgtcgatgtagctgaagtagaacacgctttattagctaaaaaaataacattacattcaaaaataaaatgtaggtataaatttattaacgatgataaaaaagaagaaacatcag

SEQ ID NO: 255315 - DNA, 974 bp, Unknown
  Bacterial polypeptide expressing nucleotide sequence isolated from the Sargasso Sea
ggtggaagatttgctacatcctgatttaaatgacttatataggagagtcataaatagaaataatagacttaaaagactaattgatctcaaagctccaaacataattgttcgaaatgaaaaaagaatgttgcaagagtcagttgatgcattatttgacaatggaagacgtggaagagtaattactggaactggaaaaagacctcttaaatctttagctgaaatgttgaagggaaaacaaggtagatttagacaaaatttattaggtaaaagagttgattattcaggcagatcagtaattgttgttggtcctgatttaaaacttcatgaatgtggtctgccaaaaaaaatggcactagaattattcaaaccatttttatatgcaaggcttaacaaactaggattagcttctactataaaacaagctaaaaaaattgtagaaaaagaaagaaatgaagtttgggatgcattagagttaattgtaagagagcatccaattatacttaacagagctccgacacttcatagattgggaatacaagcatttgaaccaaagctaatagaaggaaatgcaattgagcttcatccattagtttgtgcagcatttaatgctgattttgatggagatcaaatggccgttcatattccattgagtttagaagcacaattagaagctagagttttaatgatgtctaccaataatattttaagtccatcaaatggaaaaccaattattgtaccaagtcaggatatgatattaggtatatactatctttctcaaccaccacttcaaacaaaaagaatagaaggatactttgttgacaactctgaaatagaacatgctttggaatctggacaaataaaagttcattcaagaatcatttcaagatttgaaaccgtcgatgaagatggaaatacaaaatatgaaaaatatacaagtactgcaggaagatttttacttgcaaacttgctaccaa

SEQ ID NO: 255316 - DNA, 907 bp, Unknown
  Bacterial polypeptide expressing nucleotide sequence isolated from the Sargasso Sea
ggtagattattctggtagatcggtaattgttgttgggcctgatttaaaattacatgaatgtggattaccaaaaaaaatggctcttgagttatttaaaccatttttatatgcaagattaaataaattaggtttagcatcaacaattaaacaagcaaaaaaacttgtcgaaaaagagagagatgaagtttgggatgcattagaaataattgtaagagaacatcctgttttattaaacagagctccaacattacatagattaggcgttcaagcatttgaacctaaattaattgaaggtgacgcaatacaattacatcctttaacatgtgctgcattcaacgcggattttgacggtgatcaaatggctgtccacgttccattaagtttagaagctcagcttgaggccagagtactaatgatgtctacaaacaatatactaagtccatcaaacggaaaaccgattattgtcccaagtcaagatatgattttaggaatatattatttatcacaaccaccatatcaaactgaaaaaatagagggatattttgttaatgttgatgaaatgttacaagcacttgaaaatggaagtgttaaaattcattctagaataatttcaagatttgaaacagtagatgaaaaaggaaataaaaagatagaaaaatataccagtactgttggtagatttttgttagctgatattattccaaaaaatataaataataaattttcattggttgacagattgctgcctaaaagaactgtttcggaagttatagatcacatatttagattttcaggtcaaaagagtacagtcattttttgtgatagattgaaagatttaggattcaagtatgcttttaaagcgggtatatcatttggtaaagacgatttaattattcctgaaaacaaa

SEQ ID NO: 255317 - DNA, 799 bp, Unknown
  Bacterial polypeptide expressing nucleotide sequence isolated from the Sargasso Sea
gctaaagttgttgctgaacctctggaaaaaggattcggacagacaatagggaattctctaagaagaattttgttatcatcaatccaaggagcagcagtttcagctattcaaatagatggtgttcttcacgagttttcctctattaaaggagttagagaagatgtaactgatattgtattaaatgtgaaaaacttagctataaaatcatcatcggcaagtcctaaaaaaataattttagatataaaaggtcctaaagaagttaaagcaaaagacattactcttgtaccagaaattgaaattttgaatccagaacaaactatttgtaatttagatgaaaaaaccaactttcacatggaattaatgattagtactggaaaaggttatgttgcggctccaaaaaacaaaaatgaagatagtccacttggattaatttcaatagattcattatttagtccagtcaaaaaagtttctttttctatagaaaatacaagagcaggcagtgcacttgattatgataaattattaatgaccgttgaaacaaatggaacagttgctgctgaagatgctatcgcttattcagctagaatttttcaagatcaattatcaatgtttgttaattttgaagatccaaaagaaatagttaaggaagttaaaagcacagaaccagaatttaacagaaatttattgaaaagagttgaagaactagaactatctgtaagatcaatgaattgtcttaaaaatgataatataatttatataggtgatttagttcaaaaaacagagcctgaaatgttaagaa

SEQ ID NO: 255318 - DNA, 925 bp, Unknown
  Bacterial polypeptide expressing nucleotide sequence isolated from the Sargasso Sea
tttcgccacttccgacctgaacgacctgtaccgcggcgtcatcaaccgcaactcgcgtctgcgtcgtctgctcgagctcaaggctcctgaaatcatcgcgcgcaacgaaaagcgcatgctgcaggaagcggtggactcgctgctggacaacggccgtcgcggcaaggccatgacgggcgccaacaagcgtgccctgaagtctctggccgacatgatcaagggcaagagcggtcgtttccgtcagaacttgctgggcaagcgcgtggactactccggtcgttccgtgattaccgtgggtccttacctcaagctgcaccagtgcggtctgcccaagctgatggcgctggagctgttcaagcccttcatcttcgcgcagctcgagcagcgcggcatcgccacgaccatcaaggcggccaagaaggaagtggaagccggtacgcccgtggtgtgggacatccttgaagaagtcatcaaggaacaccccatcatgctcaaccgtgcgcctacgctgcaccgtctgggtatccaggcgttcgagcccatcctgatcgaaggcaaggccctgcaactgcacccgctggtctgcgcggccttcaacgccgacttcgacggtgaccagatggctgttcacgtgcccctgtctgtggaagcgcagatggaagcccgcgtgctgatgctggcctcgaacaacgtgctgttccccgcttcgggcgaaccctccatcgttccttcccaggacgtggtgctgggtctgtatcacgccacgcgtgaaaagatcaacggcaagggcgaaggcatggtgtttgccgacctgatggagctgcaacgcgctctggatgccggcgagaccgaactgcacgccaagatcagcgtgcacctgaccgagtggaacaagaacaaggaaaccggcgaattcgagcccgtg

SEQ ID NO: 255319 - DNA, 504 bp, Unknown
  Bacterial polypeptide expressing nucleotide sequence isolated from the Sargasso Sea
tatggaatctgctgaagtaaataataagaactggaagactttaatcaaaccttcaaagatagatattaaacttagtgacgataaatcttttgcaaaaattatagctgaacctttagaaaagggttatggactaactttaggtaactcattaagaagaattttactttcttctataagaggaaccgctgtaacttcaatacaaatcgatggtgtacttcatgaatttacatctattaaaggtatcagggaggatgtaacagatattgttttaaatgtaaaatctttagcactaaaaagtacttctgaagtaaataaaaaactaatacttgatgtaaagggacctggtgaaattaaagcatctgatataactccagttgctgacgttgaaatattaaatccagatctagttatatgtaatcttgatgaaaacacaaaatttcatatggaaatgaatgttagctcaagtaaaggatatgtttcggcagataataacaaacctgaaga

SEQ ID NO: 255320 - DNA, 409 bp, Unknown
  Bacterial polypeptide expressing nucleotide sequence isolated from the Sargasso Sea
tttacagtcgatgaaaccgctgtgggtgaaggcggctcggcccgtgagcgcctccgactagagatcaacaccaacggctccatcacccctgatgacgccctggcctatgcggcgaaccagttgatcgccctgttccagcctctggccacggtcaccctggccgaagagcccggtcaagaacccgagcccagtgctgagagccaaattccactggaagagctcaatctttccgttcgggcttacaactgcctcaagcgtgcccaggtcaactccgtttcggatctgatgggcttcagctatgaggatctgctggagatcaagaacttcggtgccaagtcggcggatgaagtgatcgaagcgcttgagcgcatcggcatctccttgccccagagccgcaccaccgcctgac

SEQ ID NO: 255321 - DNA, 436 bp, Unknown
  Bacterial polypeptide expressing nucleotide sequence isolated from the Sargasso Sea
gtagaagcagctcgtgttgaacagcgtactgacttggataaactcgttatcgatatgaccactaatggtactattgatcctgaggaagctatccgtcgttctgcaaccatcttagctgaacagctggatgcgtttgttgagctgcgtgacgtgactgagccagaaatgaaggaagagaagccggagttcgatccgattctgttgcgtcctgtcgacgatttagagctaactgtacgttcggctaactgtttgaaagccgaagcgattcattacatcggagatctggtacagcgtactgaagttgagctgctgaaaacccctaacttaggtaagaaatctcttactgaaattaaggacgttttagcttctcgcggactgtcgttaggtatgcgtctggaaaactggcctccagctagtttagcagacgacctataag

SEQ ID NO: 255322 - DNA, 820 bp, Unknown
  Bacterial polypeptide expressing nucleotide sequence isolated from the Sargasso Sea
atggaaacagctaatgtaaatttaaaaaattggaaatcattaattaaacctggaaagttagatataaatttaaatgatgataaatcatacgctaaaattgtagctgaacctcttgaaaaaggttatggtttaactttgggtaactcactaagaagaattttattatcttcaattagagggactgctgtgacagcaattcaaattgatggagtacttcatgaatttacttccattaaaggtgtgagagaagatgtaactgatattgttcttaatgttaaatctttagcattaaaaagtacctctgagggttcaaaaaaattagtattggatgcaaaaggcccaggagtaattaaagcatctgacataacaaaaattaacgaaatagaaattctaaatccagacttagtaatttgtaatttagatgaaaatacaaattttcatatggagatgacaataggtaatggaaaaggttatgttcctgcagaacttaacaaaccagatgaaccacctttaggtcttatacctattgactcactttttagtcctgttaaaaaagtatcttattctgtgagtactgctcgtgaaggtaaagctttagattatgacaaattaacaatggaaatagaaactaatggatctatttcagcagaagatgcgttagcgtactcagctagaatttttcaagaccaattaggaatgtttgttaattttgatgaacctcaagaagtaactataacagaaaaaccaagtgagccagaatttaacaaaaatttgttaggaaaagttgatgaattagagctttccgtaagatctatgaact

SEQ ID NO: 255323 - DNA, 928 bp, Unknown
  Bacterial polypeptide expressing nucleotide sequence isolated from the Sargasso Sea
gaccagaaaaagatgggttatttgtgcaagaatatttgtccaataaaggattatgaatgtttgtgtggaaaatataaacgtatgaaattcagaggtattatttgcgaaaaatgtggtgttgaagtcacaaaatcaaatgttcgaagagaaagaatgggtcatatcaatttagctactccagttgctcatatttggtttttaaaatctttaccaagcagaatagcacttgcggtagatatgaaacttaaagaagttgaaagagttttatattttgaaaattttatagttattgaaccaggtttaaccggattacaaaaaaatcaattattaaatgaagaggaattagcaaaatatcaagatgaatttggtgaagaagcttttacagcaggtattggagctgaggctgttcttgagatgcttagaaatttagatttagaattagagagaaaaaatttagctaattatataaaagaaacaaaatcaaaagttaatgaggaacgagctataaaaagattaaaattgattgagtcatttattgaaacaggacaaaaacctgaatggatgattatgactgtaattccagttataccacctgaattaagaccattagttcctttggatggtggaagatttgccacttcagatctaaacgatttatatagaagagtaattaatagaaataacaggctaaaaagattaatggatctaaaagctcctgatataattgttagaaacgaaaagcgaatgctacaagagtcggtcgacgctctttttgacaatggtagacgtggaagagtaataactggaactggtaaaagaccactaaaatctctagctgaaatgttaaaaggcaaacaaggaaggtttagacaaaatcttttaggaaaaagagtagattactctggtagatcggtaattgttgtaggac

SEQ ID NO: 255324 - DNA, 639 bp, Unknown
  Bacterial polypeptide expressing nucleotide sequence isolated from the Sargasso Sea
aatggaaactaataatgtgaaccttaaaaattggaaatcattaataaaaccatccaaaattgatgtagatcaaaatgataataaaacatttgcaaaagttgtcgccgaacctttagaaaaaggatatggtttaacaattggtaattccttaagaagaattttactatcttcgataagaggaactgctgtaacagctattcaaatagatggtgttcagcatgaatacagttcaattaagggtgtaagagaagatgttactgatattgtattgaatataaaatctttagctttaaaaagtaatgctgagggtaataaaaaattaattttagacgcaaaaggacccggtgaaattaaagcatctcaaatttctccagtaactgacattgaaattttaaatccagacttagtgatatgtaatttagatgaaaatactaattttcatatggaactttttgtaggaaacggaaaaggttatgtatcagcagaacttaacaagcctgaagaaccacctttaggattaataccaattgattctttatttagtccagtaaaaaaagtttcttattcagttagcacagctagagaaggtaaagcacttgattatgataaacttgacatggaaatagaaactaatggatc

SEQ ID NO: 255325 - DNA, 925 bp, Unknown
  Bacterial polypeptide expressing nucleotide sequence isolated from the Sargasso Sea
cttaaagcacctgatattatgttagaaaatgaaaaaagaatgttacaagagtctgtagacgctctctttgataatggaagaagagggagagtaataacaggtactggcaaaagaccacttaaatcccttgcagaaatgttaaaaggtaagcaaggaagatttaggcaaaacttattgggtaaacgagtagattattctggaagatcagtaattgttgttgggccggatttaaaactgcatgaatgtggtcttccaaaaaaaatggctctagaactttttaaaccttttttatatgccagattgaataaattaggattagcttctactattaaacaagcaaaaaaattagttgaaaaagagacaaatgccgtctgggatgctttagaacttattgtaagagaacatccagtattattaaatcgagccccaactcttcacaggttaggagttcaagcttttgaacctaagcttatagagggagatgcaattgagcttcacccattaacttgtgcagcatttaatgctgattttgatggtgaccaaatggcagttcatgttccattgagtctagaggctcaattagaagctagaatattaatgctatcgactaataacattttatcaccttcaaatggaaaaccaattatagttccaagtcaggacatgattttgggtatatattatttatcacaagagcctcttacagataaaccagagggatattttttgaacgctgatcaaatagaatttgctttatcttctggacaattaaaagttcatagtacgattatttcaagatttgaaacagtagatgaaaaagggaataaaaaatttgagaagtatacctctacagctggaaggtttttattagcacatttgttaccaaaaaataaagatattaaattttctttagtggatagattat

SEQ ID NO: 255326 - DNA, 790 bp, Unknown
  Bacterial polypeptide expressing nucleotide sequence isolated from the Sargasso Sea
gtaagagaagatgtaacagatatagttttaaatataaaatctctagcattaaaaagtaattctgaaggttctaaaaaattaattttggatgctaaagggcctggtgaaataaaagcatcaaatattactccagttgctgacatagaaatattaaatcctgatttagttatttgtaatttagatgaaaaaacgcattttcatatggaaatgattgtaggaagtgggaaaggttacgtttctgcggatatgaataaaccagaagagccaccattgggattgattccaatagactctttattcagccctgtaaagaaagtttcttactcgataagcaccgctagagaaggtaaggctttagattatgataaattaacaatggaaattgaaactaacggatctatttctgcagaagatgctcttgcatattcagcaaggatatttcaggatcaattaggtatgttcattaattttgatgaaccacaagaagttttaattaaggaaaaacctactgagccagagtttaataaaaatcttttaagaaaagttgatgaacttgaattatcagttagatcaatgaattgtttaaaaaacgacaatattatatatatcggtgatttggttcaaaagtccgaaggcgaaatgctgagaacaccaaattttggtagaaagtctttgaacgaaataaaagaagttttgaccggcatgtctttataccttggaatggaaataccaaattggccaccggataatatcgctgaattatctaaaaaactagaggagtcgatctaag

SEQ ID NO: 255327 - DNA, 434 bp, Unknown
  Bacterial polypeptide expressing nucleotide sequence isolated from the Sargasso Sea
agagtctgctcgtgttgaacaacgcacagatctagacaaactaatcatcgacatggagacgaacggtactttggatcctgaagaagcgatccgccgttctgctactatcctagctgaacagctagatgcattcgtagacctacgtgatgtgtctgagccagaggcgaaagaagagaagccagaattcgatccgattctgcttcgtccagtagatgacctagagctgacagtacgttctgcaaactgtttgaaagcagaagctatccagtacattggtgacctggtacagcgcactgaggttgagctacttaaaacgccaaaccttggtaagaaatcgctaactgaaatcaaagatgttctagcatctcgtggtctttctctaggtatgcgcctagaaaactggccgccagagagcatcgctgaaaaagattaat

SEQ ID NO: 255328 - DNA, 877 bp, Unknown
  Bacterial polypeptide expressing nucleotide sequence isolated from the Sargasso Sea
tgcgcaagaatatttggtcctgtgaaagactacgaatgtttatgtggaaaatacaaaagaatgaaatttagaggaattgtttgtgaaaaatgtggagttgagattacgaaatcaaatgtcaggcgagagcgtatgggacacatagatcttgcttgtcctgttgctcatatatggtttttaaaatcattaccaagccgtatagccctagctgttgatatgaaattaaaagaagtagaaaaagttttatactttgaaagctttattgttatagagccaggattaactactttaaaaaaatgtcaattattaactgaagagcaactaaataaagcccaagaagaatttggtgaagatgctttctcagctggtataggagcagaagcagttagggaaattctaattagtttagatttgttaaaagaacaaaaaaaattaagagattcattaagtgaaattaaatcaaaagtcacagaagaaagaacaataaaaaggttaaaactaatagagtcttttattaattctggcaacaaacctgaatggatgattttgacaacagttccagttataccacctgaattaagacccttagtgcctttggatggaggtagatttgcaacttctgatcttaacgatctctatcgtagagttataaatagaaacaacagattaaaaagattattagatttaaaagctccagatattattgttagaaatgaaaaaagaatgttgcaagagtctgtagatgcactttttgataacggtcgaagaggacgtgtaattactggtacgggtaaaagaccattaaaatctttagctgagatgcttaaaggaaaacagggcaggtttagacaaaacttattaggaaaaagaggttgat

SEQ ID NO: 255329 - DNA, 919 bp, Unknown
  Bacterial polypeptide expressing nucleotide sequence isolated from the Sargasso Sea
cgaagtgctaaaatgatgatgaaaaattgtgaacctgtagtctataaagtgttggaatatgtcgttaaagatcatccagttatgttgaatagggcacccaccctgcatagattaggtattcaggcttttcagcctgttcttgttgatggtaaggccatacaattgcatcccttagtttgttcggcgtttaacgctgactttgatggtgatcagatggcagttcatgtaccattgtctttggaggcgcaaatggaagcgcggatgttgatgcttgctagtcataatatattgcatccagcaaatggacagccaattgcagttccatctcaggacatgattctaggttcttattacctcacgaagctaaaagatggtgatttgggcgaagggaagatatttggttcgatagatgaggtggtgctggcctatgaaaatagagtcgttggtctacattctaaagttagtttaaagcataatggtgattggataaaggatactaccataggtagggcaattttcaattcaatattgcctgatgagatggaatatattaatgatttaatagataaaaagcgtttaacgaatatagtgaatcaatgttatcttattgtcggtaactacaagacagtaatatttcttgataacttaaaagatcttggctttaacatggctacgcagagtggtttatcgatatcggttagtgatgttctgataccaaagggaaaagatagtattctatctactgcatttgaaaaggttgaagatattaaaagaaaatacgatagacatgttttaacggaaggtgaaagatataataaggtcattgatgtgtggacccataccaccaatcacatcgctcaggtaatggaagatgagctaaggatggataataaaggttttaatgctctatctatgatga

SEQ ID NO: 255330 - DNA, 778 bp, Unknown
  Bacterial polypeptide expressing nucleotide sequence isolated from the Sargasso Sea
ttccggcagaatctgctgggtaaacgtgttgattattcaggacgttcagtcatcgttgttggacctaccttaaaactgcatcagtgtgggcttccgaaactaatggcgttagaactattcaagccattcgttatgcgaactcttgtccatgacaatatggcacctaacataaggtcagctaaacgaatggttgaaagaaggcgaccagcggtttggcctgtgcttgatgaagtgattaaagaacacccagtgctgctgaacagagctcccacgctacacaggcttggtatacaagcattcgaacccgttctcgtagaaggtaaggcaattcagctacacccactcgtatgtactgcgttcaatgctgactttgatggtgaccaaatggctgtccatttgccactatctactgaagcacaagctgaagcgcgagttttgatgctatctgcccacaatattctttctccagctaatggaaacccacttaccgtcccgacacaagacatgataattggagctttctacctaactgaacatgtagagggcgcaaaaggcgaaggctcagttttcagaagattagatcaagttgagagagctattgaagctggagaagttagccttcatgctcaagtagaatttcggtcacctcgaacccaaatctcaggcggcaatgaagatgaaaaagtaagctacctcgctacgacagcgggaagagtcctatttaaccaggcactacctgaagatttcccatgggtaaacacaaaggtcaccaaacgag

SEQ ID NO: 255331 - DNA, 508 bp, Unknown
  Bacterial polypeptide expressing nucleotide sequence isolated from the Sargasso Sea
cagggaacatcccgtcatgcttaatcgtgcaccaactttgcatagattaggtattcaagcctttgaaccagttctagtagaaggtaaggctattcaacttcacccattagtttgtaaggcatataacgcagactttgacggggatcagatggctgtacatgttcctttaacattggaggcacagcttgaatgtagagctttgatgatggctacaaataatatactctcaccatcaaatggtaagcccatcatcgatccttcacaagatgtagtcctaggcctttattacatgtctagagaaaaaattaatgatctaggtgagggaaggatcatgtcttcaccggatgaggtaaatagagcttattattctggaactgtcggtcttcaggctaagatcaaggttagattaaaacctaataaactagatgacgaaccttctcagatagtagaaacaactactggaagaactcttctctatgaacttttgcctgaaggaatgtcctttgat

SEQ ID NO: 255332 - DNA, 896 bp, Unknown
  Bacterial polypeptide expressing nucleotide sequence isolated from the Sargasso Sea
aggcaaatcaatccaattgcatccattagtatgtactgcatttaacgctgattttgatggtgatcagatggcagtccatgttccattaagtcttgaggctcaattagaagcaagagtattaatgatgagtacaaacaatattttgtcaccttcaagtggtaaaccaatcattgttccttctcaggatatagtattaggtatttattatttatctatacaaagagataatcaaaaaggagaaggtagatcgtttgttgatctttttgaaattttgaaagctttagaaaacaaagatgtcacattgcatacaaaaatatccgcaagaataattaattttgatggaatttatgagaaagttgaaacaactcctggaagaatgatcttaggtaacaatcttccaaaaaacaagaatattaaatttgatatggtaaataagattcttacaaaaaaagaagttagtaacattattgacaccgtgtatagattttgtggtcaaaaagaaacagtactatttgctgatcatataatgcaaactggttttaaatatgcagcaatagcaggaatatcttttggtaaggacgatttaattattcctgatgataagcaaaaattactaaatgatactcagttaaaagtccaggaatacgaaagtcaatatcaggatggtcttataactcaaggcgaaaagtataataaagttgtagatgcttggtcagaatgtacaaataaagtagctgataaaatgcttgaagtaatttcaaccccatcagatgataaacctattaattcagtttatatgatggctcattcaggtgcaaggggttctgctgcccagttaaagcagttatctggtatgaggggtttgatggctaaaacttctggagaattattgaaaa

SEQ ID NO: 255333 - DNA, 823 bp, Unknown
  Bacterial polypeptide expressing nucleotide sequence isolated from the Sargasso Sea
gataaaattaagtcttggtcctatggtgaaataaagaaacccgaaacaattaattacagaacttttagacctgaaaaagatggattattttgttctagaatatttggacctgttaaagattatgaatgtttatgtggaaaatataaaagaatgaaatttagaggaattatttgtgaaaaatgcggtgtagaggtaactaaatctaacgttagaagagagagaatgggccatattgatttagcatgccctgttgctcacatttggtttttgaaatctttacctagtcgaatttctctagcaattgacatgaaattaaaagaggtagagaaagttttatattttgaaagcttcattataattgaaccaggcttaaccactttaaaaaaagggcaattaatttctgaagaagctttagtaaaagcccaagaagaatttggagaggacgctttttcagcaggtattggtgcagaagcggttcgagagatgctggtaaatctagatcttaaaaaggaacaaaaaaaattaagagagtctctttctgagattaaatctaaagtcactgaagaaagaacaatcaagagacttaaattaattgagtcatttttatcatctggcaacaaaccagagtggatgatattaacttctgtacctgtaattccacctgaattaagacctttagttcctttagatggaggaaggtttgctacttctgacctaaacgatctttatagaagagttataaatcgaaacaatagacttaaaagattattagatctcaaagctccagacatcattgttagaaagaaaaaagaatgctccaaga

SEQ ID NO: 255334 - DNA, 699 bp, Unknown
  Bacterial polypeptide expressing nucleotide sequence isolated from the Sargasso Sea
gatggaaactaacaatgttaatcttaaaaattggaaatcattaattaaacctgcaaaaattgatgtcgatcaaaatgatgataaaacatttgcaaaagttattgcggaaccacttgaaaaaggatatgggctaacaataggaaactcattaagaagaatattactttcatcaattagaggtactgctgtaacagcaatacaaattgatggtgtacaacacgaatatagttcaattaaaggtgttagagaagatgtaactgatatagttcttaatattaaatcacttgcattaaaaagtaattttgaaggaaataaaaagttagttttagatgcaaaaggacctggtgaaattactgcatcacaaataacttcggtaccagatattgaaattttaaatcctaatttagttatttgtaacttagatgaaaatactaacttccatatggaactttttgttggtaatggcaaaggttatgtatcagcagaactaaataaaccagaagagcctccactaggtttgataccaatagattctttatttagtcctgtcaaaaaagtgtcttattctgtaagcaccgcaagagagggtaaagctttagactacgataaattaactatggaaatagaaaccaatggatcaattacagctgaagatgcattagcttattctgctagaatttttcaagatcaactaggaat

SEQ ID NO: 255335 - DNA, 884 bp, Unknown
  Bacterial polypeptide expressing nucleotide sequence isolated from the Sargasso Sea
aaaacttgaaataacaagcaatgacgacaaaactattgcaaaagtcatagcagaaccattagaaaaaggatttggtcaaacaattggaaattcactaagaagaattttattatcctcaatacaaggtgctgcagttactgctatccaaattgacggtgttcttcatgaattttcatcaattaaaggtgttagagaagatgtgactgatattgttttaaacgtaaaaaatttagccataaaatcttcttcaacaggtgcaaaaaaaattattttagatataaaaggccctaaagaagtcaaagcaaaagatattacactcgtaccagaggtagagatattaaatccagagcaaactatatgtaatttggatgaaaaaaccaattttcatatggagctaatgattagtaatggaaaaggctatgttccagcaccaaaaaatagatctgaagagagtcctttagggttaatttctatagactcgctatttagtccagttaaaaaagtttcttttaccgtagaaaatactagagcaggtagcgcgctagattatgataaattagttatgactgttgaaactaacggaacagtagccgctgaagatgctatagcttactctgctcgaatttttcaagaccaactttcaatgttcgttaattttgaagatcctcaagaagtcgttaaagaagtaaaatctgcagaaccagagtttaatagaaatttattaaaaagagttgaagagcttgagctttctgtaagatcaatgaattgtcttaaaaatgataatataatttatataggtgatttagttcaaaaaactgaaccagaaatgttaagaacaccaaatttggaagaaaatctcttaatgaaattaaagaagttttaaa

SEQ ID NO: 255336 - DNA, 860 bp, Unknown
  Bacterial polypeptide expressing nucleotide sequence isolated from the Sargasso Sea
ctctgaagcacaaaattttaatagcattaaaattacattggcaagtcctgaaaaaattaaatcatggacttttggtgagataaaaaaacctgagacaattaattatagaacatttagaccagaaaaggatggtctattttgtgcaagaatttttggacctataaaagattatgaatgtttatgtggaaaatacaaaagaatgaaatttagaggaattatttgtgagaaatgtggagtagaagtaacaaaatcaaatgttagaagagaacgaatgggacatataaatttagctactccagtagcacacatatggtttttaaaatccttaccgagtagaatctctttagttgttgatatgaagttaaaggaagtggagcgtgttttatattttgaaaactttattgttattgaaccaggattaactggtttaaaaaaaaaccaattattaaatgaggaagaattaataaaatatcaagatgattatggtgaagaagcatttacagcaggtattggggctgaagcaatactggaaattcttaaatcaataaatttagaagaggaaaaacaaatacttattaaaaacattaaagaaactaagtcaaaagttaatgaagaaagatctataaaaaggctaaaattaatagaatcgtttatagaaactggaaataaacccgaatggatgattttaactacagttcctgtaattccaccagaattaagaccacttgttcctttggatggaggacgttttgctacatcagatttaaatgatttatatagaagagttataaacagaaataacagactaaagagacttattgatttaaaagcacctgatattattgttagaaatgaaaaaa

SEQ ID NO: 255337 - DNA, 745 bp, Unknown
  Bacterial polypeptide expressing nucleotide sequence isolated from the Sargasso Sea
ccattaaaatctttagcagaaatgcttaagggtaaacaaggtcgatttagacaaaatttactaggtaaacgagttgattattcaggtagatctgtaattgtagtaggtcctgacttaaaacttcatgagtgtggtttgccaaaaaaaatggctttggaattatttaaaccatttctgtatgcaagattaaataaattgggattagcttcgacaatcaaacaagctaaaaaattagttgataaggaaacaaacgcagtatgggatgcactagaattaattgttagagaacatccagtaatattaaatagagcaccgactttacatagacttggtgttcaagcatttgaacccaaacttatagaaggggatgccattgaattgcatcctttaacatgcgcagcttttaatgcagattttgatggtgatcaaatggcagttcacataccattaagtttagaagctcaattagaagctcgagttttaatgatgtcaacaaacaatattttaagtccatcaaatggaaaaccaattattgttcctagtcaagatatgattttaggaatttattatttatctcaaccaccataccagacagaaaaagtagaaggatattttgttaataattcagaaattgaacaaggtttagagtcaggtagtataaatgtacactctagaattatatcaagattccaaacagctgataaagatggtaaattgataactgaaaaacacacaagtacagctg

SEQ ID NO: 255338 - DNA, 748 bp, Unknown
  Bacterial polypeptide expressing nucleotide sequence isolated from the Sargasso Sea
agtaagagaggatgtaatagatattctattaaatattaaagacatgccaataaatctaattgaaggagactcggctgaagtaacgttggatgtaaaaggtccttgtgatgtattagcttcatcctttgatgttcctggaaatgtagagcttgttaatcaagattttcatatcgctactattgttgataaggttaatctcaaaatgactttaactgttagaaatggaagaggttatgagccagctgacttgagagaagacgaagatagggtagttggagctcttaaagtagacgcatcatatagtcctgttagaagagtttcttacacagttgataacgcaagatctggaaaaagaactgacttagataaattagttctagagcttgaaactgacggcacattagatccaaagatggcaatagaacactctgcaacaattctgcaacagcagcttggtgcgtttgttgatctagatgcaatagctgaacaagaggctaaaaaagatcaaaatgactttgatccaatcttattaagatcgattgaagagcttgagctaacagtaagatctactaattgtctcaaagcagagagtatttttcttataggcgacctaattcatagatctgagtttgatttattaaaaactccaaatctaggtaagaaatctttaaatgaaattaaagatgttttagcttctaaagatttatcgcttggtatgaatgttgaaaactggcctccagtaggataa

SEQ ID NO: 255339 - DNA, 305 bp, Unknown
  Bacterial polypeptide expressing nucleotide sequence isolated from the Sargasso Sea
aaaacttttagaatctttcatagaaaccggtcaaaaaccagaatggatgattttaacagttgtaccagttattccacctgaattaagacctttagttcctcttgatggaggtagatttgctacatctgatttaaatgacctttatagaagagtgattaacagaaataacagattgaaaagattaatggatcttaaggctccagatataatagtacgaaacgaaaagcgtatgcttcaagagtctgtagatgcattatttgataacggtagaagaggtagagtaattactgggacaggtaacagac

SEQ ID NO: 255340 - DNA, 445 bp, Unknown
  Bacterial polypeptide expressing nucleotide sequence isolated from the Sargasso Sea
atggaaagttcagttatttttgataaaaattggaaatcacttattaaaccttcaaaacttcaggttacaagcaatgatgataaatctttggcgaaggttattgcggaacctttagaaaaaggttttgcccaaacactaggcaattctttgagaagaatattattatcatcaatccaaggagcggctgttacagccatacaaatcgatggagttttacatgaattctcatctataaaaggtgttagagaagatgttacagatatagttttaaatgttaaaaatttggcaattaaacaaggagcagatggaccaaaaaaattaattcttgatgctacaggaccaaaagaagtaaaggcaaaagatataaccctggtttccgatgttgaaataataaatcctgagcaaacaatatgtaatctagatgaaaaaactaagtttcatatgg

SEQ ID NO: 255341 - DNA, 832 bp, Unknown
  Bacterial polypeptide expressing nucleotide sequence isolated from the Sargasso Sea
gcctatctcgttactgaccctgggatgacagatctaaaaagaggccaattaatgtctgaggaagaatatcttgagtctcttgagcaatatggagatgactttacagcagctatgggagctgaagcaatatatgagattttgaaaaaaatagatttgaaagttgtaatggaccaaatccatgatgatatgcaagcaacttcatcacagattaagattaaacgttaccaaaagcgtcttaaattactagaatctctaaagcaatcaggcaatagaccagaatggatgattcttaaggtcctgcctattttgccacctgacttaaggcccttggtacctctcgatggaggacgttttgcaacctcagatttaaatgatctatatagaagagttataaatagaaacaatagacttcaaaggttgctcgatcttaacgctcctgaaattatagttagaaatgaaaaaaggatgctacaaaaatccgttgatgctcttttagataatggaagaatgggacgagctgtaaccggatctaataaaaggcctttaaagtcccttgcagatatgattaaaggaaagcaaggaagattcaggcaaaacctattagggaaaagagttgactactcaggaagatcggtaattgtggtcggccctacattgaaacttcatcagtgtgggattccaaagaaaatggcacttgagttgtttaagccctttgtttttagcaagctaatctatcaaggtgaagcatcaacaataaaatctgctaaaagattagttgaacaagaagggcctgaaatttgggatatattggatgaagttataagacaacatc

SEQ ID NO: 255342 - DNA, 817 bp, Unknown
  Bacterial polypeptide expressing nucleotide sequence isolated from the Sargasso Sea
tgtggaaaatacaaacgattaaaacatagaggcgtggtttgtgagaaatgcggcgtagaggttacacaaagcaaggttagaagagaaagaatgggccatttagagctcgcaagtccagttgcacatatttggtttttgaaatctcttccatcaagaattggactattacttgatatgacattgagggagattgagagagttctttactttgaagcttatcttgttacagatccaggcatgacagatctcacccaaggtcaaatgctatcagaagaacaatatatagaagcattagagatgtatggtgatgatttttctgcagcaatgggtgctgaagcaattcacgatattctcaaagatttagatcttcaggacaacctcaatcaaattcaagaagatatggaagcaactgcatctcagatcaaaatcaaacgatatcaaaagagactgaagcttattgaatcactaatttcttctggaaataggcccgaatggatgattttaaaagttcttcctattttaccacctgacttaagaccactcgttccacttgatggaggaaggtttgctacatcagatttaaatgatctctataggagggtaatcaataggaataatagacttcaaagattattagatcttaatgcaccagatatcattgtaagaaatgaaaagaggatgttgcaaaaatctgttgatgcgcttctagacaatggaaggatggggagagcagttacagggtctaataagagaccacttaagtctcttgcagatatgattaaagggaagcaaggtagatttagacagaatttgttgg

SEQ ID NO: 255343 - DNA, 460 bp, Unknown
  Bacterial polypeptide expressing nucleotide sequence isolated from the Sargasso Sea
aatggaaacagcggaagttaatactaaaaattggaaatcattaattaaaccaccaaagcttgatattcaattaagcgatgataaatcttatgcaaaaattacagctgaacctttagaaaaaggatatggattaacattaggaaattctttaagaagaattcttttatcatcaataagagggactgctgtaacagcaatccaaatagatggagttttgcatgaatttacttcaattaaaggagtaagagaagatgttacagatattgtattaaatattaaatctttagcattaaaaagtaattcagaaactacaagtaaattgattttagatgcaaaaggtcctggtgaaattaaagcatcaaatataacaactacacctgacatagagatattaaacccagacttagttatttgtaacttggatgaaaacacaaattttcatatggaaatgacggtgagt

SEQ ID NO: 255344 - DNA, 407 bp, Unknown
  Bacterial polypeptide expressing nucleotide sequence isolated from the Sargasso Sea
aatgacagataattacgatattattaaagattttttaacaccaactgaaatagtagttgaagaatcaggtcctacaagatcaaagatagtacttgaacctcttgaacaaggtttcggacataccttagggaatgctcttaggagaattatattatcttctatgcctggtacagctgtatcagaggttaaaattgatggtgtacttcacgaatatagcactatagagggtgtgcaagaagatgtgatcgatatcttattaaacttaaaagacctttcagtgagactaactgaagtggaagatgctgaattaactctatcaaaatctggaagtggagttgtaactgcagccgatatagaactatcaacaggagtagaagttatcaatccagatcatcatattgctactt

SEQ ID NO: 255345 - DNA, 913 bp, Unknown
  Bacterial polypeptide expressing nucleotide sequence isolated from the Sargasso Sea
gaatttggtgaagatgctttttcagcaggaattggtgcagaagcagtgagagaaattttggttaacttagatttaaaaaatgaacagaaaaaattaagagaatcattaaaagatatcaaatctaaagtcactgaggagagaactattaaaagattaaagctagttgagtctttcatatcatccggaaacaaaccagagtggatgatattaacttctgtacccgttattcctcctgaactaagaccgctagttccattagatggaggtagatttgctacatcagatttgaacgatttatatagaagggtaattaatagaaataatcgtttaaaaagacttttggatctaaaggctcctgacattatcgtgagaaatgaaaaaagaatgttgcaagagtccgtcgacgctctttttgataacggaagaagaggaagagtaatcacaggaacaggaaaaagaccacttaaatccttagctgaaatgcttaaaggtaaacaagggagatttaggcaaaatcttttaggtaaacgagtggactactcaggtaggtcagtgattgtagtaggcccggagcttaaacttcatcagtgtggtttaccaaaaaaaatggcacttgagttatttaagccatttttatatgcacgactcgataaactaggtttagcaacaacaattaaacaagctaaaaggcttgtagaaaaagaaaaaagcgaagtctgggattcacttgaacatattattagagaacatccgatacttttgaatagagctccaacattacatagacttggggttcaagcttttgaagccaaattaatagaaggaaatgcaatagaacttcatccactggtatgtgctgcttttaatgctgattttgacggagatcaaatggcagttcatattccattaagtt

SEQ ID NO: 255346 - DNA, 874 bp, Unknown
  Bacterial polypeptide expressing nucleotide sequence isolated from the Sargasso Sea
aatggaaacagctgaagtaaatccaaaaaattggaaatcattaattaaaccaccaaagcttgatatacaattaagcgatgataaatcttacgctaaaattatagctgaaccacttgaaaaaggttacggtttaacattaggaaattctttaagacgaattcttctttcatctataagaggtactgcggttacagctttacaaatagatggtgttctccacgaatttacttcaataaaaggagtaagagaagatgtaacagatatcgttttaaatgttaaatcacttgctttgaaaagtaattcagaagtaaatagtaaattagtgttagatgctaatggacctggtgaaattaaggcttcaaatattacaacgactgctgatattgaaattttaaatccagatttagtaatatgtaatttagatgaaaatacaaactttcatatggaaatgacagttaatagcggaaaaggatatgtttctgcagaaatgaacaagccagaagagccacctcttggtttaattccaatagactcattgtttagtcctgtaaaaaaagtttcttattctgttagtacagccagagaaggtaaggcattagattatgataaattgactatggaaattgaaactaatggttctatttctgcggaggatgctgtggcttattctgcaagaattttccaagatcaattaggaatgtttgtaaattttgatgaaccacaggaagttatagttagagagcaaccatcagaacctgaattcaataaaaatttactaagaaaagttgatgaattagagttgtcagtaagatcaatgaattgcttaaaaaatgataatattatttatattggtgatttagtccaaaaaatcaga

SEQ ID NO: 255347 - DNA, 180 bp, Unknown
  Bacterial polypeptide expressing nucleotide sequence isolated from the Sargasso Sea
atatcggtgacttgatccaaagaaccgaggtagagctcttaaagacgcctaacctcggcaaaaagtccctaacagagattaaggacgtgctggctacccgcggcctttctttgggtgtcaagctcgagaattggcccccggcatcacttcagcgcgaaaagcgggacaatctgcactgat

SEQ ID NO: 255348 - DNA, 866 bp, Unknown
  Bacterial polypeptide expressing nucleotide sequence isolated from the Sargasso Sea
aatgaaaaaagaattaacagatctatttaaaaatacggaaatatctgaagctcaaaattttaatagcattaaaatttcactagctagtcctgaaaaaattaaatcatggacttacggtgaaattaaaaaacctgaaacaataaactatagaactttcagaccagaaaaagatggtttgttttgtgcgagaatttttggaccaattaaagattacgaatgtttgtgcggaaaatacaaacgaatgaaatttagaggaattatttgcgaaaaatgtggtgttgaggttacaaaatcaaatgtaagaagagaaagaatgggtcacattaatcttgctacacctgtagcacatatatggtttttaaaatcgctgcctagtagaattgcactagctgtagatatgaagctgaaggaaatagagagagttctttactttgagaatttcatcgtcatagaacctggtttaactggtttacaaaaaaatcaattattaaatgaagaagaattagcaaaatatcaagatgattttggcgaagagtcttttactgcaggcataggtgccgaagcagttcttgaaatgcttaagaatttagatttagagcaagagagaaaaaatttagttaattttattaaagaaacaaaatcaaaagttaatgaggaaagagcaatcaaaaggctaaaacttatagagtcatttattgagactggtcaaaaaccagagtggatgattatgacagttgtacctgtaattccgccagaattaagaccacttgttccattagatggtggtagatttgctacatcagatctgaatgatctttatagaagagtaatcaatagaaataatagattaaaaagattaatggatc

SEQ ID NO: 255349 - DNA, 835 bp, Unknown
  Bacterial polypeptide expressing nucleotide sequence isolated from the Sargasso Sea
gctgaggcaatacttgaaatattaaaatcactaaatttagaggaagagaaaaatatattagttaaaactattaatgagacaaaatccaaggtagcagaggaaagatcaataaaaagattaaaattaatagaatcatttattgaaacaggaaataaacctgaatggatgattttgacagttgttcctgtaatacctccagaactaagacctttggtgcctttggatggtggtagatttgcaacttcagaccttaatgatttatatagaagagtcataaacagaaacaatcgtttaaaaagattaatagatttaaaagctccagatataataatcagaaacgaaaaaagaatgcttcaagagtcagttgatgcactttttgacaatggaagaagaggcagggttatcacaggaacaggaaaaagacctcttaagtctttagcagaaatgttaaaaggtaaacaaggtagatttagacaaaatttattaggcaaaagagtagattattcaggaagatcggtaatagtagttggtcctgatttaaaacttcatgaatgtggacttccaaagaaaatggctttggaattattcaaaccatttttatacgcaagattaaacaaattaggtttagcatctacaattaaacaagcaaaaaaattagttgaaaaagaaagagatgaagtttgggatgcgctagaaattattgttagggagcacccggtaatattaaatagagcacctacgcttcacaggttaggagtacaagcttttgaaccaaaattaatagaaggagatgcaatagaactacatcctttaacatgtgctgcattcaatgctg

SEQ ID NO: 255350 - DNA, 868 bp, Unknown
  Bacterial polypeptide expressing nucleotide sequence isolated from the Sargasso Sea
atgaaagaagttgaaagggtattatattttgagagctttatagttattgaacctggcttgactgaccttaaaaaaaatcaattgttaactgaagacgagcttgcaaaatatcaagaagaacacggcgaagatgctttctcagctggtattggcgctgaagcaatattagagatacttaagtctgtagatttaaaaaaagaaagagaagttttattaaaaaatattaaagaaacaaaatcaaaagttgctgaagagagatcgattaagagacttaaacttatagactcttttattgagacaggtaataagcctgagtggatgatacttacaactattccagttattccacctgaattaagacctttggttcctctagatggtggaagatttgcaacatcagatttaaatgatttgtatagaagagtaataaatagaaataacagattaaaacgattaatggacttaaaagctccagatataataattagaaatgagaaaagaatgctccaagagtcggttgatgcattatttgataatggaagaagaggaagagtaataactggaaccggtaaacgtccattaaaatcactcgcggagatgttaaaaggtaagcaaggtagatttagacaaaatcttttaggtaaacgtgttgattattctggtcgatcagtgattgttgtgggtccagatttgaagcttcatgagtgtggattaccaaaaaaaatggctttagaattattcaaaccttttttatatgcaaggctaaataaacttggcctggcatcaacaattaaacaagctaaaaaactagttgaaaaagaaacaaatgcagtttgggatgcattagaattaattgttagagaacatc

SEQ ID NO: 255351 - DNA, 923 bp, Unknown
  Bacterial polypeptide expressing nucleotide sequence isolated from the Sargasso Sea
gtttggtgaggatgcgtttaccgccggcataggcgccgaagcagtaagagaaatacttgttaatttagaccttaaaaaagagcagaaaaaacttagagagtctttaaatgaaattaaatcaaaagttactgaagaaagaactataaaaagattaaagctaattgagtcttttattaattcaggaaataaacctgaatggatgattttaacatcagttccagtaattccacctgagctaagacctttagttccactagacgggggcagatttgctacttctgatctgaacgatctttacagaagagtaattaacagaaataatcgattaaagagattactagaccttaaggcaccggatatcatagtaagaaatgaaaaaagaatgcttcaagagtcagttgatgcattatttgataacggaagaagagggagagtaattaccggcacaggtaaaaggccactcaaatctttagcagaaatgttgaaaggaaaacaaggaaggtttagacaaaatttattagggaaaagagtagattattcaggaagatcagtcatagtagtaggtcctgaattaaaattgcatcagtgtggtttacctaaaaaaatggcattggagttatttaagccatttttatatgcaagattggataaattaggtcttgcaacaacaattaaacaggcaaagagattagtcgaaaaagaaaaaagtgaagtgtgggactcgttagaacatataattagagaacatccaatacttctaaatagagcaccaactcttcatagattaggagttcaagctttcgaagctaaattaatcgagggtaatgctatagagcttcaccctcttgtttgtgctgcgtttaatgccgattttgatggagaccaaatggcagttcatattcctttaagtttagaagctcaac

SEQ ID NO: 255352 - DNA, 722 bp, Unknown
  Bacterial polypeptide expressing nucleotide sequence isolated from the Sargasso Sea
tttgagccagttctcatagagggcaaggcaattcagcttcacccacttgtttgtactgcgttcaatgctgactttgatggtgatcaaatggcggttcatgtgcctttgtcgcttgaggcccaacttgaagcgcgtgtgcttatgatgtccacaaacaatattttaagcccagcgaacggtaagccaatcatcgttccctcacaagatataatacttggcctttattacatgtcgatggaacgcgataatgaaaaaggtgagggcatgatgttctcgaatgttcaggaaatccttttggctcttgggaatggctcggtaagcctccacgctaaggttaaagctcgtgttccgacccgcgataccgaagatagatcacgagtgatgaaggttatcgacaccaccccgggccgcgcacagcttgcggatttgctacctgacaacccggcatgctcatttgagctcgtgaataaattgatgactaagagagaggtcagtgatgttattgaccacgtttatcgccattgtgggcagaaagacacagtaattttctgtgaccgactcatgggcctcggatttggtcaagcttgcgacgctggtatttcatttggtattgctgatttgacaacgcctgagttgaaaacaaagtatgttaccgaagcggaaacagaggtcaaaactttcgagcagcaatatcttgatggcctaatcactcaaggagaaaa

SEQ ID NO: 255353 - DNA, 750 bp, Unknown
  Bacterial polypeptide expressing nucleotide sequence isolated from the Sargasso Sea
gttaaatagagctccaacccttcatagacttggtattcaagcttttgaacctattctaattgaaggaaaagcaattcagttacatccacttgtgtgtaccgcctttaatgcagattttgatggtgatcagatggctgtccatgtgcctctttcattagaggctcagctagaagcaagagtgctaatgatgtcaactaacaatattcttaatccatcaaacggaaaaccaataattgttccctctcaagatatagttctaggcctatattatatgactatatctcagccaggggaattgggagagggaatggtatttggtgatgttgacgaaatcgagcatgcattggcttcaggggtagtttctttgcatgctaggataaaagctagatttaaaactattaacgaacagggtgattcagttatatcaattgttgaaagtactcctggacgaatgctcttatctgctattttgccaaggcatcctagaatttcatttgaactaataaataagttactaacaaagaaagaggttagtcaggtaattgatgaggtgtatcgtcatacaggtcaaaaagagactgttatgtttgctgataaattaatgtcattaggtttttcacatgctgcaagggcaggaatttcatttggtaaggatgatatgattgttcctgatgctaaagaacgattggttgatgaaactcgtaaattagttaaagaatatgaattgcaatatttagatggattaataac

SEQ ID NO: 255354 - DNA, 838 bp, Unknown
  Bacterial polypeptide expressing nucleotide sequence isolated from the Sargasso Sea
ttagtcccattagatggaggtcgttttgcgacttcagatttaaacgatttatacagaagagttataataagaaacaacagattaaaaagacttgttgagattaaagcccctgaagtgattttaagaaatgagaaaagaatgcttcaagaagcagtagattcattgtttgataatactcgtaaggcctctgctgtcaagaccgattcaaatcgtccgttaaagtctttatctgactctttgaaaggaaaacaaggcaggtttcgtcaaaacctacttgggaaaagagttgattattctgcacgttcagtaatagttgttggaccagaactgaaactttacgagtgtggtataccaaaagatatggctgctgaaatatataaaccatttataatcagaaaactaatagaaagaggaattgttaaaactgttaagtctgcaaagaaaattattgatcgaaaggagcctgttgtatgggatattttggaaaatgtattaaaaggtcatccagtacttcttaaccgagcacctacacttcatagacttggtattcaggcatttcaaccaaaattaatagaaggtaaagcaattcagcttcatccattagtatgtacagcttttaatgctgattttgatggcgatcaaatggctgttcatttacctctaggacctgaagcaatattagaagctcaattacttatgttagcttcgcataatattttaaatcctgcaaatggttctccgataactgttccgtctcaagacatggttttaggtctctattacatgactaaagcaaaaaaatcaactaaaaataacccagtaataggcgagggattaa

SEQ ID NO: 255355 - DNA, 484 bp, Unknown
  Bacterial polypeptide expressing nucleotide sequence isolated from the Sargasso Sea
cttctaaagctcgatgcatcatttagtccaataaaaacagttacatattcagtcgaagctgcaagagtggagaatagaacggatttggataaacttattgttgatctagaaacagacggaactatagatccagaaagagcgataaagtttgccggggcaattcttcaaaatcaactaagtatatttacaaacttgacgagagttcaagagcagaagaaagaggaagagatagttcttattgatccaattatgcttagacctgtagatgagcttgaattgaccgtgcggtctgcaaattgtctaaaagcagaaaatgcaaactatattggtgatcttgttcaaaaaactgaggttgaattacttcgtactcctaatcttggtaagaaatcacttaatgagatcaaggaggttcttgctagccatggactttcacttggaatggaattagaaaactggccaccaaaagaagcagttgtagactaat

SEQ ID NO: 255356 - DNA, 649 bp, Unknown
  Bacterial polypeptide expressing nucleotide sequence isolated from the Sargasso Sea
aggacgatttgcaacttctgatcttaacgatttatacagaagagtaataaatagaaataatagacttaaaagattaatagatcttaaggctccagatataattattagaaatgaaaaaaggatgcttcaagaatctgtagatgcattgtttgacaatggtagaagaggaagggtaataacaggaacaggaaaaagaccacttaaatctcttgctgaaatgttaaaaggtaagcaaggaaggtttagacaaaatctattaggtaaaagagttgattactcaggtaggtcagtaatcgttgttggacctgatcttaaacttcatgaatgtggcttaccaaaaaaaatggctttagagctatttaaaccttttctatatgctagattaaataaattaggattagcttctacaataaagcaagcaaaaaagcttgtagaaaaagaaagaaatgaagtttgggatgctttagaattaattgttagagagcacccagttattttaaatagagcacctacattacatagattaggtgttcaagcatttgaaccaaagcttattgaaggtaatgcaattgaattacacccattaacttgtgcagcttttaatgcagattttgatggagatcaaatggcagttcatgttccattgagt

SEQ ID NO: 255357 - DNA, 901 bp, Unknown
  Bacterial polypeptide expressing nucleotide sequence isolated from the Sargasso Sea
ttaattaaaacaattaatgaaactaaatcaaaagtttctgaggaaagatcaattaaaagattaaaattaattgaatcatttattgaaactggcaataaaccagagtggatgattttaacagtggtccctgtaattccacccgagctaagacctttagttcctcttgatggaggtaggtttgccacttcggatcttaacgatttatatagaagagttattaatagaaataatagattaaaaagactaattgatcttaaagctccagatataattgttagaaatgaaaaaagaatgttgcaggaatcagttgatgctctttttgacaatggaagaagaggaagagtaataactggaactggtaaaagaccacttaaatctctagcagaaatgcttaaaggtaaacaaggaagatttagacaaaaccttttaggtaaaagagttgattattcaggaagatctgtaattgttgtaggaccagatttaaaattgcacgaatgtggtctacccaaaaaaatggctcttgagttatttaaaccttttttatatgcaagacttaacaaattaggattggcatcaacaattaaacaagcaaaaagacttgttgaaaaagaaagagatgaagtttgggatgctttggagcatattgttagagaacatccagtaatacttaatagagctccaacattacatagattaggagttcaagcatttgaaccaaaattgatagagggaaatgctattgaattacatccattaacatgtgctgcgtttaatgcagattttgatggagatcaaatggcagtgcacgttcctttgagtctagaagctcaattagaagcaagagttttaatgatgtcaactaataatattttaagcccatcaaaaatggtaagccaataat

SEQ ID NO: 255358 - DNA, 934 bp, Unknown
  Bacterial polypeptide expressing nucleotide sequence isolated from the Sargasso Sea
tgagccagtagtctataaagttttggaatatgttgtaaaagatcatccagttatgttaaatagagcgcctacgctacataggttgggaattcaggcctttcagcctgtgcttgttgatggtaaggctatacaattacatcctttagtttgttcagcatttaatgcggattttgatggtgatcaaatggctgtccatgttcccctttctttggaggctcaaatggaggcgagaatgctcatgcttgctagtcataatattttgcatcctgcaaatggccagccaattgcagttccgtctcaggatatgattcttggttcatattatctcacaaagctaaaacaaggtgatttaggggaaggaaaaatatttggttcaatagatgaagtgttattagcctatgaaaatagagtagttggactgcattcaaaaattagcttaaagcatgacggttcatgggtaaaagatactactataggtagagcaatttttaattcaattttaccagttgagatggattatgttaatgatttaatagacaaaaaacgtctaacagatatagtaaatcaatgttatctaattgttggtaattataaaactgtaatattccttgataacttaaaagatcttggattcagcatggctacacaaagtggtctttctatatctgtaagtgatgttttgatacctcaagaaaaagatactatcctatctactgcttttgataaggttgaagatataaaaaggaaattcgataggcatgttttaaccgaaggtgaaaggtataacaaggtgattgatgtatggacacatactacaaatcatattgcacaggttatggaagatgatcttaggaaagacaataaaggtttcaatgctctctcaatgatgacagattctggtgcaaggggaagcaaggatcaaataaaacagctc

SEQ ID NO: 255359 - DNA, 925 bp, Unknown
  Bacterial polypeptide expressing nucleotide sequence isolated from the Sargasso Sea
acagaagaagagtatttagatatctgtgatgaattgccatcagataatcagtatttggataatgatgatccaaataagtttattgctgcaatgggtgctgaggctcttgaattgttactaaaaagattagatcttgatgccttgtcttatgaattaagacataaagctaatactgaaacttctcaacaaagaaaagcagaagctcttaaaagacttcaggttgttgaagcatttagatcagcaaataagcatattgaaaatcgtccggaatggatgattattaaggttgttcctgtgattccaccagaattacgtccattggttccattagatggaggtcgatttgcaacatcagatttaaatgatttatatagaagagtaattattagaaataatcgtttaaaacgattaattgaaatcaaagcgcccgaagtgatcttacgtaatgaaaagcgcatgttacaggaggctgtagattcattatttgataattccagaaaagctaatgctgttaaaacagatgcaaatagggctttaaaatctctttctgactctttaaaaggtaagtcgggtcgttttcgtcaaaacttattgggaaaacgtgtagattattcagcacgttctgtaattattgttgggcctacattaaaattacatgagtgtggtttaccaaaaaatatggcggctgaactttacaagccattcatcattcgaaaaatgattgaaagaggtattgtaaaaacagttaagtctgctaagaagatggtagacaagaaagatcctgttgtttgggatattttagaaaatgtacttaaaggtcaccctgtattactaaacagagctcctaccttacaccgtttaggtattcaagcctttcaaccaaaacttattgaaggtaaagctatacaattacatcctttagctt

SEQ ID NO: 255360 - DNA, 844 bp, Unknown
  Bacterial polypeptide expressing nucleotide sequence isolated from the Sargasso Sea
acttttaaatatagatttaaaaaaagaaaaagaaaagttaagagagtcattaaaaagtattaaatcaaaagtaacagaagaaagaactttaaagagattaaaacttatagagtcattcttggattctggaaacaaacctgagtggatgatattgaccacggtacctgtaattcctccagaacttagaccactcgttcctttagatggtggaagatttgctacctcagatctaaatgatttatacagaagagtaataaatagaaataatagattaaaaagactattggatttaaaagctccagatataatagttagaaacgaaaagaggatgctgcaagagtcagtagatgcactgtttgataatggaagaagaggcagagttataactggaacgggtaaacgaccactcaaatctttagcagaaatgctaaaaggcaagcaaggaagatttagacaaaatcttttaggtaagagagtggactattctggaagatctgtaattgtagttggcccggaacttaaacttcatcaatgtggattgccaaaaaaaatggcacttgaattatttaaaccttttttatacgcgagactagataaattaggtttggctacaactattaaacaagcaaaaagaatggttgaaaaacaaaaaccagaagtttgggatgctttggagcatatcattagagaacatccagttcttttaaatcgggcaccaactttacacaggttgggtgtacaggcatttgaagcaaaattaattgaaggtaacgcaattgaattacacccattagtttgtgcagcatttaatgctgattttgatggtgatcaaatggccgtgcat

SEQ ID NO: 255361 - DNA, 847 bp, Unknown
  Bacterial polypeptide expressing nucleotide sequence isolated from the Sargasso Sea
aatggatacaactgaagtaaatattaaaaattggaaatcgctaattaaaccacctaaactagatattaatcttagcgatgacaaatcttatgcaaagataatagcagaacctcttgaaaaaggttatggtttaactttaggaaattcattaagaagaatattactatcatcaataagaggtactgcagtaacagcaattcaaattgatggagttttacacgaatttacatcaattaagggtgttagagaagatgtgactgatattgtattaaatgttaaatcactcgctttaaaaagtaattcagaaactgctaataagctaattttagatgcaaagggacccggtgaaattaaagcttcaaatattacaacttctgcagatattgaaatattaaacccagatttagttatttgtaatttggatgaaaatacaaattttcacatggaaatgacggtgagtaatggaaaagggtatgtttctgcagatatgaacaagcctgaggaaccaccgttaggtctaataccaatagattcactttttagccctgtaaaaaaagtttcatattcaataagtaccgcaagggaaggtaaagctttagattatgataaacttacaatggaagtagagacaaatggatcaatttctgctgaggatgcagtggcttactctgctagaatattccaagatcaacttggaatgtttgttaattttgatgaaccacaagaagttattataagagagcaaccaacagaaccagaatttaataaaaatttattaagaaaagtagatgagttggaattatcagttagatcgatgaactgtcttaaaaatgataacataatctac

SEQ ID NO: 255362 - DNA, 785 bp, Unknown
  Bacterial polypeptide expressing nucleotide sequence isolated from the Sargasso Sea
ctttaagaagattcttctttcatctatgcctggagctgctgtgacagatgtatcaattgatggaatatctcacgaatatagcactatagagggaataagagaggatgtaattaatatattactcaatattaaggatatgccgattaatttaatagaaggcgattctgctgagataacactggatgttacagggccatgtgatgtattggcatcgtcttttgatgttcctggtaacgttgaattggtgaaccaagattttcatgtagctactattgttgacaaagttaatcttaagatgacgcttacagtcaaaactggaagaggttatgagcctgctgatttaagagaggatgaagacattgtggtcggagcactaaaagtagatgcctcatatagtccagtgagaagggtttcgtatacagttgataatgctagatcaggaaaaagaactgacctagataaattagtagttgagcttgaaactgatggaactattgatccaaaaatggcaattgaacactgtgcaacaatcctacaacaacaattaagtgcttttgttgatttagatgcaattgctgagcaagaagctaaaaaagatcaaaatgattttgatccaatcttattaaggtctattgaagaattggaacttacagtaagatcgacgaattgtcttaaggccgagagtattttccttattggtgatttaattcatagatctgaatttgatttacttaaaactcccaacttaggaaagaaatctttaaatgaaataaaagatgttctag

SEQ ID NO: 255363 - DNA, 532 bp, Unknown
  Bacterial polypeptide expressing nucleotide sequence isolated from the Sargasso Sea
tgaagatcagcctattggtcttgtgcctatcgatgccatctatagcccagtccgccgggtatcctttcgcgtcgacaatacccgtgttgggcaggtaacggattatgacaagttgaccattgacgttgaaacggatggtactgtaacaccagatgatgcgattgctctcgctgcccgtattttgcaggaccaattgcggcctttcgtgaactttgaagagcctaccgttccagaggacacagaggtcccggcagaaccggcgtttaatagaaacttattgcgtaaagtagatgagctagagttatctgttcgttcagcaaattgtctaaagaatgataatattatttatatcggtgatcttgtccaaaagtctgaacaagaaatgctccgcacaccaaactttggccgaaaatcactaaatgaaatcaaggaagttttatctcagatgggtctccatcttggtatggatattcttgaatggccacctgaaaatatcgaagagcttgcgaagcggctcgaagaaccttactga

SEQ ID NO: 255364 - DNA, 916 bp, Unknown
  Bacterial polypeptide expressing nucleotide sequence isolated from the Sargasso Sea
tgatgacaaatcttacgcaaaaataatcgctgaacctttagaaaaaggttatggacttactttaggtaattcattaagaagaatacttttgtcctcgattagaggaacagctgtgacagcaattcaaattgatggtgttttgcatgaatttacatcaataaaaggagtaagggaggatgtaactgatattgttttaaatgtaaaatcccttgcattaaaatcaagttcagaaaatgtaaataaattaattttagacgtaaaaggccctggcgagattaaagcttccaacattactacaagtgctgatattgaaattttaaatcccgatcttgtaatttgtaatttagacgagaatacgaattttcatatggagatgactgtaaatagtggtaaaggttacgtatcagccgaaataaataagccagaagaacctcctttaggacttattcctatagactcactttttagccctgtgaaaaaggtttcttactcagtaagtacagctagagaaggaaaagctctagattacgataaactaacaatggaggtagaaacgaatggatctatatccgcagaagacgcagttgcatattctgcaaaaatttttcaagatcaattaggaatgttcgtaaattttgatgaacctcaagaggtaattgttagagatcagccttcagaacctgaatttaataaaaatttattgagaaaagttgatgagttagaattgtctgtaagatccatgaattgtcttaaaaatgataatataatttatattggagatcttgtgcaaaaatctgagggagaaatgctaagaactccaaattttggaagaaaatctttaaatgaaattaaagaggtattaactggaatgtcattatatcttggaatggaaatccccaaactggccaccagacaa

SEQ ID NO: 255365 - DNA, 841 bp, Unknown
  Bacterial polypeptide expressing nucleotide sequence isolated from the Sargasso Sea
aactattaatgagacgaaatctaaagtttctgaagaaaggtctattaaacgattaaagcttatagattcatttattaaaactggcaataaacctgagtggatgatattaactgtaatcccggttataccacctgaattgagaccgttagttcctctagatggaggtagatttgctacttccgatttaaatgatctttatagaagagtaataaataggaataatcgtttaaaaagattaatggatctaaaggctccagacataatagttagaaatgaaaaaagaatgttacaagagtctgttgacgctctttttgataatggaagaagaggtagagtaataactggcacaggtaagagaccattaaaatctttagctgaaatgttaaaaggtaaacaaggtagatttagacaaaatttactaggtaaaagagttgattattctggaaggtcagtaatcgtagttggtcctgatttaaaattacatgaatgtggtttaccaaaaaaaatggcgttagaactatttaaaccttttttatacgcaagattaaataaattaggtttagcatcaactataaaacaagcaaaaaaattggttgagaaagaaactaacgcagtttgggatgcattagaacttattgtaagagaacatcctgttatattaaatagggctccaacattacacagactcggtgttcaagcttttgaacctaaattaatagagggagatgctatcgaattacacccgttaacttgtgcagcttttaacgctgactttgatggtgaccaaatggctgtacatatacctttaagtttagaggcacaacttgaagcaagagtttta

SEQ ID NO: 255366 - DNA, 685 bp, Unknown
  Bacterial polypeptide expressing nucleotide sequence isolated from the Sargasso Sea
tagaattgggcttgctcttgatataacgctcaagaacctagaaaaagttttatattttgaaagccatattgtaattgaccctctaatgtctggtttaagccaaaatcaactactcacagatgaagaattagaggaagccattgatcaatttggtgaagactccttcaagcatggaattggagcagaggctgttcaagaaattctatctaaaattgatttagaagctgaaatagaaacattagttgaggaaagtgaggctacttcatctgaaactaaaaagaaaaaaattttaaaaagaatgaaagttatggaaggctttaaaaactctaacataaaacctgagtggatggttttaaaagtacttcctgttatcccaccagagttgagacctcttgtacctttggagggtgggcgttttgcaacatctgatttaaacgacttgtatcgtagagttattaatagaaataacaggttaaaaagacttttagatttaagagccccagacattattgttagaaatgaaaaaagaatgctccaagagtctgttgacgctctttttgataatggaagaagaggaagagttattacaagtaccaataaaagacctctaaaatctttatctgaaatgttaaaaggtaaacagggtagatttagacaaaatttattaggtaaaagagttgactac

SEQ ID NO: 255367 - DNA, 879 bp, Unknown
  Bacterial polypeptide expressing nucleotide sequence isolated from the Sargasso Sea
tttggttcctttagacggtggaagatttgctacttcagatcttaacgatttatatagaagagtaatcaacagaaataacagattgaaaagactaatggatcttaaagctccagatatcattgtgagaaatgaaaaaagaatgcttcaagagtcggtagatgcactatttgataacggtagaagaggtagagtaattacaggtacaggtaagagaccacttaaatcgcttgcagaaatgctaaaagggaaacaaggtagatttagacagaatcttctaggcaaacgagttgattattctggaagatctgtgatcgttgttggtccagatttgaaacttcatgaatgtggtttaccaaaaaaaatggccttagaattatttaaaccattcttatatgcacgattaaataaactaggcttagcttctacaattaaacaagctaaaaaattagttgaaaaagagactaatgcagtttgggatgctctagaattgatagttagagaacatcctgtacttttaaatagagcgccaacacttcatagacttggagttcaagcatttgagccaaaattaattgaaggtgatgcaattgaattacaccctttaacttgtgcagcatttaacgctgattttgatggtgaccaaatggcggttcatgttccattaagtttagaggcacaactagaagcaagaattttaatgttatctacaaataatattctttctccatcaaatggaaaaccaattatcgttccaagtcaggatatgattttaggaatttattatctatcacaagaacctatttctgataaaccagctggatactttacaaattcagatcaaattgaatttgcattatcatctagccaaataaatgttca

SEQ ID NO: 255368 - DNA, 955 bp, Unknown
  Bacterial polypeptide expressing nucleotide sequence isolated from the Sargasso Sea
ctattctgtgcaagaatttttggacctatcaaagattatgaatgcttatgtggcaaatataagagaatgaagtttagaggaattatatgtgaaaaatgtggtgttgaagttacaaaatcgaacgtaagacgtgaaaggatgggacatattaatcttgcaacaccagtggcacatatttggttccttaaatctttaccaagtagaatttctttagctatagatatgaaactaaaagaagttgaaagagtcctttattttgagaattttatagtcattgaacctggcttaactggtttaaaaaagaaccaattactgtcagaggatgaattaataaaattccaaaacgaatacggggatgaatcttttacagcaggtattggagctgaagctatattagaaatactcaaaaatataaacttggaacaagaaagagaaattcttgtaaaaaatattaacgaaacaaagtctaaagtttcagaagagagatcaataaaaaggttaaaactaattgattcatttattaagacaggaaataaacctgaatggatgattttaacagttatacctgttataccgccagaactaagacccttggtaccattagatggaggtagatttgctacctcagatttaaatgatttatatagaagggtcattaatagaaacaaccgtctaaaaaggttaatggatttaaaagctccagatataattgttagaaatgaaaaaaggatgttgcaagagtccgttgatgcactctttgataacggaagaaggggaagggtaattactggaactggtaaacgtccactaaaatctttagcggaaatgcttaaaggtaaacaaggaagatttagacaaaacctgttaggtaaaagggtagattattcaggaagatcagtaatagtagttggtccagatcttaaacttcatgaatgtggcttgccaaaaaaaaaat

SEQ ID NO: 255369 - DNA, 706 bp, Unknown
  Bacterial polypeptide expressing nucleotide sequence isolated from the Sargasso Sea
atgccaataaatctaattgaaggagactcggctgaagtaacgttggatgtaaaaggtccttgtgatgtattagcttcatcctttgatgttcctggaaatgtagagcttgttaatcaagattttcatatcgctactattgttgataaggttaatctcaaaatgactttaactgttagaaatggaagaggttatgagccagctgacttgagagaagacgaagatagggtagttggagctcttaaagtagacgcatcatatagtcctgttagaagagtttcttacacagttgataacgcaagatctggaaaaagaactgacttagataaattagttctagagcttgaaactgacggcacattagatccaaagatggcaatagaacactctgcaacaattctgcaacagcagcttggtgcgtttgttgatctagatgcaatagctgaacaagaggctaaaaaagatcaaaatgactttgatccaatcttattaagatcgattgaagagcttgagctaacagtaagatctactaattgtctcaaagcagagagtatttttcttataggcgacctaattcatagatctgagtttgatttattaaaaactccaaatctaggtaagaaatctttaaatgaaattaaagatgttttagcttctaaagatttatcgcttggtatgaatgttgaaaactggcctccagtaggataaa

SEQ ID NO: 255370 - DNA, 818 bp, Unknown
  Bacterial polypeptide expressing nucleotide sequence isolated from the Sargasso Sea
tattccagttattccacctgaattaagacctttggttcctttagatggtggaagatttgcaacatcagacttaaatgatttatatagaagagtaataaatagaaataacagattaaaaagattaatggacttaaaagctccagatataataattagaaatgagaaaagaatgctccaagagtcggttgatgcattatttgataatggaagaagaggaagagtaataactggaaccggtaaacgtccattaaaatcactcgcggagatgttaaaaggtaaacaaggtagatttagacaaaatcttttgggtaaacgtgttgattattctggtcgatcagtgattgttgtgggtccagatttgaagctacatgaatgtggattaccaaaaaaaatggctttagaattattcaaaccttttttatatgcaagactaaataaacttggtctggcatcaacaattaaacaagctaaaaaattagttgaaaaagaaactaatgcagtttgggatgcattagaattaattgttagagaacatccaataattctaaaccgtgcacctactttgcatagattaggtgttcaagcatttgagccaaaattgattgaaggcgatgctatagaacttcatcctttaacatgtgcagcgtttaatgcagattttgatggagaccaaatggctgtacatatcccattgagtttagaagcacagctagaggcacgtgtgcttatgatgtcaacaaataatattctcagtccttctaatggaaaaccaattatcgtaccaagtcaggatatgattttgggaatttattatttat

SEQ ID NO: 255371 - DNA, 508 bp, Unknown
  Bacterial polypeptide expressing nucleotide sequence isolated from the Sargasso Sea
atggaaactgcagaagtaaattcaaaaaattggaaatctttaatcaaaccaccaaaacttgatatacaacttagtgatgacaaatcatacgctagaataacagctgagccattagaaaaaggatatggtctaactttaggaaattcattaagaagaatattattatcttcaattagaggaacggctgttacagcattacaaatcgatggtgtattgcatgaatttacttcaataaaaggtgtaagagaagatgtaacagatattgttttaaatgttaaatcacttgctttaaaaagtaatacagagggtaataataaattaattttagatgcaaatggacctggtgaaataaaggcttcaaacatatcaacaactgctgatattgaaattttaaatccagatctagttatatgtaatcttgatgaaaacactaattttcatatggaaatgacagttagtagcggaaaaggatatgtgtcagcagatatgaacaaacccgaagaaccac

SEQ ID NO: 255372 - DNA, 919 bp, Unknown
  Bacterial polypeptide expressing nucleotide sequence isolated from the Sargasso Sea
aatggaagtagaaaatgttaatgtaaaaaattggaaatcattaattaagccatccaaattagatgtgcaaataagtgatgacttgactcatgcaaaaattgtagctgagcctttagaaaaaggttatggattaactttaggaaattctctaagaaggattttgttgtcatctataagaggagctgctgtaacatcaattcaaattgatggagttttacatgaattcacttcaataaaaggtgttagagaggatgttactgatatagttttaaacgtaaaatctttagcattaaaaagtaattctgagggtactaaaaaattaattttagacgcaaaaggacctggagaaattaaagcttcagatatagctccagttgcagacgttgaaattttaaatcctgatttagtaatttgcaatttagatgaaaacactactttccatatggagatgaatgttaatacagggaaaggatacgtacctgcagaattaaataaacctgaggagccaccattaggtcttatcgccattgactcactttatagtccagttaaaaaagtttcatattcagtaagtactgctagggaaggtaaagctttagattatgataaattaattatggaagttgaaactaacggttcaatttctgctgaagatgcagtggcatattcagctagaattttccaggatcagcttaaaatgtttgtaaattttgatgaaccagtcgaagctccagtaaaagaagtttctacagaacctgagtttaacaaaaacttattacgaaaagtggatgagttagagttatctgttagatcaatgaattgcctaaaaaatgataacattatttatattggtgatttggggttcaaatctgaaggtgaaatgctgagaacacctaattttggaagaaatcacttaatg

SEQ ID NO: 255373 - DNA, 885 bp, Unknown
  Bacterial polypeptide expressing nucleotide sequence isolated from the Sargasso Sea
gatgattttaactacaataccagtaatcccccctgagttaagaccattagtaccattagatggaggtagatttgccacttctgatttaaatgatttatatagaagagttataaatagaaataatcgtttaaaaagattaatggaccttaaagctccagatatcattgtaagaaatgaaaagagaatgcttcaagagtctgtagatgcattatttgacaatggtagaagaggaagagtaatcactggaactggtaaaagacctctaaaatctttagcagaaatgttgaaaggaaaacaaggaagatttagacaaaatttattaggtaaaagagttgattattctggaagatcagtgatcgtagttggaccagatttaaagttacacgaatgtggtttgcctaaaaaaatggctttagaattatttaaaccatttttgtatgcaagattaaataaacttggattagcttctacaatcaagcaagctaaaaaactagttgaaagagagagaaatgaagtttgggatgctttagaattaattgttagagagcatccagttatattaaatagagctccaacattacatagattaggtgttcaagcttttgaaccaaaattaattgagggtaatgcaattgaattacatccactaacttgtgctgcattcaatgcagattttgatggtgatcaaatggcagtgcacgtgccattaagtttagaggcacaattagaagcaagagttttaatgatgtctacaaataatattttaagcccatcaaatggaaaacctataattgttcccagtcaggatatgattttaggtatatattatctttctcaaccaccatatcaaactgatagagttgaaggatattttgtaatacttca

SEQ ID NO: 255374 - DNA, 520 bp, Unknown
  Bacterial polypeptide expressing nucleotide sequence isolated from the Sargasso Sea
gcttgatatagatgatgagataagaattattagagaagaaatcccacaaacaaattcagaaacaaaactaaagaaattttcaaagagattaaaactattagaagcttttaacaattctggaaataagcctgaatggatgataatgaatgttcttccagttttaccaccagatttaagacctttagtacccttagaaggtggaagatttgcaacctctgatctcaatgatctttatagaagagttattaacagaaataatagattaaaaagattactggaacttaatgctccagaaattattgttagaaatgaaaaaagaatgcttcaagagtcagttgacgcgctattggataatggacgaagaggaagagttataacaggtacaaataaaagacctttaaaatctcttgctgacatgatcaaaggcaaaggtggaagatttagacaaaacttacttggaaaaagagttgattactctggaagatctgtaattgttgctggccctaatttgaaattacat

SEQ ID NO: 255375 - DNA, 804 bp, Unknown
  Bacterial polypeptide expressing nucleotide sequence isolated from the Sargasso Sea
aattaaaagattaaaattaatagaatcatttattgaaacaggtcaaaaacctgagtggatgattatgactgttgtaccagttataccaccagaattaagaccattagttcctcttgatggtggaagatttgctacttcagatcttaacgatttatacagaagagtaattaacagaaataatagattaaaaagattaatggatcttaaagctccagatatcattgtaagaaatgaaaaaagaatgcttcaggagtctgtagatgctctatttgataacggtagaagaggcagggtaataacaggaacaggtaagcgaccacttaaatctcttgctgaaatgttaaaaggtaaacaaggaagatttagacaaaatttattaggtaaaagagttgattattctggaagatcagtaatcgttgtcggtcctgatttaaaattgcatgagtgtggtttaccgaaaaaaatggctcttgaattgtttaaaccatttttatatgcaagattaaataaattaggcttagcttcaacaattaaacaagctaaaaaattagttgaaaaagagacaaatgcagtttgggacgctttagaattaatagttagagagcatccggtacttttaaatagggcaccaacacttcataggctcggagttcaagcgtttgagccaaaattaattgaaggggatgcaattgaattacatcctttaacttgtgctgcatttaacgctgacttcgatggtgaccaaatggcagtgcacgtgccattgagtttagaagcacaattggaagcaagaattttaatgtt

SEQ ID NO: 255376 - DNA, 625 bp, Unknown
  Bacterial polypeptide expressing nucleotide sequence isolated from the Sargasso Sea
ctcggtgaccgccagcgatctgcagttctcctcccaggtgtcggttgtcaacgccgaccgtcccatcgccaccgtggccgatggccatgccctggaactcgaagtccatgtggagcgtggcgtgggctaccgccccgtcgagcgcaccagcgaagacgctgccgccctggatttgctccaaatcgacgcggtgttcatgcccgtgcgtcgcgtgaacttcacagtggatgaaactgctgtgggtgaaggcggctcagcccgtgagcgtctgcgcctggagatcaacaccaacggttcgatcacccccgatgacgccctggcttatgcggccaaccagctgatcgccctgttccagcctctggccaccgtgaccctggccgaagagcccggtcaggagcctgagcccagcgctgagagccagatccccctggaggagctcaacctctcagtgcgggcttacaactgcctcaagcgtgcccaggtcaactccgtttcggatctgatgggcttcagctacgaggatctgctggagatcaaaaacttcggtgccaagtcggcggatgaagtaatcgaagcgcttgagcgcatcggcatctccttgccccagagccgcaccaccgcctga

SEQ ID NO: 255377 - DNA, 844 bp, Unknown
  Bacterial polypeptide expressing nucleotide sequence isolated from the Sargasso Sea
gaaacaataaactatagaacatttaagcccgaacgtgacggtcttttttgtgctaaaatatttggaccagtaagggattatgaatgtttatgcggtaaatataaaagaatgaagtaccgcggaattatttgtgaaaagtgtggtgttgaggtaactctatctaaagtaagaagagaaagaatgggtcatattgatttagctgcacctgtcgcacacatttggtttttaaagtcattaccatcaagaataggtctgttggttgatatgacacttaaagatcttgaaaaagtgctttattttgaaaactttcttgttaccgaacctggtttgacttctttaaataaaggacaacttcttagtgaggaagattatgagagttctcttgacgaatttggtgatgaaagttttgaggtctctattggtgcagaagcaattaaaaaaattctaattgatatgaatcttgatgaagaagtagtcaaaattcgagaggaattaattaaaactggttcagagatcaaaagaaaaaaattagttaaaagactcaaactagttgaatcttttttgcaatcaggtgcaaaacctgaatggatgattctagatgtggttcctgtgattccaccagaactaagacctctagttcctcttgatggaggtaggttcgcaacctcggatttaaatgatttatatagaagagttattaatcgtaataatcgacttaaaaggttaatagaattgagggctcctgatattattatccgcaatgaaaaaagaatgttgcaagaatccgttgatgctttattcgataatggtagaagaggccgtgtaataaccggggtaaataaaa

SEQ ID NO: 255378 - DNA, 796 bp, Unknown
  Bacterial polypeptide expressing nucleotide sequence isolated from the Sargasso Sea
tttgaaagttttattgttatagagcccggtcttacagagttaaaaaaaggacaattgctcacagaggatgaatatgccaaagctctagaaaaatacggcgaagatggatttacagcgggtattggagcagaagcagtaagagaaatattattaagtatagatttagagtctgagaaaaaaaaattaagagactctttaaaagatattaaatcaaaagttaccgaagaaagaactttaaaaagattaaaattaatagagtcatttattgagtcaggcaacaaacctgaatggatgattttaacaacagttccagttataccgccagaactcagaccgttagtacctctagacggcggaaggtttgcgacatcagatttaaatgatctttatagaagagtaataaatagaaataacagattgaaaagacttttagatttaaaagcaccagatatcatagttagaaacgaaaagagaatgttacaagaatctgtagatgctttatttgataacggaagaagaggcagagttattactggaacaggtaaaagaccattaaaatctttagcagaaatgttaaaaggtaagcagggcaggtttagacaaaatcttttaggtaaaagagttgattattcaggaagatcagtaatcgtagttggccctgaattgaaactgcatcaatgcggcttaccaaaaaaaatggctttagaattatttaaacctttcttatatgcaagattagacaagttaggatttgctacaacaataaaacaggcaaaaagaatggttgaaaaacaaa

SEQ ID NO: 255379 - DNA, 898 bp, Unknown
  Bacterial polypeptide expressing nucleotide sequence isolated from the Sargasso Sea
atgcagactacaagtaacgttatagataaaaattggaaagctttaattaaacctaataaattagatattacaagtaatgatgataaaacgattgcaaaagttattgcagaaccactggaaaaaggatttggccaaactataggaaattcacttagaagaattttgctctcttcaatacaaggtgctgctgtgacagctatccaaattgacggtgtgttacacgaattctcatcaattaaaggagttagagaagatgttactgatattgttttaaatgtgaaaaatttagctatcaaatcttcttcgtcatcttcaaaaaaaattattttagatattaagggtccaaaagaggtaaaagcaaaagatattactttagttccagaaatagaaattcttaatcccgaacaaactatttgtaacttagatgaaaaaacccattttcacatggagcttatggtaagtactggtaaaggttatgttcaagctcctaaaaataagtctgaagatagtccattaggactaatttcaattgattcactatttagtccagtaaaaaaagtttctttttcagttgaaaatactagagcaggtagcgcattggattatgataaattaataatgaccgtagagactaatggaactgttgatgcagaggatgccatagcgtattcagctagaatatttcaagatcaattatctatgtttgtcaattttgaagatcctcaagaggtgattaaagaggttaaatcagctgaaccggaatttaatagaaacttgttaaaaagagttgaagagcttgaattatcggttagatcgatgaattgtttgaaaaatgataatataatttatattggagatttagttcaaaaaactgagccagaaatgttaagaacaccaa

SEQ ID NO: 255380 - DNA, 580 bp, Unknown
  Bacterial polypeptide expressing nucleotide sequence isolated from the Sargasso Sea
cttgaaagaggttttggtttaacacttggaaatgctctaagaagagttcttttgtcatctcttcaaggcacatcagtcactgctgttcagattgatggtgttttacatgagttttcatcggttccgggagttagggaagatgttacagaaatagttttaaatattaaacaaatagctctaagaatgcatggagaaggacccaaaaaagctcgacttcacgctacgggtcctggtcaagttactgctcgccaaattgaacttgggcacgatattgaggttatgaaccccaatcatgtaatatgtactttagatgaaggttcaagtatttcaatggagttaactattcaaaatggaaaaggttatgttgctgcagaaagagatagttctgaagaccaaccaattggccttattcctgtagatgcagtttatagtcctgtaagaaaggtttcatataaagttgacaatactagagaaggtaaaaaacttgattatgataaactaaccctaagtattttaactaatggtgctctaacgcctgaagacgcaatagcttttgctgctcgaattcttcacagagcga

SEQ ID NO: 255381 - DNA, 607 bp, Unknown
  Bacterial polypeptide expressing nucleotide sequence isolated from the Sargasso Sea
tatgatcaaagacttcttaactcccaaagaaattttggtagaagaagttgattcaaacaattcaaaaatagtgttagaacctcttgaaagaggctttggacataccttgggaaatgctcttagaaggataattttatcttcaatccccggcgcggcggtttctgaagcaaaaataaatggggttcttcatgagtttggctctattgatggagttaaagaggatgtcattaatattcttttaaatctaaaagatctttccgtaagactttcagatcaagaggaagtcgaaatatcagtgaataaatcaggatcaggagatatcaaaggtagtgattttgaacttcctgctggagttgagattgtcaatcctgatcacgtagttgctactctcgctgacaaaggctcccttgagatgacagcaaaagttacaaagggtagaggttatgttcctgtagacatcatcgctttggccgagagcgaagatactgaggtcggctcactaaagattgatgcttcatacagtccaattaaaaaagtttcttattcagttgaaaatggcagggtagaaaatagaactgacctagacaagcttattcttgaggtttga

SEQ ID NO: 255382 - DNA, 232 bp, Unknown
  Bacterial polypeptide expressing nucleotide sequence isolated from the Sargasso Sea
atgtcagctacaacaaatattatagataaaaactggaaagcactaatcaaacctaataaattagacataaatagtaacgatgataaaactgttgctaaagtagttgcagaacctttagaaaaaggttttggtcaaacaattggaaactctttaagaagaatattactatcttcaattcaaggagcagcagtgactgcaatccaaattgatggggtcctacatgaatttcatc

SEQ ID NO: 255383 - DNA, 530 bp, Unknown
  Bacterial polypeptide expressing nucleotide sequence isolated from the Sargasso Sea
acaaaatcttttagggaaaagagttgattactctgccagatcagttattgttgtaggtcctgagctgaaactatatgagtgtggtttaccaaaagatatggcagcggaattatacaagccttttattattagaaagcttattgaaaggggaatagttaaaacagttaagtctgcaaaaaaaataattgacagaagagaaccagttgtgtgggatatattagagaatgttcttaagggtcacccggtcttacttaatagagctcctactttgcatagattaggaattcaagcattccagccaaagcttatagagggaaaagctatccaattacaccccttaacatgtacagcattcaatgctgattttgatggtgatcaaatggccgttcatctcccgttgggtccagaggctattttagaagcacaacttttaatgcttggctctcacaatattcttaaccctgctaatggctcaccaattactggttcatctcaagatatggttttaggtctttattatatgacaaaat

SEQ ID NO: 255384 - DNA, 898 bp, Unknown
  Bacterial polypeptide expressing nucleotide sequence isolated from the Sargasso Sea
atgaaaaaagaattaacagacctgtttaaaaattcagaaatttctgaagcacaaaattttaatagcatcaaaatatctttagctagtcctgaaaagattaaatcatggacttacggtgaaattaaaaaacccgaaacaataaattatagaacttttagacctgaaaaagatggtcttttttgcgctagaatttttggtccaataaaagattacgaatgtttatgtggaaaatataaacgaatgaaatttagaggtattatatgtgaaaaatgtggtgttgaagtaacaaaatcaaatgttcgaagagaaagaatgggtcatataaatttagcaacaccagtagcacatatttggtttttaaaatcattacctagcagaatagctcttgctgtagatatgaaactaaaagaagtagagagagtattgtattttgaaaactttattgtaattgaacctggtttaactggcttacaaaaaaatcagattttgagtgaagaagaactaaataaatatcaggatgaatatggcgaagaatcgtttactgctggtattggagctgaagctgttctagaaatgcttaaaaatcttgacttagaattagaaagaaaaaatttagcaagttatattaaagagactaaatcaaaagttaatgaggaaagagcaataaaaagactaaaattaattgaatcttttattgagactggacaaaaaccagagtggatgattatgactgttgttccagtaatcccacctgaattacgaccattagtccctcttgatggtggtagatttgctacatctgatttaaatgatctttatagaagagttattaatagaaataatcgtttaaagagattaatggatcttaaagctccagaatattattttagaaagaaaa

SEQ ID NO: 255385 - DNA, 415 bp, Unknown
  Bacterial polypeptide expressing nucleotide sequence isolated from the Sargasso Sea
gcaagagttgaacaaagaactaacttagatagacttacagtagatattgatacagatggcactctggatgcggaagaaatcttaagaatttccgcaacaatacttcagcaccagctatctgctttcgctgaattaggtagattagaagaggttattgaagaaaaggaagaggctaagattgatccaattatgttaagaccagttgatgaattagagttaactgtaaggtcggcaaactgcctaaaagcagagaatattcattacataggtgatttggttaccagaatggaatctgacttattaagaacaccgaatttaggtaaaaaatcactaaatgaaattaaagaagttttactatcaagaggtttatctttaggtctaatattggaaaattggccacctgaaacaaattaaa

SEQ ID NO: 255386 - DNA, 916 bp, Unknown
  Bacterial polypeptide expressing nucleotide sequence isolated from the Sargasso Sea
gatcgaatgggccatatagaacttgctgctcctgtttcccatatttggtttatgaaatctttaccaagtagaatagcaacattgctagatatgacaattaagaatttagaaaaggtactttattttgaacaatttatagttgttgaaccagggctaacagatttaacaaaaggtcaaataatttctgaagatcaatacatagactatcaagatcaacacggagaagattcatttagtgcatcaataggagcagaggctatagagcagatgcttcaaaatattgatcttcaaagtgattacgatcaattaaaacaagatttgcttgatacaaaatcagaattaaaaaaagctaaaataactaaaagattaaaattaatagaacattttatatcatctaaaaataaacctgagtggatgattttaagagttttacctgttatacctccagaattacgacctctagttcctctggatggaggtagatttgctaccagcgatttgaatgatttgtatagaagagtaattaatcgcaataatagacttaaaagattaatcgatttacgtgcacctgatattattattagaaatgaaaaaagaatgcttcaagaatctgttgacgctctatttgataatggacgtagaggcagaataataacttctactaataaaagacctcttaaatctttatcagatatgcttaaaggaaaacagggcagatttagacaaaacttattaggtaaaagagtagattattctggaagatctgtaatcgttgtcggtcctaatttaaagttgcatcaatgcggtttgccaaaaaaaatggctttagaattgtttaaaccttttatttttcataaactagagatttatggatgggccaatactataaaggctgcaaaaaaattagtgaaaaaga

SEQ ID NO: 255387 - DNA, 843 bp, Unknown
  Bacterial polypeptide expressing nucleotide sequence isolated from the Sargasso Sea
ggtagatttagacaaaatttacttggtaaaagagtagattattcaggaagatcagtaatagtagccggacccgaactaaaattgcaccaatgcggccttccaaaaaaaatggcagttgaactttttaaaccctttttatatgccagattagataagttaggacttgcaacaactattaaacaagcaaaaagaatggttgaaaaagaaaaaagtgaagtttgggatgctttggaaacaataattagagaacatcctgttattttaaacagagctccaactttgcacagacttggagttcaagcttttgaagcaaaattaatagaaggaaatgctattgaattacatccacttgtatgtgctgcatttaatgctgatttcgatggagatcagatggccgttcatattccattaagtttagaagctcaattggaagctcgagtgttaatgatgtctactaacaacatattaagtccttcaaatggaaaaccaataatagttcctagtcaagatatggttttaggaatatattatttatctcaatctctagataacggaaaaaaagatgatacaaaaggatattttagtaatgtctctgaggtagaacaggctatagaatcaaagagtataagcattcattcaaaaataatttgtagatttgagactgtagatgacaaaaataataaaataaccgaaaaatataaaactacagctggcaggttcattttatcaagtgttttgcccaaacatcataaaataaaattttctctaatcgatagattgttatcaaaaaaagatgtttctgaaattatcgatattgtttatcgtttctgtgggcaaaaaaga

SEQ ID NO: 255388 - DNA, 879 bp, Unknown
  Bacterial polypeptide expressing nucleotide sequence isolated from the Sargasso Sea
ccaagtagaatttcgttagttgtagacatgaagcttaaagatgttgagagagtattatattttgagaattttattgttattgagccaggtcttactggacttaaaaaaaaccaacttctaggtgaagaggagttaatcaaataccaagatgagtacggtgaagaatcttttacagcaggtataggagctgaagctgttcttgaaattttaaaatcaattaatttagaagatgaaaaaaatttattgatgaaaaccataaaagaaacaaaatcaaaagtttcagaggaaagatcaataaaaagattaaaactaatagaatcatttattgaaactggaaataaacctgaatggatgattttaactactatacctgtaatacctcccgaactaagacctttagttcctttggatggaggacgttttgctacttcagatcttaatgatttatatcgaagagtgataaatagaaataatagacttaaaagattaatggatcttaaagctccagacattatagttagaaatgaaaaaagaatgcttcaagaatctgttgatgcattatttgataatggaagaagaggcagagtaataacaggtactggaaaaagacccctcaagtctcttgcagaaatgttaaaaggtaagcaaggaagatttagacagaacttattaggtaaaagggtagattattcaggtagatcagtcatagttgttggaccggatcttaagcttcatgaatgtggtttgccaaaaaaaatggctttagagttattcaaaccattcttatatgcaagattaaataaattaggcttagcatcaacaataaaacaagccaaaaaacttgttgagaaagaaagaaatgaagtatgggatgcttag

SEQ ID NO: 255389 - DNA, 943 bp, Unknown
  Bacterial polypeptide expressing nucleotide sequence isolated from the Sargasso Sea
ttttggaccagttaaggattacgagtgtttatgtggtaaatataaaaggatgaaatttagaggaataatatgtgaaaaatgtggggtagaagttacaaaatcgaacgtaagaagagaaagaatgggacatatagatcttgcgtgtcctgttgcacatatatggtttttaaaatctttacctagcagaatttctttggccatagatatgaaactcaaagaggtagaaaaggtattgtattttgagagttttattgtgattgaaccaggtttaacgactttaaaaaaaggccaactaattaatgaagaagaccttttaaaagcccaagaagaatttggagaagacgctttttctgctggaataggagccgaagcagtaagagaaatattagttaatttagatcttaaacaagaacagaaaaaattgagagactctcttagtgaaattaaatcaaaagttactgaagagagaactataaaaagattaaaacttatagagtcttttataaattcaggaaacaaaccagaatggatgatattaacttctgttcctgttataccgcctgagcttagacctctagtcccacttgatggaggaagatttgcaacatctgatcttaatgatttatacagaagagtaattaatagaaataatagattaaaaagattactcgatttaaaagcgccagacattattgttagaaatgaaaaacgaatgttacaagagtctgttgatgcactttttgataacggtagaagaggaagagtaattacaggtacaggcaaaagacctttaaaatctcttgcagaaatgctcaaaggtaagcagggaagatttagacaaaatttattaggaaaaagagtagattattctggaagatctgtaattgttgttggcccagaattaaaattgcatcaatgtggtcttcctaaaaaatggctctag

SEQ ID NO: 255390 - DNA, 852 bp, Unknown
  Bacterial polypeptide expressing nucleotide sequence isolated from the Sargasso Sea
aggacagttacttagcgaagaagctttaagtaaggctcaagaagaatttggtgaagacgcctttactgctggtataggggctgaagcagtaagagatattttattaagtctagatttagcaaaagaacaaaaaaaattaagggatgccttaaaagaaattaaatctaaagtaacagaagagagaacaattaaaagattaaaacttgtagagtcatttatttcttcagaaaataaacctgaatggatgattttaacaactgttcctgtcatacctccagaacttagacctttagttccacttgatggtggtagatttgcaacgtcagatttaaatgacctttacaggagagtaataaatagaaacaacagattaaaaagattgttagatcttaaagcgccagacataattattagaaatgaaaaaagaatgctccaagaatcagtcgatgcactttttgacaatggaagaagaggaagagtaattacaggaacaggcaaaagaccacttaaatctttggcagaaatgttaaaaggaaaacaaggaagatttagacaaaatttattagggaaaagagtagactactcaggacgatcagtgatcgtagtaggtccagaacttaagctgcatcaatgtggtttaccaaaaaaaatggctttggagctttttaaaccttttttgtatgcaagattagacaaactaggtttagctacaactattaaacaagctaaaagattggttgaaaaagaaaaaagcgaagtttgggatgctttagagcatataattagagaacacccagtaattttgaacagagcgcctactttacatagattaggagtccaagcttttgaggc

SEQ ID NO: 255391 - DNA, 885 bp, Unknown
  Bacterial polypeptide expressing nucleotide sequence isolated from the Sargasso Sea
aatcttaaagtagccgaagaaagatcaattaaaagactcaaattaatagagtcattcatagaaacaggcaacaagcctgaatggatgatactaactgttattccagtaattccaccagagcttagacctttagttccactagatggtggtagatttgctacttcagatcttaatgacctatatagaagagttataaatagaaataatcgtttaaagaggttaattgatttaaaagcaccagatataattgtacgtaatgaaaaaaggatgctccaggagtcagttgacgctctatttgacaacggtcgaagaggaagagtaataacaggaactggcaaaagacctcttaaatcattagctgaaatgctaaaaggtaaacaaggtagatttagacaaaatttattaggcaaaagagttgattactcaggaagatctgtaattgtagtgggtccagatttaaaattgcatgagtgtggcttgccaaaaaaaatggcattagagttattcaaaccatttctatatgctagattaaataagttaggtcttgcttccacaattaaacaagcaaaaaaattagttgaaaaggaaagagacgaagtttgggacgctctagaaataattgttagagaacatcctgtaattttaaatagagctccaactcttcatagattaggtgttcaagcatttgagcccaagttaattgagggagatgcaattgaactacatccattaacatgcgcagcattcaatgcagatttcgatggggatcaaatggcagtacatatacctctaagtttagaggctcaactagaagctagagtattaatgatgtcaacaaacaatattttaagtccttcgaatggaaaaccaattattgtacccagt

SEQ ID NO: 255392 - DNA, 796 bp, Unknown
  Bacterial polypeptide expressing nucleotide sequence isolated from the Sargasso Sea
gcgtagagagaggatggggcatattaatctagcaacgccagttgctcatatctggttcctaaaatctttacctagtagaatttcattagcaattgatatgaaactaaaagaagtagagagagttttgtattttgaaaatttcatagttatagaacctggcttaacaggattaaaaaagaatcaattattaggtgaagaagaattaattaaatatcaagacgattacggtgaagaagcatttacagcaggaattggagcagaagctatattagaaatattaaaatctataaatctagaagaagaaagagatgcgttaattaaaagtattaaagaaacgaaatcaaaagtatctgaagagcgatctataaagagacttaaattaatagagtcattcattgaaactggaaacaaacctgagtggatgatactgacaactgtaccagtaatacctccagaattaagaccactagtacctttagatggtggtaggtttgctacttctgatttaaatgatttatacagaagagtcattaatagaaacaaccgtttaaaaagacttattgaccttaaagcaccagatataatagtccgaaatgaaaaaagaatgcttcaggagtcagtggacgcactttttgacaatggtagaagaggaagagtaataaccggtaccagcaaaagacctcttaaatctttagctgaaatgctaaaaggaaaacaagggagatttagacaaaatttacttggtaaaagagtagattactcaggtagatctgtaattgtcgttggacctgatcta

SEQ ID NO: 255393 - DNA, 724 bp, Unknown
  Bacterial polypeptide expressing nucleotide sequence isolated from the Sargasso Sea
aaatctttgccaagtagaattgcattagcagttgatatgaaattaaaagatattgaaaaagtattatattttgaaaattttattgtcatagaacctggattgacaggattaaaaaaaaatcaacttttaaatgaagaagatttagcaaaatatcaggatgaatttggtgaagaggccttttctacaggcattggtgctgaagcagttttggaaatgctcaaaaatttggatttagaggcagaaagaaaaaatttagttaattacataaaagaaacaaaatcaaaagttaatgaagaaagagcaattaaaagattaaaattaattgagtcatttattgaaactggtcaaaaacctgaatggatgattatgacagttgttcctgttattccacctgaactgagacctttagtaccattagatggaggtagatttgctacatctgaccttaacgatttgtacagaagagtaataaatagaaacaatcgtcttaaaagattaatggatcttaaggcaccagatataatcgtaagaaatgaaaaaagaatgcttcaagagtctgttgacgcattatttgataacggtagaagaggtagagtcattactggaactggaaaaagacctttgaaatctttagcagaaatgcttaaaggaaaacaaggaagatttagacaaaatttattaggaaaacgtgttgattactcaggtagatcagtaatagttgttg

SEQ ID NO: 255394 - DNA, 914 bp, Unknown
  Bacterial polypeptide expressing nucleotide sequence isolated from the Sargasso Sea
actggggcttaaaaaaaaccaacttcttaatgaggaagaattaataaaatatcaagatgaatttggagaagagtctttcacagctggaattggtgctgaagcaattttagacatactaaaatcaataaatctagaagaggaaaaaaatttattaatccaaacaattaaagaaacaaaatctaaagtatcagaggaaagatcaattaaaagattaaaacttatagagtcgtttttagagactggaaataaacctgaatggatgattttaacaactatacctgttattccacctgaactacgacctcttgttcctttggatggaggcagatttgcaacatcagatttaaacgatctttatagaagagtaataaatagaaataacagattaaaaagattaatggatctgaaagcaccagacataatagtaagaaatgaaaaaagaatgctacaggaatcggtagatgctttgtttgacaatggaagaagaggaagagtgataactggaacaggaaaaaggccgttaaaatcacttgcagaaatgctcaaaggaaaacaggggcgttttagacaaaatttattaggaaaacgtgttgattattcaggccgttctgtaattgttgttggaccagatcttaaacttcatgaatgcggtttacctaaaaaaatggcattggaattatttaaaccatttttatacgcaagattgaataagttaggattagcatcaacaattaaacaggctaagaaattagttgaaaaagagagaaacgaagtatgggatgctttagaattaattgtaagagaacatcctgtaattttaaatagagcacctactttacacagattgggagttcaagctttcgaacctaaacttatagaaggaaatgctatagaattacatccattaacatgtg

SEQ ID NO: 255395 - DNA, 598 bp, Unknown
  Bacterial polypeptide expressing nucleotide sequence isolated from the Sargasso Sea
aatgacaaacagcaacttaagaactgaaaatcactttgattacgtcaaaatttcaatagcttctccacaaagaataatggattggggtcagaggacattgcccaatggacaaatagttggtgaagttacgaaacccgaaactatcaattacaggacacttaaaccagaaatggatggattgttttgtgaaaaaatttttggaccatctaaagattgggaatgccattgcggaaagtacaaaagggtaagacatcgcggtattgtttgtgagagatgtggggttgaagtaactgaaagtagagtcagaagacataggatgggctacataaaactcgctgcgccagtttctcatgtttggtatttgaaaggaatccctagttatgttgcaatacttttggatattccgcttagggatgtagaacaaattgtctattttaattgttatgttgttttagatccgggagatcataaagaacttaaatacaagcaattactcactgaggatgagtggctggaaattgaagatgaaatatacgcagaagattcaactatagaaaacgaaccttttgtaggaattggtgctgaggcacttaagcaa

SEQ ID NO: 255396 - DNA, 919 bp, Unknown
  Bacterial polypeptide expressing nucleotide sequence isolated from the Sargasso Sea
atgggccatatagagctagcttcaccggtagcacatatatggtttctaaaatctctaccgtctcgaataggccttatgttggatatgacattaagagatttagagaggatactttactttgagcagtatgttgtagttgagtcaggtctgacagatcttgctactggacagcttttaacagaagaagaatatttagatgctcaagatcagtatggttcagatgcctttactgctggtattggtgcagaagcaattagatcaatgctaggcagcattaaccttccagaagaggtagataagctaagagaagagttagcagaagccacaggagagctgaaggtaaagaaaataattaagagacttaagttgcttgagagctttaaggacagtaagaatcgtcctgaatggatgatattaactgttgtgcctgttatccccccggaattaagacctttagtacctttggatggtggtaggtttgccacatcggatttaaacgacttgtataggcgagttattaatagaaacaatagacttaagcgtctaatggagttgcgggctccggatattataattcgaaatgagaagcgaatgcttcaggaatcggttgatgcattgttcgataatgggagaagaggcagggtgatcactggcggcaataaaagacccctgaaatctttgtcagatatgttgaaaggaaagcaaggtcgctttaggcagaatttgttggggaaaagagtggatttttctggtagatctgtaattgttacaggccctgagcttaaattacatcaatgtggcttgccgaaaaaaatggcattagagctatttaaaccctttatttattctcggttggaagcaaaaggcttatcttccacagtgaagcaagcaaagaaattggtagaaaaagaaaggcctg

SEQ ID NO: 255397 - DNA, 757 bp, Unknown
  Bacterial polypeptide expressing nucleotide sequence isolated from the Sargasso Sea
cgtattggtttactgctggatatgacgctcaaagaactggagaggatcttatatttcgaaagttttgtcgttttagatgaaggatttacttcattaaatcgcaggcaactgttgtccgaggacgaatacttcgatgctatggatgagtttggcgaagacacgtttaaggcgtctattggggcagaagcacttaaggaaatgctcagcgaactcgacttagagcaagaggtagtagaaatacgggagggtctccgcacaacgggttcggagatgaaaagaaagaaatacgtcaaaagattaaaactaatcgaagcctttatagagtccggttgtcgaccagaatggatgatcttagatgtcgtgcctgtgattccaccagagctacgtcctctcgttcccttggacggaggtcggtttgcaacttctgacctaaacgatctatacagacgtgtaatcaatagaaacaataggctgaagcgtcttattgagttgagagcccctgatataatagtcaggaatgaaaaacgtatgctccaagaatcggttgacgcattatttgataatgggcgacgcggacgagtaatcaccggggcaaataagcgcccattgaaatctctctctgatatgctgaagggtaaacaaggtaggttcaggcaaaatttacttggcaagcgagtagactactcgggacgatcggtaatagttgtggggccggagttgagactccatcaatgtggcttgcctaaaaaaatggcct

SEQ ID NO: 255398 - DNA, 370 bp, Unknown
  Bacterial polypeptide expressing nucleotide sequence isolated from the Sargasso Sea
cctgaagaggctatccgtcgtgccgcgaccatcctgcagcagcagctggccgcgttcgtcgacctcaaaggtgacagtgagccagtggtggtcgagcaggaagacgagatcgatccgatcctgctgcgtcctgtcgatgacctggaactgaccgtacgttcggccaactgcctcaaggcagagaacatctactacatcggtgatctgattcagcgcaccgaagtagagctgctcaaaaccccgaacctgggcaagaaatccctgaccgaaatcaaggatgttctggcttctcgcggtctgtccctcggtatgcgcctcgacaactggccgccggcaagtctgaagaaagacgataaggccactgcctgat

SEQ ID NO: 255399 - DNA, 807 bp, Unknown
  Bacterial polypeptide expressing nucleotide sequence isolated from the Sargasso Sea
gtttggtgaggaagctttttctgctggaataggagctgaggcagttttagagatgctaaagaaccttgatttagaattagagaagaaaaatttagttagttacattaaagagacaaaatcaaaagttaatgaagaaagagcaattaaaaggctaaaactaatagaatcttttatagatacaggtcaaaaacctgagtggatgataatgacagttgtccctgtaattccgcctgaactaagacctttagtccctttggatggtggtagatttgcgacttcagatttaaacgatttatatagaagagttatcaatagaaataatcgtttaaaaagattaatggatctaaaagctccagacatcatcgtcagaaatgaaaaaagaatgttacaagaatctgttgatgcattatttgataatggtcgaagaggaagagtgatcactggtactggtaagagaccattaaaatctttagcagaaatgttaaaaggtaagcaaggtagatttagacaaaatcttttaggtaagcgtgtagattattctggaagatctgtaattgttgttggaccagatttaaagttgcacgagtgtggattaccaaaaaaaatggcgttagaattatttaaaccattcttatatgccagattaaataaacttggattagcctcaacaattaaacaagcgaaaaaacttgttgaaaaagagactaatgctgtatgggatgctttagaattaattgtgagagaacatccagttttattgaatagagcttcaacacttcatagattaggtgtacaagcttttgaaca

SEQ ID NO: 255400 - DNA, 931 bp, Unknown
  Bacterial polypeptide expressing nucleotide sequence isolated from the Sargasso Sea
tttctgtatgcaaggttggataaattaggtttagcaacaactataaaacaagcaaaaagactggttgaaaaagaaaaaagcgaggtatgggactcactagaacatattattagagagcatcctatacttttgaatcgtgcaccaactcttcacagacttggtgttcaggcttttgaggcaaaattaatagagggaaatgctattgagcttcaccctttagtgtgtgctgcatttaatgcagattttgatggtgatcaaatggctgtgcatattcccttaagtttagaagcacaattagaagcaagagtattaatgatgtctacgaataatattttaagtccatctaacggaaaaccaattattgttcccagtcaggatattgtattaggtatttactatctatcacaagcagaagataatgaaaaaaaacctaaaggtattttttcgagtattgaggaaattgaacaagctcttgaaaataaatcaattagcttacattcaaagattgtgtctatttttaaaacattagataaagatggtaagccaataactgaaaaatatactagtacagcaggaagattcttattagcaaacgtgcttccaaaaaataacaatataaaatttgctttaataaataaattactaacaaaaaaaaatgtttcggaagtaatagatactatctttagatattgcggacaaaaagaaacagtaattttctgtgatagaattaaaactctaggatttaaacacgctttcaaagcaggaatttcatttggaaaggatgatttaataattccaaaaacaaaagaaaatttaattagcagtacaaaaaaacaaattgaagaatacgaaaaacagtactcagatggtctaattactcgtggcgaaaaatataataaagtagttgatatttggtcaaaatgtactgata

SEQ ID NO: 255401 - DNA, 723 bp, Unknown
  Bacterial polypeptide expressing nucleotide sequence isolated from the Sargasso Sea
taagagacccttaaaatctttagctgaaatgttgaaaggaaagcaaggaagatttagacaaaacttacttggaaagagagtagattactctggaagatcagtaatagttgttggtccagaacttaaactacaccaatgtggtctaccgaaaaaaatggctttagagctttttaaaccttttttatacgcaagattagataagttaggtttagccacaacaattaaacaagctaaaagattagtagaaaaagagaagagtgaagtttgggatgctttagaacatattatccgagagcatccagttcttttaaatcgagctccaactctacacagattaggagttcaagcttttgaagctaaattgatagagggcaatgctatagaacttcaccctctagtttgtgcagctttcaacgccgactttgatggagatcaaatggctgtgcatatccctttaagtttagaggcgcagttagaagcaagagttcttatgatgtctacaaataatatattaagtccttcaaatggaaagccaatcatagtacctagtcaagatatagtacttggtatttattatttatcacaagcttcgaaatcagaaaaaccaaaaggaatattttcaaacattgacgaaattgaacaagctttagaaaataaatcaataagtcttcatactaaaataatttcaatatttgaaactgttgatcaaaacaataaagaaat

SEQ ID NO: 255402 - DNA, 756 bp, Unknown
  Bacterial polypeptide expressing nucleotide sequence isolated from the Sargasso Sea
tagagggagtaagagaggatgtgattgatatacttctaaatattaaggatatgccaattaatttaatcgaaggtgactcggctgaggtaacattggatataaaaggtccatgtgatgtactggcttcatcttttgatgtgcctggaaatgttgagcttgttaatcaagattttcatattgctactatagttgataaagtcagtctcaaaatgactctaactgtaagaaacggaagagggtatgaaccagctgatttaagagaagatgaggacagagtagttggagctttaaaggttgatgcttcatttagtcctgtaagaagagtttcctatacagtagataatgcaagatcaggaaaaagaactgatttagataagttagtacttgaattagaaactgatggaactttggatccaaaaatggcaatagaacactcagctacaatattacaacaacagcttggcgcatttgttgacttagatgctatcgctgaacaagaagccaaaaaggatcaaaatgattttgatccaatactgcttagatcaatagaagaactcgaattaacagtaagatctacgaattgtttaaaagctgaaagtatttttctcattggtgatcttattcatagatctgagtttgatttattgaagactccaaacttgggaaaaaaatctttaaatgaaattaaagatgttttagcttctaaggaactctctcttggtatgaatgttgaaaattggccacctgtaggataag

SEQ ID NO: 255403 - DNA, 673 bp, Unknown
  Bacterial polypeptide expressing nucleotide sequence isolated from the Sargasso Sea
tttgaaacagactcagaaactgaaattatgaatcctgaccagttaattatgacacttgattcaaatgctgatgttgaaattgaagctaacgttgaaacaggtaaaggttatgtgtcggctgaagttgctgaagatgaaaacaaagttataggagaaataaaactagacgctatgtttagtccaattataaaagctacttacaaagttgaaaacagtagagtaggtcaggtaacagactttgataaattagttttagaagtagaaacaaatggtgctattactcctgatgatgcaatagctttggcagcaagaattttacaggatcaactacagccatttatcaattttgatgaacctgaaacgcaacctgatcaatctaaagttgaagccctttcttttaattctaatttacttaaaaaagtcgaagagcttgaattatcagttagatcagcaaactgtttaaaaaacgataatataatatacataggagatctagttcaaaaatctgagtccgaaatgctaagaacccccaactttggtagaaaatctcttaatgaaataaaggaagttcttcaacaaatggaacttaaccttggtatgtctgtacctgattggccacctgaaaatatagatgagttagcaaagaaatacgaagatccctttaacaaataaa

SEQ ID NO: 255404 - DNA, 942 bp, Unknown
  Bacterial polypeptide expressing nucleotide sequence isolated from the Sargasso Sea
gaaaaattcgcattgattgaagaagatgaatatcttgattatgaggagcagttcggatatatggcagtctctgaagaagacagagataatgaaaattatttttatgccatcatgggcggcgaagcgatgaaagaaatgttgtcaagattgagcattgtagatttgaaaaatgaattaattgatattgtaaaaacatcaaaatcaaaacaaaagcgtggtgatgctttaaagcgattaaaagtagtccagtcttttgtcgcagacccaacaaaaaaacgcattaataaacccgaatggatgattgtttccattttgccagttattcctccagagcttcgtccattggttcccctagaagggggaaggtttgccgcatcagatttaaatgatttgtatagacgcattatcattaggaataatcgtttgaaacagctgatggagattaaagctcctgatgtgattcttagaaatgagaaaaggatgctgcaggaagcagttgatgcgctttttgataataataggcgtaaaactgctattagaagtggttcgcgaagacctttgaagtcactttctgatatgctaagaggaaaaacaggacgttttcgacaaaatttactcggtaaacgtgtcgattattctgggcgttcggtaatagtagttgggccgcaactgcaactacatgaatgtgggatgcctaaaaatatggcattagaactttttaagccgcatatgattcatgaacttatggcgagggggtatacacaaacgccgagaagtgcaaaattaatggtagagaatcaggagccggttgtatataaggttcttgaatacgttgtgcaagatcatcctgtattgttgaatcgagctccaaccttacacaggttaggaatacaggcattccaacctgtccttgttgatggtaaagcgatacaacttcatcct

SEQ ID NO: 255405 - DNA, 925 bp, Unknown
  Bacterial polypeptide expressing nucleotide sequence isolated from the Sargasso Sea
ttactaaatagagcgccaaccttacatagattgggggtacaagcatttgaagcgaaattaatagaaggaaatgcaatagaacttcaccctttagtttgtgctgcatttaacgctgattttgacggtgatcaaatggcagtgcatataccgttgagtctagaggctcaacttgaggctagagttctgatgatgtccacaaacaacatactcagcccgtctaacggaaaaccaattatagtgcctagccaagatatagttttgggaatttattatttatcccaatcttcaaaatcagataagccgaaaggaatattctcaaacatagatgaaattgagcaagctttagaaaacaaatcaataagtttgcacacaaaaataatttcaatatttcaaactgttgataaagacaataacattgttaaacaaaagtacgcaagcacagctggaagatttttactagctaatttactacctaaaaattacaatataaaatttaccttaattgataagttattaacaaaaaaaaatgtttcggaagtaattgacactattttcagatattgcggacagaaagagaccgtgatcttttgtgatagaattaaaacattaggttttaaacatgctttcaaggcaggtatttcatttggaaaagacgatttaataattcctaagactaaagaaaatttaataaatgacacaaagaaaaaaatagaagaatatgaaaaacaatattcagatggtcttataactagaggtgaaaaatataataaagtagttgatatttggtcaaaatgcacagacacagtcgctaatgagatgatgaaagaaatttcatctgcagaaaaagtttatgaaaatgataggatagaaacaaattctgtatatatgatggcagactctggagctagagttcccaagcgcaaag

SEQ ID NO: 255406 - DNA, 913 bp, Unknown
  Bacterial polypeptide expressing nucleotide sequence isolated from the Sargasso Sea
ggtggaagatttgctacctcagatcttaatgatctataccgaagagtaataaatagaaataacaggcttaaaagattaatggatctaaaagctccagacataattgtaagaaatgagaaaagaatgttacaagagtctgtcgatgcattatttgataatggaagaagaggaagagttataactgggactggtaaaagaccattaaaatctcttgctgaaatgttaaaaggaaagcagggtagatttagacagaatttactaggtaaaagagtagactattcaggaagatcagtaatcgttgttggaccagatttgaaattacatgaatgtggattaccaaaaaaaatggcattagaattatttaaaccttttttatacgcaagattaaataaattaggtttagcatcaactattaaacaagctaaaaaattagtggaaaaagagacaaatgcagtttgggacgcacttgaattaattgttagagaacatcctatcctcttgaatagagctccaacacttcatagattgggagtccaagcctttgagccaaaattgattgagggagatgcaatagaattgcatccattgacctgtgcagctttcaatgctgatttcgatggagatcaaatggcagttcatattccattaagcttagaagcacaattagaagcaagagttttaatgatgtctactaataatattttaagtccatcaaatggtaagccaataattgttccaagtcaggatatgatattaggtatttactatttatctcaacctccatatcaaacagataaagtcgaaggatattttgtaaataattcagaaatagaacaaggtttggagtctgggagtataaatgtgcattcaagaattatatcaagatttgaaactgtagatgaaaccaggtaaa

SEQ ID NO: 255407 - DNA, 868 bp, Unknown
  Bacterial polypeptide expressing nucleotide sequence isolated from the Sargasso Sea
gcaagaatttttggacctataaaagattatgaatgtttatgtggaaaatataaacggatgaaatttagaggaataatttgtgaaaaatgtggtgttgaagtaactaaatcaaatgttagacgagagagaatgggccatatcaatctagcaactcctgttgctcatatttggttcctaaaatcactaccaagcaggatttctttgacaatagatatgaagcttaaggaagttgaaagagtattatattttgaaaactttatagtcattgagccaggattaacaaatttaaaaaaacatcaattattaaacgaagaagagttaattaaatatcaagatgagtatggagaagaggccttcacagcaggcattggagctgaagccattcttgaaattttaaaatctttaaatttagaagatgagagaaatttgctaattaaaacaataaatgaaacaaaatcaaaagttgcggaagaaagatctattaaaagattaaaacttatagaatctttcattgaaacaggcaacaaacctgaatggatgattttaacagtaatacctgttattcctcctgagctaagaccattggttcctttagacggtggtaggtttgcaacatcagatttgaacgatctatatagaagagttataaatagaaacaatcgtctaaaaagattgatggatttaaaagcacccgacattattgttaggaatgaaaagagaatgcttcaagaatctgttgatgcactttttgataatggcagaagaggtagagtaataacaggaacaggtaaaagaccacttaagtctcttgctgaaatgttaaaaggtaaacaaggaagattcagacaaaatttattaggtaaaagag

SEQ ID NO: 255408 - DNA, 691 bp, Unknown
  Bacterial polypeptide expressing nucleotide sequence isolated from the Sargasso Sea
ccatctaaagattgggaatgtcattgtggaaagtacaaaagggtaagacatcgcggcattgtttgtgagagatgtggggttgaagtaactgaaagtagagtcagaagacataggatgggctatataaaactcgctgcgccagtatcccatgtttggtatttgaaaggaatccctagttatgttgcaattcttttggatattccgcttagggatgtagagcaaatagtttattttaattgttatgttgttttagatccaggggatcataaagaacttaaatataagcaattactcactgaggatgagtggctggaaattgaagatgaaatttatgctgaagattcaactatagaaaatgagccttttgttggaattggtgctgaggcactgaagcaattactggaggaccttgatttaaatcaggttgctgaggagctgagagaagaaattactaatagcaaagggcaaaagagagcaaagctcataaagaggataagagttattgataatttcattgcaacaaatgcaaaaccagaatggatggttttagatgcaataccagttatacctccagatctaagacctatggttcagcttgatggaggaagatttgcaacttcagatttaaatgacttatatagaagagtcataaatagaaataatagactggctaggctccaagaaattttag

SEQ ID NO: 255409 - DNA, 925 bp, Unknown
  Bacterial polypeptide expressing nucleotide sequence isolated from the Sargasso Sea
ttaaaccaaaattgggtcgacatatcaactatatcgtcgacacatgcgaagattagtatcgagccattagagagaggttttgggcatacattaggtaatgccctcaggagagtcctactttcctctttacctggaagtgctgtaactgaggttacaatagagaatattcttcacgaatacagtactattgaaggtgtacaagaggatgtactagaaatacttttaaacataaaaaaattagcattagtactaccaagtaaggatacgcttgatatcactctaagaaaaaaaggtcttggaccagttttagcatctgatatatcggataatccagatctagaaattaagaatcctaacttttgcctagcaaatatcactaacgacaaaactgaacttgttataaatatgactgtaacaaaagggagaggatatcaacaagcccaaaaaagaaaatttaatgaattagatgacttgggtataggtaagatgcagctagatgcctcttttagtcctgtggtgctggtaacttacaatgtggagacagcgagagtaaaacaaagaactgacctagataagcttgttatagatttaaaaacaaatgcaactattgaacctgaagatgctattagaaaagctggccaactcctcagaaatcaacttgacgtatttacatacttagaagtccatgaagaaactgaagaggaatcagatacaccacagattgatccagttttattaagaccagttgatgacttggaacttactgtaaggtcggctaattgtcttaaagctgaaaacatatactatattggtgatttagttcagagaagtgaaaatgaactccttaaaacaccaaatctaggaaaaaaatcacttactgagattaaagatgtacttgctactcacagtttacaactaggccaaa

SEQ ID NO: 255410 - DNA, 601 bp, Unknown
  Bacterial polypeptide expressing nucleotide sequence isolated from the Sargasso Sea
aatgactgataattacgatattattaaagattttttaacaccaactgaaatagtagttgaagaattgggtcctacaagatctaagatagtacttgaacctcttgaacaaggttttggacataccttagggaatgctcttagaagaatcatattatcttctatgcctggaacggctgtatcagaagttaaaattgatggtgtgcttcatgaatatagcactatagaaggtgtgcaagaagatgtgatcgatatcttattaaaccttaaagacctttcagtgagactagtcgaagtagaagatgctgaactaacgctatcaaaatcaggaagtggagttgtaactgcatccgatatagaactatcaacaggagtagaagtcatcaatccagatcatcatattgctactctaaatgaagaaggctccataaatatgacaatgaaagtaacaagaggcagaggttttgtgcctgttcgacctcttgatgaagatgaaggtcaagaaactggacttctaagattagatgcaacttattctcctattaaaagagtgacatatcaagtagacaatgcgagggttgagcaaagaactaatttagataga

SEQ ID NO: 255411 - DNA, 821 bp, Unknown
  Bacterial polypeptide expressing nucleotide sequence isolated from the Sargasso Sea
cctgtttcacatatttgggttttttaaagccacgccgagtcggatgggattaattcttggaatgactatgcgtgatttagaacgtgttttgtattatgataatcatatcgtaattgatagcggaaatactcctcttaaggaaaaacaattattatctgaagaggaatatcgtgaagctattgaccaatttggatacgattcatttactgcaatgattggtgctgcaggcataagagagttattatcaaaaataaacccatcagaaatgcttaaagagcttgaagaagctatgatgaatactagatctaaacaaacccgtcaaaagatagtgaatcaaatgaaagtaatggaaggtttcctaaaaaatggatcgagacccgagtggatgattctagaggtcctaccagttattcctcccaatcttcgccccttagtacctctagaaggaggacggtttgctacctcagatttaaatgatttgtatcggagagtaataaatagaaataatcgtttaagaactttattagctttaaagacacccgaagttattattcgcaatgaaaagaggatgctgcaacaatcagtagacgcattatttgataatggtcgacatggacgagcagttactggaccaggtaatcggccattgaaatctttgagtgatatgctaaagggtaagcaaggccgttttagacaaaatcttttaggtaaaagagtagattattcaggtcgttcagtaattgttgttgggccaacattaaaattaaatcaatgtggtcttcctaaaaaaatggctttgattttatttgagccctttatta

SEQ ID NO: 255412 - DNA, 622 bp, Unknown
  Bacterial polypeptide expressing nucleotide sequence isolated from the Sargasso Sea
atggaagtcgaaaatgttaatgtaaaaaactggaagtcgttaattaagccgtctaaacttgacgttcaaattagtgatgacttaacacatgcaaagattgtagcagaaccactggaaaaaggttatggattaactttaggaaattctttaagaagaattttattatcatcaataagaggtgctgctgtaacttctattcaaattgatggcgttttacatgagttcacttcaataaaaggtgtaagagaagacgttacagatattgttttaaacgttaaatctttagcattaaaaagtaactcagatggtacaaaaaaattaattttagatgcaaaaggacctggagaaattaaagcttcggatatagctccagttgcagatgttgaaattttaaatcctgacttagttatttgtaatctagatgagaataccacttttcatatggaaatgaatgttaatacaggtaaaggttacgttcctgctgaattaaataaacctgaagaaccaccattagggcttatcgctatagattcactttatagtccagttaaaaaagtttcatactcagtgagtactgctagagaaggtaaagcattagattatgataagttaattatggaag

SEQ ID NO: 255413 - DNA, 895 bp, Unknown
  Bacterial polypeptide expressing nucleotide sequence isolated from the Sargasso Sea
aaattagatttaaaagcagaaagagaaaaattaagattgctattaaaagatattaaatcaaaagtttctgaagaaagagctataaagagattaaaactaattgagtcttttattcattctggaaataaaccagaatggatgattttaacatgtattcctgttatacctcctgaacttagaccactagttccactagacggaggtagatttgctacatctgatttaaatgatttatatcgaagggtaattaatagaaataatagattaaaaaggttaatagacttaaaagctccagatattattgtaagaaatgaaaaaagaatgctacaggagtcggttgatgctttatttgataatggaagaagaggtagagtaattactggtactggtaagcgtccattaaaatcattagctgaaatgctaaaaggaaaacaaggtagatttagacaaaatttattaggtaaaagagttgattattcaggaagatctgtaattgtggctgggccagaactaaaattacatcaatgtggattgccaaaaaagatggctgtagaactttttaaaccttttttatatgcaagattagataaacttggtttggctacaacaattaaacaagctaaaaaaatggttgagaaagaaaagccagaggtttgggattcattagaaacaataattagagagcatcctgttatattaaatagggcaccaactttacacagacttggagtgcaagcttttgaagcaaaattaattgagggtagtgcaatcgaattgcaccctttggtatgttccgcttttaatgcagattttgacggagatcaaatggcagttcatatacctttaagtttagaatctcaaattgaagcaagagttcttatgatgtcaacataat

SEQ ID NO: 255414 - DNA, 605 bp, Unknown
  Bacterial polypeptide expressing nucleotide sequence isolated from the Sargasso Sea
tcaaatagatggtgtgttacatgaatttagctcaattaaaggtgtaagagaggatgttacagatattgttctaaacattaaatcactagcccttaagagtcactcagaaggtacaaaaaagcttattcttgatgcaaaaggtccaggagaaattaaagcgtcaaatatcgcaccagttagtgacatagaaatattaaatcctgatctcgtaatatgtaacttagatgataatacgaattttcatatggaaatgaatgtaaacacaggtaaaggatatgtctcggcggatttaaataaacctgaggatccacctctaggattaatcccaatagattctttatatagtccagtaaaaagagtttcgtattcagtgagtacagctagagaaggaaaagccttagattatgataaattaattatggaagttgagacaaatggttcaatttcagcggaggatgcagttgcttatgcagcaagaatttttcaagatcaattaggaatgtttgttaattttgacgagccacaagaggtaattgtcagagataaaccaactgaacctgaatttaataaaaatttattgagaaaagttgatgaattagaattat

SEQ ID NO: 255415 - DNA, 879 bp, Unknown
  Bacterial polypeptide expressing nucleotide sequence isolated from the Sargasso Sea
ggtgaggtcaccaaaccggagaccattaactaccgcaccctgaagcccgagatggacgggctgttctgcgaaaagatttttgggccttccaaagactgggagtgccactgcggcaagtacaagcgggtgcgtcaccgcggcatcgtctgtgaacggtgcggtgttgaggtcaccgagagtcgtgtgcggcgtcaccgcatgggcttcatcaagctggcggccccggtctcccacgtctggtacctgaagggcattcctagctacgtggcgatcctgctggatatgccgctgagggatgttgagcagatcgtttacttcaactgttatgtggtgctggatcccggcgatcacaaagacctcaagtacaagcagctgctcaccgaggacgagtggctggagatcgaagacgagatctacgccgaggagtctgaaatcgagaacgagcccgtggtgggcatcggtgccgaggcactcaagcagttgttggaagatctgacgctggacgaggtggctgaacagctgcgggaagagatcaacggcagcaaggggcagaagcgggccaagctcatcaagcgcctgcgggtgatcgataacttcattgccaccagtgcccgtcccgagtggatggtgctggatgtgatccccgtgattccccccgatctgcgcccgatggtgcagctcgacggtggacgtttcgccaccagtgatctcaacgatctctaccggcgggtgatcaaccgcaacaaccggctggcaaggctgcaagaaattctcgcccccgagatcatcgtccgcaacgagaagcggatgctgcaggaggccgtcgatgcgctgatcgacaacggccgacgggccgcacggtggtgggcgccaacaacc

SEQ ID NO: 255416 - DNA, 727 bp, Unknown
  Bacterial polypeptide expressing nucleotide sequence isolated from the Sargasso Sea
catggaaattacaagtaatgatgacaagtcagttgcaaaagtaattgcagaacctttagagaaaggatttggacaaactattggaaatgctctcagaagaatacttttatcttcaattcaaggcgctgcagtaacagcaattcagattgatggtgtacttcacgaattctcttcgatacaaggtgttagggaagacgttactgacatagttcttaatgttaaaaacctagcaattaaatcatcttcttctggatcaaaaaaaattatactagacattaaggggccaaaagaagttaaagcgagtgacattacattagttccagatattgagattttaaatcctgacttaacgatttgtaatttagatgaaaaaactcattttcatatggaattaattattaatacaggtaaagggtatgttccagcgccaaaaaataagtcagaagacagtccactaggtcttatctcgatagactcactttttagtccagtgaaaaaagtttctttctcaattgagaatactagagcaggaagcgctttggattatgataaattggtaatgacagttgaaactaacggtacagtagctgcagaagatgctgttgcttactcagcaagaatatttcaggatcaactatctatgtttgtaaattttgaagatcctaaagaaactataaaagagacaaaaagtgtagagccagagtttaacaaaaatttactaaaaaga

SEQ ID NO: 255417 - DNA, 839 bp, Unknown
  Bacterial polypeptide expressing nucleotide sequence isolated from the Sargasso Sea
aaatatattaaaaggccatcctgtattattaaacagagccccaactcttcacagattgggtattcaagcttttcaacccaaacttattgaaggaaaagcaattcgtctacatcctttagttacaactgcatttaatgccgattttgatggtgaccagatggctgttcatcttccacttggaaatgcagcaatattagaggctcaaatgcttatgttggcttcacacaatattttgaatccagcaaatggagctcctatttctgtaccttctcaggatatggttttgggattgtattacttaacaaaaggaagaaagtctaccaaagaaaaagtaatcaaaggtgaaggaagtatattttattctccagaagaagttatcattgcttacaatgaaaagcaattagatcttcatgctcacattaaagttaaggtcaaagatttagatgaaaacaatgagtttgtcaccaaattaattgagacaacttgtggtagggtaatttttagtcaatatgtgcctgaagaggctggatttataaatacagaccttactaaaaaagcattaagagacatcataggtcacgttcttaagctttctgggacttctactactgctaagtttcttgatgatattaaaacgcttggatataatatggcatttaaaggtggattgtcctttaatttagatgatgtcattattccattagaaaaagacaagcttgttaataaagctgatgctgatgttaaagaagttatggcaaattataacatgggtcttataactaataatgaacgttacaatcaaattattgacatatggactcatacaaattctagatgac

SEQ ID NO: 255418 - DNA, 688 bp, Unknown
  Bacterial polypeptide expressing nucleotide sequence isolated from the Sargasso Sea
tatggaaactaataacgttaatattaaaaattggaagtcattaattaaaccagcaaaaatagatattgatcaaaacgatgataaaacatttgctaaagttatagctgaacctcttgaaaaaggttatggcttaacaattggtaattcattaagaagaattttactttcctctattagaggaacagcggtcactgctattcaaatagatggagttcaacatgagtacagctctatcaaaggtgttagggaagatgttacagatatagttcttaatgttaaatcattagctctaaaaagtaacttggaagggaataaaaaactaattttagacgccaaaggacctggggaaattaaagcttcacaaattactcccgtatctgatattgtaatattaaaccctgatttagtaatctgtaatctcgatgaaaatacaaattttcatatggagttatttgtaggaaatggcaaaggatatgtttctgcagaattaaataaacccgaagaacctccgcttgggctaataccaatagattcattatttagtcctgtaaaaaaagtttcttattcagtaagtacagccagagaaggaaaagctcttgattatgataaattaataatggagatagaaactaatggatccataacagctgaagatgccttagcttactctgctagaatttttcaagat

SEQ ID NO: 255419 - DNA, 871 bp, Unknown
  Bacterial polypeptide expressing nucleotide sequence isolated from the Sargasso Sea
aaccctgaacgcgatgggctattctgtgcccgtatttttgggcctattaaggattacgaatgcctgtgcggtaaatacaaacgcatgaaatatcgcgggataatttgcgagaagtgcggggtcgaggtcaccctttccaaagttaggcgtgaacgtatggcccatattgagctggcgtcaccagtcgctcatatctggttcttaaaatcattgccgagtcgaattgcgttgcttcttgacatgactttgaaagatgtcgagagggtactttatttcgaaaattatattgttactgaaccgggattatcgcccctcgaagagggtcaattgctcactgaagaagggtttatagaggcccaagatgactatggtgaggatgcctttgaagcaatgataggtgctgaagcgctcaaaaaaatgctttcggaaatagacctcgaagaagagcgcgaggaattgcgcatcgatatgaaagaaactggctctgaggctaaacgaaagaagtatgtcaaacgcttaaagttggttgaatctttcatcgagtcgggcgcacgaccagaatggatgattttagaggtcgtaccggttattccaccagaattgcggcctctcgtgccgcttgatggggggcgttttgcaacttccgacctgaatgacttatatcgacgagttataaataggaataatcgtctaaagaggcttattgaactcagggcgccagatattatcgttcggaacgaaaaacggatgctacaggaagcggtcgatgccctatttgacaatggtcgtcgaggccggactataaccggtgctaataaacgaccgcttaaatcattaagcgatatgttaaagggtaagcagggacgatttc

SEQ ID NO: 255420 - DNA, 943 bp, Unknown
  Bacterial polypeptide expressing nucleotide sequence isolated from the Sargasso Sea
aaagagcaacaaaaattaagagagtctcttaaagaaattaaatcaaaagtaacagaggaaagaacgatcaaaagattgaaattgattgagtcatttattaattcaggaaataaaccagaatggatgattttaacttcagttcctgtcataccgcctgaattaagaccattagttcctttagatggtggaaggtttgcgacgtcggatctgaatgatttatatagacgagtaattaataggaacaatagattaaaacgtcttttagatttaaaagctccagatataattgttagaaacgaaaaaagaatgctccaagagtcagttgacgcattatttgataacggaagacgaggaagagtaattacaggcactggaaaaagacctttaaaatctttagctgaaatgctcaaggggaaacagggtcgattcagacagaacctattaggtaagagagtagattattctggaagatcagtaattgttgttggaccggaactaaagttgcatcagtgtggtttaccaaaaaaaatggccttagaattatttaaaccatttctttatgctcgtttagataaattaggtttggctacaactattaaacaagctaagagattagttgaaaaggaaaaaagtgaagtctgggattctcttgaacatattattagagaacatccaatacttttaaatagagcacctactcttcatagacttggcgttcaagctttcgaagcgaagttaattgagggtaatgccatcgaattacaccctctagtctgtgctgcttttaatgcagactttgatggcgaccaaatggctgttcatattcctttgagtttagaagctcaattagaagcaagagttttgatgatgtctactaataatattttaagcccatctaatggcaagccaataattgttcccaagtcaggatatagtattaggt

SEQ ID NO: 255421 - DNA, 302 bp, Unknown
  Bacterial polypeptide expressing nucleotide sequence isolated from the Sargasso Sea
aatggatacaagtgaagtaaatataaaaaattggaaatcattaattaaaccaccaaaattagatgtaaatttgagtgacgataagtcttacgcaaaaatagtagctgagcctcttgaaaaaggttatggactcaccttaggaaattctttaagaagaatactattatcatctataagaggaactgcagtcacagcaattcagattgatggtgtattacatgaatttacttctattaaaggtgtaagagaagatgtaaccgatatagttcttaatattaaatcacttgctctaaaaagtaatt

SEQ ID NO: 255422 - DNA, 781 bp, Unknown
  Bacterial polypeptide expressing nucleotide sequence isolated from the Sargasso Sea
gttagaaacgagaaaaggatgctgcaagaatctgttgatgcacttttcgataatggaagacgaggaagagtaataactggcactggaaaaaggccattaaaatctttagcggaaatgctcaaaggaaaacaaggaagatttagacaaaatttattagggaaaagagtagattattcgggaaggtcagtcatagtagttggccctgaattaaaactacatcaatgcggcttaccaaaaaaaatggctttggaactatttaagcctttcttatacgctcgattagataaattaggattagctacaacaattaaacaagcgaaaagactcgttgaaaaggaaaaaagcgaagtttgggacgcattagaaaatattataagagagcatccaattttattaaacagggcgccaacactccatagacttggtgttcaagcttttgaggcaaagttgattgaaggtaatgcgatagagcttcaccctttggtatgtgcagcctttaacgcagattttgatggagatcaaatggctgtccatattccactcagcttagaagctcaattagaagctagagttttgatgatgtcgacgaacaacattttaagcccatctaatggtaaacctattattgtacccagccaagatatagttttaggtatttattatctctcgcaagcatcaaagaaggataataaacctaagggaattttttcaaatattgatgaaatagaacaagcattagagaataaatcaattagcttacatacaaaaattattcaaaatt

SEQ ID NO: 255423 - DNA, 757 bp, Unknown
  Bacterial polypeptide expressing nucleotide sequence isolated from the Sargasso Sea
gagcttgaaacaataagttcaacaacaaagtcaaaacaaaaaagagaagatgctcttaaaagacttaaagttgttaaagattttgctcaagatagaaacaataagccagaatggatgattgtttctattttacctgtaatgccacctgagttaagacctttagttccattagagggtggaagatttgctgctagtgatcttaatgacttatacagaagaattattattagaaataatagattgaagcaattaatggatattcaagcacctgaagtaattttaagaaatgaaaaaagaatgctccaagaatctgttgatgcgctttttgataatacaaagcgtaaaactgcaattagaagtggttcaaagagacctttgaaatcaatttctgatatgcttaggggtaagcagggtagatttagacaaaatcttcttggtaaaagagtagattattctggtagatcagttattgtagttggtccagaattaagaatgactgaatgcggtattccaaagaatatggcattagaattatttaaaccgcatttaattagagaattaataagaagagatttagctgcaactccaagaagtgcaaaacttatgattgaaaataaagaatcatttgtttatgaaattcttgaaagtgttgttaaggatcatccagtattattgaatcgtgctcctactcttcatagattgggtattattgctttcccagccatatacttattgacggtaaagctattcgagtcca

SEQ ID NO: 255424 - DNA, 905 bp, Unknown
  Bacterial polypeptide expressing nucleotide sequence isolated from the Sargasso Sea
tatagctctcatgatggatatgaagcttaaagatcttgaaaaagttctttattttgaaaaattcatggtaactgagccaggattaactcctctaattcaaaaccagcttcttgatgaagaagaattagagaatgctaaagaagaatatggagaagactctttttcagctggtataggagctgaggcagtcagaaaagttcttgaaagaatagaacttgagccagagcttgaggcattacgcacaaaactttctgaaacgaaagcagttgcgctgtcagaaaagcttgtaaaaagaattaaaatttttgaagcctttatatcatcaggaaacagacctgagtggatgattttaacctctgtacctgtcatcccaccagaattaagaccactggttccacttgatggaggaaggtttgcatcaagtgatttgaatgatctatacagaagagtaatcaatagaaataatagattgtctagattaattgaattaagagctccagatataataataagaaatgaaaaaagaatgcttcaagagtccgttgatgcattatttgataatggaagaagaggaagagtcatcactggaacaaataaaagacctctcaaatcgctggcagaaatgcttaaaggtaaacagggtcgatttagacagaacttattgggaaaaagggtcgattactctggaaggtctgtaattgttgttggtccagaattaaaacttcatcaatgtggcttgccaaaaaaaatggctatcgagctatttaaaccatttatatacgcaaggttggagtctctaggtttagccacaacattaaaacaagccaagaaaatgggtgagaaagaacgtccagaagtatgggatgtactagaccgtgtaattagagagcatccagtaatactaa

SEQ ID NO: 255425 - DNA, 892 bp, Unknown
  Bacterial polypeptide expressing nucleotide sequence isolated from the Sargasso Sea
ggcactagaactttttaaaccatttattttccataaactggatatatacggctgggctaacacaataaaagctgcaaaaaaactcgttgaaaaagaagatccaagagtatgggatattttagaagaggtaattcgagaacatcctgttcttttaaatagagcaccaactttacatcgattaggtattcaagcttttgaacctatattgatagagggaaaatcaattcaattacatccattagtatgtacagcttttaacgctgattttgatggtgatcaaatggcagttcatgtacctctcagtttagaagcacaacttgaagccagagttttaatgatgagtacaaataatatcttatctccttcaagtggtaaacctattattgtgccttcacaagatattgttttgggaatttattatctttcaattcaacgtgataatcaaaaaggtgaaggtagatattttgttgatttaaatgaaattgaaaaagcacttgaaaattctgatttaagtctacattcaaaaattaatgcaagaataaaagataataatgaccagaatataatcattcagacaactcctggaagaatgatacttggaaacatacttccaaaaaatgaaaacattaattttgaaatgatcaacaaggtattaacaaaaaaagaagttagtaatataattgatacggtatacagattttgtggacaaaaagagacagttttatttgctgatcatattatgcagattggttttaaatacgccgcaattgctggaatttcatttggtaaagatgatttaattatccctaatgataaaaatgatcttttaaatgaaactcaaattaaagttcaagaatatgaagatcaatatcaggatggattaataactcaa

SEQ ID NO: 255426 - DNA, 854 bp, Unknown
  Bacterial polypeptide expressing nucleotide sequence isolated from the Sargasso Sea
cctttagaaaaaggatatggattaactttaggaaactctttaagacgaattttattatcatcaataagaggcgctgctgtaacatctatccaaattgatggtgttttacatgagttcacttcaattaaaggtgtaagagaagatgttactgatattgttttaaacgtaaagtctttagcattaaaaagtaattcagagggcacaaaaaagttaattttagatgcaaaaggacctggagaaattaaagcttcagatataactccagttgcagatgttgaaattttaaatcctgatttggttatttgtaatctagatgaaaatactactttccatatggagatgaatgttaatacaggtaaaggatatgtgcctgcagaattgaataaacccgaagaaccaccactaggtctaattgctgtagactctctatatagcccggttaaaaaagtatcatattcagtgagtacagccagagaaggtaaagcattagattatgataagctaattatggaagttgaaactaatggatcaatttctgcagaagatgcagtagcttattctgctagaattttccaagatcagcttaaaatgtttgtaaattttgacgagccagttgaagctcctgtgaaagaagtttctacagagcctgagtttaacaaaaatctattaagaaaagtagatgagttagaattatctgtcagatctatgaactgcttaaaaaatgacaatattatttatattggtgatctggttcaaaaatctgaaggtgaaatgttgagaacacctaattttggaagaaagtcattaaatgaaattaaagaagttttaactggtatgtcattatatttaggaat

SEQ ID NO: 255427 - DNA, 211 bp, Unknown
  Bacterial polypeptide expressing nucleotide sequence isolated from the Sargasso Sea
atgcaaatatcagtaatagatttattagtaccaaccgagatacaagtcgaaaatgtttcagatactgtatcgaaggtaacgctagagccgcttgagagaggttttggtcatacgctaggtaatgccttaagaagaattcttctttcatcaatgcctggtgctgctgtaacagatgttgtgatcgatggtatttctcatgagtattcaacaa

SEQ ID NO: 255428 - DNA, 592 bp, Unknown
  Bacterial polypeptide expressing nucleotide sequence isolated from the Sargasso Sea
gttatggatcctgatcatgtaattgccactctagttgaaccaaaaaagcttgttatgactttaaaagttgaaactggtacaggctatgttccttcagaaaataacaagaataagagtgttgattcattgcatcttgatgcaatattttctccagtaaagagagttaattataaagttgagaacacaagagttgagaatagaacagatctagataaattaatattagatttagaaactgacggaacaattgatccaaaacaagcagttaaatatgctgcaactattatgcagcatcaattagctgtatttgttgatgaagaattagtctcaagaaaagaaaagagaaaagataaatatgactttgatccacttcttttaagatcaattgaagagttagagcttactgtaagatctacaaattgtttaaaagcagagaatattttcttaattggagatttaatacaaagaagcgaaatggatctattgaaaactccaaatcttggaaagaaatcattaaatgaaattaaagatgaattagcgtcaagaggactttctatgggaaccgtccttaaaaattggccgccaatgtaaa

SEQ ID NO: 255429 - DNA, 715 bp, Unknown
  Bacterial polypeptide expressing nucleotide sequence isolated from the Sargasso Sea
cttaaagatatgccagtgaaactgattgaaggaaatgaagcagaacttaaactatctgttgatgggccatgcgaagtaacatcttcttcatttgaggctcctggaaatgttgagttaacagatgccgatcaccatgttgtttcacttgtagataaaattaaattaaatatgtcagtttttgtaagaactggaagaggttatgagcctgcagatattagagatgatgaaaataatactgtaggaggtttaaaagtagatgcttcatttagtccagttaaaagagtttcttattctgtagagaatgcaagatttgagaaaagaacagacttagacaaattaatacttgagttagaaactgatgggactatcgatgcaaaaatggctatagagcattctgcaactataatgcagcaacaacttgcagcctttgttgatttagaagcaattgcagaacaagaagctaaaaaagagcaaaatgactttgacccactactccttaggtctatagaagaacttgagctaactgtaaggtcaactaattgtctaaaagcagaaagtattttcttaattggtgatttaattcaaagatctgaatttgatcttctaaaaacaccaaatcttggtaaaaagtctcttaatgagattaaagatgtcctagcttcaaaaggactttctttaggtatggtgttagataactggccaccgatgggttaaa

SEQ ID NO: 255430 - DNA, 943 bp, Unknown
  Bacterial polypeptide expressing nucleotide sequence isolated from the Sargasso Sea
aaaagttggcgatttacttaacgagtcaatgtatagagattttaaagataagtttggcccagtctttgtagcagaaatgggagctgatgcagttttaaaacttcttaaaaaaattgaccttgatgaaataagtggcaatttgaaagaagaaattgcagtaacatcaggacaaaaaagaaaaaaatctttgaagcgattaagagttgttgaggcatttagaaccagcggcaataagccagaatggatgattttaaacgttttacctgttttacctccagacctgcaccctatggttcagctcgatggaggaaggtttgcaactagcgatcttaatgatttataccgaagagttataaatagaaataataggttaaaacatttattagatttagaggcccctgaaataattgttaggaatgagaaaagaatgctacaagaagcagtggatgcacttgttgataacggcaggagaggaagagcgatccaaggcagtcataaccatgtgctaaaatctttaactgacctattaagaggtaaacagggcagatttagacaaaatcttcttggtaaaagagttgattatagtggaaggtcagtaattgttgttggtccagatcttaaattaaatgaatgtgggcttcctagaaaaatggccttagaattattcaaacctttagttatgaatgctttagttattcagggttatgcacataatattaagagcgccaaaagaaaggcagaatctggagatgaagaggtttgggacatattgcaagaagtcattaaagatcatccagttctattaaatagggcaccaaccttacataggcttggaattcaagcatttcaaccagttttagtagaaggaagtgcaataaggctgcatcctttagtatgcccagcttttaacgcagactttgatggggaccagatggctgttcat

SEQ ID NO: 255431 - DNA, 889 bp, Unknown
  Bacterial polypeptide expressing nucleotide sequence isolated from the Sargasso Sea
gtctgttgatgcactttttgacaatggaagaaggggaagagtaatcactggaacaaataaaaggcctcttaaatcattagcggaaatgcttaaaggtaagcaaggtcgttttcgacagaatttacttgggaaaagggtagattattcaggtagatcagtgatagttgtaggccctgaacttaagttacatcaatgtggtttgcctaaaaaaatggctattgagctatttaagccattcatttatgcgagactagagtcattaggtttagctaccactcttaaacaagcaaaaaaaatggttgaaaaagaacgtcctgaagtttgggatgtgttagatcgagtaattagagagcacccagtaattctaaatagagcaccaactttgcataggcttggtgttcaggcctttgaaccagttctaatagaaggtaaagcaattcaacttcatcctcttgtctgcaccgcgtttaacgcggatttcgatggtgaccagatggcagttcatgttccgcttagtctagaggcacagcttgaggctagagttctaatgatgtcaacaaataacatacttaacccagctaatggaaagccagttattgttccaagtcaagatattgttctaggtatttattatttatctcaagaaaaagataacgaacctggtgaaggtaaagtatttaaggatgtttatgaagtacaacaagctcttgaaaataatgctacaactgttcacgccaaagttaatgcaagaattaattttattgatcttgatggtaataaaaaaataaaaagaatcgaaacaacacctggtagagtgttattatggaacttagttccccagcacaaagacctcgatccaaaaatcgtgaatagacttttaggaaaaaaa

SEQ ID NO: 255432 - DNA, 832 bp, Unknown
  Bacterial polypeptide expressing nucleotide sequence isolated from the Sargasso Sea
aaccagctttttgatgaagaagaattagagaatgctaaagaagaatatggagaagactctttttcagctggtataggagctgaggcagtcagaaaagttcttgaaagaatagaacttgagccagagcttgaggcattacgcacaaaactttctgaaacgaaagctgttgcactatcagaaaagcttgtaaaaagaattaaaatttttgaagcctttatatcatcaggaaacagacctgagtggatgattttaacctctgtgcctgtaatcccgccagaattaagaccactggttccacttgatggaggaagatttgcatcaagtgatttgaatgatctatatagaagagtaatcaatagaaataatagattgtctagattaattgaattaagagctccagatataataataagaaatgaaaaaagaatgcttcaagagtccgttgatgcattatttgataatggaagaagaggaagagtcatcactggaacaaataaaagacctctcaaatcactggcagaaatgcttaaaggtaaacaaggtcgatttagacagaacttattgggaaaaagggttgattactctggaaggtctgtaattgttgttggtccagaattaaaacttcatcaatgtggcttgccaaaaaaaatggctatcgagttatttaaaccatttatatacgcaaggttggagtctctaggtttagccacaacattaaaacaagctaagaaaatggttgagaaagaacgtccggaagtatgggatgtactagaccgtgtaattagggagcacccagtaatactaaacagagcaccgactttacatagactcg

SEQ ID NO: 255433 - DNA, 745 bp, Unknown
  Bacterial polypeptide expressing nucleotide sequence isolated from the Sargasso Sea
catgattgaaaagaattggaaagaaataataaagccttctaagttagaagtcagaaatgagcaaaatcctgaatacacttcaactatagtagcagaacctcttgagagaggttatggagtgaccattggaaatgctctcagacgaatattattatcatcactccaaggatccgctattacttccatacaagttcaaggtgtacttcatgagttttcatcaataccaggtgtgagagaagatcttactgacataatattgaatgtaaaaggtataaaagtcagaatggattttgatggaattaaaaaaatccaattaaatgttgacggtccttcaacagtaactgcaggcatgatagtatgtccaccagaagttgaaataatgaataaagatcatgaaatatgtactttagatcaaggagccaaacttaatgtagagttttctgtagaaaatggaaaaggatatgtttcctctgcaattaacagaaaagaagatattccaatcggtgttattccgattgatgcaatttttagccctgtagttcaagtttcatataatgttgataatgctcgtgttggtcaacaaacagattatgataaattatctttaatggttacaactgatggatcagtttcaccagaagatgcggttgctttctctgctagaattatgcaagatcaattaaataattttattaactttgaagaaccagaagaagaagaggttgcagaagttcttgaagatttg

SEQ ID NO: 255434 - DNA, 613 bp, Unknown
  Bacterial polypeptide expressing nucleotide sequence isolated from the Sargasso Sea
atgaccaacagcaacctccgcaccgagaaccacttcgactacgtcaagatcacgctcgcgtcacctgaacgggtgatggagtggggccagcgcaccttgcccaacggccaggtggtgggcgaggtcaccaaaccggagaccatcaactaccgcaccctgaagcccgaaatggacgggctgttctgcgaaaagatcttcggtccctccaaggactgggaatgccactgcggcaagtacaagcgtgtccgtcaccgcggcattgtctgcgagcgctgcggcgttgaggtcaccgagagtcgggtgcgccgccatcgcatgggcttcatcaagctggcggccccggtgtcacacgtctggtacctgaagggcatccccagctacgtggcgatcctgttggatatgcctctgcgggatgtggagcagatcgtctacttcaactgctatgtggtgctggatcccggcgatcacaaggatctcaagtacaagcagctgctcaccgaggacgagtggctggagatcgaggacgagatttacgccgaggaatccgaaatcgagaacgagcccgtggtgggcatcggtgccgaggccctcaagcagctgctggaggacctca

SEQ ID NO: 255435 - DNA, 833 bp, Unknown
  Bacterial polypeptide expressing nucleotide sequence isolated from the Sargasso Sea
aactctgataccaagctgaagaagctgtccaaacgcctcaagctgatggaagccttcaaggattccggtaacgcgcccgaatggatggttctcaccgtgctgccggtactgccgccggatctgcgtccgctggtgccgctcgatggtggtcgttttgcgacctccgatttgaacgatctgtatcgccgggtaatcaaccgtaacaatcgcctcaagcggttgctggatctgagcgcgccggacatcatcgtgcggaacgaaaagcgtatgctgcaggaatctgtagatgcgttgttggacaacggtcgtcgtggccgtgccattaccggttctaacaagcgtcctttgaagtcccttgccgacatgatcaagggtaagcagggccgcttccgtcagaacctgttgggtaagcgagtcgattactccggtcgttccgtgatcgtggtaggtccgactctcaagctgcacgagtgtggtctgcccaagaaaatggcgctggaactgttcaagccgtttatctttgccaagctggaagggcgtggtctggcgaccaccattaaggcggccaagaaaatggtcgagcgcgaaaccgctgaagtgtgggatatcctcgctgaagttattcgcgaacacccggttatgttgaaccgggcgccaacccttcaccgtctcggtattcaggcgtttgagccggtgctgattgaaggtaaggccatccagctgcacccgctggtgtgtgcggccttcaacgccgacttcgatggtgaccagatggcggtgcacgtaccgctgaccctggaagcgcagcttgaagcccgtgcatcgatgatgtc

SEQ ID NO: 255436 - DNA, 985 bp, Unknown
  Bacterial polypeptide expressing nucleotide sequence isolated from the Sargasso Sea
gatggaaatcgacctcccaagcctgaatgagcaccttcgtaaagaaatgcgggaagtgacttccgaaacccgaaggaagcgtattcacaaacggctcaatttggtcagtgccctggttgattctggaaataccgcaagttccatgatcatcgaaaatttaccggtgttgcccccggaattgaggcctttggttccgcttgaaggaggaaggtttgcgaccagtgacctgaatgatctctatcgccgtgttattcaccgaaacaacagactcaagcgattgatcgaattacgtgctccgggaatcatcgttaaaaatgagaaaaggatgctccaggaatcggtggatgctctttttgataatggacgaagaggacggcccatggtcggttctaacaaacgtccgctgaaatccctgagcgatatgctgaaaggaaagcagggacgtttccgacaaaacctgcttggtaaacgagtcgattattcaggaaggaccgtgattgttgtcggtccggatctcaaattgcaccaatgtggacttcccaaaaaaatggctctggaattattcaagcctttcattttccatagattgatcgattaccaggaagttcatacgatcaaaaacgctaagcgcaaattggaggaaaatgatccccgggtttgggctatccttgaagaagtggtcaaggaacatcctattttgctaaaccgtgcaccgactctccaccgcctcggtatccaggcttttgaaccggtactgatcgaaggtaaagcaattcagttgcatcctctggtctgtactgcatttaatgcggactttgacggggaccagatggcggttcatgtgcccctctctgtggaagctcagctagagtccaagattttgatgctctcaaccaacaacgtcttatctcctgccaatgggaagcccttgatgagcccgacccaggatatggttctgggggtgtactggattacccgagagcgt

SEQ ID NO: 255437 - DNA, 856 bp, Unknown
  Bacterial polypeptide expressing nucleotide sequence isolated from the Sargasso Sea
tggttcacgccgtcctctcaaatcactctctgatatgttaagaggaaaaacaggtcgttttcgtcaaaatttgttaggaaaaagagttgattattcagggaggtctgttattgtagttgggcctcagttaagactgcaagagtgtggcttgcctaagaatatggctttagaactattcaagccacatatgataagggaattgatgggtcgtggttatacccaaactcctagaagtgctaaattaatgattgaaaattgcgagcctgtagtatataaggttttggaatatgttgttaaagatcatccagtaatgttaaacagggcgccgactttacatagactgggcattcaggcatttcaacccgtgcttgtagatggtaaagctatacagttacaccctttagtttgttcagcgtttaatgcagactttgatggtgaccaaatggcagttcatgtgcccctatctcttgaggcgcaaatggaggctaggatgttgatgcttgctagtcacaacatattgcatccagcaaatggccaacctattgcagttccatcccaggatatgatcttgggttcttattatcttacaaagctaaaagatggtgatttgggagaagggaagatatttggatctttagatgaggttgttttagcatatgaaaatagggttgttggtctacattgtaaagtgagtctaaagcatgctggtagctggataaaagaaaccaccgtaggaagagcaattttcaattctatattgcctgatgaaatggaatatattaatgagttgatcgataagaagcgcttaacgaacatagtaaaccagtgttatcttattgttggtaattacaagagc

SEQ ID NO: 255438 - DNA, 955 bp, Unknown
  Bacterial polypeptide expressing nucleotide sequence isolated from the Sargasso Sea
agaaaaagacggtcttttttgtgagaaaaattttggtccacaaaaagattgggaatgttattgtgaaaaatataagaaaatcagatataggggtgtgatttgtgatcgttgtggcgtagaagttgcaagatctaaagttagaagagagagaatgggaactataactctagcagcaccagttgctcatatttggtttgccaaaggttctccaagcagattaggaatgattttagatttgtcaccaagaaatcttgagagaatattatacttcgctcaatatttagtgacaaaagttaatgatgaatctaaagaatcattaaaagaaaaaattgaagatgaaatcaaaaatttaaatttgaatttagaagaagacaaaaaagaagaaaaaaacaaatcagatcaaccaatagaaacttcagatgaagaagaaatggaagacgatgaaccaatacttactaaagaacagattaaagaaaaaattgatgagttaaatgttattttatctgaccttaaaacattaaaattaggtttgctactaacagatcagaaatataagtctataagaaatatttctataagatatcaaatagatgttttctcagcagaaatgggagcagaagcagtgaccaaggttttgaaaactattaatttggattctttgcgagatgaattgcaaaaagaaataagagaaacaacagggcagcgattaaaaaaagcagtaaagagactcagagttgtagaagcattcagaaaaagtggcaatgctttggaatcaatgattttagaagttattcctgttcttcctcctgaattaagaccaatggttcaattagatggaggtagatttgctgcaagtgatcttaatgatttatatagaagagtaatcaatagaaataacagactaaagagattattagaacttagtgcccctgaaataattgttagaaagaaaaac

SEQ ID NO: 255439 - DNA, 735 bp, Unknown
  Bacterial polypeptide expressing nucleotide sequence isolated from the Sargasso Sea
tattgatttagaagcagatttcgaaaaagcaaaagttgaattaacagagaccaaatctgagctaaaaaaaacaaagttaacaaaaagaattaaactactagagtcatttattgtatctaaaaataagccggaatggatgattttgagagtccttcctgtgattcctcctgaactaagacctttagtccctcttgatggtggaaggtttgccacgagtgaccttaatgatctctacagaagggttataaatagaaataatagattaaaaagattaatagatttaagagcaccagacattatcataagaaatgaaaaaagaatgcttcaagagtcagttgatgctctttttgataatggaagaaggggaagggttataacttctaccaacaaaagaccacttaaatcactatctgatatgcttaaaggaaaacaaggtagatttagacaaaatcttcttggcaaaagagttgattattctggaagatcagtaattgttgttggacctaatcttaaattacatcagtgtggaatcccaaaaaaaatggctcttgaattatttaaaccttttattttccataagttagatatctatggatgggctaacacaataaaagctgcaaaaaaactagttgaaaaagaagatccaagagtttgggatatacttgaggaagttataagagagcaccctatacttcttaatagagcacctacacttcatagattaggaatacaggc

SEQ ID NO: 255440 - DNA, 794 bp, Unknown
  Bacterial polypeptide expressing nucleotide sequence isolated from the Sargasso Sea
aatcgatggtgtacagcatgaatatagttctattaaaggtgtgagagaagatgttacagatatagttctaaatattaaatcattagcattaaaaagtaattttgaaggtagcaaaaaactaattttagacgcaaaaggacctggagaaattaaagcagcgcaaataacgccaattccagatatagaaattttaaatccagatttagtgatttgtaatttagatgaaaataccaattttcatatggagctttttataggaaacggaaaaggttatatttctgctgaattaaataaacctgaagaaccaccattaggattaattcctatagattcattgtttagccctgttaaaaaagtatcatattctgtaagtacagccagagaaggaaaagctttagattatgataagcttactatggaaattgaaaccaatggatcaattactgccgaagatgctttagcttattccgctagaatttttcaagatcaattaggaatgtttataaattttgatgaacctcaagaaattaaaatacaagatcaacctaaagaacctgaatttaatcagaatcttttaagaaaagttgatgagcttgaattgtcagtaagatcaatgaattgcttaaaaaatgacaatattatttatattggtgacctagttcaaaaatcagaaggagaaatgctgagaacaccaaattttggtagaaaatcacttaatgaaattaaagaagttttaagtggaatgtccttatatttgggcatggaaattcctaactggccgccagataacatag

SEQ ID NO: 255441 - DNA, 435 bp, Unknown
  Bacterial polypeptide expressing nucleotide sequence isolated from the Sargasso Sea
gtgtggataacgccagggtgaaacaaaaagccgatttagataaattaattatagagcttgagacaaatagtacaattaacccagaagatgctattagaactgctggtaagattttaagagaacagcttgaggtgtttagtcacctagaaatcaaagacgatacccaagatgaggttgatgaacatgacattgatccagttttactgagacctgttgatgatcttgaattaactgttagatctgctaattgtctaaaagcagaaaatattcattatattggtgatttggttcaaagaagtgaaaacgagcttctcaaaactcctaatctcggaaaaaaatctcttacagaaataaaagatgttttatcaacacatagtttatcgcttggtcaaattattgaagattggcctccaaaaagcattgaaagaagataat

SEQ ID NO: 255442 - DNA, 623 bp, Unknown
  Bacterial polypeptide expressing nucleotide sequence isolated from the Sargasso Sea
agtatgtcccgcttttaacgccgattttgatggtgatcaaatggctgttcatgtgccattaggacttgaagcacaagctgaagcccgcctgttaatgttagcaacacataactggttatctcctgcaacaggtgaacctagtattcttccgagtcaggatatgattcttggattttattatttaacaacattaaagccaactattagccataagcgtacgactaatcttgcgtctgggttaacaaataaagtaccttatcaacttaatacgatttataatagtttcgaaagcgtgctacatgcttacgatattaataaaattgatttacatgaaatggtttggctccgttggtcatcctatatccaaacccaaaatccgtttccattacaacttaatatttcgccaaacggtcatgtaactagtatttatgatagttttgttattgaatctgattctgaccagcaggattgtttagttaaatctcctgaaattacacaaacaacgaaaaaaatagtgtcttaccaatcagaaatgtcagtaactggatcatcattttatatccgtacaacacctgggcgtgttctttttaacaatttaatttatgaaaacctttttttgtaac

SEQ ID NO: 255443 - DNA, 721 bp, Unknown
  Bacterial polypeptide expressing nucleotide sequence isolated from the Sargasso Sea
tgttttcctgcttgagggaagagatgatgtgttgttgttattaaagaaaagtggcccaggaaacatagttgtcggcgattttgaactaccacatgatgttaaagttgttaacccggaccatttggttgcacgtttatcaaaagaagctgagctagatttacagattagagttcaaaaaggtagaggttatgtaccaggaaactttcgcaggtacgatgatgaagaaactaaaacaataggtaaaatagtcattgatgcttctttctctcctgtaaaaagagttagttacttggtcgaaaatgcaagagttgagcaaagaactgacttggataagttagttatggaagttgaaactaatggtgtgattagccctgaggatgcagtcagacaagcagcaaggattttagttgaacagttgaaagttttcgccgcattggataaaggtgagccagaggatgagcaaccaaaaggacaacaatttgatcctactttgttgagacctgttgacgacttagagttaactgtcaggtctgctaactgtttaaaggctgagtctatttattatattggtgatcttattcaaagatcggagaacgaacttttaaaaactcctaaccttggacgtaaatcattgaatgaaataaaagaagtattagcaaccaaagggcttactttgggaatgaagcttgagaattggccaccaactggatttgagcactaa

SEQ ID NO: 255444 - DNA, 936 bp, Unknown
  Bacterial polypeptide expressing nucleotide sequence isolated from the Sargasso Sea
tgtaagaaatgaaaaaagaatgttgcaggagtctgttgacgcattattcgataacggaagaagaggcagagtaattacaggaaccggaaaaagacctttaaagtctcttgcagaaatgttgaaaggaaaacaaggtcgatttaggcaaaatttattaggtaaaagagtagattattcaggaagatcagtaatagttgtaggcccagagttaaaattacatcaatgtggtttgccaaaaaaaatggctttagaacttttcaaaccttttttgtacgcgagattagataagttaggactcgctactacaataaaacaggcaaaaagacttgttgaaaaagaaaaaagtgaagtgtgggactctttagagcatataatcagggagcacccaattctccttaacagagctccaactttacatagacttggtgttcaagcctttgaagcaaaattaattgagggtaatgcaatagaactacaccctctagtgtgtgcagcatttaatgcagattttgacggtgaccaaatggctgttcatatacctttaagtcttgaagctcagttggaagctcgagtattaatgatgtctactaataacatcttaagcccatctaatggaaaacctataatagtcccaagtcaagatatagttttaggcatatattacctttctcagtcagatgagaacgataaaaaacctaaaggaatattttcaaatatagaggaaatagagcaggctctagaaagtaatgtgataagtttacattcaaaaattatttcaacattcaatactattgataataatggtaagcctatagttgaaaaatacacaagtacggctggaagatttttgttagcaaacgtattaccaaaaaatagcaacataaaattttctttgataaataaactttttaacaaaaaagaatgtttcagaggtaa

SEQ ID NO: 255445 - DNA, 859 bp, Unknown
  Bacterial polypeptide expressing nucleotide sequence isolated from the Sargasso Sea
catgactaatagcaatctacgtacggaaaatcattttgattacgtcaaaattaaattagcttctcctgaaagagtaatggaatgggggcaaaggactttgcccaatggccaggtagtaggggaagtgaccaagccagaaacaataaattatcgaacactaaagccggagatggatggattattttgtgaaaagattttcggtccatctaaagattgggaatgtcactgcgggaaatataagagagttagacatcgtggaattgtttgcgaaagatgcggagttgaagtaacagaaagtcgggtaagaaggcatagaatgggatttattaaattggcagctcccgtatcccatgtttggtatctaaaaggtattcctagttatgttgcgatcctattagacatgcctctgagagatgttgagcaaattgtttattttaactgttatgttgttttagatattggtgatagtaaagatcttaagtacaagcagctattaacagaagatgaatggcttgagattgaagatgagatttatgctgaggattcaactatcgagaatgaaccaattgttggaataggtgcagaggccttaaagcaattacttgaagatttaaatttaaaagaagttgccgagcaattgagagaagaaattgcaacaagcaaaggtcaaaaaagggctaagcttatcaaaagactaagggtgatagataattttattgctactagtgcaagcccagagtggatggttttagatgcgatacctgttatacctcctgatttgagacctatggtgcaattagatgggggtagattcgctacttcagatttaaatgacttatatagaaagagtaaatcatag

SEQ ID NO: 255446 - DNA, 922 bp, Unknown
  Bacterial polypeptide expressing nucleotide sequence isolated from the Sargasso Sea
tacatcagacttaaatgatttgtatagaagagtaatcaacagaaataatagacttaaaagactactagaattaaatgcaccagaaataatagttagaaatgaaaaaaggatgttacaagagtctgtagatgcccttttagataatggaagaaggggaagagttatcaccggtacaaataagagacctttaaaatctttagcagatatgattaaaggtaaaggcggaagatttagacaaaatctattaggtaaaagagtagattactctggtagatcagttattgttgctggtcctaatctaagactacaccaatgcggattaccaaaaaaaatggccttagaactattcaaaccttttgtttatggaaaacttgagcaaagagagcttgctactacaattaaaggcgcaaagaaattagtagaaagagaaactcctgaagtgtgggaagttttagaggaagtcataagagaacaccctgtcttattaaacagagccccaactcttcataggttgggtcttcaagcatttgaaccaaaactaattgaaggaaaagcaattcagctacatccattggtatgcgtagcttttaatgctgattttgatggtgatcagatggcagttcatgtacctcttactttagaagcgcaattagaagctagggcattaatgatgtcaacaaataatattctttcacctgcagatggatcaccaattattaatccaactcaagacattgttctaggcttatattatatgactagggacaatgctaatgcatttggggctggaagagtgtttagtaattctgatgaagttttgagagcatatgaaacagaaaatttagaaatacattctcctattaaggtaagaattgataatggtgaaggtgagacttccttgcaagaaacaaccgtagggagg

SEQ ID NO: 255447 - DNA, 585 bp, Unknown
  Bacterial polypeptide expressing nucleotide sequence isolated from the Sargasso Sea
aaattgttgatgacgaaaaaccgatcgcgactattcaggagggtcataacttagagttggaaattcatgttgaaagaggtgttggatatagacccgttgaccgtaagagtgaagagacaactgctattgatctacttcagatagatgctgtatttatgccagtaaagagagtgaattttactattgatgaaactgctgtagcagaagggggagcgggcagagaaagattgaaaatggaagtcgtaacagatggttcaacaagtcctgacgatgctattgctgaagctgcaaatcagttaatagaactttttcaacccctagctactgtaacaatggttgaggaaattcctgaagaacctgaaccatctcctgaagctcaaattcctcttgaggaactaaacttgtccgttagagcatataattgtttgaaaagggcgcaagttaactcagtttcggatttaatgggcttcagctatgaagatcttcttgaaattaagaactttggctctaaatctgcagatgaggtcattgaagctctcgagcgcataggcatttctattccacaaagtagaacatctgtttaac

SEQ ID NO: 255448 - DNA, 813 bp, Unknown
  Bacterial polypeptide expressing nucleotide sequence isolated from the Sargasso Sea
aatgacagataattacgatattattaaagattttttaacaccaactgaaatagtagttgaagaatcaggtcctacaaggtctaagatagtacttgaacctcttgaacaaggtttcggacataccttaggaaatgctcttagaagaattatattatcttctatgcctggtacagctgtatcagaggttaagattgatggtgtgcttcatgaatatagcactatagagggtgtacaagaagatgtcatagatatcttattaaacctaaaagacctctcagtaagattaaccgaagtagaagatgctttactaactctatcaaagtccggaagtggagtggtaactgcggccgatatagaactttctacaggtgtagaagtcatcaatccagatcatcatattgctactctaaatgaagaaggctctataaatatgacaatgaaagtaacaagaggtagaggctttgtgcctgttagacctcttgacgaagatgaaggccaagaaactggccttctaagattagatgcaacttactcacctattaaaagagtgacataccaagtagataatgccagggttgagcaaagaactaatttagataggcttacagtagatattgatacagatggaactttagaagctgaagagattttaagaatatcggcaactatcctccaacatcagttatccgcttttgctgaacttggaagacttgaagaggtgattgaagaaaaagaggaagcgaagatagatccaatcatgttaagacctgttgatgaactagagcttacagttcgatctgcaaattgcttgaa

SEQ ID NO: 255449 - DNA, 814 bp, Unknown
  Bacterial polypeptide expressing nucleotide sequence isolated from the Sargasso Sea
taaagttagaagagaaagaatgggtcatatacctttggcagctccagttgctcatatttggtttcttaagtccttacctagtagaataggtttgcttcttgatcttgctttgaaggatcttgaaaaagttctttattttgaaagttttattgttacggagccaggtatggtaaaatcgcttaaaaaatttcaaattttaagtgatgaagaaaattcaagtcttaaggaagagttcggagatagtttccaaagtatgattggcgcagaagctattcaaaaacttctatcagagatcaatcttgtagatgatcagaagctagtcagggacgaattaggttcaacatcttcagagacaaaaaagaaaaagctagtcaagagattgaagttgatagaagcttttattggttcaaagttaaaacctgaatggatgattcttaatgttataccagtcattcccccagagttaagaccacttgttcctcttgacggcggaaggtttgccacttcagatttaaatgatctttatagaagagtaataaatagaaacaatagacttcaaagattacttacacttaaagctccagatataatagttagaaatgaaaagagaatgttacaggaagcctgtgatgctttgtttgacaatggaagaagaggaagagtgataaccggaacaaataaaagacctctaaaatctctttcagatatgttgaaggggaagcaaggaagatttagacagaatttgctaggaaagagagttgattattcgggaaggtctgtgatcgtagttggacctgaacttaattacaccaat

SEQ ID NO: 255450 - DNA, 789 bp, Unknown
  Bacterial polypeptide expressing nucleotide sequence isolated from the Sargasso Sea
aatgaccaacagcaacctccgcaccgagaaccacttcgattacgtcaagatcaccctcgcctcacccgatcgggtgatggagtggggacagcgcaccctgcccaacggccaggtggtcggtgaggtcaccaagccggagaccatcaactaccgcaccctcaagcccgagatggacgggctgttctgcgaaaagatctttggcccgtccaaagactgggaatgccactgcggcaagtacaagcgggtgcgtcaccggggcatcgtttgtgaacgctgcggtgtggaggtcaccgagagccgcgtgcgtcgtcaccgcatgggcttcatcaagctggcggcccccgtctcccacgtctggtacctgaaggggatccccagctacgtggccatcctgctggacatgcccctgcgggatgtggagcagatcgtttacttcaactgctacgtggtgctggatcccggcgaccacaaggacctgaagtacaagcagctgctcaccgaagacgagtggctggaaattgaagacgagatctacgccgaagattccgagatcgagaacgagcccgtggtgggcatcggtgccgaggccctcaagcaactgctggaagacctcaccctcgatgaagtggctgagcagctgcgcgaggagatcaacggcagcaagggtcagaagcgcgccaagttgatcaagcgtctgcgcgtgatcgacaacttcatcgccaccaacgctcgtcccgagtggatggtgctggatgtgatcccggtgattccgcccgacctgcgcccgat

SEQ ID NO: 255451 - DNA, 805 bp, Unknown
  Bacterial polypeptide expressing nucleotide sequence isolated from the Sargasso Sea
aagattaatggacttaaaagcaccagatataatcgtcagaaatgaaaaaagaatgttacaagagtcggtagatgcattattcgataatggtagaagaggaagagtaataacaggtactggaaaaagaccattaaaatctcttgcagaaatgttgaaaggaaagcagggaagatttagacaaaatcttttaggaaaaagagtagattattctggaagatcagtaattgttgttggtccagatttaaaattacatgaatgtggattacccaagaaaatggctttagaattatttaaaccatttttgtatgccagattaaacaaattaggattagcttcaacaatcaaacaagcaaagaaattggtagaaaaagagagaaacgaagtatgggatgctttagaacttatagtacgagaacacccagtaatactaaatagggcaccaacacttcatagattaggtgttcaagcatttgaaccaaaacttattgagggtaatgcaatagaacttcatccacttacttgtgcagcatttaatgcagattttgatggagatcaaatggcagtgcatgttccactaagtctagaggcacaacttgaagccagagttttaatgatgtctactaataacattctaagtccatctaacggcaaaccaataattgtgcctagtcaggatatgattttaggaatatattatctttcacaaccaccagtccaatccgaaagagttgatggatattttgtaaatacatcagaaatagaacatgctttagaaactggccaaatcaaagtacattcgagaata

SEQ ID NO: 255452 - DNA, 775 bp, Unknown
  Bacterial polypeptide expressing nucleotide sequence isolated from the Sargasso Sea
gaaaaaagaatgctccaagaatctgtagacgctttatttgacaatggaagaagaggcagagtaataactggaacaggaaaaagaccattaaaatctttagctgaaatgctaaaaggtaaacaaggtagatttagacaaaaccttcttggaaaaagagttgattactcaggtagatcagtaatagttgttggcccagaacttaagttacatcaatgtggattgcctaaaaaaatggcgctagaactatttaaaccttttttatacgctagattagataaattaggattagctactacaattaaacaagcaaaaagactagttgaaaaagagaaaagtgaagtttgggactctcttgaacatattattagagaacatccaatactcttaaatcgtgccccaacacttcatagattaggagttcaggcatttgaagcaaaacttatagaaggtaacgctatagagttacatccgcttgtttgtgccgcgtttaacgcagactttgatggagatcaaatggctgtgcatataccactgagtttagaagctcaattagaggcaagagttttaatgatgtccacaaataatattttaagtccttctaatggaaaaccaataattgtacccagccaagatattgtccttggaatttactatctttcacaatcagatgttaatgaaaagaaacctaaaggtatattttcaagcgttgatgaaatcgaacaagcattggaaaataaatctatcagtttacattcaaaaataatttctgtattta

SEQ ID NO: 255453 - DNA, 664 bp, Unknown
  Bacterial polypeptide expressing nucleotide sequence isolated from the Sargasso Sea
atggaaactgaaaatgtaaatataaaaaattggaaatctttaattaaaccatcaaagattgatgtgcaattaagtgatgacttatctcgagccaagattgtagccgaacccttagaaaagggttatggattaactttaggaaattctttaagaagaattttactatcatcaatacgaggtgcagcagtgacatctatacaaattgatggtgtgttgcatgaatttacatccataaaaggtgtgcgtgaagatgtgactgatattgttttaaacgtaaaatctttagcattaaaatcatcatcagaaggaacaaaaaaattaattctagatgccaaaggtcctggagaaataaaagcttctgatattactcctgttaatgatgtagaaattttgaatccagatttagttatttgtaatttagacgaaaatacttcatttcatatggaaatgaacgttaacactggaaaaggatatgtgccagcagaacttaataaacctgaagaaccaccattaggtttaattgcgatagactctttatacagtccagtcaagaaagtttcctactcggtaagtacagcacgagaaggcaaagcacttgactacgataaattaaccatggaagtagagaccgatggatctatctctgcagaagatgcggttgctt

SEQ ID NO: 255454 - DNA, 870 bp, Unknown
  Bacterial polypeptide expressing nucleotide sequence isolated from the Sargasso Sea
gctattaaatattgatcttgaaactgattttaatcaaactaaaaattatctcttagaaacaaagtctgagcttaaaaaaactaaacttacgaaaagattaaaattacttgagtcttttattgtttcaaaaaataaacctgagtggatgatattaagggtattgccagttataccacccgagctaagacctcttgttcctctagatggaggaagatttgcaacgagtgatttaaatgatctttataggagagttataaatagaaataacaggttaaaaaggctaattgatttaagggctcctgatataattataagaaatgaaaaaagaatgctgcaggagtcagttgatgcattattcgataatggaagaagagggagaattataacatcgacaaataaacgcccccttaaatctttatctgatatgttaaaaggtaagcagggcagatttaggcagaatcttttaggtaaaagagtagattactctggtagatcagttattgtagttggtccgactctaaagttgcatcaatgtggtattccaaaaaaaatggcattagaattgttcaagccatttatttttcataaactagatatctatggctgggccaacacaattaaagcagctaaaaaattagttgaaaaagaagatcctagggtttgggatattttagaagaggttattagagaacatccagttctattgaatagagctcctactttacacagacttggtattcaggcttttgaaccagttctaattgagggtaaatctatacaattgcacccattagtatgtactgcatttaacgctgattttgatggagatcaaatggctgttcatgttccgttaagtcttgaagcccaatt

SEQ ID NO: 255455 - DNA, 925 bp, Unknown
  Bacterial polypeptide expressing nucleotide sequence isolated from the Sargasso Sea
aatgggacatttagaactcgcaagtcctgttgcacatatttggtttttgaaatcacttccatcaagaatcggtctattgcttgatatgacattgagggagattgagagagttctttactttgaagcttatcttgttacagatccaggaatgacagatctcacccaaggacaaatgctatctgaagaacaatatatagaagcattggagatgtacggagatgatttctctgctgcaatgggcgctgaagcaattcacgatattctcaaagatttagatcttcaagacaacctcaatcaaattcaagaagatatggaggcaactgcttcccagattaaaatcaagcgatatcaaaagagactcaaacttatagaatcactaatttcttctggaaatagacccgaatggatgattctaaaagttcttcctattttacctcctgacttaaggccactagttcctctagatgggggaaggtttgctacatcagatttaaatgacctctataggagggttatcaataggaataatagacttcaaagattactggatctcaatgcaccagatatcattgtaagaaatgaaaagaggatgttacaaaaatctgttgatgcgctcctagataatggaagaatgggtagagcggttacaggttctaataagagaccgcttaagtctcttgcggatatgattaaagggaagcaaggtcgatttagacagaatttgttaggtaaaagggttgattactctggcaggtctgtgattgttgtagggccaaccttaaaacttcatcagtgcggtattccaaaaaagatggcattagagctattcaagccatttgttttcagtaagcttatttaccaaggtgaggcgtcaacaatcaaatctgctaaaaggctggtagagcttgagggggcagagattggg

SEQ ID NO: 255456 - DNA, 847 bp, Unknown
  Bacterial polypeptide expressing nucleotide sequence isolated from the Sargasso Sea
ttaattgagattggtgccccagatgttattttaagaaatgaaaaaagaatgttgcaagaagctgtagatgcattatttgataatagtcgtagaaaaacagctattagaagtggaactagacggcctttaaaatcaatatctgatatgttgagaggtaaaactggtcgttttagacaaaatttactagggaaaagggtagattattctggacgatctgtgatagttgttggtcctaaattaagaatgagtgaatgtggtttacctaagaatatggcgcttgaactatttaagcctcacatgatttatgaattaatggccagaggttacactgaaacaccgagaagcgcaaaattaatgatagaaaaacaagagcaagttgtttataaagtccttgagtacgtggtaaaagatcacccggttttgcttaatagagctccaacgctccatcgtctaggtattcaggctttccagcctatcttggttgatggtaaagctatacagttacacccccttgtttgtgctgcatttaatgctgattttgatggagatcaaatggcggttcatgttcctttgagctctcaatcacaaatggaagcaagagtgcttatgctttctagtcataatgtgcttcatccagctaatggaaaaccaatatctgtaccttctcaagatatggtgctaggttgttattatttaactcgcccattagttggtgcaaaaggtgaaggtaaatcattttcatctatagatgaggtgttattagcttatgaaaataaatctattagtatgcatgctgtaataaatgttcgtattgattctgtatggcacaaggagactactgtggaaa

SEQ ID NO: 255457 - DNA, 776 bp, Unknown
  Bacterial polypeptide expressing nucleotide sequence isolated from the Sargasso Sea
tttacctccagatttaagacctctagtgcctctcgaaggtggtaggtttgcaacatcagatttgaatgatttatatagaagagtaattaatagaaataatagacttaaaagattgttggaattaaatgcacctgaaataattgttagaaatgagaaaagaatgcttcaagagtcggttgatgctttattagataacggaagaaggggacgagttataactggtactaataagagacctttaaaatccttagcagatatgattaagggtaagggaggacgatttagacaaaacttattaggaaaaagagtagattattcgggtaggtcagttattgttgctggtcctaatcttagattgcatcaatgcggattaccaaagaagatggctttagagctattcaaaccttttgtttatgggaagcttgaacaaagagagcttgctacaactataaaaggagctaagaaattagtagaaagagaaacaccagaggtatgggaagtgctagaagaagtcataagagaacacccagttttattaaatagagctccaactcttcataggcttggcttgcaagcatttgaaccaaaattaattgaaggtaaggcaattcagttacatccattagtttgcgttgctttcaatgccgactttgatggtgaccaaatggcagttcatgtgccacttacattagaagctcagctagaagcaagggcattaatgatgtcaactaataacatactttcaccagctgacgggtctccaatcataaatccaa

SEQ ID NO: 255458 - DNA, 463 bp, Unknown
  Bacterial polypeptide expressing nucleotide sequence isolated from the Sargasso Sea
gttgacgcttcctttagtcctgtaaaaagagttgcctactatgtagaaaatgctcgttttgagaagagaactgacttagacaagttaattgttgaacttgaaactgacggcaccttaaatcctaaagaagcaattgaacactcagctacaattatgcaacaacaattggctgcttttgtgaatcttgatgcaattgcagaacaagaagctaaaaaagagcaaaacgattttgatccgctgcttatgagatcaattgaagagcttgaattgaccgttagatcaacaaactgtttaaaagccgagagtattttcttgatcggggacttaattcaaagaagtgaattcgatttacttaagactcctaaccttggaaaaaaatctctcaatgaaatcaaagatgttcttgcatcaaaagggtttgcacttggcacaacaattgataattggccacctatggggtaac

SEQ ID NO: 255459 - DNA, 895 bp, Unknown
  Bacterial polypeptide expressing nucleotide sequence isolated from the Sargasso Sea
cagaattgctttggcagtggacatgaagttaaaggaaatagaaagagttctttattttgaaaactttatagtgatagaaccaggcttaactggcttacaaaaaaatcaacttttaaatgaggaagaattagcaaaatatcaagatgaatttggtgaagagaactttacagcaggtataggtgcagaagctgttcttgagatgctaaaaaatctggatttagaattagaaagaaaaaatcttgttagctttataaaagaaactaaatcaaaagttaacgaagaaagagcgatcaaaagattaaaactaatcgaatcttttattgaaactggtcagaaacctgaatggatgattatgactgtagttccagttataccacctgaattaaggcctttagttcctttagatggtggaagatttgcaacttctgatcttaacgatttatataggagagtaataaatagaaataatagattaaaaagattaatggatcttaaagctccagatataattgtaagaaatgaaaaaaggatgcttcaagaatctgtagatgctctatttgataacggtagaagaggaagagtaataacaggaacaggtaagagaccacttaaatctcttgctgaaatgttaaaaggtaaacaaggaagatttagacaaaatttattaggtaaacgagttgattattctggaagatcagtaatcgttgtcggtcctgatttaaaattacatgagtgtggtttaccaaaaaaaatggctcttgagctatttaaaccatttttatatgcaagattaaataaattaggcttagcttcaacaattaaacaagctaaaaaattagttgaaaaagaaacgaatgcagtttgggatgctttagaattaattttagagagcacc

SEQ ID NO: 255460 - DNA, 916 bp, Unknown
  Bacterial polypeptide expressing nucleotide sequence isolated from the Sargasso Sea
agaaatgaaaaaaggatgtgcaaagaatcagttgatgctttgttcgacaatgcagaaagaggaagggtatacaggggtgtaaataaacgtcctttaaaatctctatcagacatgctaaagggaaaacagggacgtttaaggcaaaatttgcttggtaagagagtagattattctggaagatctgtaatagttgtagggccggagttaaaacttcatcaatgtggaattccaaaaaaaatggctctagaactttttaagcctttcatatactcaaaattagagttgtatggtcttgcgaatacgattaaggcagcaaaaaggatggttgaaaaagaaagacctgaggtttgggatatattggaagaagttataagagaacatccagttttactcaacagggcaccaacattgcaccgtttgggaatacaggcctttgagcctgtattaattgaaggaaaagcaattaacttgcatccactagtttgtacagcatttaatgctgactttgacggtgatcaaatggcggttcatgttccattatcacttgaagctcagcttgaagcaagagtattgatgatgtcaacaaataatattctttctccctcaagtggaaagccaataattgttccatcacaagacattatattaggtctttactatttatctcttgttaaagagaagtcaaaaggtgaaggtatgattttctcgagtgttgaagaagttttaatagctttggatcatgatgtagttgacttgcaagcaagtgtaaaattaagaattcctgttaataatgaaaatgataaaaaagaatataaaactatagatactactcctggcagagctaagatatctaatgttattccaaagcatgcttcggtggattatgaaatagttaataaacttatgactaaaaaag

SEQ ID NO: 255461 - DNA, 873 bp, Unknown
  Bacterial polypeptide expressing nucleotide sequence isolated from the Sargasso Sea
gcaatatcagtaatagatttattagtaccaaccgagatacaagtcgaaaatgtttcagatactgtatcgaaggtaacactagagccgcttgaaagaggttttggacatacgctaggtaatgcccttagaagaattcttctgtcatcaatgcctggtgctgctgtaacagatgttgtgatagatggtatttctcatgagtattcaacgattgagggagttagagaggatgtaatagatattctattgaatcttaaagatatgccagtgaaattaattgaaggaaatgatgcagaactaaaactatctgtaaatgggccatgcgaagtaacatcttcttcatttgaggctcctggaaatgttgaattaacagatgctgatcatcatgttgtttcacttgtagataaaattaaattaaatatgtcagtttttgtaagaactggaagaggttatgagcctgcagatattagggatgatgaaaataatactgttggagggttaaaagttgatgcttcatttagtccagtaaaaagagtttcttattctgtagagaatgcaagatttgagaaaagaacagacttagataaattaatacttgagttagaaactgatgggactatcgatgcaaaaatggctatagagcattctgcaactataatgcagcaacaacttgcagcctttgttgatttagaagcaattgcagagcaagaagctaaaaaagagcaaaatgactttgatccactgctcctgaggtctatagaagaacttgagttaactgtaagatcaactaattgtttaaaagcagaaagtattttcttaattggtgatttaattcaaagatctgaatttgatcttctaaaaacacctaatcttggt

SEQ ID NO: 255462 - DNA, 856 bp, Unknown
  Bacterial polypeptide expressing nucleotide sequence isolated from the Sargasso Sea
ttacggagaaataaaaaaaccagagactataaattacagaactttcagacctgaaaaagatggtttattttgcgctagaatttttggaccaataaaagattatgaatgtctttgtggtaaatataaaaggatgaaatttagagggataatttgtgagaaatgtggtgttgaagtgactaaatctaatgttagacgagaaagaatgggtcatattaatcttgcaacaccagttgcccacatatggtttcttaagtcactacctagcagaatatctctagccatagatatgaaactaaaggaagttgaaagagttttatattttgaaaatttcattgttatagagcctggattaactggtcttaaaaaaaaccaactattatcagaagaagaactaataaaatttcaagacgaatttggtgaagagtctttcacagcggggataggtgccgaagctattcttgaaattctaaaatcaatagatcttcaaaaagaaaaagaacttctagttaaaactattaacgaaacaaaatcaaaagtttcagaagaaagatcaattaaacgtctaaagctcgtagattcttttattaaaacaggaaataaacctgagtggatgatattaactgtaatacctgttatcccacctgagctaagaccattagtccccctagatggaggaagatttgcgacttctgatttaaatgatctttatagaagagtaataaatagaaataatcgcttaaagagattaatggatttaaaggcaccagatataatagtcagaaatgaaaaaagaatgttacaggagtccgttgacgctctttttgataatggaagaagaggaagagtaataactggt

SEQ ID NO: 255463 - DNA, 681 bp, Unknown
  Bacterial polypeptide expressing nucleotide sequence isolated from the Sargasso Sea
caggtaattttgaaactgactcagaaacagaaataatgaatcctgatcaattgatcatgactttagactctaatgctgatatcgagattgaggcaaatgttgagactggaaaaggttatgtatctgctgaagtagcagaagatgaaaataaaataattggagaaataaaattagacgcaatgtttagtccagttgtaaaagcaacctataaagttgaaaatagcagagttggacaggttacagattttgataaattagtttttgaagttgaaactaatggtgcaataacacctgatgatgccattgctctagcagcaagaattttacaggatcaattgcaaccttttattaattttgatgaacctgaggtgcttccagatcaatcaaaggctgaagctttatcatttaattctaacctacttaaaaaagtagaagagttagagttgtcagttagatcagcaaactgcctcaaaaatgataatattatttacattggcgatctagtacaaaaatcagagtcagaaatgttgagaacaccgaattttggtagaaaatctcttaacgaaattaaagaggttttacaacaaatggagttaaatcttggaatgtcagttcctgattggcctccagaaaatattgatgaattagcaaagaaatacgaggaccctttcaataaataaa

SEQ ID NO: 255464 - DNA, 247 bp, Unknown
  Bacterial polypeptide expressing nucleotide sequence isolated from the Sargasso Sea
ttgatagaaaagaattggaaagaattgatcaagccatcaaaaatagatgtgcaatctagtgacgacaaaaaaatatcgaaaatagttgtagaacctctcgaaaggggatttgctttaactttaggaaatgctttaagaagagttttgctttcatcaatccaaggtaccgccgttacagctattcaaatagatggtgtactacatgaattttcatcaataaatggtgtaagagacggatgtaactaga

SEQ ID NO: 255465 - DNA, 929 bp, Unknown
  Bacterial polypeptide expressing nucleotide sequence isolated from the Sargasso Sea
ttactctttcaaagttcgaagagatagaatgggtcatatagagcttgctgctccagtttcacatatttggtttatgaaatctttaccgagtagaatagcaacattactagatatgacaataaagaatttagaaaaggtactttattttgaacaatttatagttgttgaaccaggattaacagatttaacaaaaggccaaatacttactgaagatcaatacatagaatatcaagatttacatggagaagattcatttagtgcatcaataggagcagaggctattgagcagatgcttcaaaatattgatcttcaaagtgattacgatcaattaaagcaagatctacttgagacaaaatccgaattaaaaaaagttaaaatcactaaaaggctaaaattaatagaacattttatatcatctaaaaataaaccagagtggatgattctaagagttttaccagttatacctccagaattgcgacctctagttcctctagatggtggtagatttgctactagtgatttgaatgatttgtatagaagagtaattaatcgcaataatcgacttaaaagattaattgatttacgtgcccctgacattattgttagaaatgaaaaaagaatgcttcaagaatctgttgatgcgctatttgataatggtcgtagaggcagagtaataacttctacaaataaaagacctcttaaatctttatcggatatgcttaaaggtaaacaaggcagatttagacaaaacttgttaggtaaaagggtagattattctggaagatctgtaatagttgttggtcctaatttaaaattacatcaatgcggtttgccaaaaaaaatggctttagaattatttaaaccatttatttttcataaactagatatttatggttgggctaacactataaaagctgcaaaaaaattag

SEQ ID NO: 255466 - DNA, 860 bp, Unknown
  Bacterial polypeptide expressing nucleotide sequence isolated from the Sargasso Sea
taaaagagttgactattctggtcgatcagtcattgttgtaggaccagaattaaaacttcatcaatgtggactaccaaaaaaaatggctttagagttatttaaaccattcatatacaataaactcgagtcttatggttttgcctcaactcttaaatctgcgagaaaaatggttgagtcagagagacctgaagtatgggacatacttgacgaagtaataagagaacaccctattcttttaaaccgtgcacctactttacatagattaggtattcaagcatttgagcctattttaattgaaggtaaggctattcaactccatccattagtttgtacagcctttaatgcagactttgacggtgaccagatggcagtccacatacctttgagtcttgaagctcaacttgaagcaagagtattaatgatgagcactaataatattctttcaccttcaagcggaaaaccaattattgtcccaagccaggatattgttcttggtatatattacttatcattaattaatgaaaatgaagatccaaagaaatattattctcatgtaggtgaggtagaatttgcactagaaaataaatcaatagaattacatacacctattatctatagaactaaaatctacaattcagaaatagatagtttcgaatataaaaaatataccacttccgcaggaagagtggtcctatttaaaactgttcctgaaaacaataacttgccttttgatgtgatcaataaagttcttacaaaaaaagatattagtaatcttttagacaatgtttacagatttacaggtcaaaaagcgacctgcatatttgttgatcaaatcatgaatgtaggatttaaatatgctg

SEQ ID NO: 255467 - DNA, 589 bp, Unknown
  Bacterial polypeptide expressing nucleotide sequence isolated from the Sargasso Sea
atgcctgcacagcgggcttttggttcatattgcgattgcgaggccacttcagtgattcaaaaaaattggcaacaactgattaaaccgacgaagttggatatcgttccgggttccgaccccgaacgcgcggcaaccatcgtcgctgaaccgcttgagcgcgggttcggactgaccttgggtaatgctctgcgccgtgtccttttatcgtcgttacatggcgccgccgtaacagcggttcaaattgacggggtcctccacgagttctcgtccgtgccgggcgtccgcgaagacgtgacggacattgtcttgaacatcaaggccatcgggctgcgaatgcacgtcgaaggaccaaagcggatgacgttgaaagcatccggcccaggggaagttaaggctagcgatattgaagccggtgccgacatcgaaattatgaatccagagttggtgctttgccacttggataagggggccaagctctccatggaattgactgtggaagcgggaaagggttacgtagccgctacgcagaaccggccggaagatagcccaatcggccttatacctgtggatgccgtttctccccggttcg

SEQ ID NO: 255468 - DNA, 754 bp, Unknown
  Bacterial polypeptide expressing nucleotide sequence isolated from the Sargasso Sea
gttgcaataccagatagacagaatcgaccatcaaacagcagatgatcgctcccaaacaggaacttttttaattggccctttagaaaggggacaagctacaactttgggtaattcacttaggcgagtccttatgggaggacttgaaggaagtgcagtaactgcagttagaattgcaggaattaatcacgaatatgcaacaattcctggagttagagaagatgttctcgatattcttcttaattgtaagcaactatcaataaatagttctaatccagagctcgaaatcggaagacttgttgcaagtggtccaatggaggtgaaggcgaatgatattcaattctcatctcaagttgaaattgttgatggtgaaaaaccgattgcaacgattcaagagggtcataacttagagttagaaattcatgttgaaagaggagtgggatatagacccgttgatcggaaaaatgaagagacaactgctattgatttacttcagatagatgcagtatttatgcctgtaaagagggttaattttacgattgatgaaacagctgttgcagaaggtgggacaggtagagaaagattaacaatggaagtagtaacagatggctcaacaacccctgatgacgctatcgctgaagcagcgaaccatttaattgaactctttcaacctctagctactgttacaatggttgaggaaatccctgaagaacctgaaccatctcctgaagctcaaattcctcttgaggaactaaac

SEQ ID NO: 255469 - DNA, 944 bp, Unknown
  Bacterial polypeptide expressing nucleotide sequence isolated from the Sargasso Sea
agaaagaatgggccatattgatttagcatctccggtagcccatatctgtttctttaaatcattaccatcaagaattggtcttatgttagatatgacattaagagatttagaaagggttttgtattttgaacaatatattgttattgagccaggactaactgaattaaagcacggtcagctcttaactgaggaagaatttttagattttcaggaccaatacggaactgattcttttactgcgggtattggagctgaggcaataagagaaatgttgtcttccattgatcttgaagcggagggagaaaaacttagggccgaattggcagaggcgactggtgaacttaaacctaaaaaaatcattaaaaggttgaaattagtagaaaattttatcgatggaggaaatcgtccggaatggatgatattaacagttgttcctgtaattccgcctgaacttcgtcctttagttccgttagatggtggcagatttgctacatcagatttgaatgacttatatagaagagtaatcaatagaaataatcgtttaaagcgcttaattgaattaagagctccagatataattatccgtaatgaaaaaaggatgttacaagaatctgttgatgctttgtttgataatggtaggagaggaagagttataacaggtggaaataagcgtcccttaaaatcattatctgatatgttaaaaggtaagcagggtagatttagacaaaacctgttgggaaaaagagtagatttttcgggcagatctgtcattgtaactggtccagagttaaaactgcatcaatgtggtttaccaaaaaagatggctttggaattgtttaaaccttttatttattctagattagaagcaaaaggactatcctctacagttaaacaagcaaaaaaattagtgaaaaagagagacctgaagtttgggatatcttaga

SEQ ID NO: 255470 - DNA, 962 bp, Unknown
  Bacterial polypeptide expressing nucleotide sequence isolated from the Sargasso Sea
ttatgaaaatgctcttgatgagtttggagatgaaagttttgaagttgctattggcgcagaggcaattaaaaaaatattagttgagatggaccttgaagaagaagttgttaaaattcgggaagatttgttgaaaactggttctgaaatcaaaagaaaaaaactagttaaaagattaaaattagttgaatcatttattgaatcaggttctaagcctgagtggatgatacttgaagttattccagttattccgcctgaacttcgtcctttggttccacttgatggaggtaggttcgcaacatcagatctgaatgatctttatagaagagttataaatagaaataatcgtctaaaaagattaattgaattgagagctcctgacattattattcgtaatgaaaaaagaatgttacaagagtctgttgatgcattatttgataatggaagaagaggtagagttattactggtgtcaataaaagaccattaaaatccttatctgatatgcttaaaggaaaacaaggtagatttagacaaaacttacttggtaaacgagttgattattctggaagatcagtaattgttgtaggtccagagttaaaattacatcaatgtggtttgcccaaaaaaatggcattagaactttttaagccttttatatattctcgtttagaattatatggtttagccagtacagttaaagctgcaaaaagaatggttgaaaaagaaaggcctgaagtttgggatattttggatgaagtaattagagagcatcctgttatgcttaatagagctccaacattacatagattaggtattcaagcttttgaaccagtcttaattgaaggtaaagctataaatttgcaccctctagtatgtacagcttttaatgcagattttgatggtgatcaaatggctgttcatgttcctttatcacttgaagctcagttagaggctagagtttgat

SEQ ID NO: 255471 - DNA, 799 bp, Unknown
  Bacterial polypeptide expressing nucleotide sequence isolated from the Sargasso Sea
ggtgttgaagttacaaaatcaaatgtgagaagagaaagaatgggtcacattaatcttgctacaccagtagcacatatttggttcttaaagtctcttccaagcagaattgctttagcagttgatatgaaattaaaggaaatagagagagttctttattttgaaaactttatagtaatagaaccaggtttaactggtttacaaaaaaatcagcttttaaatgaggaagaattagcaaaatatcaagatgaatttggtgaagagagctttacagcaggaattggtgcagaagccgttcttgagatgctgaagaatttagatttagaatcagaaagaaaaaatcttgttagctttattaaagaaaccaaatcaaaagttaacgaagaaagagcaatcaaaagattaaaactaatcgagtcatttattgaaactggtcaaaaacctgagtggatgattatgacagtagttccagttataccacctgaattaagacctttagttcctctagatggtggaagatttgctacttcagatcttaacgatttatacagaagagtaattaatagaaataacagactaaaaagactaatggatcttaaagctccagacatcattgtaagaaatgaaaaaaggatgcttcaagagtctgtagatgctttatttgataatggaagaagaggcagggtaataacaggaacaggtaagcgaccacttaaatctcttgctgaaatgttaaaaggtaaacaaggaagatttagacaaaatttattaggtaaacgagttgattattctggaagatcag

SEQ ID NO: 255472 - DNA, 835 bp, Unknown
  Bacterial polypeptide expressing nucleotide sequence isolated from the Sargasso Sea
aagaggttttggacaccactcggaaatgctctaagaagaatattactttcctcaatgcctggtgctgctgtgacagacgtcgcaattgatggaatatctcatgaatatagcactatcgaaggagtaagagaggatgtaatagatattcttttaaatattaaagacatgcctataaatcttattgaaggagactcagctgaagtaacacttgatgtaaaaggtccttgtgacgtattagcttcatcctttgatgtacctggaaatctagagcttgttaatcaagattttcatatcgctactattgttgataaggttaatctcaaaatgactttaactgttagaaacggaagaggttatgagccagctgacttgagagaagacgaagatagggtagttggagctcttaaggtagacgcatcatatagtcctgttagaagagtttcttacacagttgataacgcaagatctggaaaaagaactgacttagataaattagttttagagcttgaaactgacggcacattagatccaaagatggcaatagaacactctgcaacaattctgcaacagcagcttggtgcgtttgttgatctagatgcaatagctgaacaagaggctaaaaaagatcaaaatgactttgatccaatcttattaagatcgattgaagagcttgagctaacagtaagatctactaattgtctcaaagcagagagtatttttcttataggcgacctaattcatagatctgagtttgatttattaaaaactccaaatctaggtaagaaatctttgaatgaaattaaagatgttttagcttctaaagatttatcgcttg

SEQ ID NO: 255473 - DNA, 878 bp, Unknown
  Bacterial polypeptide expressing nucleotide sequence isolated from the Sargasso Sea
gatgaaatttggagaagaggcttttacagcaggtattggtgctgaagcagttttagagatgcttaaaaatctagatttagagttagaaagaaaaaatttagtaaactatatacaagaaactaaatcaaaagtgaatgaagaaagagcaattaaaagattaaagttgatagagtctttcattgaaacaggtcaaaagcctgaatggatgattatgacggttgtgccagttatacctccagaattaagacctcttgttccattagatggaggcagatttgcgacatcagatcttaatgatttatacagaagagttataaatagaaacaatcgtctgaaaaggttaatggaccttaaagcaccagatattattgtaagaaacgaaaaaagaatgctccaagaatcagttgatgcactatttgataacggtagacgaggcagagttattactggaactggaaaacgaccacttaaatctctagcagagatgttaaaaggaaaacaaggtagatttagacaaaatttattaggcaaacgtgtagattattctggaagatctgtaattgttgttggaccagatttaaaacttcatgaatgtggtcttccaaaaaaaatggcactagaattgtttaaaccttttttatatgcaagattaaataaattaggtttagcatcaactataaaacaagcaaaaaaattagttgagaaagaaactaatgctgtttgggatgcacttgagcttatagtaagagaacatccagtattacttaacagagcaccaacattacatagattaggggttcaagcatttgagccaaaattaattgaaggcgatgcaatagagttgcatccattaacttgtgcagcattcaatgctgact

SEQ ID NO: 255474 - DNA, 855 bp, Unknown
  Bacterial polypeptide expressing nucleotide sequence isolated from the Sargasso Sea
ggtgaaattaaaaaaccagaaactattaattatagaacatttagacctgaaaaagatggtttattttgttcaagaatttttggtccaataaaagattatgaatgtctatgtggaaaatacaaaagaatgaaatttagagggataatatgtgaaaaatgcggcgttgaagtttgtagagctaatgtaagaagagagagaatgggccatattgaattagcatgtcctgttgcacatatatggtttttaaaatctcttccaagcagaatatctttagctgtagatatgaaacttaaagaagtcgaaaaagttctctattttgaaagttttatggtaattgagcctggattaactaaacttaaaaaaaaacaacttttatccgaagaagaatatgtaaaagcacaagaacagtacggagaagattcattcgtggcatcaataggagctgaggctataagggatttattaataaatttagatttaaaagctgaaaaggaaaaactaagatccatattaaaagaagtaaagtctaaagtagctgaagaaagaactacaaaaagattaaaattagtagaatcgtttcttgaatctggaaacaaacctgaatggatgattctaacaactatacccgttattccaccagagttaagacctcttgtacctttagatggaggtagatttgccacttctgacttaaacgatttgtatagaagagtaataaatcgaaacaatagattaaaaagattaatggaccttaaagctcctgatattattgtaagaaatgaaaaaagaatgcttcaagaatcagtcgatgctttatttgataacgggagaagaggaagagtaataacaggaaca

SEQ ID NO: 255475 - DNA, 508 bp, Unknown
  Bacterial polypeptide expressing nucleotide sequence isolated from the Sargasso Sea
gatgcaatgtttagtcctgtaattaaaacatcctataaggtgaaaaatagtagagttggtcaagttacagattatgataagctgatatttgaggttgaaacaaatggtgttatcgcaccagacgatgctatagcacttgcagcaagaatacttcaagatcaattacaaccatttatcaactttgatgaaccagaaattttacctgatcaatctcaggttgaaaaactatcttttaattctaatttattgaaaaaggttgaagaacttgaattgtctgtaagatctgcaaattgtcttaaaaatgataatataatttatattggtgatttggtccaaaaatctgaatctgaaatgcttcgaacaccgaattttggaagaaaatccttaaatgaaattaaagaagtacttcaacaaatggaattaaatttaggtatgtctgttccagaatggcctcctgaaaacattgatgaacttgcaaaaaaatacgaggatccatttaataaataaa

SEQ ID NO: 255476 - DNA, 553 bp, Unknown
  Bacterial polypeptide expressing nucleotide sequence isolated from the Sargasso Sea
aatggaagccactgacataaacattaaaaattggaaatcacttattaaacctggaaaacttgatattaaattaagcgatgacaagtcatatgcaaaaattatagctgagccattagaaaaaggctatgggttgactttaggaaattcattaagaagaatattgttatcttctataagaggtacagcagtcactgcaattcaaatagatggagttctacacgaattttcttcaataaaaggtgtgcgagaagatgttacagatattgtattgaacgtaaaatcactagcgttaaaaagtaatattgagggaacaaaaaaattaatacttgacgcaaaaggtcctggtgaaattaaagcttcaaacataactcctgtttctgacgtagaaatattaaatccagaccttgttatttgtaatttagatgaaaatacaaattttcatatggaaatgacagttggaaatggaaaagggtatgtttctgctgatatgaacaagcctgaagaacctcctttaggattaataccaatcgactcactttttagtcctgtaaaa

SEQ ID NO: 255477 - DNA, 775 bp, Unknown
  Bacterial polypeptide expressing nucleotide sequence isolated from the Sargasso Sea
atgcaatcaggaacaaatattgttgataaaaattggaaagatctaataaaacctaacaaacttgatattacaagcaacaatgacaaatcagtagctaaagtagtagcggaaccattagaaaaaggattcgggcaaacaatagggaatactttaagaagaattttattatcgtctattcaaggagcggcggtaaccgctattcaaatagatggagtgctacatgaattttcatctataaagggagtgagagaagatgtaactgatatcgttttaaatgtaaaaaatcttgcaattaaatgcgagtcaaatagtcaaaaaaaaatagtactagatgttaaaggaccaaaagaagttaaagcaaaagatattactcttgtttcagaagttgaaatacttaacccagaacagactatatgcaatgttgatgaaaaaacaaatttccatatggagctttttgtcaattctggtaaaggatacgtgcctgctccaaaaaacagatctgaagacagtccattaggattaatttctatcgactctctatttagtcctgttaaaaaagtttctttttcaatcgaaaatacaagagcaggaagtgcactagattatgacaagttgattatgaatgttgaaacaaacggaaccgttgctgcagaagacgccatagcttattctgcaagaatttttcaagatcaattgtcaatgttcgtaaattttgacgatcctaaagaagttataaaggaagttaaatcctccgaaccagagtttaacaaaaatc

SEQ ID NO: 255478 - DNA, 889 bp, Unknown
  Bacterial polypeptide expressing nucleotide sequence isolated from the Sargasso Sea
tattttgaaaattttattgtaattgaacccggtttaactggcttacaaaaaaatcaacttttaaatgaggaagaattagcaaaataccaagatgaatttggcgaagaagcttttactgcaggtattggagcagaagctgttttagaaatgttaaaaagtttagatttagagttagagaaaaaaaacttagttaattatatcaaagaaacaaagtctaaggtcaatgaagaaagagcaattaaaagattaaaattaatagagtcttttatcgagacaggtcaaaaacctgaatggatgataatgacagttgttcctgtcatccctccagaattaagaccactggttccactcgatggaggtcgttttgctacgtcagatttaaatgatttgtatagaagagtaataaatagaaataatcgtttaaaaagattaatggatctcaaagctcctgacataatagtgagaaatgaaaaaagaatgcttcaagagtctgtggatgcattatttgacaatggtagaagaggtagagtaattacaggtacaggtaagaggcctctcaaatctttggctgagatgttaaaaggaaaacaaggtagatttagacagaatcttcttggtaagagagttgattattctgggagatcagtaattgtggttggtccagatttaaaattacacgaatgtggtcttccaaaaaaaatggctttagagttatttaaaccatttttatacgcgagattgaataaacttggtttagcctctacaatcaaacaggctaaaaaattagtcgagagagagaccaatgcagtttgggacgcattagaactcattgtaagagagcaccctgtgctactaaatagagctccgacacttcacagattaggagttc

SEQ ID NO: 255479 - DNA, 814 bp, Unknown
  Bacterial polypeptide expressing nucleotide sequence isolated from the Sargasso Sea
tcttggtctttcggagaaattaaaaagccagagacgataaattatagaactttcaagccagaaaaagatggtcttttttgtgctagaatttttggtccaataaaagattatgaatgcctatgcggtaagtataaaagaatgaagtttagaggaattatttgcgaaaagtgtggtgttgaaataactagatcgaatgtaagaagagaaagaatgggccacatagagctggcctctccagtagctcacatttggtttttaaaatcattacccagtagaattgcttctgcaattgatatgaagcttaaagatgtagaaaaagttttatattttgaaagttttcttgtaattgaaccaggattaacaaaattaaaaaaaaatcaattactgacagaagaagagtatgttaaagcgcaagaagagtacgaggaaggctccttcgaagcaggtattggtgctgaagctataagaaaaattttaattaatctcgatttaaaagctgaaagagaaaaattaaaagcttctttaaaagaaataaaatcaaaagttactgaagaaaaagttacaaagagattaaagttaatggagtcatttatcgaatcaggaaataaacctgagtggatgattttaacaagtatacctgtcattccaccagagctaagacctctagttcctttggatggcggaagatttgctacatctgatttgaatgatttgtacagaagagttattaatagaaataatagattaaaaagattaattgatttaaaagcacccgacataattgtaagaaatgaaaaaagaatgcttcaagaat

SEQ ID NO: 255480 - DNA, 886 bp, Unknown
  Bacterial polypeptide expressing nucleotide sequence isolated from the Sargasso Sea
agaaccaggattaacagatctcaaaaaaggtgaaattatatcagaagaacaatatatacaatatcaagacgattatggtgaagactcttttagtgcggcaataggtgctgaagcaatagaacaaatgcttctaaatattgatttagaatctgatcataaacaaattaagattgatttatctgaaaccaaatctgaattaaaaaaaactaaactaactaaaagattaaaattaattgagtcatttttagtttctaaaaataaaccagagtggatgatattaagagtacttccagttataccacctgaacttcgtccattagttccattagatggtggaagatttgctacaagcgaccttaatgatttgtatagaagagtaattaatagaaacaatagattaaaaagattaatagatcttagagcaccagatataatcataaggaatgaaaaaagaatgttgcaagagtctgttgatgcattgtttgataatggaagaaggggtagagtaattacttcaacaaacaaaagaccattaaaatctttatctgatatgcttaaaggaaaacagggtagatttagacaaaatcttcttggtaaaagagttgattattcaggtaggtcagtaatagtagttggaccaaacttaaaacttcatcaatgtggaattccgaagaaaatggctttagaattgtttaaaccttttatttttcataagcttgatatttatggatgggcaaatactattaaagcagcaaaaaaattggtagaaaaagaagatcctagagtttgggatattcttgaagaagttataagggaacatccaatattgttgaatagagctccaacacttcatagattgggtatccaagcttttgaaccatattga

SEQ ID NO: 255481 - DNA, 314 bp, Unknown
  Bacterial polypeptide expressing nucleotide sequence isolated from the Sargasso Sea
gatggaaactgaaaatgttaatattaaaaattggaaatcacttattaaaccggcaaaattagatgttaaaattagtgatgacttaacacatgcaacaattatagcagagccacttgaaaaaggttacggcttaactttaggtaattctttaagaagaatattattatcttcaattagaggtgctgcagttacttcaattcaaatagatggtgttttgcacgagtttacctcaataaaaggggtaagagaagatgttactgatattgtattaaacgttaaatctttagcattaaaatgttctgctgagggaacaa

SEQ ID NO: 255482 - DNA, 787 bp, Unknown
  Bacterial polypeptide expressing nucleotide sequence isolated from the Sargasso Sea
cagattaaaatcaagcgatatcaaaaaaggctcaaacttatagaatcactaatttcttctggaaatagacccgaatggatgattttaaaagttcttcctattttaccacctgacttaaggccacttgttcctctagatgggggaaggtttgctacttcagatttaaatgacctctataggagggtgatcaacagaaataatagacttcaaagattattggatctcaatgcaccagatatcattgtaagaaatgaaaagaggatgttacaaaaatctgttgatgcactcctagacaatggaagaatgggtagagcggttacaggttctaataagagaccgcttaagtctcttgcggatatgattaaagggaagcaaggtcgatttagacagaatttgttaggcaaaagggttgattactctggcaggtctgtgattgttgtagggccaaccttaaagcttcatcagtgcggcattcctaaaaagatggcattagagctattcaagccatttgtattcagtaagcttatttaccaaggtgaggcgtcaacaatcaaatctgccaaaaggctcgtagagcttgagggggcagagatttgggatattttagacggcgtcataagacagcatccaatcctgcttaatcgtgcaccaactcttcacagactcggtatacaagcttttgagcctgttttggttgaaggaaaagccattcagttacatcctcttgtatgcaaagcctttaatgcagactttgatggagatcaagatggcagttcatgtgccacta

SEQ ID NO: 255483 - DNA, 813 bp, Unknown
  Bacterial polypeptide expressing nucleotide sequence isolated from the Sargasso Sea
ctgaacctttagaaaaaggttatggtttaacattaggaaattcgttaagaagaatattattatcatcgataagaggtacagctgtcacttcaattcaaattgatggcgttttacatgaattcacctcaattaaaggagttagagaagacgtcacagatatagttttaaatgttaaatctttagctttaaaaggtaattcagagggaacaaaaaaattaatcttagatgcaaaaggtccaggtgtaataaaagcatccaacataacaccgataaatgaaatcgaaatattaaaccctgatcttgtaatttgtaatttagatgaaaataccaatttccatatggagatgacagttggaaatggaaaggggtacgtatccgcagacttaaataaaccagaagaaccacctcttggattaatacctatcgactctttgtttagtccagttaaaaaagtctcatattcagtaagtactgctagagaaggtaatgcacttgattatgataaacttactatggaagttgaaacaaatggttcgatttcagctgaagatgctttagcttattctgcaagaatttttcaagatcaactttcaatgtttattaattttgatgagcctcaagaagtttctattacagaatctccaaaagaaccagaatttaatagaaatcttcttagaaaagttgacgaacttgaactttcagtaagatctatgaactgtttaaagaatgacaatataatttatatcggtgatttagtccaaaaatctgagggtgaaatgttaagaacgcctaacttggaagaaagtcattaaa

SEQ ID NO: 255484 - DNA, 587 bp, Unknown
  Bacterial polypeptide expressing nucleotide sequence isolated from the Sargasso Sea
aatgacaaacagtaacttaagaactgaaaatcactttgactacgtcaaaatttcaatagcttcaccccaaagaataatggattggggtcagaggacactgcccaatggacaagtagttggtgaagttacgaaacctgaaactatcaattacagaacacttaaaccagaaatggatggattgttttgtgaaaagatttttgggccatctaaagattgggaatgccattgtggaaagtacaaaagggtaagacatcgcggtatagtttgtgagagatgtggggttgaagtaactgaaagtagagtcagaagacataggatgggctatataaaactcgctgcgccggtttcccatgtttggtatttgaaaggaatccctagttacgttgcgatacttttagatattccgcttagggatgtcgaacaaattgtttattttaattgttatgtcgttttagatccaggtgatcataaggaacttaaatataagcaattgctcactgaggatgagtggctggaaattgaagatgaaatttatgctgaagattcaactatcgaaaatgaaccttttgttggaattggtgctgagg

SEQ ID NO: 255485 - DNA, 841 bp, Unknown
  Bacterial polypeptide expressing nucleotide sequence isolated from the Sargasso Sea
acttttagaccagaaaaagatggtcttttttgctcaagaatatttgggcctgtaaaagactacgagtgtctttgtggtaaatataaaaggatgaagttcagagggataatttgtgagaagtgtggtgtagaagttacaaaatctaatgttagacgagaaagaatggggcatattgatctagcatgccctgtagctcatatttggtttctaaaatcactaccaagtagaatttctttggctattgatatgaaattaaaggaagttgaaaaagttctttatttcgaaagctttattgttattgaaccaggtctaacaaagttaaaaaaaggccagcttttaagtgaggaagaacttataaaatctcaagatgaatttggagaagacgcttttactgctggcataggagccgaagctgtcagagaaatacttatcaatcttgatcttcagtctgagcaaaaaaaattaagagagtctttaaaagaggtaaaatcaaaagtaactgaagaaagaacaattaaaagattaaaattaattgagtcttttattaattctggaaataaaccagagtggatgattttgactacagtaccggtaattccaccagaattaagaccattagtgcctttagatggtggaagatttgctacatcagatcttaatgatttgtatagacgagtaattaatagaaataatagacttaaaaggcttttagatcttaaagcaccagatattatagtaagaaatgagaaaagaatgcttcaagagtctgttgatgctctttttgataacgggagaagaggcagagtaattactggaacaggaaaaagaccgcttaaatctt

SEQ ID NO: 255486 - DNA, 976 bp, Unknown
  Bacterial polypeptide expressing nucleotide sequence isolated from the Sargasso Sea
cgctttgcgacctcggatctcaacgatctctatcgacgtgtgatcaaccgcaataatcgtctgaagcggctactcgacctgaacgcgccggacatcatcgtgcgaaacgaaaagcgtatgctgcaggaatcggtggatgcgctgctcgataacggccgtcgcggacgcgctattactggctcaaacaagcgcccgctcaagtcactggccgacatgatcaagggtaagcagggtcgtttccgacagaacctgctgggtaagcgcgtggattattccggccgttcggtaatcgtgaccggcccgactctgaagctacaccagtgcgggctgcccaagaagatggcactcgagctcttcaagccgttcatctttggtaagctcgagttgcgtggcctggcgagcactatcaaggccgccaagaaaatggtcgagcgcgagccgcccgaggtctgggatattctcgctgaggtgattcgcgagcaccctgtgctgttgaacagggcgccgaccctgcatcgtttgggtattcaggcgttcgagccggtgctcattgagggtaaggcgatccagctccatcccttggtttgtgcggcgtataacgcggacttcgatggtgaccagatggcggtacacgtgccgctgacgctggaagcccagctcgaagcccgggcgctcatgatgtctaccaacaatattctgtcccctgcatccggtgatccgatcatcgtcccctcgcaggacgtggtactgggtctctactacatgacccgcgaccgcgtgaacgcgaagggtgagggcatgtcttttgctgacacagaagaggtgcaacgtgcttatggtagtgggcgggttgagctgcacgcgcgggtcaaggtgcgcatccacgagacactgatgaatctgggtgaagagacgactgaacaaacgcgtatcgtggagactacggtgggacgcgctttgctgtgggatatcgtgc

SEQ ID NO: 255487 - DNA, 226 bp, Unknown
  Bacterial polypeptide expressing nucleotide sequence isolated from the Sargasso Sea
atgccaacaacaaataatgttatagataaaaattggaaagatttaataaaaccaaacaaactacaaattactagcaacaaagataaatctgttgctcaagttgttgcagaacctttagaaaaaggttttggccaaacaataggaaattcattaagaagaatacttttgtcgtctattcaaggagcagcagttaccgcgatacaaatcgatggagttttacatgagt

SEQ ID NO: 255488 - DNA, 886 bp, Unknown
  Bacterial polypeptide expressing nucleotide sequence isolated from the Sargasso Sea
gttgatgcattatttgataatggcagaagaggtagagttataacaggtgttaataaaaggccacttaaatcgttgtcagatatgcttaaaggtaaacaaggaagatttaggcaaaatcttcttggtaaaagagttgattattctggaagatcagtaattgttgtaggtccagatttaaagttacatcaatgtggtcttccaaaaaaaatggctttagaattattcaaaccatttatttattctaaattagaactttatggtttggcgagcacagttaaagcagcaaaaaggatggttgagaaagaaagaccagaagtttgggatattctggaagaggttattagggaacaccccgttatgcttaatagggccccaactttgcacagactaggaattcaggctttcgaaccagttctaattgaaggaaaagctattaacttgcatcctctagtttgcaccgcttttaatgccgattttgatggagatcagatggccgttcatgtgcctctttctcttgaagcgcaattagaagctagggtacttatgatgtcaactaataatatactttcaccgtctagtggaaagcccataatagtaccatctcaagatattattttaggattatattatttatccatgataagcgatggtcaaaaaggtgaaggtatgattttttcaaaacctgctgaagctctaatagcattagacaattctcaagttcatttgcaggctaaggtcaaaattagagttgaaacttatgatgataaaggaaataagtccattgaattagtcgaaactactccaggtagagcaaaattatcaacattattacctgcgcacagatcagttgattataatactataaataaattaagacaaaaaaaga

SEQ ID NO: 255489 - DNA, 938 bp, Unknown
  Bacterial polypeptide expressing nucleotide sequence isolated from the Sargasso Sea
ctttactttgtaaaaacaataaacgaaacaaaatctaaagttgctgaagaaagatcaataaaaagattaaaacttatagagtcctttatcgaaacaggcaataagccagaatggatgatattaactgtaataccagttataccaccagagctaagacctttagttccactggatggcggcaggtttgctacttctgatcttaacgatttatatagaagagtaattaatagaaataaccgtttaaaaagactaatagatttaaaagctccagacattattgttagaaatgaaaaaagaatgcttcaagagtcagtagatgcactctttgataatggtagaagaggaagagtaataactggtactggcaagagaccacttaaatctttggctgaaatgcttaaaggaaaacaaggaagatttagacaaaatttattgggtaaaagagtcgattactctggaagatcagtaattgtggtaggccctgatttaaaacttcatgaatgtggtctaccaaaaaaaatggcattagaattatttaaaccatttttgtatgcgaggcttaataaattaggtcttgcttctacaattaagcaggcaaaaaaattagtagaaaaagaaagagatgaagtttgggatgctttagaaataatagttagagaacatccagtaatacttaatagagctccaacgctccatagactaggtgttcaagcttttgaaccaaaattaattgaaggtgatgctatagaattacacccattaacttgtgcagcttttaatgctgactttgatggtgatcaaatggctgttcatatacctttaagtttagaagcccaattagaagcaagagtgcttatgatgtcgactaataatattctaagtccatcaaatggaaaaccaataattgttccaagtcaagacatgattttaggaatata

SEQ ID NO: 255490 - DNA, 883 bp, Unknown
  Bacterial polypeptide expressing nucleotide sequence isolated from the Sargasso Sea
gccaaagtaattgctgaacctttagagaagggtttcggacaaacaataggtaattcattaagaagaattttattatcttcaattcagggcgccgcagtaacctcaattcaaattgatggagttcttcacgaattttcttctataaagggtgttcgagaagatgttactgacattgtattgaatgtaaaaaatttagctattaaatcatcttcttcatctccaaaaaaaattattttggacataaaaggtccaaaagaagttaaagctaaagatataactttggtgccagaggtagagattttaaacccagagcaaactatatgtaacttagatgaaaaaacacaatttcatatggaattaatggtaagtacaggaaaagggtatgttcaagctccaaaaaataagtctgatgatagtcctcttggacttatctctatagactctttatttagtccagttaaaaaagtttcattttctgtagaaaacactagagcgggaagcgctttagattatgacaagctagttatgactgtagagacaaatggtacagtagatgcagaagatgcaatagcttattcagcgagaatatttcaagatcaattatcaatgtttgtgaattttgaagatccacaagaaatcgttaaagaagttaaatctgcagaaccagaatttaatagaaatttgctaaaaagagttgaagaacttgaactctcagtaagatcaatgaactgtcttaaaaatgataatataatttatatcggcgatttagttcaaaaaactgaacctgaaatgttgagaactccaaactttggtagaaaatctttaaatgaaatcaaagaagttttaaatactatgtctttatacttgggaatggaaattccaa

SEQ ID NO: 255491 - DNA, 827 bp, Unknown
  Bacterial polypeptide expressing nucleotide sequence isolated from the Sargasso Sea
aatgaaagatttaacaaacttatttaaaaccaacaaccagactcttaattttgatcagattaagatttctgtttcaagccctgagcaaatcagatcgtggtcttttggtgaaatcaaaaagccagagactattaattacagaaccttcaagcctgaaagagagggtttattttgtgcaaggatatttggacctacaaaagattatgagtgtttgtgtggaaaatataagagaatgaagtttaaaggtatcacatgtgaaaaatgtggagttgaagttactctctctaaagttagaagagaaagaatggctcatattgaattagcagccccagttgctcacatttggtttttaaagtcattacctagtagaattggtcttgcacttgatatgactttaaagaatttagagaaggttctatattttgaaagccatatagtgattgatcctctaatgtctggcttaagttccaaccaattactaactgatgaagaattagaggaggctatagatcaatttggtgaggactcttttaagcatggcatcggtgcagaggccgttcaagaaattttatctaaaattaatttagaagctgaaatagaaaaattagtcgaggaaagtgagtctacttcatctgaaactaaaaagaaaaaaattctaaaaagaatgaaagttatggagggttttaaaaactctaacattaaacctgagtggatggttttaaaagtacttcctggtattccacctgagttgagaccacttgtacctttagagggtggccgttttgctacatcagacctaaatgacttgtatcgtcgggttattaata

SEQ ID NO: 255492 - DNA, 901 bp, Unknown
  Bacterial polypeptide expressing nucleotide sequence isolated from the Sargasso Sea
tatgactgttgtaccagttataccacctgaattaagacctttagttccattggatggtggtagatttgctacttcagatcttaacgatttatatagaagagttatcaatagaaataatcgtctaaaaagacttatggatcttaaagctccagacatcatagtcagaaatgagaagagaatgcttcaagaatctgtagatgcattatttgataatggtagacgaggaagagttattactggaactggaaaaagacctttaaaatctttagctgaaatgcttaagggtaagcaagggagatttagacaaaacttacttggaaaacgtgtcgattattctggaaggtccgtcatagttgtaggacctgatttaaaacttcatgagtgtggtcttccaaaaaaaatggctttagagttatttaagccatttttatatgcaagactaaataaattaggattagcgtcaacgattaagcaggcaaaaaaattagtagaaagagaaactaacgctgtctgggatgctttagaacttattgtacgagaacatccagttctacttaatagagcaccaacattacatagattaggtgttcaggcttttgagcctaaattaattgagggcgacgctatagaattacatcctttaacttgtgcagcatttaatgctgactttgatggagatcaaatggctgttcatgttccattaagtttagaagctcaactagaggcaagaattctaatgctatctacaaataatattttatcaccttccaatggaaaaccgataatagttccaagtcaggatatgattttaggtatttattatttatctcaagaaccattaacagataagtctgcaggttactttattgatgctgatcaaattgaatatgcattatcatca

SEQ ID NO: 255493 - DNA, 846 bp, Unknown
  Bacterial polypeptide expressing nucleotide sequence isolated from the Sargasso Sea
caatttagttgtcccagtagctcacatatggtattttagatcattacctaataaaattggataccttctaggtcttgcttccaaaaaacttgacatgattatttattatgaaagatatgttgtaattgagcctggtgaagctattaatgacgaaggtgaaaagcttcaaaaaatggattttttaactgaagaagaatatttaaatgttagagaaagactacccgaagataatcaatatctcgaggatagtgaccctaaaaaatttatagcaaaaatgggtgctgagtgcttgattgaacttctttctaggattgatttagaaagtttgtcatatgaattgagacataaagctaataatgagacatctaaacaaagaaagactgaggctttaaaaagattacaagttgttgaagcgttcagagatgcagatacaaggaaggaaaatagacctgaatggatgataatgaaagttataccagttatccctccagaattaaggcctcttgtgcctcttgacggaggtagatttgctacatcagatttaaatgatttatacagaagagtaatcataagaaacaataggctaaaaagactagtcgaaattaaagctcctgaggtaatattgaggaatgaaaaaagaatgcttcaggaatcggtggattctttgtttgataacaccagaaaatcatctgcagttaaaacagattccaatagacctttaaaatccttgtctgactcattaaaaggaaagcagggaagatttagacaaaacttattagggaaaagggtagactattcagctcgttcggttattgttgttggaccagaattaaaattatacgagtg

SEQ ID NO: 255494 - DNA, 811 bp, Unknown
  Bacterial polypeptide expressing nucleotide sequence isolated from the Sargasso Sea
aaccaattattatctgaagaggaattaattaaataccaagatgaatttggtgaagaagcattttctgctggtattggtgccgaagctatcttggaaattttaaaatcaatagatctgcaaaaagaaaaagaacttttagtaaaaacaataaacgagacaaaatcaaaagtttcagaggaaagatcaattaaacgtctaaaactcatagactcttttattaaaacaggtaataaacctgagtggatgattttaactgtaattccggttattccacctgaattaaggccattagttcctctagatggaggtagattcgctacctctgatttaaacgatctctatcgaagagtaataaatagaaataatcgattaaaaagattaatggatttaaaagctcctgacattattgtaagaaatgaaaaaagaatgcttcaagagtcagtagatgctcttttcgataatggaagacgtggtagggtaataactgggacaggtaaaagaccattaaaatctttagcagagatgttaaagggtaagcaaggtagatttagacaaaatttattaggtaaaagagttgattattctggtaggtcagtcattgtagttggtcctgacctaaaattacatgaatgcggtttaccaaaaaaaatggctttagaattatttaaaccttttttatatgcaagattaaataaattgggtttagcatcaacaattaaacaagcaaaaaaattagtcgaaagagaaaccaatgcagtctgggatgcactagagcttattgtaagagagcaccctgtcatacttaatagag

SEQ ID NO: 255495 - DNA, 256 bp, Unknown
  Bacterial polypeptide expressing nucleotide sequence isolated from the Sargasso Sea
agctaaaaaagagcaaaatgattttgatccactgctacttaggtctattgaagaacttgaattgactgtaagatcaactaattgtttaaaagctgaaagtattttcttaattggtgatttaattcagagatccgaatttgaccttttaaaaacacctaaccttggtaaaaaatctcttaatgagattaaagatgtgctagcttcaaaagggctttctctgggtatggtattagaaaactggccaccgctgggttaa

SEQ ID NO: 255496 - DNA, 915 bp, Unknown
  Bacterial polypeptide expressing nucleotide sequence isolated from the Sargasso Sea
aatgttcgtagagaaagaatgggtcatataaatttagcaacacctgttgctcatatatggtttttaaaatctttacctagtagaatttctttaactattgatatgaaattaaaagaagtagaaagagttttgtattttgaaaattttatagttattgaaccagggttaactccgcttaaaaaataccagttattaaatgaggaagaacttataaaatatcaagatgagtatggagatgaagcttttactgccggtataggagctgaagcaatacttgaaattttaaagtctattaatttagaaaatgaaaaagctctattagttaaaacaattaatgagacaaaatctaaagtagccgaagaaagatctataaaaagattgaaattaatagagtcatttatcgaaacaggaaataaacctgagtggatgatattaactgtaattccagtaattccaccagagcttagaccattagttcctttagatggtggtagatttgctacctctgatcttaatgatttatatagaagagtaataaatagaaataatcgtttaaaaagattaattgatttaaaagccccagatataatcgttcgtaatgagaaaagaatgctacaagaatctgttgatgctctatttgataacggtagaagaggaagagttataactggaactgggaagagaccactaaaatcattagctgaaatgttaaaaggaaaacaaggtagatttagacaaaatcttttaggtaaaagagttgattattcaggaagatcagtaattgttgttggaccagatttaaaattacacgaatgtggattaccaaaaaaaatggccctagaattattcaaaccatttttatacgctagattaaataaactaggtcttgcatcaacgattaaacaggcaaaaaaa

SEQ ID NO: 255497 - DNA, 766 bp, Unknown
  Bacterial polypeptide expressing nucleotide sequence isolated from the Sargasso Sea
gcatttggagctattcaaaccatttgtctttagtaaattgatttatcaaggtgaggcttccacaatcaaatctgcaaaaagactagtagagcttgagggggccgagatttgggatattttagacggtgttataagacaacaccctgtgcttctgaatcgcgctccaacccttcataggctcggaattcaagcttttgagcctgtcttagttgaaggtaaagcgattcaattacatcctcttgtttgcaaggcgttcaatgctgactttgatggtgaccagatggctgttcatgttccactatcaattgaggcgcaacttgaaagtagggcactgatgatgtcatccaataatattctttcgcctgcgaatggcgagcctattattgttccatctcaggatgtagttttaggtctctattacatgacaagagaaaaagttaaagatactggtgagggcggtatttttgcagacatagaagaggttgagagagcatttcataatggcttccttggtctgcatgcaaagattaaactaaaaatttcaacccataatgaagaaaagcccacagaaattgtagaaactacgacaggtagggctctattctctaagatcgtgccagatgaaattccatttgctttaataaataaaacaatggatagcaaggagatctccagactgatcaatcgttgttatcgcgaggttggccttaaagccacagttatatttgcagacaaactaatgtatctcggctttgagtatgcaact

SEQ ID NO: 255498 - DNA, 835 bp, Unknown
  Bacterial polypeptide expressing nucleotide sequence isolated from the Sargasso Sea
catacagattgatggcgtacttcacgaatttacttctattaaaggtatcagagaggatgtaaccgacattgttttaaatgtaaaatctttagcactaaagagtacgtctgaagtaaataaaaaattaatacttgatgtaaaaggaccaggtgaaattaaagcttctgatataactccagttgcagatgttgaaatattaaatccagatctagttatatgtaatcttgatgaaaatacaaaatttcatatggaaatgaatgttagctcaggcaaaggatatgtttcagctgataataataagcctgaggagcaaccattgggtttaatagcaatagattcattatttagtcctgtaaaaaaagtttcatattcagtgagtactgctagagagggtaaagcgctagattatgataaattaactatggaaattgaaaccaacggatcaatatctgctgaagatgctatagcctatgcagcgagaatttttcaagatcaactgggtatgtttgtaaattttgacgaaccacaagaagtaatagttaaggatcaaccacaagaacctgaatttaacaaaaatcttttaagaaaagttgatgagttagaactttctgtaaggtcaatgaattgtctaaaaaatgataacataatctacataggcgatcttgtccaaaaatctgaaggtgaaatgctaagaacgccaaattttggaagaaaatctttaaatgaaataaaagaagttttaacagctatgtcactatatttaggtatggagataccaaattggccaccagacaatattgctgaattatcaaaaaaacttgaggaggcaatataa

SEQ ID NO: 255499 - DNA, 910 bp, Unknown
  Bacterial polypeptide expressing nucleotide sequence isolated from the Sargasso Sea
tttgaaagaattacttaatttattgcaatcaaaccaagatgaattttcatctatttctgctggcttagcatctcctcagatggttagatcttggtcttttggtgaagtgaagaaaccagaaaccatcaactatagaacatttaaaccagaaagagatggtctcttttgtgcaaagatttttggaccgattaaggactatgaatgtatatgcggtaaatacaaaagaatgaagcataggggagtggtatgtgaaaaatgtggagtcgaagttactcttgcaaaagtaagaagagaaagaatggggcatattgagttagcagctcctgtggctcatatatggttcctaaaatcgcttccttcaagaattggcctacttctagatgtaacactaagagaaattgaaagagttttatattttgaaagcttcattgtaactgatccaggaatgactgatttagaaactggagatatcctcacagaagaggaatatattgaagcttatgatcaatatggagatgagttcaaggcgggaatgggtgcagaagcagtcaaattacttcttgaagagcttgatattgaagaggagataaggattcttagagaagaaattccacaaacaaactctgaaacaaaacttaaaaagatttctaaaagattaaagcttcttgaggcatttaaggcttctggtaataaaccagagtggatgataatggatgttcttccagtgctacctccagatcttagaccgcttgtgccgctcgaaggtggaagatttgctacttctgatttaaatgatttatatagaagagtaattaatagaaacaatagattaaaaagattattggagcttaatgcgcctgacatcattgtaagaaatgaaaaaagaatgcttcaagaatcagttgatgca

SEQ ID NO: 255500 - DNA, 843 bp, Unknown
  Bacterial polypeptide expressing nucleotide sequence isolated from the Sargasso Sea
aggttatggtcttacattaggtaactccttacgaagaatacttttgtcatcaattagaggtacagctgtgactgctatccaaatagatggagttttacacgaatttacttctatcaaaggtgttagggaggacgttacagatatagttcttaatgttaaatctctagcattgaagagcgattcaaacactaacggcaaattaattttagatgctaagggtccaggtgaaataaaagctgcagatatagctaattcaggagatattgaaattttaaatccagatttagtaatatgtaatctagatgaaaatacaaattttcacatggaaatgacagttagtagcggaaagggatatgtttcagctgatttaaataaaccagaagaaccaccattaggtttaataccaattgactctctattcagcccagtgaagaaagtatcatattctataagcactgcaagagaagggaaagcgcttgattatgataaattgactatggaagtagagacaaatggctcaatttcagcagaagatgctgtagcatattcggctagaattttccaagatcaattaggaatgtttgtaaattttgatgaaccacaagaagtgattgtaagagaacaaccatctgaaccagaatttaataaaaatttattgagaaaagttgatgagttggaactttcagttagatctatgaactgtttaaagaatgataatataatttacattggtgatttggttcaaaaatcggagggtgaaatgcttagaacaccaaattttggaagaaaatctctaaatgaaataaaggaagttttgactggaatgtcactttatttaggtat

SEQ ID NO: 255501 - DNA, 730 bp, Unknown
  Bacterial polypeptide expressing nucleotide sequence isolated from the Sargasso Sea
tgatgagttttcagctggcatgggagcagaagctgtacaagttctattagaagagttagatattgaagatgaaattagagaaataagagaagagattcctcagacaaactcagaaactaaattaaaaaaattatctaaaagattaaaacttcttgaagcgtttaaagattctggcaacaaaccagaatggatgattatgaacgttttaccagttttaccgccagatcttaggccattagttccattagagggaggacgctttgcaacatctgatctgaatgatctatatcgaagagtgataaacagaaataatagactaaaacgtcttcttgagttaagtgctcctgaaataatagttagaaacgaaaagagaatgcttcaagagtctgttgatgcacttttagataatggaagaagaggaagagtaataacaggcactaataaaagaccattaaaatctcttgctgatatgattaagggtaagggtggaagatttagacaaaaccttcttggaaagagggttgattattcaggtaggtctgtaattgtttctggcccaaacttaaaacttcatcaatgcggactaccaaagaaaatggcattagaattatttaagccatttgtttatgggaaattagaaaatagagaattagctacaactataaaggctgcaaaaaaactagttgaaagaaaacacctgaaatttgggaagtgcttgaagaagttataa

SEQ ID NO: 255502 - DNA, 922 bp, Unknown
  Bacterial polypeptide expressing nucleotide sequence isolated from the Sargasso Sea
atgggccatattaatcttgctacacctgtagcacatatatggtttttaaaatctcttccaagcagaattgcactggctgtagacatgaaactaaaagaaatagagagagtgctttactttgagaattttattgtaatagaacctggtctgacaggtctacaaaaaaaccagttgttaaacgaggaagagttagcaaaatatcaagatgagtttggagaagagtcatttacagcaggaattggggctgaagcagttcttgaaatgcttaaaaacttagatttagaattagaaagaaaaaaattagttaatttcattaaagaaacaaaatcgaaagttaatgaggaacgtgcaatcaaaaggttgaaactcgttgagtcatttattgaaacaggtcaaaaacccgagtggatgattatgacagttgttcctgtaataccacctgaattaaggccacttgtaccattagatggtggtagatttgcgacttcagatctgaacgatctttatagaagagtaataaacagaaacaatagattaaaaagattaatggatctgaaagctccagatataattgttcgtaacgaaaaaagaatgcttcaagagtctgtagatgcattatttgataacggaagaagaggaagggtaataactggtacaggaaaaagacctctaaaatcacttgctgaaatgcttaaaggtaaacaaggacgatttagacagaacttgttaggtaaacgtgtggattattctggtagatctgtaattgttgttggcccagatttaaaacttcatgaatgtggtttaccaaaaaaaatggctttggaattatttaagccatttttatatgcaagattaaataaactaggtctagcttccacaattaaacaggctaaaaaacttgttgaaaaggagacaaatgctg

SEQ ID NO: 255503 - DNA, 696 bp, Unknown
  Bacterial polypeptide expressing nucleotide sequence isolated from the Sargasso Sea
aaggtccgggagaaattaaagcctcaaatattactccagttgcagatgtagaaatattaaatcctgacttagtaatttgtaatttagatgaaaatacaaattttcacatggaaatgacagttggtaatggaaagggctatgtttcagcagatttaaataagcctgaagaaccacctctaggattgatacctattgactccctttttagcccagttaaaaaagtttcatactcaataagtacagcaagagaaggaaaagcattagattatgacaagctcattatggaagttgaaactaatggatctatatcagctgaagatgctgtagcttattcggcaagaatttttcaagaccaactaggaatgtttgttaattttgacgaaccacaagaagtaattgttagagaagcaccgtcggagcctgaattcaacaaaaacttattaagaaaagttgatgaattagaactttctgtaagatcaatgaattgtttaaaaaatgacaatataatttatatcggtgatctagttcaaaaatctgaaggagaaatgctcagaacacctaattttggcagaaagtctttaaatgaaataaaagaggtcttaaacacaatgtcattatatttaggaatggaaataccaaattggcctcctgataatatagcagaattatcaaaaaaacttgaagaagctatataat

SEQ ID NO: 255504 - DNA, 880 bp, Unknown
  Bacterial polypeptide expressing nucleotide sequence isolated from the Sargasso Sea
gagagctttacagcaggaattggtgcagaagccgttctagagatgctaaagaatttagatttagatttagaaagaaaaaaccttgttagttttattaaagaaactaaatcaaaggttaacgaggaaagagcaattaaaagattaaaattaatcgagtcatttcttgaaactggtcaaaaacctgagtggatgattatgacggtagttccagttataccacctgaattaagacctttagttcctctagatggtggaagatttgccacttcagatcttaatgatttatacagaagggtaataaacagaaataatagattaaaaagattaatggatcttaaagctcctgatatcattgtaagaaatgaaaaaaggatgcttcaagaatctgtagatgctttatttgataatggtcgtagaggaagagtaattacaggaacaggcaaaagaccacttaaatcgcttgcagaaatgctaaaaggtaaacagggtagatttagacagaatcttctaggtaaacgagttgattattcaggaagatcagtaatcgtagttggcccagatttgaaactacatgagtgtggtttgcctaaaaaaatggctttagaattatttaaaccatttttatatgcaagattaaataaattaggactagcttcaacaatcaaacaagctaaaaaattagttgaaaaagaaacaaatgctgtttgggatgcattagaattaattgttagagaacatcctgtactattaaatagagctccaacacttcatagacttggagttcaagcattcgagccaaaattaattgaaggagatgcaattgaattacaccctttaacttgtgcagcatttaacgctgactttgatggtgaccaaatgg

SEQ ID NO: 255505 - DNA, 664 bp, Unknown
  Bacterial polypeptide expressing nucleotide sequence isolated from the Sargasso Sea
gattcagagactgaaattttaaatccagatcagctgattatgactcttgactctaatgcagatgtagaaattgaagcaaatgttgagacaggaaaaggttatgtttctgcagaagttgctgaagatgaaaataagattattggagaaattaagctagatgctatgtttagtccagttaggagagctacctataaagttgaaaatagcagggttggtcaagtaacagattttgataaattaatattagatgttgaaaccacaggagctatttcacctgatgatgctattgctttagcagctagaattcttcaagatcaacttcaaccttttattaattttgatgaacctgagatagaacaggaaacaagtgcacaagataaactaccatttaatcctaatctcctaaaaaaagtggaagaattagagctatctgtccgatctgcgaattgtcttaaaaatgataatataatttatatcggagacttagttcaaaaatcagaatcagaaatgctaagaacacctaattttggaagaaaatctctgaatgagataaaagaagtactccaacaaatggaactaaatcttggtataacagtacttgattggcctcctgaaaatatagaagagttggcaaaaaaatatgaagatccttttaacaaataaa

SEQ ID NO: 255506 - DNA, 823 bp, Unknown
  Bacterial polypeptide expressing nucleotide sequence isolated from the Sargasso Sea
tttagcttgtcccgttgcacacatttggtttttaaaatcacttcctagcagaatatcattagctatagatatgaaattaaaagaagtggaaaaagttttatattttgagagttttatagtagttgaaccaggcttgactactttaaaacaaggtcaattattatcagaggaagccttgcttaaagctcaagacgaatttggggaagatgcatttacagcagggatcggagctgaagctgttagagaaattttagttaatttagatttaaaaaaagaacaaaaaagattaagagattcattatctgaaattaaatcaaaagtaacagaagaaagaacaattaaaagattaaagttaatcgagtcatttatatcatcaaacaataaacctgaatggatgattttaacttcagttccagtaattcctcctgagcttagaccattagtacctttggatggaggtagatttgctacatcagatttaaacgatttatacagaagagtaattaatagaaacaatcgtttaaaaagattattagatctaaaagcaccagatattattgtaagaaatgaaaaacgaatgcttcaagagtctgtggatgctttatttgataatggaagaagaggaagagtaattacaggaacaggtaaaagacccttaaaatctttagctgaaatgcttaaaggtaagcaaggtagatttagacaaaatttattaggaaaaagagtagattattctggaagatcggtaattgtagttggaccagaactcaaactacatcaatgcggtttaccaaaaaaaatggcattagaattatttaagcca

SEQ ID NO: 255507 - DNA, 265 bp, Unknown
  Bacterial polypeptide expressing nucleotide sequence isolated from the Sargasso Sea
gaagaagaggaagttcttatagatccaattatgctcagacctgtggatgagcttgagttgactgtaaggtctgcaaattgtctgaaagcagaaaatgctaactatatcggtgatcttgttcaaaaaactgaagttgaattactgcgtactccaaacttaggtaagaaatctcttaatgagattaaggaagtccttgctagtcatggactatctcttggaatggagttagagaactggccgccaaaagaggctgttgtagactaat

SEQ ID NO: 255508 - DNA, 499 bp, Unknown
  Bacterial polypeptide expressing nucleotide sequence isolated from the Sargasso Sea
tatagccccgtcgatcgtaagaatgaagagacaactgctatgatttactttcaaatagatgctgtatttatgccagtgaagagagtcaattttacgattgatgaaactgcagtagcagagggcggaacaggtagagaaagattaaaaatggaagtagtaacagatggctcaacaaccccagacgatgctgttgctgaagctgcaaaccagttaatagaactttttcaacctcttgctactgttacaatggttgaggaaattcctgaagaacctgaaccatctcctgaagctcaaattcctcttgaagaactaaacttgtccgttagagcatataattgtctaaaaagggctcaagttaattcagtttcagatttaatgggctttagctatgaagatcttcttgaaattaagaactttggctctaaatctgcagatgaggttattgaagctcttgagcgcatcggcatttctattccacaaagcagaacctctgcttaac

SEQ ID NO: 255509 - DNA, 262 bp, Unknown
  Bacterial polypeptide expressing nucleotide sequence isolated from the Sargasso Sea
actgttacaatggtcgaggaaattcctcgaagaaccagaaccttctcccgaagctcaaatccccttagaagaactaaatttgtccgttagagcatataattgtttgaaaagggcacaagttaattctgtttcagatttaatgggctttagttatgaagatcttttagaaattaagaactttggctccaaatcagcagatgaagttatagaggctctagagcgtataggaatttctattcctcaaagcagaacttccgtttaa

SEQ ID NO: 255510 - DNA, 553 bp, Unknown
  Bacterial polypeptide expressing nucleotide sequence isolated from the Sargasso Sea
atggaaacaactgaagttaatataaaaaattggaaatcaatgattaaacctggaaaattagatgtacagattagtgatgacaaatcatatgcaaagataatagcagaaccccttgaaaagggttatggacttacattgggtaattcattaagaagaattttactttcttctattagaggcacagctgtaacagcaattcaaatagatggagttctacatgagttttcatcaatcaaaggtgttagagaagatgttactgatatagttttaaatgtaaaatctttagctttaaaaagcacaggtgaatcaaataaaaaacttatattagatgccaaaggacctggagaaataaaagcttcagatataactcaagttaatgatatagaaattttaaatcctgatttagtaatttgtaacttagatgaaaatacacggtttcatatggagatgagtgttggatctggcaaaggatatgtttcagcagatatgaataagccagaagagccaccactaggacttattcctgtagattcactgtttagtccagtaaaaa

SEQ ID NO: 255511 - DNA, 727 bp, Unknown
  Bacterial polypeptide expressing nucleotide sequence isolated from the Sargasso Sea
tgtggtttaccaaaaaagatggccttggaactattcaaaccatttttatatgcaagattagataaattaggatttgcaacaaccattaaacaagcaaaaagaatggttgaaaaacaaaaaagtgaagtctgggatgctcttgaacatattataagagagcacccggttatattaaatagggcaccgacattgcatagattgggtgttcaagcttttgaggcaaaattaatagagggaaatgcaattgaattacatcctttagtctgtgccgctttcaatgcagattttgatggagaccaaatggctgtacatgtaccattgagtttagaagcacaaatcgaagcacgtgtgcttatgatgtcaacaaacaacattctaagtccatcgaacggtaagccaataattgtaccgagccaagatattgtgcttggcatatattatttgtctcaacataaagaggattcgaatgtaaaaccagttggtatcttctctgatgtagatgagatcgagaacgccattgaaagaaaagatattagtgttcactctaagatagtttcgatatttaatacagtagataaagatggaaataaaatttcagagaaacacacaagtactgctggacgttttctattgtctaaaaccttacctaaaaatcacagaattaaatttgaactcgtaaataaattattaacgaaaaaagctgtttctgaggtaattgacactgttt

SEQ ID NO: 255512 - DNA, 322 bp, Unknown
  Bacterial polypeptide expressing nucleotide sequence isolated from the Sargasso Sea
gatggaaactactgaggtaaatattaaaaattggaaatcattaattaaaccaccaaaattagaagttaacttaagtgatgataagtcttacgcgaagatagtagcggaaccactagaaaaaggttatggattaacattaggtaattccttaagaagaattcttttatcctctataagagggacagcagttactgcaatacaaatagatggtgtgttacacgaatttacatcaataaaaggtgttagagaagatgtaactgacatagttttaaatgttaaatctttagcattaaaaagtaatactgaaacaacaaacaagtta

SEQ ID NO: 255513 - DNA, 838 bp, Unknown
  Bacterial polypeptide expressing nucleotide sequence isolated from the Sargasso Sea
tcatacccaagtagaatttctttagcaatagatatgaaattaaaagaggtagaaagagttttgtacttcgaaagtttcatagtaattgaacctggactacccagccttaaaaaaaatcaacttttaaatgaagatgaactgaacaaataccaagaagagtttggcgaggaggcattcactgcaggaataggagcagaagctatacttgaaattttaaaatcaattgatcttaacaaggaaagagagatacttcggaaaaatattaacgaaacaaaatcaaaagtagctgaagaaagatctataaaaagattaaaactaattgattcttttatagagactggaaataaaccagaatggatgatattaaccacgatacctgtaattccaccagaattaagacctttagtgcctttagatggaggtagatttgctacttcagatcttaatgatctctacagaagagtaataaaccgaaacaacagacttaaaagattaatggatctaaaagctcctgacataattgtcagaaatgagaaacggatgttacaagagtctgttgatgcattatttgataatggaagaagaggaagggttatcactggcactggtaaaagaccattaaaatctcttgccgaaatgctaaaaggaaagcaaggtagatttagacaaaatttacttggaaaaagagtagattactcaggaagatcagtaattgttgttggaccagatttaaaattacacgaatgcggattaccaaaaaaaatggctttagagttatttaaaccttttttatacgctagattaaataaactaggtttagcctcaacaataaaacaag

SEQ ID NO: 255514 - DNA, 916 bp, Unknown
  Bacterial polypeptide expressing nucleotide sequence isolated from the Sargasso Sea
attgctaagatgggagcagaatgcttgattgaattactttctcgtattgatcttgaaacactatcttatgaattgcggcacaaagcaaataatgaaacatccaaacaacgaaagacagaggcattaaaacgcttgcaagttgttgaagccttccgtgaagcaaatcatcgtggagaaaatctgccagagtggatgattatgaaagtgatacctgtaattccacccgagttacgccctctagttcctcttgatggtgggcgctttgctacttcagatctaaacgacctttatcgtagagtaattattagaaataatcgtctcaagagactggttgaaattaaagcacctgaagtaattttaagaaatgaaaaacgtatgctacaagaatcggtagattctttatttgacaatactcgtaaagcatctgctgtcaaaacagattcaaatcgtcctttaaaatcactttcagattctttaaaaggtaagcaggggcgatttcgacaaaatcttctagggaagcgtgtggactactcagctcgttccgtaatagttgtaggacctgaattgaaattatttgaatgtggactgccaaaggatatggcagctgaattatataagccattcatcataagaaagatcattgaaagaggaattgttaaaacggtaaagtctgctaaaaaaataattgaccgtaaagagcctgtggtgtgggatattttggaaaacgtattgaaaggacacccagtattattaaatcgtgcacctactttacaccgtttagggattcaagccttccagcctaaattgatagaagggaaagctatacagttacacccacttgtatgtacggccttcaatgcagattttgatggtgaccaaaatggcagttcatcttcctctaggacccgaagcgatt

SEQ ID NO: 255515 - DNA, 451 bp, Unknown
  Bacterial polypeptide expressing nucleotide sequence isolated from the Sargasso Sea
aatggaaaatgtagatgtaaatataaaaaattggaaatcattaatcaaaccaccaaaattagatataaaattaaacgatgataaatcatttgctaagattactgctgaaccattggaaaagggttatggtttaacattaggcaattctttaagaagaatattactgtcttctattagaggtgcagcagttacatctttacaaatagatggtgttcttcacgaatttagttctataaaaggtgttagggaagacgtcacagacattgtgttaaatataaaatctttagctttgaaatgtcattccgatggtataaaaaaacttgtattagatgctaaaggaccaggtgaaataaaagcctcagatatctcaaaagtagctgatattgaaatattaaacccagatttagttatctgtaatttagatgaaaatacgaattttcatatggaaatg

SEQ ID NO: 255516 - DNA, 496 bp, Unknown
  Bacterial polypeptide expressing nucleotide sequence isolated from the Sargasso Sea
aatggaaaatgctacaataattcaaaattggaaatcattaattaagccaggtaaattaaatattaaaagtaatgatgataaaagtatttgcactatagttgcggagccgcttgaaaaaggttatgccttaactattggaaattctttgagaagaattttgctttcttcaattcaaggttcagcaattacagcaatacaaatagacggagttctgcatgagttctcatcaataaaaggtgtaagggaagatgtaacagatatagttttaaacgttaaatctttatcattaaaagttatgtcaaaggaatcaaaaaaattaattttggatgttaaagggcctggagaaataaaagcgaaagatattcaagcaaatccagatgtaaaaattttgaatccagatttaattctatgtcatttagatgaaaatactaaatttcatatggagttgatagcagataatggcaaaggttattgtcccgcagaaaaaaataaaaaa

SEQ ID NO: 255517 - DNA, 754 bp, Unknown
  Bacterial polypeptide expressing nucleotide sequence isolated from the Sargasso Sea
atttttggtccagttaaagattatgaatgtttgtgtggaaaatataagaggatgaaatttagaggtattgtttgtgaaaaatgtggagtcgaagttaccaaatcgaaggttagaagagaaagaatgggccatatcgatctagcatctcccgttgcacatatttggtttttaaaatcacttccaagcagaatatctttatcaattgatatgaaattaaaagaagtagaaaaagttttatattttgaaagcttcatagttatagaacctggccttacagagcttaaaaaaggtcaactattgtctgaggaagaatatttaaaatctcaagagaaatacggcgaagatggatttactgcaggaatcggagctgaagcagttagagaaatattaatcagcatggacttaaaaaaagagagagacaaattaagaaattccttaaaagaaatcaaatctaaggttacggaggaaagaaccctaaaaagattaaagctcttagagtcatttattgagtcaggaaataaacctgaagatatgattttaactacagttccagtaattccacctgaacttagacctttagtacctcttgatggaggcaggtttgctacttctgatcttaatgatttatatcgaagagttataaacagaaataatcgattgaaaagattaatggacctaaaagctccggatataatagttagaaatgaaaaaagaatgcttcaagaatccgttgatgctttatttgataacggaa

SEQ ID NO: 255518 - DNA, 761 bp, Unknown
  Bacterial polypeptide expressing nucleotide sequence isolated from the Sargasso Sea
atatttagtaaacttcatacaagaggcttagcaactactataaaagctgcaaagaaattggttgaaaaagagggcgctgaagtttgggatattcttgatgaggttattagagagcatcctgttttgttgaatagagcgccaacactacatagacttggtattcaagcgtttgagccaatactaattgagggaaaagctatacaattgcatcctcttgtatgtgctgcatttaatgctgactttgatggagatcaaatggcggttcatgtgcctttgtctgtagaagctcagttagaagcaagatccttgatgatgtctacaaataatattttatccccggctaatggtgagccgattattgtcccatcgcaagatatagttttaggaatatattatttaactagggaagatataaatgtacaaggcgaaggtatgattttttcaaatattgatgaagtttcccgagcatattattcaggaaatgtgcatattcatgcaagagtcactgtaaggatggatttagttgaatctaattcagacaaaattgtaaataaaagaattgaaacaactgtaggtagagcattattttcaaaaattcttcctaaaggattaccttttgagttagttaataaaacaatggataaaaaatcaatatcaagtgctattgatacttgttatagagtccttggtttaaaagcgacagttatatttgcagaccaattgatgtacatgggatatgaatatgctacaaaatcaggagt

SEQ ID NO: 255519 - DNA, 747 bp, Unknown
  Bacterial polypeptide expressing nucleotide sequence isolated from the Sargasso Sea
aatagaatcttttatagagactggcaataaacccgagtggatgatactaactactgttccagtaataccaccagaattgagacctcttgttcctttggatggaggaagatttgctacatctgatttgaatgatttatatagaagagtaataaacagaaataatagattgaaaagattgatagatttgaaagcacctgacataattgtaagaaatgaaaaaagaatgttgcaagagtcagtagatgcactatttgataacggaagaagaggacgagtaattacaggaactggtaaaagaccccttaaatctttggcagaaatgttaaaaggtaaacaaggacggtttagacaaaatcttttaggaaaaagagtagattattcaggaagatcagtaattgttgttggtccagacttaaaacttcatgagtgcggtttgccaaaaaagatggcattagaactattcaaaccatttttatatgctagattaaataaattaggattagcctcaactattaaacaagctaaaaaattagtagaaagagaaagaactgaagtttgggatgcattagaacttattgttagagagcatccagtaattttaaacagagctccgacattgcacagacttggtgttcaagcatttgagcctaaacttattgaaggaaacgctattgagttacatcctttaacttgtgctgcatttaatgcggattttgatggtgatcaaatggctgttcatgttccatt

SEQ ID NO: 255520 - DNA, 673 bp, Unknown
  Bacterial polypeptide expressing nucleotide sequence isolated from the Sargasso Sea
tttgaaacagactctgaaacagaaataatgaatccagatcagttgattatgacacttgattctaatgctgatgtagaaattgaagcaaatattgaaacaggaaaaggttatgtaactgcagaagttgccgaagatgaaaataaaaatattggagaaattaagctagacgctatgttcagccctgttgtgaaagcttcttataaaattgaaaacagtagggtaggtcaagttactgattttgataagttggtttttgaagttgaaactaatggcgcgatttcacctgatgatgctatagcactagcagccagaatattacaggatcaactacagccttttattaattttgatgagcctgaggtacttccagatcagtctacagcagaaagtttatcgtttaactcaaatttattgaaaaaagtagaagagttagaattatctgttagatctgctaactgtttgaaaaatgataatataatttatattggtgatcttgtgcaaaaatctgaatcagaaatgttaagaacccctaactttggtagaaaatccttgaatgagattaaagaggttctgcaacaaatggaactaaatttaggtatgtcagtccctgattggcctccagaaaatattgatgatctggctaaaaaatatgaggatcctttcaataagtaaa

SEQ ID NO: 255521 - DNA, 874 bp, Unknown
  Bacterial polypeptide expressing nucleotide sequence isolated from the Sargasso Sea
gatttaaaagctccagacataatagttagaaatgaaaaaagaatgcttcaagagtccgtagatgctctttttgacaatggtagaagagggagagttattaccggtacaggaaaaagaccacttaaatctttagctgaaatgcttaaaggtaaacagggaaggtttagacaaaacttattaggtaaaagggttgattactcaggtagatcggtaatagttgtcggaccggaattaaaattacatcagtgtggtttaccaaaaaaaatggctttagaacttttcaaaccatttttatacgctagactatcaaaacttggtttggctacaactattaaacaagcaaaaaaaatagtcgaaaaacaaaaacctgaggtatgggacgctttagagcatatcattagagaacatccaattttacttaatagagccccaactttacacaggttgggcgtacaagcttttgaagcgaagttgatagagggtaacgcaattgaattacatccattagtttgtgcagcttttaatgctgattttgatggagatcaaatggcagtacatataccgctaagtttagaggctcagttagaggcaagagttttaatgatgtcaacaaacaatatattaagcccatcaaatggtaagccaataattgttcccagccaagatatagtattaggtatatactatttatcacagtctaaggacgactcagaagccaaaccgacgggtatattttcaaatgtagacgaaattgttaatgcattagataataacaacattagtattcattcaaagattatttctcaattcactacagttgataaagatggaaaagaaattaaagaaaagtacaaaagtacagctggaagatttt

SEQ ID NO: 255522 - DNA, 812 bp, Unknown
  Bacterial polypeptide expressing nucleotide sequence isolated from the Sargasso Sea
gcaataggagctgaagctattgagcagatgttaataggtattgatcttgaatctgattataaacaactaaaaattgatcttactgaaactaaatctgaattaaaaaaatctaaaattacaaagagattgaaacttttagagtcctttattgtttcaaaaaataaaccagaatggatgataatgagagttcttccagtaattccacctgaactaagaccgttagttccgcttgatggtggccgatttgctacaagtgatttaaacgacttatatagaagagtaatcaacagaaataacagattaaagagattaattgatttgagagctccagatataataatcagaaatgaaaagagaatgcttcaagagtctgttgatgcactattcgataatggaagaagaggtagagtaataacgtctacaaataaaagaccacttaaatcattatctgatatgctaaaggggaagcaaggaagatttagacagaacttattaggaaaaagagttgattattcaggaagatcagtcattgttgttggtccaaaccttaaacttcatcaatgtggtattccaaaaaaaatggcacttgagctattcaagccttttatatttcataaacttgatatttatggctgggccaatacaattaaagcagcaaaaaaacttgttgaaaaagaagatccaagagtgtgggatattttagaagaggttattagagaacatcctgtacttcttaatagggcacctactttgcatagattaggaattcaagcttttgaaccaatattaattgaaggaaagtcaattcaatt

SEQ ID NO: 255523 - DNA, 907 bp, Unknown
  Bacterial polypeptide expressing nucleotide sequence isolated from the Sargasso Sea
atgacagataattacgatattattaaagattttttaacaccaactgaaatagtagttgaagaatcaggtcctacaaggtctaagatagtacttgaacctcttgaacaaggtttcggacataccttaggaaatgctcttagaagaattatattatcttctatgcctggtacagctgtatcagaggttaagattgatggtgtgcttcatgaatatagcactatagagggtgtacaagaagatgtcatagatatcttattaaacctaaaagacctctcagtaagattaaccgaagtagaagatgctttactaactctatcaaagtccggaagtggagtggtaactgcggccgatatagaactttctacaggtgtagaagtcatcaatccagatcatcatattgctactctaaatgaagaaggctctataaatatgacaatgaaagtaacaagaggtagaggctttgtgcctgttagacctcttgacgaagatgaaggccaagaaactggccttctaagattagatgcaacttactcacctattaaaagagtgacataccaagtagataatgccagggttgagcaaagaactaatttagataggcttacagtagatattgatacagatggaactttagaagctgaagagattttaagaatatcggcaactatcctccaacatcagttatccgcttttgctgaacttggaagacttgaagaggtgattgaagaaaaagaggaagcgaagatagatccaatcatgttaagacctgttgatgaactagagcttacagttcgatctgcaaattgcttgaaagctgagaatatacactatattggtgatctagttaccagaatggaatcagatcttttaagaacccccaaacttaggaaagaaatccttaaatgaa

SEQ ID NO: 255524 - DNA, 877 bp, Unknown
  Bacterial polypeptide expressing nucleotide sequence isolated from the Sargasso Sea
tgtggtaaatataaaagaatgaaatttagaggaataatatgtgaaaaatgtggtgtagaggtaacaaaatcaaatgttcgtagggaaagaatgggacatattaatttagctacacctgtagcacatatatggtttttaaagtctttaccaagtagaatttctttagttgtggatatgaaacttaaagaggttgaaagagttttatactttgaaaattttatagttattgaacctggtttaactggattaaaaaaaaaccaattattaggtgaagaagagcttataaaataccaagatgattatggcgaggaagcttttaccgctggtatcggagcagaggctattcttgaaatacttaaatcaataaacttagaggaagaaagagacgctttaattaagactattaaagagactaaatctaaagttgctgaagaaagatcaattaaaagattaaaattgatagagtcatttatagagacaggcaataaaccagagtggatgattttaacaactgtacctgtcataccccctgaattgagaccgcttgtaccattagatggtggtagatttgctacatctgatttaaacgatctttatagaagagtaataaacagaaataatagattaaaaagacttattgacttaaaagctcctgatatcattgtaagaaatgaaaaaagaatgctgcaagagtctgttgatgcactatttgataatggaagaagaggaagagtaataacaggaactggaaaaagacctctaaaatctcttgcagaaatgttaaaaggtaaacaaggaagatttagacaaaatttacttggaaaacgtgtagattattctggaagatcagtaatagtcgttggtcctgatctaaagt

SEQ ID NO: 255525 - DNA, 577 bp, Unknown
  Bacterial polypeptide expressing nucleotide sequence isolated from the Sargasso Sea
tatgcagctaagaattgaacgaggacgaggctatcaacccgcagatatgagagtttttgatgatgagacgcgagccgtaggacgattaaaattggacgccacttttagccctgtttacagcgtctcttacagcgtagagagcgctcgagtagaaaatcgaaccgacctcgacaaattagtgctcgaattggacacgaatggaaccttggatcccgaaagtgctattcgtagagcgtcgaccatattgcagcaacagttatctgtgtttgttgacatacaagaccaatctgtcgcagaaccagaggaagaagaggtcgcaatagatcctatactgcttcgtcctgttgatgacttagaactcactgttcgctccgcaaactgtttgaaagctgagagcatctattatattggagatttgattcaacgcaccgaggttgagttgctgaaaactcccaatttgggcaagaaatcactcactgaaattaaggatgttcttgcatctaggggcttatcattggggatgcgtttagaaaactggccgccagtcagtattaaaaatgagcgagaaatggtgtag

SEQ ID NO: 255526 - DNA, 775 bp, Unknown
  Bacterial polypeptide expressing nucleotide sequence isolated from the Sargasso Sea
tacattaggtaactctttacgtagaatacttttatcatcaataagagggacggctgtaacagctatacaaatagatggtgtactacatgaatttacgtcaataaaaggtgttagagaagatgttaccgatatcgtcttaaatgttaaatctcttgctttaaaaagtaactcagagactataagtaagttaattttggatgctaaaggaccaggagaaattaaagcttcaaatatcacaacatctaatgatatagaaatattaaatcctgaattagtaatatgtaatttagatgaaaatacaaattttcatatggaaatgacagtaagtaacggtaagggttatgtatcagcagatatgaacaaacctgaggaaccgccattaggtttaatacctatagattcattatttagcccagtaaaaaaagtttcctactcaatcagtactgcaagagaaggaaaagctttagattatgacaaactcactatggaagtagagactaatggatcaatatcagcagaagatgcagtagcctattctgcaagaatatttcaagatcaattaggtatgtttgttaactttgacgagccgcaagaggttattgtaagagaacaaccaacggaacctgagtttaataaaaatttacttagaaaagttgatgaacttgaactttcagttagatcaatgaactgtcttaaaaatgataatataatctatattggtgacttagttcagaaatcagaaggagaaatgttaagaactcccaatttttggtag

SEQ ID NO: 255527 - DNA, 700 bp, Unknown
  Bacterial polypeptide expressing nucleotide sequence isolated from the Sargasso Sea
ctggaaggcgttcgcgaggacgtggtcgacatcgttctgaacatcaagcaactggccctgcgcatgcacgcggaaggcccgaagcggatgacgctgcgcgccacgggtcccggcccggtgaccgcggctcagatcgacctgccggccgacatcgaggtgctgaacccggatcacgtgatctgcaccctggacgacggcgcttcggttcgcatggaactgacggtgcagaacggcaagggctacgtcgccgccgaactgaaccgcccggaagacgccccgatcggtctgatcgccgtcgacgccctgtattcgccggtgaagcgcgtcgcctatcgcgtcgagccgacccgtcagggccagtcgctggactacgacaagctgatcctggaagtcgaaaccaacggcgccgtctcgccggttgacgctgtggcttacgctgcgcgcatcctgcaagaccagctgcagatcttcatcaccttcgatgagccgaccaaggctgtcgagcagtcggacggcaagcccgaactgcccttcaacccgtcgctgctgaagaaggtggacgagctggagctgtcggtccgttcggccaactgcctgaagaacgacaacatcgtctacatcggcgacctgatccagaagaccgagggcgaaatgcttcgcaccccgaacttcggccgcaagtcgctgaacgaaatcaagg

SEQ ID NO: 255528 - DNA, 878 bp, Unknown
  Bacterial polypeptide expressing nucleotide sequence isolated from the Sargasso Sea
gaagtcactgtccgacatgctcaagggcaagcagggtcgattccgtcagaacctgctcggaaagcgcgtcgactactcaggccgatcggtcatcgtcgttgggccgcagttgaaattgcaccagtgcggtctgcccaagcagatggcactcgagctcttcaagcccttcgttatgaagcgtctcgtcgacctcaaccacgcgcaaaacatcaagagcgcgaagcgcatggtcgagcgctcgcggtcgatcgtgtgggatgtgttagaagaggtcatcgccgagcacccggtgctgttgaaccgtgcgccgaccctgcaccgtttgggtatccaggcgttcgagccgcaactgatcgagggcaaggccatccagattcatccgttggtgtgcaccgcgttcaacgcggacttcgacggtgaccagatggcagttcacctcccgctgtcggcagaagctcaggccgaggctcgcattctgatgctgtccacgaacaacatcctgtctccggcgaacggacgaccgattgccacaccgacccaggacatggtgctgggtatctactacttgacgactcagaacggagcgaacgcctcgacaaaggatgaggagctcccctcctacgcgagcgtggccgaagccctgatggccttcgacgcgggcgcgctggatctgcaagcacgcgccaagatcaggattgagaccaccgagccgccgcacgggtggccggtccccgaaggctgggaagccggacagcccttcaccctcatcaccacgcttgggcgggccctgttcaacgaggcactgccagcggactaccccttcgtgaacgatcaggtagacaagaaactcctgggtgccacggtcaaccgtcttgccg

SEQ ID NO: 255529 - DNA, 746 bp, Unknown
  Bacterial polypeptide expressing nucleotide sequence isolated from the Sargasso Sea
gctgcagtaccagatcgaccgcatcgagcatcaggtggaggaggatcgctcccagagcggtgtgttcctcatcggtcccctcgagaggggtcaggcgaccaccctcggcaacgccctgcgacgggttctgatgggcggcctcgaaggcagtgccgtcaccgccattcgcattgccggcgttaaccacgagtacgccaccgttcccggtgtgcgtgaagacgttctcgacatccttctgaactgcaaggagctctccgtcaatagccgctcctcagagctcgaaatcggccgtctcgtggtggcgggtcccgctgaggtgaccgccaacgacctgcagttctcctcgcaggtggacgtggtcgacggcaaccgacccatcgccaccgtggccgatggttacagcctcgagcttgaggttcatgtcgagcgcggtgtgggctacaggccggtggatcgccacagcgaggacaccagcgccatcgacctgctccagatcgatgccgtgttcatgccggtgattcgggtgaatttcaccatcgatgaaaccgctgtcgccgaagggggttcagcccgtgagcgtctgcgcatggagatcgtcaccgacggttccattacgcccgacgatgctctggcgcagtcagcgaaccacctgatcgagttgttccagcccctcgccacggtgaccctcgtggaggagcctggtgtcgagcctgaaccctctgcagaagcccagattcctctggagg

SEQ ID NO: 255530 - DNA, 880 bp, Unknown
  Bacterial polypeptide expressing nucleotide sequence isolated from the Sargasso Sea
atgcaatcaagcactaatataattgataagaattggaaagatttaataaaaccaaacaaattaaatataacaagcagtgatgacaaatcttttgctaaagttgtcgctgagcctttagaaaaaggatttggtcaaactataggtaattctttaagaagaattttactgtcttcaattcaaggtgctgcagttaccgcaatacaaattgatggagtattgcatgagttttcatctattaagggcgtgagagaagatgtgacggatattgttttaaatgtaaaaaatttagcaattaaatgtaactcaacaagttctaaaaaaattattttagatatcaagggcccaaaagaagttaaggcgaaagatataactttaggaccagaagtggaaattttaaatcctgaacaaacaatatgtaatgttgatgagaaaacaaattttcatatggagttatttgtcaattctggcaaaggatatgtgcctgctcctaaaaatagatctgaggatagtcctcttggattaatatcaatagactctttatttagtccagtgaaaaaagtgtctttttcaattgaaaataccagagctggaagcgcactagattatgataaattagttatgaatgtggaaacaaacggaacagttgctgcagaagatgcaatagcttactcagcaagaatatttcaagatcagctttctatgtttgttaattttgaagatccaaaagaaattgtgaaagaggtaaaatcttcagagccagaatttaataaaaatttattaaaaagagttgaagaacttgaattgtctgtaagatcaatgaattgtttaaaaaatgataatattatttatataggagatttagtacaaaaaaccgaaccag

SEQ ID NO: 255531 - DNA, 970 bp, Unknown
  Bacterial polypeptide expressing nucleotide sequence isolated from the Sargasso Sea
aacgattgagatagtagaatcattacataagtctggtaatcgacctgagtggatgattttagaggctattcctataatgccacctgatttaaggccaatggttcaattagagggcggacgttttgcaacgtctgatttgaatgatttatatagacgtgttgtgaatagaaataatcgtttaaaaagacttatggatattggtgctcctgaaatgattatacgtaacgaaaaaagaatgttacaagaatcagttgatgtattaatttcaaatggtaaaagaggtcgttccgttacaggttcgaatggaagaccactaaaatctcttggtaatattattgaaggtaagcaaggaagatttagacaaaacttacttggtaagcgtgttgattattcagctagatctgtaattgtggttgggcctcatttgaaatttcatcagtgtgggttacctaaagagatggttttagaattatttaagccttttgttattagaaaacttgttcaagatggtgtagtttcgaacgtgaaaagtgctaaaagaaagatagaaaaaagagaagtagaggtttgggatgctttagaatcagttattaaaggtcaattagtattattaaatcgtgcacctactttgcatagattaggtattcaggcttttgaaccagtattggttgaaggttctgctattcaaatacatcctttagtatgttctgcttttaatgctgattttgatggtgaccaaatggcggttcatttgccattgtcaatagaggcacaaactgagtgtcgaatgcttatatgttctacaaacaatattttatctccatctagtggtagatctatagttactccaactcaagatatgacattaggttgttatttcttaactgttgaagatgaggaggagaaaaagaaagaaacatttttaatgtttttcagacatgggagaagcttggagagcttgggagagtaa

SEQ ID NO: 255532 - DNA, 460 bp, Unknown
  Bacterial polypeptide expressing nucleotide sequence isolated from the Sargasso Sea
catgaataaaaataattttttaaaaccaaaattagttgatattgaggctttgagttcatctcatgcaaaaataacaattgaaccacttgagagaggttttgggcacacactaggaaatgcattaagaagagtcttactttcttcaatgcctggtagtgctgttacagaagtaactattgaaaatattctccatgaatacagtgctattgagggagttcaagaagatgttcttgagatattattgaatattaagaaactggcactagttttacatgacaaagatagccttgatgtaacgctaagaaaaaaaggtacaggtgcggtactagcctcagatattacggataaccctgaattagaagttaaaaatccagatttttgtattgcaaacataacaaatgataaaactgaacttgttatccatatgacaattaccaatggtaggggttatcagcctgca

SEQ ID NO: 255533 - DNA, 239 bp, Unknown
  Bacterial polypeptide expressing nucleotide sequence isolated from the Sargasso Sea
tatggaaaacacaataataaatcaaaattggaagaatctaatcaaaccaaataaattaaatatacaaagtagtgacgacaagtcattcacaacagttacagcagaacctttggagaagggttatgcattaactataggtaattcattaagaagaatacttctctcttcaatacaaggttcagcgattaccgctatacaaatagatggagttttacatgagttctcttccattaaaggag

SEQ ID NO: 255534 - DNA, 676 bp, Unknown
  Bacterial polypeptide expressing nucleotide sequence isolated from the Sargasso Sea
ccaagtagaatagcacttgctgttgatatgaagctcaaagaagtcgaaagggttttgtattttgaaaattttattgtcattgaaccaggtttaacaggtctgcaaaaaaatcaacttttaaatgaggaagaactagcaaaatatcaagatgaatatggtgaggaggcttttacagctggaattggagctgaagcagttctggaaatgcttaaaaatcttgatttagatttagagagaaaaaaccttgttgattatatcaaagagacgaaatcaaaagtgaatgaagaaagagctataaagagattaaaattaattgagtcctttattgaaactggtcaaaaacctgagtggatgatcatgactgttgttccagttattccaccagaattaagaccactggttcctttagatggtggaagatttgcaacatcagatctaaatgatctttatagaagggttattaatagaaataatcgtttaaagagactaatggatcttaaggcaccagatataatcatcagaaatgaaaaaagaatgttgcaagagtccgttgatgcactttttgataatggaagaagaggtagagtaattactggaacaggtaaaagaccattaaaatctttagctgagatgttgaaaggaaaacaaggaagatttagacaaaatcttcttggta

SEQ ID NO: 255535 - DNA, 481 bp, Unknown
  Bacterial polypeptide expressing nucleotide sequence isolated from the Sargasso Sea
atggaaacggcaaatgtaaatttaaaaaattggaaatcattaattaagcctggcaaattagacattaatttaaacgatgacaaatcatacgcaaagattgtagctgaaccacttgaaaagggttatggtttaactttaggtaattcactaagaagaattttattgtcttcaattagaggtactgctgtgacagcaattcaaattgatggagtacttcatgaatttacttcaattaaaggtgtaagagaagatgtaactgatattgttcttaatgtaaaatctttagcactaaaaagtacatccgaaggttcaaaaaaattagtgttagatgctaagggcccaggagtaattaaagcatctgatataacaaaagttaatgaaatagaaattttaaatccagacttgataatttgcaatttggatgaaaatacaaattttcacatggaaatgacaataggcaatggaaaaggttatgttcctg

SEQ ID NO: 255536 - DNA, 928 bp, Unknown
  Bacterial polypeptide expressing nucleotide sequence isolated from the Sargasso Sea
acttcaaagcaaagaaagaccgaatcattaaaaagatacaaagtagttgaatccttaagagaggcaaatattaacaaagaaaataagccggaatggatgattttaaaagccatccctgtaatcccacctgaattaagaccacttgttccacttgatggtggtaggtttgctacttcagacctaaatgatttatacagaagagttatcataagaaataacagattaaaaagacttgttgaaattaaagcgccggaagttattttaagaaatgaaaaaagaatgcttcaagaatcagttgattcattatttgataatacaagaaaatcatcagctgttaagacagaggctaatagacctttaaaatctctgtcggattcacttaaaggtaagcaaggtagattcagacaaaatcttctcggtaagcgtgtagattattctgctaggtcggtaattgttggcggtcccactcttaaactctatgaatgtgggttaccaaaagatatggcagctgagctatataaaccttttatagtaaagaaattaattgaaagaggcatagttaaaactgtaaagtctgcaaaaaaaataattgataaaagagaaccacttgtttgggatattcttgaaaatgttttgaaaggtcatccagttctattaaacagagcaccgactcttcatagacttggaattcaagcttttcagcctattctaattgaaggtaaagctatacaggtacatcctctagtctgtacagcatttaatgcagattttgatggagatcaaatggctgttcacttacctttaggcccagaagctattcttgaatctcaattattaatgttagcatctcacaatattttaaaccctgctaatggatcaccaattacagttccttctcaagatatggtactggattatactacagacc

SEQ ID NO: 255537 - DNA, 922 bp, Unknown
  Bacterial polypeptide expressing nucleotide sequence isolated from the Sargasso Sea
agaaaaaatcttataagcttcatcaaagagactaaatcaaaagttaacgaagaaagagcaatcaaaagattaaaattaatcgagtctttcattgaaactggtcaaaaacctgagtggatgattatgacagttgtaccagtcataccacccgaattaagacctttagttcctttagatgggggaagatttgctacttcagatcttaacgatttatacagaagagtaattaacagaaataatagattaaaaagattaatggacctcaaggccccagatataattgtaagaaatgaaaaaagaatgcttcaagaatctgtagatgctttatttgataatggaagaagaggcagggttattactggaacgggtaagaggccgcttaaatcactagctgaaatgctaaaagggaagcaaggtagatttagacaaaatttacttggtaaaagagttgattattcaggaagatcagtaattgttgttggtccagatttgaaattacatgagtgtggcttgccaaaaaaaatggctttggagctatttaaaccatttttatatgcaagattaaataaattaggtttagcttcaacaatcaaacaagctaaaaaattagttgaaaaagagacaaatgctgtttgggacgctttagaattgatcgttagagaacaccctgtgcttttaaatagagcaccaacacttcatagacttggagtacaggcatttgaaccaaaattaattgaaggtgatgcgatagaattacatcctttaacttgcgcagcatttaatgctgactttgatggtgaccaaatggcagttcacgttccgttaagtttggaagcacaattagaggcaagaattctaatgctatctacaaataatattctatctccatcaaatggtaaaccaattattgttccaagtcagg

SEQ ID NO: 255538 - DNA, 916 bp, Unknown
  Bacterial polypeptide expressing nucleotide sequence isolated from the Sargasso Sea
atggaaactcaagacgtaaacattaaaaattggaaatcactcattaaaccaggaaaactagatattcaatcaagtgatgataaatcttttgcaaaaatcatagctgaacctttagaaaaaggctacggattaacattaggaaattcattaagacgtatattattatcttcaataagaggagcagcagttaccgctatacaaattgatggagttttgcatgagttcacatctattaaaggtataagagaagatgttacagatatagttttaaatattaagtcgttagctttaaaaagtacatctgacactccaaaaaaactaattttagatgcgaaaggaccaggtgaaataaaagcatcagacattacgaaaatagcagatatagaaattttaaatcctgatttaacaatctgtaatttagatgaaaatacccattttcatatggaaatgaccgtagggactggtaagggatacgttccagcatcaatgaataaacccgaggatccaccaataggcttaatacctattgattctttatttagtccagtaaagaaagtttcttattctataagcactgccagagaaggtaaagcactagactatgataaattaactttagaagttgaaacaaatggatctatatcagcggaagatgctttagcttattcagcaagaatatttcaagatcaattaggtatgtttgttaactttgatgaaccacaagaagttactattagagagaagcctacggaacctgaatttaacaaaaatctattaagaaaagttgacgaacttgaattatctgtaagatctatgaattgtttaaaaaatgataatattatttatataggtgacctagttcaaaaatcagagggagaaatgctaagaacaccaaacttggaagaaaatcattaaa

SEQ ID NO: 255539 - DNA, 895 bp, Unknown
  Bacterial polypeptide expressing nucleotide sequence isolated from the Sargasso Sea
tatgtcacaatctttaatgaatatttttaatcctacagcttcaagagatgattttaatcaaattaaaattgcgatagcaagccctgaaagaattctttcatggtcatatggtgatatcaagaaacctgagacaattaactatagaacttttaagccagaaagagatgggttattttgtgcgagaatatttggtcctgtgaaagattatgaatgtctttgtggaaaatataaaaggatgaagttcaagggtattatctgtgaaaaatgtggagttgaagttacaaaaaaagatgtaagaagagaacgaatgggtcatattcaattagcagcacccgttgctcatatttggtttctaaagtctttaccaagtagaatagctctcatgatggatatgaagcttaaagatttggagaaggttctatactttgagaaatttatggtaacagaacctggtctaactcctttagagcaaaatcagttgcttgatgaagaggaattagaggctgcaaaagaagaatacggtgaagatggattttctgccagcatcggtgccgaagctgtaagaaaagtattagagaggattgtactggtagatgagttggaagctcttaagaaaaaattagaggaaaccaaagcggttgcactttcagaaaaacttgtaaaacgaataaagatatttgaagcatttatctcttcaggtaatagacctgaatggatgatacttacgagtattccagtcattccacctgaattaagaccactagtaccacttgatggaggaagatttgcctcgtcagatctaaatgacttatacaggagagtaattaatagaaataatcgattatctcgattaatggaattaagagcgcctgatatcatattagaaagaaaaaag

SEQ ID NO: 255540 - DNA, 895 bp, Unknown
  Bacterial polypeptide expressing nucleotide sequence isolated from the Sargasso Sea
cagctcgcaaccacaattaaagccgcaaaaaaaatggttgaacgggaaacaaccgaagtatgggatattttagcggacgtgattcgcgagcaccctattttgcttaatagagctccaacgttgcacaggttagggattcaagcatttgaaccagtattgattgaggggaaagcaatacaattacacccacttgtttgtacggcttacaatgctgattttgatggtgaccagatggctgtgcacgtccccattacgttagaagcccagcttgaaagtagaacgctaatgatgtctacaaacaacgtattatcgccggctagcggagagccaataatcgttccttcacaggatgtcgttttgggcatttattacatgacacgtgaaaaggttaatgcaaaaggtgaggggcttgtctttgcagatgtagaggaggtgcagcgggcttaccatagtaaaaatgtggatcttcaggctcgcgtaaaagttcgagtcaaaaatatggacttggtaaacggtaatccgtccaaaatatttgaaacgacggttggacgagcactgctctacaatattgtccctgaccagctcccttttgatgttgtcaacaagactatggacaaaaaatcaatatcgaatttgattaatgattgttacagaaggtgtgggttaaaggatactgttatatttgctgaccagcttatgtatgcaggttttgcgtattcgacttactccggggcatcaataggggtggaagattttgtggtgcctaaagataaacaagcattgatccaagaggcgcagtcagaggtcgcagagattgaggcccaatattcgtcagggttggtgactcaaggagaaaagtataacaaagtggtcgacatttggggtaggaccaatg

SEQ ID NO: 255541 - DNA, 835 bp, Unknown
  Bacterial polypeptide expressing nucleotide sequence isolated from the Sargasso Sea
gatgatattaactactgtaccggttataccacctgagctaagacctttagtgccattagatggaggcagatttgctacatctgatttaaatgatttatatagaagagtaataaatagaaataatagattaaaaagacttattgacttaaaagctccagacataattgtcagaaatgagaaaagaatgttgcaggagtctgttgatgcgttatttgataatggcagaagaggaagagttataacaggaactagtaagagacccctgaaatcacttgcggaaatgctaaaaggtaagcaaggaagattcaggcaaaatttgttaggaaaaagagtagattattcagggaggtcagtaatagttgttggtccagatctaaaattacatgagtgcggattaccaaaaaaaatggctttagagttatttaaaccattcttgtatgctaggttaaataaattaggattagcatctaccattaaacaagcaaaaaaattagttgaaaaggaaagaaccgaggtttgggacgcactagaattaattgtaagagagcacccagtaatattaaatagagcacctactcttcacagattaggtgttcaggctttcgagccaaaactaattgaaggtaatgcaatagagcttcatcctttaacatgtgctgcatttaatgctgattttgatggagatcaaatggcagtacacgtcccattaagtttagaggcgcaattagaagctagagtattaatgatgtctacaaacaacattttaagcccttctaatggtaaaacaataattgtaccaagtcaggatatgatacttggcatttattatttatct

SEQ ID NO: 255542 - DNA, 943 bp, Unknown
  Bacterial polypeptide expressing nucleotide sequence isolated from the Sargasso Sea
acaaaatttacttgtaaagagagtggactattcaggtagatccgtaatagttgtaggaccaaaccttaaattacaccaatgtggtcttccaaaaaaaatggctttagagttatttaaaccttttatttttcacaaacttgatattcaaggatttgcaaatacaataaaagctgcaaaaaaacttgtagaaaaagaagatccaagagtttgggatattcttgaagaagttatcagagagcacccagttcttctaaatagagcaccaactttacatagacttggtatccaagcttttgaaccaacacttatagaaggcaaatcaatacagcttcacccattagtttgtactgcttttaatgcagattttgatggtgatcaaatggctatccatgttcctttaagcttggaagcacaattagaggccagagtattaatgatgagtactaataatattttatcaccttcgagtggaaaaccaataatagttccttcgcaggacatagtgcttggaatttattatctgtctattatgagagataaacaaaaaggagatggaaagttttttgttgatttaaatgaaataataaaagcattagataatggagatattaatctccataccaaaatagttacaaggattaacaattttagaaacgaagtatctagaatggaaaccacggcaggaagaatgttgctaggtaatttattgcctaaaaataagaatattgattttagcttacttaataaagttttaacaaaaaaagaaataagcaatataattgatactgtttacagattttgtggtcaaaaggagacagtaatatttgctgatcaaattatggctttgggatttaagtatgctgcaaaagctggaatatcttttggcaaagatgatttaatcattccatctgataaaaatattctaattgaacaaactcaacaa

SEQ ID NO: 255543 - DNA, 862 bp, Unknown
  Bacterial polypeptide expressing nucleotide sequence isolated from the Sargasso Sea
ctagagaaagaaagagaaatattattaaaaaatataaatgaaacgaaatctaaagttgctgaggagagatcgataaaaagattaaaactaatagattcttttattgaaactggaaataaaccagaatggatgattttaactactataccagtgattccaccagagttaagaccactagtgcctcttgatggaggaagatttgctacatcagatttaaacgatttatacagaagagttattaatagaaataatagattgaaaaggttaatggaccttaaagctccagatataattataagaaatgaaaaaagaatgttgcaagagtccgttgatgctttatttgataacggcagaagagggagagtaattacaggtactggtaaacgtccattaaaatctttagctgaaatgctcaaaggaaaacaaggaagatttagacaaaatcttttaggaaaaagagttgattactctggaagatccgtgattgttgttggtccagatttaaaactacatgaatgtggtttaccaaaaaaaatggctcttgagttgttcaagccatttttatacgcaagattgaataaattaggattagcatctacaattaaacaggcaaaaaaacttgttgaaaaagaaacaaatgctgtttgggatgctctagaacttattgttagacaacatccaattttattaaatcgagcaccaactttacatagattaggtgttcaagcttttgaacctaagttaattgagggtgatgctatagaactgcaccctttaacttgtgctgcttttaatgctgactttgatggtgaccaaatggctgtacatattccgctaagcttagaggctcaacttgaggcaa

SEQ ID NO: 255544 - DNA, 715 bp, Unknown
  Bacterial polypeptide expressing nucleotide sequence isolated from the Sargasso Sea
tggatgatacttacaactattccagttattccacctgaattaagacctttggttcctctagatggtggaagatttgcaacatcagacttaaatgatttgtatagaagagtaataaatagaaataacagattaaaaagattaatggacttaaaagctccagatataataattagaaatgagaaaagaatgctccaagagtcggttgatgcattatttgataatggaagaagaggaagagtaataactggaactggtaaacgtccactaaaatcattagcagagatgttaaaaggtaaacaaggtagatttagacaaaatcttttaggaaaacgtgttgattattctggtcgatcagtgattgttgtgggtcctgatttaaaacttcatgagtgtggattaccaaaaaaaatggctttagaattattcaaaccttttctatatgcaagactaaataaacttggtctggcatcaacaattaaacaagctaaaaaactagtcgaaaaagaaacaaatgcagtttgggatgcattagaattaattgttagagaacacccaataattctaaaccgtgcacctactttgcatagattaggggtgcaagcatttgagccaaaattgattgaaggcgatgcaatagaacttcaccctctaacttgtgcggcgtttaatgcagattttgatggagatcaaatggctgtacatatcccactaagtc

SEQ ID NO: 255545 - DNA, 541 bp, Unknown
  Bacterial polypeptide expressing nucleotide sequence isolated from the Sargasso Sea
accattagaaaaaggttatggtttaactttagggaactcaattagaagaatattgctttcatctatcagaggagctgcagttacttcaatacaaattgatggtgttctgcacgaatttacatctattaaaggtgtaagggaagatgttacagatatagttttaaatgtaaaatctcttgctctaaaaagtttgtctgatggaaataaaaaacttatattagatgttaagggtcctggtgagataaaagcatccaacatcaccccagttcaagatattgaaatattaaatccagatttagttatatgtaatctagatgaaaataccaattttcatatggaaatgatggttggtaatggcaaaggttatgtttcagctgaaatgaataaaccagaggaaccccctttaggtttaattcctattgactcattatttagtccagttaaaaaagtttcttattcagtaagtacagcgagagagggaaaagcattggattatgacaagttaactatggaagttgaaactaatggatctatttccgca

SEQ ID NO: 255546 - DNA, 877 bp, Unknown
  Bacterial polypeptide expressing nucleotide sequence isolated from the Sargasso Sea
aaatgatttataccgtagggtaattaatagaaacaataggttaagaagactccttgagcttggcgctcctgacattattgtaaggaatgaaaaaagaatgcttcaagagagtgtagatgcgcttctagataatgggagaagaggcagagtcattaccggtaccaacaaaagaccactcaaatcattggctgatatgatcaaaggtaagggtggaagatttagacaaaacctcctaggtaagcgagttgactattctggtagatctgtaatcgttgctggtcctaatttgaaacttcatcaatgcggcttaccaaagaaaatggcccttgaactatttaaaccatatgtctatggcaagcttgaacaaagagagctagctacaaccattaaagctgctaaaaagttggttgaaagagaaactccagaggtttgggagatactcgaagaagtgattagagaacatcctgttcttcttaacagggctccaactctccatagactaggtatccaagcttttgaaccattattggttgagggaaaagctatacaacttcacccattagtatgtgttgcttttaatgctgattttgatggtgaccaaatggcggttcatgttccattaactattgaagctcaacttgaggctagggctttaatgatgtcaacaaataatattttatctcctgcgaatggagagccaattattaacccatctcaagatgttgtattaggtctttactatatgactagagaaaaaattggtgctacagggtctggaagggtatttagtaatccagatgaagttcttagagcttatgaatctgagaccatagatctacatgcacagattaaagtaagaattacaaatgctgacaaa

SEQ ID NO: 255547 - DNA, 772 bp, Unknown
  Bacterial polypeptide expressing nucleotide sequence isolated from the Sargasso Sea
ctttattttgaacaatttattgttgttgagcctggtttaacagatttaaaaaaaggtgatataatttctgaagatcaatatattgattatcaagatgaatatggtgaagattcttttagtgctgcaattggagctgaagcaattgagcaaatgcttctcaatattgatcttgaggctgattttaacaaaactaaaaatgatcttctggaaacaaaatcagaacttaaaaaaacaaagctaacgaaaagattgaaattattagaatctttcatactttcaaaaaacaaacctgagtggatgattttaagagtactgccagtaattccaccagagttaagaccattagtacctctggatggtggaagatttgctactagtgatttaaatgacctttatagaagagttattaatcgaaataataggttaaaaagactaattgatcttagggcccctgatatcattataagaaatgaaaaaagaatgcttcaggaatctgtagatgctctatttgacaatggaagaagaggaagggtaataacttctactaataaacgtccattaaaatctttatctgatatgcttaaaggtaagcaggggagatttaggcaaaaccttttagggaaaagggttgattactctggaaggtcggtaattgtagttggtccaaatcttaaactacatcagtgtggtcttccaaaaaaaatggcattagaattgtttaaaccttttatttttaataaattagatatttatggatgggctaatactatca

SEQ ID NO: 255548 - DNA, 674 bp, Unknown
  Bacterial polypeptide expressing nucleotide sequence isolated from the Sargasso Sea
ttctgacatcacacctgttacagatgttgaaattttaaatcctgatttagtgatttgtaatttagatgaaaaaacaaatttccatatggaaatgaatgttaataccggaaaaggctatgtgccagctgagttaaataaacctgaggaacctcctttaggactaatagcaattgactcattatatagcccagtaaaaaaagtatcttattcagtgagtacagctagagaaggaaaagctctagattatgacaaacttacaatggaagttgaaactaatggatctatttctgctgaagatgcagtagcttattcagcgagaattttccaagatcaattaaaaatgtttattaattttgatgaaccagttgaggctccagttcaagaagtatcaactgagccagaatttaataaaaatctactaagaaaagttgacgaattagaactttctgtaagatcaatgaattgtctaaaaaatgataacataatttatataggagatcttgtacaaaaatcggaaggtgaaatgttaagaacaccgaattttggtagaaaatctttaaatgaaattaaagaggtattaacaggaatgtcattatatcttggtatggaaatacctaattggccaccggataatattgctgaaatgtctaaaaaattagaggaagcaatttaat

SEQ ID NO: 255549 - DNA, 796 bp, Unknown
  Bacterial polypeptide expressing nucleotide sequence isolated from the Sargasso Sea
gaaagagttctctactttgaaaattatgttgtcattgaaccaggtttgacagatctcatatatggtcaaatgatgagcgaagaagagtttatggatgctcaagatacttatggaatggatgcatttactgcaaatatcggagcagaagcaattcgagaaatgcttgctgcaattgatcttgaggcagaagccgaacaactccgagttgacttgagggaagcgaccggtgagctaaaaccaaagaaaattatcaaacgtcttaaggtcgttgagagttttcttgaatcaggaaatagacctgagtggatgatcttgacggttgtaccagtgataccgcctgaacttagaccgcttgtgcctttggatggtggtcgctttgcgacttctgatttgaatgacctataccgacgagtgatcaatcgtaataaccgtctgaaaaggttaattgaattacgagctccagatattattgttcgaaacgaaaagcggatgcttcaagagtctgttgacgctttgtttgataacggtaggcgcggtcgcgttattacaggagctaacaagcgaccattaaagtctttgtctgatatgctaaaaggtaaacaagggcgctttcgtcagaaccttctagggaaaagagttgacttttctggcaggtcagtaattgttaccggtcctgaattgaagttacatcaatgtggtctacccaaaaagatggccttagagctgttcaagcccttcatttattctcggttggaagcaaaaggtctttctagcacggtaaagcaagctaaaaaat

SEQ ID NO: 255550 - DNA, 803 bp, Unknown
  Bacterial polypeptide expressing nucleotide sequence isolated from the Sargasso Sea
atttctcaagaaaacacttttgacaatattaagattactcttgctagtccggaaaaaattaaatcttggtcttttggagagatcaaaaaacctgaaactataaattatagaacttttagacctgaaaaagatggtttattttgttcaagaattttcggacctgttaaagattacgaatgtctttgtggaaaatataaaagaatgaagtttagaggaattatttgtgaaaaatgtggagtagaagtaacaaagtctaacgttagaagagaacgtatgggtcatatcgacttagcttgtccagtagcacatatttggtttttaaaatctctgcctagtcgtatttctttggcgatagatatgaaattgaaagaggttgaaaaagttttatattttgagagtttcatagtgattgaacctggtttgacaacacttaaaaaaggacaattgatttctgaagaggcattaataaaagcacaagaggaatttggtgaagatgcttttaccgctggtataggagctgaagctgttagagaaattttattgaatttagatttaaaaaaagagcaaaagaaattaagagattctctttctgagataaaatcaaaggttactgaagaaagaacaattaagagattgaaattaattgagtctttcatttcatctggtaacaaacctgagtggatgatcctaacttctgttccagtcataccacctgaattaagacctttagttccactggatggaggaagatttgctacttcagaccttaatgatttatatagaagagtcataaacagaaataa

SEQ ID NO: 255551 - DNA, 756 bp, Unknown
  Bacterial polypeptide expressing nucleotide sequence isolated from the Sargasso Sea
gatggtgtccagcatgaatatagttctataaaaggtgtcagagaagacgttactgatatagttctcaatattaaatcattagctttaaaaagtagctcagaaagcaataaaaaattaattttagatgttaaaggaccgggcgagattaaagcatctcaaataactccagttcaggatatagaaattttaaatccagatcttgtaatatgtaatttagatgagaatacaaattttcatatggagctatttgttggaaatggaaaaggttatgtttctgcagaattgaataaaccagaggagcctcctttgggcttaattccgatagactcattatttagtccagttaaaaaggtatcatattctgttagtacagctagagagggaaaagcattagattatgacaaattaactatggaaattgaaactaacggatcaataactgcggaagatgctttagcttattcagcaagaatattccaagatcaattaggtatgttcgttaattttgacgaacctcaagaaattaaaatgcaagatcaaccaaaagaaccagaatttaatcaaaatttattaagaaaagttgatgaattagagttgtctgtaagatctatgaattgtttaaaaaatgataatataatttatattggagacttagttcaaaaatctgaaggtgaaatgttaagaaccccaaattttggtcgaaaatcacttaatgaaattaaagaggttttgagcggaatgtcactttatttaggc

SEQ ID NO: 255552 - DNA, 811 bp, Unknown
  Bacterial polypeptide expressing nucleotide sequence isolated from the Sargasso Sea
ggtccaataaaagattatgaatgtctttgcggaaaatataaaagaatgaaattcagaggtattatttgtgaaaaatgtggagttgaagttactaaatcaaatgtacgtagagaaagaatgggccatattaatttggcaacacctgttgctcatatttggtttttaaaatcattacctagtagaatttcactcgcagttgacatgaagttaaaagaagttgaaagagttttatatttcgaaaattttatagttattgaacctggtttaacgggacttaaaaaaaatcaactattaacagaagaagaattaataaaatatcaagatgaacatggtgatgagtcatttacaacaggaattggtgcagaagcaattttagaaatattaaaatcaattgacttagagtctgaaaaagtaaccttaactaatgcaataaaagaaactaaatctaaagtggctgaggaaagagcaataaaaagacttaaattaatagaatcttttattgaaacaggaaacaaaccagagtggatgattttaacaactattcccgtaataccacctgagcttagaccgttagtacctttagatggaggaagattcgcaacatctgatttaaatgatttatacagaagggtaataaatagaaataatagacttaagagattaatggatcttaaagcaccagatataataatccgtaatgaaaaaagaatgcttcaagaatctgtagacgcgctttttgataacggaagaagaggaagggttattacaggaactgcaaaaagacctttgaaatctctagcagaaatgtgaa

SEQ ID NO: 255553 - DNA, 325 bp, Unknown
  Bacterial polypeptide expressing nucleotide sequence isolated from the Sargasso Sea
atggaaactgctgaagtaaatgcaaaaaactggaaaggacttattaagccaactaaattagatgttcagttgagtgatgataaatcttatgcaaaaataatcgctgaaccacttgaaaaaggatatggcttaactttaggaaattcacttagaagaatacttctttcatcaatcagaggtactgcggtaacctcaatacaaatagatggtgtgcttcatgaatttacttcaattaaaggtgtaagagaagatgttactgatatagttttaaatattaaatctttagctttaaaaagcgcttcagaagaaagtaaaaaattaattt

SEQ ID NO: 255554 - DNA, 790 bp, Unknown
  Bacterial polypeptide expressing nucleotide sequence isolated from the Sargasso Sea
cgtcagagaggatgttacagacatagttctgaatgttaaatctctagcattaaaaagtgactcaaacactaatagtaaattgattttagatgcaaaaggtcctggagaaattaaagcagcagatataacgaattctggagatattgaaattttaaatcctgatttagtaatttgtaatctagatgaaaatacaaattttcatatggagatgacagtcagcagtggtaaaggatatgtttcagccgatatgaataaaccagaggagccgccattgggtttaataccaattgactcattattcagcccagtcaagaaagtatcatattcaataagcactgcaagagaaggaaaagctcttgattatgataaattaactatggaagtagagacaaatggctcaatttcagcagaagatgctgtagcatattcagctagaattttccaagatcaactgggtatgtttgtgaattttgatgaaccacaagaagtgattataagagaacaaccaactgaaccagaatttaataaaaatttactgagaaaagtagatgaactagaactttcagttagatctatgaattgtttaaaaaacgataatattatttatataggcgacttggttcaaaaatcggaaggtgaaatgttaagaacaccaaattttggtagaaaatctctaaatgagataaaagaggtgttgactggaatgtcactttatttaggcatggaaataccaaactggccaccagacaatatagcagaattatccaaaaaacttgaggaagctatctaa

SEQ ID NO: 255555 - DNA, 614 bp, Unknown
  Bacterial polypeptide expressing nucleotide sequence isolated from the Sargasso Sea
tatgagtattattaataattggcaggcattaataaaaccttcaaaactaaagctaatcagcgatgaagagactcaatacaaagcaactttaattgcggaaccacttgaaaggggttttggattaacacttggaaatgctcttagaagagtactgctgtcatcactacagggtactgctgtgactgcaattaaaatagataatgttcttcatgaattttcatccattgatggagtaagagaagatgttacagatatagtgttaaatattaaatccttatctttaaatatgcattctgaaggtgtaagaaaaatgaatctcaacgtaactggtccaggtgagattactgcgggtatgataaatacaccatcagaaattgatattataaatccagagttagttatctgtaatcttgatgacaatactgaatttaatatggagcttaccgtagcaaaaggtaaagggtatgttgctgctgaacataacaagccagaagattctgcaataggcctgattccaatagactccatatttagcccagttaaacaagtttcatacagtatagaaaacactagagaaggaaaagttttagattatgacaagttaacaatgtcaa

SEQ ID NO: 255556 - DNA, 877 bp, Unknown
  Bacterial polypeptide expressing nucleotide sequence isolated from the Sargasso Sea
tcaacaaataagagaccacttaaatctttatctgatatgttaaaaggtaagcaaggaaggtttaggcagaacttattaggtaaacgtgttgattattctggaagatctgtaattgttgttgggccaaacttaaagctacaccaatgcggtattccaaaaaaaatggctcttgaattatttaaaccatttatatttcataaacttgatatttatggctgggctaatactataaaggcagcaaaaaaacttgtagaaaaagaagatccaagagtttgggatatattggaggaggttataagagagcatccagtccttctaaatagagcgccaactttacataggcttggtatacaagcattcgaaccaatattgatagaaggtaaatcaattcaattacaccctctagtttgtacagctttcaacgctgactttgatggtgaccaaatggcagttcatgttccacttagccttgaagctcaacttgaagctagagttttaatgatgagtactaataatatattatctccctcaagtggtaagcctattatagtgccatctcaggatatcgttttaggcatctattatttatcaataatgagagataaacaaataggtgaaggacgaaactttgttgatttaaatgaaatacttaaagcattagaaaatggtgatgtaaatcttcattcaaaaataaatgctagaataaaaatgaatgacggacaattatcaaaagttgtaactacaccaggcagaatgatattaggcgatattttgccaaaaaataaaaatgttaattatgaaatgattaataaagttcttacaaaaaaagaagttagcaatatcattgataatgtttatagattttgcggtcaaaaag

SEQ ID NO: 255557 - DNA, 321 bp, Unknown
  Bacterial polypeptide expressing nucleotide sequence isolated from the Sargasso Sea
catgactaatagcaatctacgaacagaaaatcattttgattacgtcaaaatcaaattagcttcacctgaaagggtaatggaatgggggcaaagaacattgcccaatggacaagtcgttggagaagttactaagcccgagacgataaattatcgaactttaaagccagaaatggatggattattttgtgagaagatttttggtccttctaaagattgggaatgtcattgtggcaaatataagagagttagacatcgcgggattgtctgtgaaaggtgtggagttgaagtaacagaaagtcgtgttagaagacatagaatggg

SEQ ID NO: 255558 - DNA, 433 bp, Unknown
  Bacterial polypeptide expressing nucleotide sequence isolated from the Sargasso Sea
atggaaacttcaaatgtaaatgttaaaaattggaaatcacttattaaacctggaaagcttgatatacaactaagtgatgataaatcatatgcaaaaattatagctgaaccactagaaaaaggttatggattaactttaggtaattctttaagaagaattttactttcttcaataagaggaactgctgttattgcaattcagatagatggtgtacttcatgaattttcatcaataaagggtgtcagagaagatgttacagacattgttttaaatgttaagtcacttgctctaaaaagtaatattgaaggatcaaaaaaacttatcttagatgcaaaaggtcctggtgaaataaaagcttcagacattactcaagtagcagatatagaaatacttaaccctgatttggtaatttgtaatttagatgaaaaaacta

SEQ ID NO: 255559 - DNA, 934 bp, Unknown
  Bacterial polypeptide expressing nucleotide sequence isolated from the Sargasso Sea
tttatttattcaaggcttgaatctattgggaatttcatcaacagtcaaacaagctaaaagaatggtcgaaaaacaaacccctgaagtttgggatattttagaagaagtcattagggagcatccagttttacttaatcgtgcaccaactcttcataggctcggaattcaagctttcgaaccagttcttatcgagggtaaagcaatacagttacatccccttgtttgtgcggcctttaatgctgattttgatggagatcaaatggctgtgcatgtacctttatcattggaagctcagcttgaagcaagagttttgatgatgtctacaaataatattttacatcctgcgaatggagatccaattattgttcctagtcaagatattattttaggcttgtactatttgtctcaaatgaaacaaaatgaaccaggagaaggaaggcattttgatgatataaacgaaattgaatttgccttagataataaaaatattactcttcatacaatgataagttttagatttaatgcagaagatggttataagaaattcgatacaacccctggtagagttttaatttctaaagaattacctagcaatgaaaatatttcatttgaattagtgaataaacttttaacaaaaaaagaaatttctaggatgatagacgatgtttataggcattgtggtcagaaagaaactgttattttttgtgatcatattatgaaattaggttttaaacatgcatgtaacgctggaatttcttttggtaaagatgatatgattattcctgaagaaaaagttagcctaattaatgatactaatgagttagtaaaagagtttgaacaacaatatatcgatggatttataactagaggcgaaaatataataaagttgttgatgcatgggcgaaatgtactgataaggtcgaggataaaatga

SEQ ID NO: 255560 - DNA, 412 bp, Unknown
  Bacterial polypeptide expressing nucleotide sequence isolated from the Sargasso Sea
atggaaactgaaaatgttaatctaaaaaattggaaatcattaattaagcctacaaaactagatgttaaaatgagtgatgatcttactcatgcaaagattgtagctgaaccattagaaaaaggatatggtttaacattaggtaattcattaagaagaatattattatcttcaatcaggggagcagctgttacttcaattcaaattgatggtgttttacatgaatttacttcgattaaaggtgtaagagaagatgtcacagatattgtattaaatgtaaaatctctagcattaaaatgttctgcagaagggacaaaaaaacttgttttagacgccaaaggaccaggagaaataaaagcttcagacataacacctgtaacagatgttgaaatattaaaccctgatttggtaattt

SEQ ID NO: 255561 - DNA, 744 bp, Unknown
  Bacterial polypeptide expressing nucleotide sequence isolated from the Sargasso Sea
attccaccagaacttagacctttagttcctttagatggaggacgttttgcaacttcggacttaaatgatttatatagaagagttattaatagaaacaatagattaaaaagattaatcgatcttaaagctcctgacataataatcagaaatgagaaaagaatgttgcaggagtcagtagatgccctattcgataatggaagaagaggtagagttattactggaactgggaaaagaccacttaaatctttagctgaaatgcttaaaggtaaacagggaagatttagacaaaatcttttaggaaaacgagttgattattcaggaagatcagtaattgtagttggtcctgatttaaaacttcatgaatgtggattgcctaaaaaaatggccttggaattatttaaaccatttctttatgctagacttaataaacttggattagcatctacaatcaagcaagcaaaaaaaatagtagaaaaggaaaaaaatgaagtttgggatgcattagaattaattgtaagagaacatccagttattttaaatagagcacctaccttgcatagattaggagttcaggcttttgaaccaaagttaattgaaggtgaagctatagaactacatccattagtatgcgcagcatttaatgcagattttgatggagatcaaatggcagttcacatacctttaagtttagaagcccaacttgaagcaagagtattaatgatgtcaacaaataatatattaagt

SEQ ID NO: 255562 - DNA, 883 bp, Unknown
  Bacterial polypeptide expressing nucleotide sequence isolated from the Sargasso Sea
gcaattaagagacttaaaatagtcgcttcttttaatcgtcgggatgagcatggccgtcgtgtcaatgaaccgggagctatgattcttgatgctgttccagttatacctcctgatcttcgacctatggtccaattagatggtggtcgttttgcaacttctgatttaaacgatttgtataggcgagtaatcaatagaaataaccgcttaaagagacttctagatttaggagcacctcgaattatcgttaataatgaaaagcgcatgttgcaagaggctgtggatgcattatttgataatggtaggagaggtagacctgttaccggtccaggaaaccgacctctaaaatccctttctgacatgttgaaaggtaagcagggaaggttcagacagaatcttcttggtaaacgagtcgattattctggtaggtctgtaatagtcgctggtcctacacttaagttccaccaatgtggacttcctaaattaatggctcttgaattgtttaagccttttgtaatgaagcgtttagttgatggagaacttgctcagaatattaaatctgccaagcgaatggtcgaaaggcgaaagccacaagtatgggatgttttagaagaagttattcaggaacatccggtaatgttgaatcgagctccaactctacacagattaggtattcaagcatttgagcctgttttggttgaaggtaaagctattcgaattcatcctttagtctgtactgcttttaacgcagattttgatggagatcagatggcagtacatttgcctttatcggctgaagcgcaagcagaagcaagagttttaatgctttctgctaacaacgtgcttagtccagctcatggtcgtccgttagttactccaactccaa

SEQ ID NO: 255563 - DNA, 820 bp, Unknown
  Bacterial polypeptide expressing nucleotide sequence isolated from the Sargasso Sea
catgaattttctacaatttctaggcgtaaaagaagatttaacagacatactgcttaatttaaaagcagtttgtttaaaggttcattctcctggtttaaaaaaaatgtatatcaaaacaaaaggccctggtgaaattagagcgggtaattttgaaactgattctgaaacagaaatcatgaatcccgatcaaattattatgacacttgatagcaatgctgatattgagctagaagctaatattgatactggaaaaggttatctttcagctgaagtagctgaagatgatgaaaaaattattggagaaataaagcttgatgcaatgtttagccctgttaagagagcatcttacaaggtagaaaatagtcgtgtgggacaagttactgattatgataaattaattttagaggtggaaacaaacggagcagtttctcctgatgatgcaatagcacttgcagcaagaattttacaagatcaacttcaaccttttattaattttgatgagccagaagttcaaatggaaacctcttctcatgaaaagttatcttttaaccctaatttactaaaaaaagttgaagagctggagctgtctgttcgttctgctaattgtcttaaaaatgataatataatttatataggggatttagttcaaaagacagaatctgaaatgttaagaacacctaactttggaagaaagtctttaaacgaaattaaagaagttcttcagcaaatggagcttggtttaggcatttctgttcctgactggccacctgaaaatatagaagaattagcaaaaaaatttgaagatccatttaataaataa

SEQ ID NO: 255564 - DNA, 817 bp, Unknown
  Bacterial polypeptide expressing nucleotide sequence isolated from the Sargasso Sea
gaattcagaaacgcgtcgcaaacgaattgccaaaagacttaatgtaatcagcgcacttttgaagtctggcaatgctgttgattcaatggtcatcgataatttacctgtgcttcctcctgaattgagacccttagtacctcttgaaggtggaaggtttgcaacaagtgatcttaatgatttgtaccgtcgagttatccatagaaacaatcgtcttaaacgccttatcgagctgagggcaccaggaataattgtcaaaaatgaaaaacgcatgcttcaggaatctgtagacgcactttttgataatggacgtcgtggacgccctatggttggttcaaacaaaagacccctcaagtctataagtgatatgctcaagggcaaacaaggacgtttccgacaaaatctactgggaaaacgtgtagattactccggacgtactgtaatagtggttggtcctgagttaaaacttcatcaatgcggtttgcctaaaaaaatggcgttggagcttttcaaacccttcatttttcataaattgatcgattaccaagaaattcatacaataaaaaatgccaagaaagtcttggaggaaaatcctcctgaagtatgggctatacttgaagaagttgtgagagaacatcccgttttacttaaccgagccccaactcttcatcgccttgggatccagtcatttgaaccaattttgatagaaggtaaagccatccagcttcatcctcttgtatgtacggcgttcaatgctgattttgatggcgatcaaatggcagttcatgtacctctttcagtggaagctcaacttgaatct

SEQ ID NO: 255565 - DNA, 686 bp, Unknown
  Bacterial polypeptide expressing nucleotide sequence isolated from the Sargasso Sea
atcatttactgcaggaattggagccgaagcaattctagaaattttaaaatcaatagatttagatcaagaaaaagaaactttgattaagtctattaaagaaacaaaatcaaaagtttcagaagaaagatcaattaaaagattaaaattaattgagtcttttatagagactggaaataaaccagaatggatgattttaacaaccataccagtgatccctcctgagttaagacctttagtgccactagatggaggtagatttgctacttctgatttaaatgatttatatagaagagttataaatagaaataatcgtttaaaaagattgatggatcttaaagctccagacatcattgtaaggaatgaaaaacggatgcttcaagagtctgtagatgctttatttgataatggtagaagaggaagagttattacaggaacaggcaaaaggcctctaaaatcattagcagagatgctgaaaggtaaacaaggaagattcagacaaaatttgttgggtaaaagagtagattactctggaagatcagtaattgttgttggtcctgacctaaaattacatgaatgtgggcttccaaaaaaaatggcgcttgagttatttaaaccttttttatacgcaaggttaaataaacttggattagcttctacaataaagcaagcaaaaaaacttgtcgaaa

SEQ ID NO: 255566 - DNA, 820 bp, Unknown
  Bacterial polypeptide expressing nucleotide sequence isolated from the Sargasso Sea
tgtagctcacatatggtttttaaaatctcttccatcgagaattggtttgctgcttgatatgacattaagagatattgagagaattttatatttcgaagcttttgtagtaattgatccaggatttactgagttagaaaaatgtcagttactttctgatgaaacctactacgaagccattgaacaatatggtgacgagttcgtagcaaaaatgggagcagaagcaattttagatatgttagacgatcttgatttaactcaagaaacagaaaaattaagagaagaattatcatcaacaaaatctgaagcaaaaataaaaagacttacaaaaagattaaaattagttgagtattttattagttctggtaacaaacctcagtggatgattttgagagcacttcctgttcttccacctgatttaagacctcttgtccctctagatggcggaagatttgcaacgtcagatttaaatgatttatatagaagagtaattaacagaaataatagactaagaagattattagagttaaatgctccagatattatagtgagaaatgaaaaaagaatgcttcaagaagcagttgacgctttgttagataatggtagaaggggtagagcgattacagggagcaataaaagacctttaaaatctctagctgaactgattaaaggaaaacaaggtagatttagacaaaatttacttggaaagcgtgtcgattattcaggaagatcagttattgttacaggtccaacccttatgttacatcaatgcggaataccaaaaaaaatggcacttgaattatttaaaccatttatatttagt

SEQ ID NO: 255567 - DNA, 872 bp, Unknown
  Bacterial polypeptide expressing nucleotide sequence isolated from the Sargasso Sea
attatctcaaattcaaggtgctgctgttactgctatcaaaattgatggtgtacttcacgaattttcatcaataaaaggtgttagagaagatgtaacagatattgttttaaatgtaaaaaatctagctttaaaattaaattcagatggaccaaaaaagttaattttagactcagttggtccaaaagaggtaaaagccaaagatattacacaaattgcagatgtagaaatattaaatccagagcagacgatttgtaatttagatgaaaaaactaaatttcatatggagttaatcgtaaatagtggaagagggtatgtacttgcacaaaaaaataaatctgaggatacaccattagggatgattgcaatcgactctctttttagtcccgtaaaaaaggtatcattcaaaattgatagcactagagcaggatcagcacttgattacgataaattagtaatgcaggttgaaaccaatggaacagtagccgcagaagacgcaattgcgtttgctgcaaggatatttcaagaccaattatcgatgtttgtgaattttgaagatccaaaagaggcacctaaacctgttacctcaacagaacctgaatttaataaaaatttattaaaacgggttgaagaattagaactttcggttagatctatgaactgcttaaaaaatgacaatataatttatattggcgatcttgttcagaaaacagaacctgaaatgttaagaacaccaaattttggtagaaaatctttaaacgagataaaagaagttttaagctcaatgtcactttacttaggaatggaaatccctaattggccaccagataatatcgctgaattatcgaaaaaattagaggaaaatacttattaat

SEQ ID NO: 255568 - DNA, 895 bp, Unknown
  Bacterial polypeptide expressing nucleotide sequence isolated from the Sargasso Sea
actctaagagaaattgaacgagtattatattttgaaagttatatagtcaccgacccaggccttacagaattagagaaaggtgatattttaaccgaagaagaatgggttgaaaaatatgaagaatttggcgatgaatttactgctggaatgggagctgaagcagttcagatattgttagaagagcttgatattgatgatgaaattagaattattagagaagagattcctgaaacaaattcagagactaaacttaaaaagttatccaaaaggttaaaattattagaggcttttaataattctggaaataagcctgaatggatgattatgaatgttttacctgttttaccaccagatttaagaccacttgtgcctcttgaaggcggaaggtttgcaacatcagacttgaatgatttatatagaagagtaattaatagaaataatagactaaaaagattattagaattaaacgcacctgaaataattgttagaaatgagaaaagaatgctacaagagtctgtggatgctttattggataacggaagaagagggcgcgttatcactggcaccaataagagacctttaaaatctttagcggacatgattaagggtaaaggagggcgatttagacaaaatttattaggaaaaagagtagattattccggtagatcagttattgttgctggtcctaatctaagattgcatcaatgcggattgccaaagaagatggctttagaactatttaaaccttttgtatacgggaagcttgagcaaagagagcttactacaactataaaaggcgctaagaaattagtagaaagagaaactccagaagtatggggagtgctagaagaagttatcagagagcatccagttttactaaatagagctcccactc

SEQ ID NO: 255569 - DNA, 883 bp, Unknown
  Bacterial polypeptide expressing nucleotide sequence isolated from the Sargasso Sea
aatgcaaacaacaagtaacgttatagacaagaactggaaagcattaattaaaccaaataaactagagattacaagcaatgatgataagactattgcaaaggtaattgctgaacctttagaaaaaggatttggacaaacaattgggaattctctaagaagaatattattatcctctatacaaggcgctgctgttacagcaattcaaattgacggggttttgcacgaattttcatctattaagggtgttagagaagatgtaacagacatagtcttaaacgttaaaaacttagctatcaaatcttcatcatcaagtccaaaaaaaataatattggacattaaaggaccaaaagaggttaaagctaaagacatcactttagtacccgagatagaaattcttaatcctgatcaaactatttgcaatttagatgaaaaaactaattttcatatggaattaatggtaagcactggcaaaggatacgtccaagcgcctaaaaacaaaacagaggatagccctttaggtttgatttcaatagactctctttttagtccagtaaaaaaagtatcgttttcagttgagaatactagagcgggtagtgcattagactatgataaattaattatgacagttgaaacaaatggcaccgtcgatgccgaagatgctattgcttattctgcaaggatttttcaagatcaactatcaatgtttgtaaattttgaagatcctcaggaagttgtaaaagaggttaaatcatcagaacctgaatttaataggaacttgttaaagagagtcgaggagttagaattatcagttagatctatgaattgtataaaaaatgataatataatttacattggtgatttagttcaaaagaccgagccagaa

SEQ ID NO: 255570 - DNA, 844 bp, Unknown
  Bacterial polypeptide expressing nucleotide sequence isolated from the Sargasso Sea
gagtcggtagatgctctatttgataacggcagaagaggcagagtaattacaggtacgggtaagaggccactaaaatctcttgctgaaatgttaaaaggtaagcaaggtagatttagacaaaatttattaggtaaaagagttgattattcaggaagatctgtaattgttgttggtccagatttgaaattacatgagtgtggtttaccgaagaaaatggctttggaattatttaaaccatttttatatgcaagattaaataaattaggattagcatctacaatcaaacaagctaaaaaattagtcgaaaaagaaacaaatgcagtttgggatgccttagaattaattgttagagagcaccctgtgcttttgaatagagctcctacacttcatagacttggggttcaagcttttgaaccaaaattaattgaaggagatgcaattgaattacatcctttaacttgtgctgcatttaatgcagactttgatggtgatcaaatggcagttcacgttccattaagtttagaagcacaattagaggcaagaattttaatgttatctacaaataacattctttcaccatcaaatggtaaaccgattatcgttccaagtcaggacatgatcttaggtatttactatctgtcacaagatccaatatctgataaaccagctggatattttacaaattcagatcaaatcgaatttgcattatcttctggtcaaataaatgtacatagtactatcatttcaagatatgagactttagatgagaaaggaaataagaaaatagaaaaatacacttctacagctggaagatttttattagcaaatttactacccaaaaaaa

SEQ ID NO: 255571 - DNA, 418 bp, Unknown
  Bacterial polypeptide expressing nucleotide sequence isolated from the Sargasso Sea
aatggaacaaactgaagttaatgttaaaaattggaaatctttaatcaaaccaacaaaattagatgttaagttaagtgatgacaaaacaaatgctaaaattatagcagaacctcttgaaaaaggttatggattaactttaggtaattcattaagaagaattttactatcctcaataagaggtgcagcagtaacagctatacaaattgatggtgtacttcacgaatttacgtcaattaaaggagttagagaagatgtaactgatatagttttaaatgttaaatcattagcattaaagtctaattctgaagggataaaaaaattagttttagatgcaaaaggcccaggtgaaataaaagcttcagatattacagctgttcctgatatagaaattctaaatccagatctagtcatatgcaat

SEQ ID NO: 255572 - DNA, 355 bp, Unknown
  Bacterial polypeptide expressing nucleotide sequence isolated from the Sargasso Sea
atggaaactgctgacgtaaatattaaaaattggaaatcattaattaaaccacctaagctagatgttaaactcagtgatgataagtctcatgctaagatcaccgctgaaccacttgaaaaaggttatggtctaacattaggaaattctttaagaagaatcttgttgtcatcaataagaggagccgctgtaacttcagtacaaatagatggtgtattacatgagtttagctcaattaaaggtgtaagagaagatgtaactgatattgtgttgaatattaagtcattagcattaaaaagtcattcagagggaacaaaaaaactaatactagatgctaaaggacctgggaaatcaaagc

SEQ ID NO: 255573 - DNA, 674 bp, Unknown
  Bacterial polypeptide expressing nucleotide sequence isolated from the Sargasso Sea
aatggatgtagaaaatgtaaatgtaaaaaattggaaatcattaatcaaacctgcaaaacttgatgttaaaataagtgatgatttaactcacgctacaatcatcgctgaaccattagaaaaaggttatggtttaacacttggtaattcacttagaagaattttattgtcctcaatcagaggagcagctgttacttcaatccaaattgatggtgtacttcatgaatttacatctattaaaggtgtaagagaagatgtgactgatattgtattaaacgttaaatctttagccttaaaatgtgctgcagagggaacaaaaaaactggtgttagatgctaaaggacctggtgaaataaaagcatctgacatcgaatcagttcctgatgttgaaattttgaatcctgacttagttatttgtaatttagatgaaaatactcacttccatatggaaatgaatgttaatacaggaaaaggttatgttccagctgatttaaataaacctgaagaaccacctttaggtttaattgcaatagactcattatatagtccagttaaaaaagtctcctattcagtaagtactgcaagagagggtaaagctttagattacgataaattaacgatggaagttgaaacaaatggatcaatttctgccgaagatgcagtttgctatttctgca

SEQ ID NO: 255574 - DNA, 741 bp, Unknown
  Bacterial polypeptide expressing nucleotide sequence isolated from the Sargasso Sea
cccacaaacaaattcagaaacaaaacttaagaaattttccaaacgattaaaattattagaagcttttaacaattctggaaataagcctgaatggatgataatgaatgttctcccagtattgccaccagatttaagacctttagtacccttagaaggtggaaggtttgctacctctgatcttaatgatctttatagaagagttattaatagaaacaacagattaaaaagattactggaactgaatgctccagaaattattgtaagaaatgaaaaaagaatgcttcaagagtcagttgatgctctcctagataatggaagaaggggaagagttataacaggcacaaataagaggcctttaaaatctctcgctgatatgatcaaaggaaaaggcggaaggtttagacaaaacttacttgggaaaagagttgattattcaggaagatctgtaattgttgctggccctaatttgaaactacatcaatgtgggcttcctaagaagatggcattagaattattcaaaccttttgtttatggaaagttagagaatagggagcttgcaactacaattaaagctgcaaaaaaacttgttgaaagagaaactccagaagtttgggaggttttggaagaagtaattagggagcacccagtcctattaaacagagctccaactcttcatagacttggtctacaagcttttgaaccaaaattaattgaaggtaaagcaattcagttacatcctct

SEQ ID NO: 255575 - DNA, 648 bp, Unknown
  Bacterial polypeptide expressing nucleotide sequence isolated from the Sargasso Sea
gaaatataaaagaatgaaatttagaggaataatatgtgaaaaatgtggagttgaagtgactaaatcaaatgtaagaagagaaagaatgggtcacattgatcttgcctgtccagttgctcacatctggtttttaaaatcattacctagccgaatttctttagcaatagatatgaaattaaaagaagttgagaaagtattatactttgaaagttttattgttgttgagcctggattaactactttaaaaaaaggccaattaatatctgaagaagcattgttaaaagcgcaagaagagtttggagaggatgctttcacagctggtattggagccgaagcagttagagaaattttagttaatttagacctaaagaaagaacaacaaaaacttagggagtcgttaaaagagatcaaatctaaagttacagaggaaagaacaattaaaagactaaaacttatagagtcatttattaattctggtaataaacctgaatggatgattctaacttcagtaccagttattccgccagaattgagaccactagtccctcttgatggaggtagatttgctacatctgatttaaatgatttgtatagaagagtcataaatagaaataacagattaaaaagacttttagaccttaaagcacc

SEQ ID NO: 255576 - DNA, 816 bp, Unknown
  Bacterial polypeptide expressing nucleotide sequence isolated from the Sargasso Sea
gggaaatgcaattgaattacatcctttagtctgtgctgctttcaatgcagattttgatggggatcaaatggctgtacatgtgccattaagtttagaagcacaaatcgaagcacgtgtgcttatgatgtctacaaataacattttaagtccatcgaatggtaaaccaataattgtaccaagccaagatattgtgctcgggatatattatttgtctcaacataaagaagattcaaatacaaaaccagttggcattttctctgatgtagatgaaattgagaacgccattgaaagaaaagatattagtgttcactctaagatagtttcagtatttaatacagttgatgaagacggaaacaaaatttcagagaaatatacaagtactgctggacgtttcctattgtcgaaaaccttacctaaaaatcatagaattaaatttgaactcgtaaacaaattattaacgaaaaaagcagtttctgaggtaattgacactgtgtacagatactgcggtcaaaaagaaacagtgattttttgtgatcgaataaaagatttaggatttaaacatgcttttaaagcagggatttcatttggaaaaaatgatttgattattccaaaaactaaagaaaaattggttaatcaaactaaaaaacaaatagaagattatgaaaaacaatatcaggatgggcttattacaaggggagaaaaatataataaagttgtagatatttggtctaaatgcacagactcagttgcaaatgaaatgatgaaagaaatttcttcagctgaaaaaatttatccagacggtagaattgaaactaa

SEQ ID NO: 255577 - DNA, 523 bp, Unknown
  Bacterial polypeptide expressing nucleotide sequence isolated from the Sargasso Sea
atggagacagagaacgtaaacataaaaaattggaaatcattaattaaaccatcaaaactagatgtaaaattaagcgaagaccttacacatgctaagataattgctgagccgttagaaaaaggttatggtttaactctaggaaattctttaagaagaatattattatcttcaataagaggtgcagcagttacttctattcaaatagatggtgtcctacatgaatttacatctataaaaggtgtgagagaggatgttacggatatagtcttaaacgtaaaatcattagctttaaaatgtaactctgaaggtacaaaaaaattaatacttgatgcaaaaggaccaggggaaattaaagcttctgatatatcacctgttgcagatgtagaaattttaaaccctgatttagtaatatgtaatctagatgagaatactaactttcatatggaaatgaatgttaatactggaaagggatatgttccagctgaactgaataaaccagaggaaccacctttaggacttatcg

SEQ ID NO: 255578 - DNA, 799 bp, Unknown
  Bacterial polypeptide expressing nucleotide sequence isolated from the Sargasso Sea
gatgggaaatatcaaacttgcatgtccagtatctcatgtctggtttctaaaaggagtccccagccgtattgcaacaattcttgacatgatgcttagggatttggaacgagtattatattttgattcatacattgttctagatccgggagattctgatcttgaaccattggagttggttgaagaagatcagtatcgtgaactggaagaaaaccatcctgatttaaagttgggaatgggggcagaggccatacagacactccttaaaagaattgaattggaagagctagaaaatactttgcaaatagagatgcgtgaagtaaattcggaaacgcgtcgcaaacgcatcgcaaaaaggctcaatataatcagccaacttttaaaatcaggcaatgctgtagattcaatgatcatagataatttacctgttcttcctcctgaactaagacccttggtacctcttgaaggcggaaggtttgcaacaagtgatcttaatgatttataccgtagagttattcacagaaacaatcgcctcaagcgccttattgagctacgggcaccaggaattattgtcaaaaatgaaaaacgtatgcttcaggaatctgtagacgcactttttgataatggacgtcgtggtcgtccaatggttggttcaaacaaaagaccactcaagtctataagtgatatgctcaagggcaaacagggtcgtttccgacaaaaccttctgggtaaacgagtagattactccggtcgtactgtaatagttgtaggccctgagttaaaacttcatcaatgtggttta

SEQ ID NO: 255579 - DNA, 812 bp, Unknown
  Bacterial polypeptide expressing nucleotide sequence isolated from the Sargasso Sea
tgatgttaatataaaaaactggaaatctcttattaaacctggaaagttagatgttcaattaagtgacgataaagcttatgctaaaataaccgctgaacccttagagaaaggttatggccttactttgggtaactctcttagaagaatattactttcttcaataagaggtacagcagtaactgcaattcaaattgacggagtcctacatgagtttacttctataaaaggagtaagagaagatgtgactgacattgttctaaacgttaaatccctagcgttaaaatgttctagcgaggggtcgaaaaaattaatattagatgcaaaaggtcctggtgaaataaaagcatcagatataacaccagttgcagatataagtatattaaatcctgaacttgtaatttgtcatttagatgaaaatacacattttcatatggaaatgaatgtaggaaatggaaaaggttatgtgtcagctgatatgaataaacctgaagaaccaccattaggattaataccaattgactcgctgtttagtcctgtaaaaaaagtttcatattcgataagcacagcaagagaaggtaaggcactagattatgataagttaactatggaagtagaaactaatggatctatatcagcggaagatgcagtagcgtattctgctagaatttttcaagaccagcttggtatgtttgtaaactttgatgaacctcaggaaactattgttcgtgaaaaatctactgagccagaattcaatagaaatcttcttagaaaagttgatgaacttgaactttctgtgcgttcaatgaactgtt

SEQ ID NO: 255580 - DNA, 812 bp, Unknown
  Bacterial polypeptide expressing nucleotide sequence isolated from the Sargasso Sea
atctatagatttaaaattagaaagagaaaaactttcaaaatttattaaagagacaaaatctaaagttactgaagaaagaaatgtaaaaagattaaagttaattgattcttttattgcaacaggaaacaagcctgaatggatgatattaacaacagttccagtaataccacctgaactaagaccattagtacctcttgatggtggccgatttgctacatcagatttaaatgatctatatagaagagttataaatagaaataacagattaaaaagactaattgatctaaaggccccagatataattataagaaacgaaaaaagaatgttgcaagaatccgttgatgctctttttgataatggacgaagaggtagagtaataactggaactggcaaaagacctttaaaatcattagctgaaatgctaaaaggaaaacagggtagatttagacaaaatttattaggaaaaagagtcgattattcaggtagatcagtaattgttgttggaccagatttaaaattacatgaatgtggattgccaaaaaaaatggctttagaattatttaagccttttttatacgcaagattaaacaagttaggcctagcatctacaattaaacaagcaaaaaaattagttgaaaaagaacgagatgaagtttgggatgctttagaaataattgttagagagcatccagttcttttaaatagagcgccaacattacataggctcggtgtacaagctttcgaaccaaaattaattgaaggtgatgcgatacaattgcatccattgacgtgtgcagcctttaacgctgatt

SEQ ID NO: 255581 - DNA, 430 bp, Unknown
  Bacterial polypeptide expressing nucleotide sequence isolated from the Sargasso Sea
atggaaaatcaagttgtagataaaaattggaaaaatttaattaaaccttcaaagattgatgttcaaagcggagaagataaatcagtagccaaaattgtagccgaacccttagagaaaggttatgctctaacactgggaaattcattgagaagaattttgttatcttctattcaaggttctgcagtaaccgcagttcaaatagatggtgtcttacatgagttttcttcgataaagggagtaagagaagatgttacagacattgttttgaatgttaaatcattagcacttaaacttgaaacagatggggcaaaaaaattaattttggacgcaactggtcctggagaaattaaagcaaaaaacataaatgaagttgcgggaaaaaagatattaaatcctgatctgactatttgtaatttggatgaaaaaacta

SEQ ID NO: 255582 - DNA, 847 bp, Unknown
  Bacterial polypeptide expressing nucleotide sequence isolated from the Sargasso Sea
gttcccttagatggtggaagatttgcaacttcagacttaaatgatttatatagaagagtaataaacagaaacaacagattaaagagattactggatcttaaagctcctgacataattgttagaaatgaaaaaagaatgttacaggagtcagttgatgcattatttgataatggaagacgaggaagagttatcactggaacaggtaaaaggcctcttaaatcgcttgcagaaatgctcaaaggaaaacaaggcagatttagacaaaatctacttggcaaaagagtagactactctggaagatcggtaattgttgtgggccctgaattaaaattacatcaatgtggattaccaaaaaaaatggctttagaattatttaaaccttttctctacgcaaggcttgataaacttggactagcaaccactattaagcaagcgaaaagattagtggaaaaagaaaagagcgaggtttgggactctctggaacacattataagagaacacccaattcttcttaatagagcaccaacattacatagattaggtgttcaagcttttgaggcgaaattaattgaaggtaacgccattgaattacatcctttagtatgtgcagcatttaacgcagattttgatggagatcagatggcagttcatattccattaagtttggaggcacaacttgaggcaagggtattaatgatgtcaacaaataatatattaagcccgtctaatgggaaaccaataattgtaccgagtcaagatattgttttaggtatttattatctatcacaatcttctaagaatgataaaaagcctaaaggagtgttttcaagcgtgaagaaattgagca

SEQ ID NO: 255583 - DNA, 964 bp, Unknown
  Bacterial polypeptide expressing nucleotide sequence isolated from the Sargasso Sea
ttgaaagatttacttaagcttttaaagcaacagggacagactgaagagtttgatgcaataacgatcgggttagcatctcctgaaaaaattcgttcttggtcttatggtgaggtaaaaaaacctgaaacaattaactatcgtacttttaaaccagaacgcgacggtcttttttgcgctaaaatttttggtccaattaaagattatgagtgtctgtgcggtaaatataaaaggcttaaacatagaggagttgtttgtgaaaagtgtggtgttgaggtaaccctatctaaagttagacgtgagcgtatgggtcacattgaactggcaactcctattgcgcacatatggtacctaaagtctttaccatcaagaatgggattaatgcttgatatgacgttgcgtgaaatcgaaagaattctttatttcgaagcatatgtggttgttgaaccagggatgacagagttagaacgtggtcagatgcttactgaagaaaattacctcgaggctcttgaaaattatggcgatgagtttgaagcaaaaatgggtgcggaagctattcgtgaattattactttcaattgatatcgaaagtgaagttcaaacgttgagagatgaaattccaaataccaattctgaaacaaaattacgcaaattaactaaaaggttaaaactattagaagcttttatgaactctggaaacaaacctgaatggatggtaatgcaagtcttaccagtattgccgccagagttgagacctttagtaccgctcgatggaggtcgttttgcaacgtctgatcttaatgatttatatcgacgtgtaattaatagaaataatcgccttaaacgtttattagatctaaatgcaccagatattattgttcgtaatgaaaaacgcatgttacaagaatctgtggatgctttactcgataatggtagacgtggtcgtgctataacagggactaacaagc

SEQ ID NO: 255584 - DNA, 373 bp, Unknown
  Bacterial polypeptide expressing nucleotide sequence isolated from the Sargasso Sea
tatgtctgaaaatgaaaatgaaattttagatgagatcgttgaaacagaagaagttgagaaagaagaaattgtcttagatcttctaaatccaatggtcattaagttggagtctcaaaatgagctccattcaagagtatcgatagagccttttgaaagaggcttcggctatacacttggtaatgcaattaggagggtactgctctctagtttgccgggttatgctattacagaagctcagattgatggagttttacatgagtatacaactattgaaggtgttcaagaagatgttgtagagatcttattaaaccttaaaggtgttgccattaatattcatgatagagattctgctgattttggatcagcaagaaag

SEQ ID NO: 255585 - DNA, 728 bp, Unknown
  Bacterial polypeptide expressing nucleotide sequence isolated from the Sargasso Sea
attgttatcatccattagaggtactgctgtgacagccattcaaattgatggtgtgcttcatgaatttacttcgattaaaggtgttagagaggatgttacagacatagttcttaatgtaaaatctctagctttaaaaagtaattctgaaaataataataaacttattttagatgccaaaggtccgggtgaaataaaagcatcaaatatttctacaacagcagatattgagatactaaatcccgatttggtaatttgcaatttagatgaaaatacaaattttcatatggaaatgacagtaaataatggaaaaggttatgtatcagcggaaatgaataaacccacagaaccaccattaggtcttattcccatagactcattatttagtccagtaaaaaaagtttcatattcaataagtacagctagagaaggtaaggcgttagattatgacaagcttactatggaggttgaaacaaatggatctatttcagctgaggatgctgttgcttattcagcaagaatttttcaagaccagttagggatgtttgttaactttgatgaaccacaggaggttatagttaaagaacagccctctgaacctgagtttaataaaaacttattaagaaaagttgatgagctagagttatcagtaagatcaatgaattgccttaaaaacgataatattatttatataggtgacttagtccaaaaatctgagggtgaaatgttaa

SEQ ID NO: 255586 - DNA, 370 bp, Unknown
  Bacterial polypeptide expressing nucleotide sequence isolated from the Sargasso Sea
atggaaacggctaatgtaaatttaaaaaattggaaatcattaattaaacctggaaagttggatattaatttaaatgatgataaatcatacgcaaaaattgtcgctgaaccacttgaaaaaggttacggtttaactttaggtaactcgttaagaaggatcttattgtcttcaattagaggtactgccgtgacagctattcaaattgatggagtacttcatgaatttacttccataaagggtgtaagagaagatgtaactgatatcgttcttaatgttaaatctttagcattaaaaagcacttctgagggttcaaaaaaattagtgcttgatgcaaaaggtccaggtgtaattaaagcatcagatataacaa

SEQ ID NO: 255587 - DNA, 808 bp, Unknown
  Bacterial polypeptide expressing nucleotide sequence isolated from the Sargasso Sea
aatgatggacatgaaattaaaagaccttgaaaaagttctttattttgaaaaattcatggtaactgaaccaggtctaacgcccctaattcaaaatcaacttctcgatgaagaagaattggagcaggcaaaagaagaacatggtgaggactcattttctgctgatatcggagcagaggctgttagaaaggttcttgaaaggattgagctagagcctgaacttgaattattaaggtcaaaacttgctgaaacaaaagccgttgccttgtcagaaaagttggtaaaaagaattaaaatatttgaggcgtttatctcatcaggaaatagacccgagtggatgattttaacttcagttcccgtaataccgccagaattaagacctcttgttccactggacgggggtagatttgcatcaagtgatttaaatgatctttatcgaagagtcattaatagaaataatagattatctaggttaatagaactaagagctcctgacataatcataagaaatgagaaaagaatgttacaggagtcagttgatgctttatttgataatggtagaagaggtagagtaattactggaactaataaaaggccacttaagtcactcgccgagatgctcaaaggtaaacagggtcgatttaggcaaaacttacttgggaaaagggttgattattctggtagatcagtaattgttgttggtccagaattgaagctgcatcaatgcggactacctaaaaaaatggctatagaattatttaagccattcatatatgcaagattagagtccttagggctagccacaacttta

SEQ ID NO: 255588 - DNA, 619 bp, Unknown
  Bacterial polypeptide expressing nucleotide sequence isolated from the Sargasso Sea
tgtggggttgaagtaactgaaagtagagtcagaagacataggatgggctatataaaactcgctgcgccagtatcccatgtttggtatttgaaaggaatccctagttatgttgcaattcttttggatattccgcttagggatgtagagcaaatagtttattttaattgttatgttgttttagatccaggggatcataaagaacttaaatataagcaattactcactgaggatgagtggctggaaattgaagatgaaatttatgctgaagattcaactatagaaaatgagccttttgttggaattggtgctgaggcactgaagcaattactggaggaccttgatttaaatcaggttgctgaggagctgagagaagaaattactaatagcaaagggcaaaagagagcaaagctcataaagaggataagagttattgataatttcattgcaacaaatgcaaaaccagaatggatggttttagatgcaataccagttatacctccagatctaagacctatggttcagcttgatggaggaagatttgcaacttcagatttaaatgacttatatagaagagtcataaatagaaataatagactggctaggctccaagaaattttag

SEQ ID NO: 255589 - DNA, 936 bp, Unknown
  Bacterial polypeptide expressing nucleotide sequence isolated from the Sargasso Sea
agaacttttagacctgaaaaagatggattattctgtgcaagaatattcggacccataaaagattatgagtgtttatgtggaaaatataaaagaatgaaattcagaggtattatttgtgagaaatgcggagttgaagtaacaaaatctaatgtaagaagagagagaatgggccatattaaccttgccacgccagtagcgcatatttggtttttaaaatctcttccaagcagaatagcattagctgtagacatgaaattaaaagaagttgaaagagttttatattttgaaaattttatagtaattgaacctgggttaactggcctaaagccaaaccaacttttaaatgaggatgagcttttaaaataccaaaatgaatttggtgaagagtcttttaccgctggcattggcgctgaagctatcttagaaatattaaaatcaataaatcttgaggaagaaaaaaataaactaattaaaaatattaatgaaactaagtcaaaagtagctgaagaaagatctattaaaagattaaagttaatagactcatttatagaaactggaaataaaccagaatggatgatattaactgttgttccggttattccaccagaacttagacctttagttcctttagatggaggacgttttgcaacttcagacttaaatgatttatatagaagagttattaatagaaacaatagattaaaaagattaattgatcttaaagctcctgacataataattagaaatgaaaaaagaatgttgcaggagtcagtagatgccctattcgataatggaagaagaggtagagttattactggaactgggaaaagaccacttaaatctttagctgaaatgcttaaaggtaaacagggaagatttagacaaaatcttttaggaaagcgagttgattattcaggaagatcagtaattgtggtt

SEQ ID NO: 255590 - DNA, 568 bp, Unknown
  Bacterial polypeptide expressing nucleotide sequence isolated from the Sargasso Sea
agttttatcgtagttgaacctggtttaactactttaaaaaaaggccagttaatttctgaagaagctcttcttaaagcccaagaggaatttggtgaagacgcttttactgcaggaataggagctgaggcagttagagaaatattagttaatttagatcttaaaaaagagcaacaaaagttgagagagtctttaaaagatattaaatcaaaagttactgaagaaagaacaattaaaagattaaaactaattgagtcatttattaattcaggaaacaaacctgaatggatgatcttaacatcagttccggtaatccctccagaattaaggccattagttccacttgatggaggaaggtttgcgacatctgatttaaatgatttatatagaagagtaataaatagaaataatagattaaaaagacttttagatctaaaagcaccagacattattgttagaaatgaaaaaaggatgcttcaagaatcagtagacgcattatttgataacggaagaagaggaagggtaattactggaactgggaaaagacccttaaaatctttagcagagatgc

SEQ ID NO: 255591 - DNA, 543 bp, Unknown
  Bacterial polypeptide expressing nucleotide sequence isolated from the Sargasso Sea
actgaatcagggtgcattattgactgaggacgagtatcacgagcgcatagtccttgagtcggggcttgaggcagctatgggcgctgaggctatacgaagcctgctgaaatcattagaccttaagtccgaacgtgacacgcttcgcgctgaattgagtgagactaaatcggaaaccaaattcaagaaactgaccaaacgattgaaggttgtcgaagggtttatcaattcaggtaacaaacctgagtggatggtaatggaggtattgccggttttgccgcctgatctgaggcctttggtgccgcttgacggtggacgtttcgcaacgtcggatttgaacgacttgtaccgtcgagtaattaatcgaaataaccgattgcgtcggctgcttgatctgaatgcgccagctatcatagtgcgaaatgaaaagcgcatgttgcaggagtccgttgattcattactcgacaacgggcggcggggaaagccggtcactggttccaacaagcgacaattgaagtctctggccgacatgattaaaggcaagca

SEQ ID NO: 255592 - DNA, 649 bp, Unknown
  Bacterial polypeptide expressing nucleotide sequence isolated from the Sargasso Sea
tttattgtcattgagccaggtttaacaggtctgcaaaaaaatcagcttctaaatgaggaagaactagcaaaatatcaagatgaatatggtgaagaggcttttacagctggaattggagctgaagcagttttggaaatgcttaaaaatcttgatttagatttagagagaaaaaatcttgttgattatatcaaagagacgaaatcaaaagttaatgaagaaagagctattaagagattaaaattaattgagtcttttattgaaactggtcaaaaacctgagtggatgatcatgactgttgttccagttattccaccagaattaagaccattggttcctttagatggtggaagatttgcgacatcagatctaaatgatctttatagaagggttattaatagaaataatcgtttaaagagactaatggatcttaaggcaccagatataatcatcagaaatgaaaaaagaatgctacaagagtctgttgatgcgctttttgataacggcagaagaggtagagtaattactggaacaggtaaaagaccattaaaatctttagctgagatgttaaaaggaaaacaaggaagatttagacaaaatcttcttggtaaaagagttgattactctggtcgttcagtcatcgtagtaggtc

SEQ ID NO: 255593 - DNA, 815 bp, Unknown
  Bacterial polypeptide expressing nucleotide sequence isolated from the Sargasso Sea
aaatgaaaaaagaatgcttcaagaatcagttgatgcattatttgataatgggagaagaggcagggttattacaggaacaggaaaaagacctcttaagtctttagcagaaatgttaaaaggaaaacaaggtagatttagacaaaatttacttggaaaaagagtagattattctggaagatcagtaattgtggttggacctgacttaaaattacatgaatgtggtttgccaaaaaagatggcacttgaattatttaaaccatttctttacgcaagattaaataaattaggattagcatcgactattaagcaagcaaaaaaacttgtggaaagagaaagaaatgaagtttgggatgcattagaattgatagtaagagaacatccagtaatactaaatagagctccaactttacatagattaggtgttcaggcttttgaaccaaaacttattgaaggaaatgcaattgagttacaccctttaacatgtgcagcatttaatgcagattttgacggagaccaaatggcagttcatgtaccactaagtttagaagcacaattagaagcaagagttttaatgatgtcaacaaacaatatattaagtccttctaatggaaaaccaataattgtaccgagccaagatatgattttaggtatttattatttgtctcaaccaccttatcaaacagaaagagtggaaggttatttcgtaaatacatcagaaatagagcatgctcttgaaacaggtgaaattaaagtacattctagaattgtttctagatttgaaactgtagatgaaaaaggtaaatcaatatttgaaa

SEQ ID NO: 255594 - DNA, 363 bp, Unknown
  Bacterial polypeptide expressing nucleotide sequence isolated from the Sargasso Sea
aatggaaacagaaaatgttaatgctaaaaattggaaatctttaatcaaacctgcaaaacttgatgttaaaataagtgaagatctttctcatgccaaaattgtagctgaacctttagaaaaaggttatggcttaactttaggtaactcattaagaagaatattattatcttcaattagaggttcagctgttacttcaattcaaatagacggtgttttgcatgaatttacttctattaaaggtgtaagagaggatgttacagatatagttttaaacgtaaaatctttagcgttaaaatgttcagcagaaggttcaaaaaaattagtcttagatgcaaaaggaccaggtgagatcaaagcatcaga

SEQ ID NO: 255595 - DNA, 883 bp, Unknown
  Bacterial polypeptide expressing nucleotide sequence isolated from the Sargasso Sea
gttataccaccagaattaagacctcttgttcctcttgatgggggtagatttgctacaagtgatttaaatgatctttatagaagagttataaatagaaataatcgactaaaaaggctcattgatttaagagctcctgacataataataagaaatgaaaaaagaatgcttcaagaatcagttgatgcattgtttgataatggaagaagaggaagagtaataacttctacaaataagagacctttaaaatctttatctgatatgcttaaaggtaagcaaggtagatttagacaaaatcttcttggaaaaagagtagattactctggtaggtccgtaattgttgtaggacctaccctgaaattacatcagtgcggaattccaaaaaaaatggcactagagttattcaaaccttttatatttcataagttggatatttatggctgggcaaatacaattaaagctgcaaaaaaattagtggaaaaggaagatcctagagtatgggatatacttgaggaggttattagagagcaccctgtgcttttaaatagagcaccaacattacatagattgggaatacaagcatttgagccaattttaattgaaggtaagtctattcaacttcatccattggtatgtaccgcttttaatgctgacttcgatggagatcaaatggcagtacatgttcctttaagtttagagtcccagctagaggcaagagttttaatgatgagtactaataatattttatctccatctagtggaaaaccaataattgtaccatctcaagacattgtgctcggtatatattatctgtcagtaatgagagatggtcaaaaaggtgaaggtagatcctttatagatttaaatgaaatacttaaagcattag

SEQ ID NO: 255596 - DNA, 418 bp, Unknown
  Bacterial polypeptide expressing nucleotide sequence isolated from the Sargasso Sea
atggaagcaagtaatgttaatttaaaaaattggaagtcattaataaaaccttcaaagattgatattgatcagaataatgataaaacttttgcaaaggttatagcggaacccttagaaaaaggttatggactaacaattggaaattcattaagaagaattttattatcatcaataagaggaactgctgtaacagcaatccaaattgatggtgtacaacatgaatatagctctatcaaaggtgtaagagaggatgttacagatattgtgttaaatataaaatctcttgcccttaaaagcaacatagaaggtaacaaaaaattaattttggatgcaaagggtcctggtgaaatcaaagcctcgcaaattactccagttgctgacatagaaatactaaatcctgatttagtgatttgtaatt

SEQ ID NO: 255597 - DNA, 739 bp, Unknown
  Bacterial polypeptide expressing nucleotide sequence isolated from the Sargasso Sea
aatgacaaacagcaacttaagaactgaaaatcactttgattacgtcaaaatttcaatagcttctcctcaaagaataatggattggggtcagaggacattgcctaatggacaagtagttggtgaagttacgaaacctgaaactatcaattacaggacacttaaaccagaaatggatggattgttttgtgaaaagatttttgggccatctaaagattgggaatgccattgtggaaaatataaaagagtaagacatcgtggcattgtttgtgagagatgtggagttgaagtaactgaaagtagagtaagaagacatagaatgggctatataaaactcgctgccccagtttcccatgtttggtatttgaaaggaattcctagttatgttgcgatacttttggatattccgcttagggatgtagaacaaatagtttattttaattgttatgtcgttttagatccaggtgatcataaagatctcaaatataagcaattactaaccgaggatgagtggctggaaattgaagatgaaatttatgctgaagattcaaccatcgaaaatgaaccctttgttggaattggtgctgaggcactgaagcaattacttgaggaccttgatttaaatcaggttgctgaggagcttagagaagaaattactaatagcaaagggcaaaagagggcaaaactaataaaaaggattagagttattgataatttcatcgcaaccaatgcaaaaccagaa

SEQ ID NO: 255598 - DNA, 511 bp, Unknown
  Bacterial polypeptide expressing nucleotide sequence isolated from the Sargasso Sea
tcgtgcaccaactcttcataggcttggaatccaagctttcgaaccagttcttatcgagggtaaagcaatacagttacacccacttgtttgtgcagcttttaatgcggattttgatggagatcaaatggctgttcatgttcctttatcattagaagctcagcttgaagctagagttttgatgatgtctacaaataatattttgcatcctgcaaacggagatccaattattgttcctagccaagatattattttaggattgtattatttatctcaaatgaaacaaaatgagccaggagaaggtagacattttgatgatttaaacgaaattgaatttgcattagacaataaaaatataacccttcattcaaagttaagttttagatttaatacagaagatggttataagaaatttgatactacccctggtagagttttaatttctaaagaattacctaacaatgaaaatatttcatttgaaattgttaataaacttttaactaaaaaagaaatt

SEQ ID NO: 255599 - DNA, 799 bp, Unknown
  Bacterial polypeptide expressing nucleotide sequence isolated from the Sargasso Sea
tctgaagaacaatatatttgaataccaagacgaatatggtgaagattcttttagtgcagctataggagctgaagcaattgaacaaatgcttttaagtattgatttagaaaatgattataaacaattaaaaattgaacttacagaaacgaaatctgaattaaaaaaaacaaaaataactaaaagactaaaattagtggagtcatttatttcttcaaaaaataaacctgaatggatgatacttaaagttttgccagttataccacctgagctaagaccattagtccctctggatggtggaagatttgcaacaagtgatttaaatgatttatatagaagggtaattaatagaaataacaggcttaaaaggttaattgatctgcgagctccagacataataattagaaatgaaaaaagaatgctacaagaatctgtagatgccttatttgataatggtagaagaggaagagtaattacatcaacaaataagagaccattaaaatctctatctgatatgcttaaaggaaagcaaggcagatttagacaaaatcttcttggaaaaagagtagattattctggccggtctgtaattgttgtaggaccaaaccttaagctacatcaatgtggaataccaaaaaaaatggcactagaattatttaagccttttatattccacaaacttgatatttatggatgggcaaatacaattaaagctgcaaaaaaacttgtagaaaaagaagacccaagagtctgggatattcttgaagaagttattagagaacatcctgtattattaaataga

SEQ ID NO: 255600 - DNA, 967 bp, Unknown
  Bacterial polypeptide expressing nucleotide sequence isolated from the Sargasso Sea
agaattttgagttggtcctttggtgaaataaaaaaacccgaaactataaattatcgtactttcaagcctgaaagagatggcttattttgctcaagaatatttgggccagttaaagactatgagtgtctctgtggtaagtacaaaagaatgaagtatagaggagttacgtgcgaaaagtgtggggttgaagtaactttgcaaaaagtaagacgagaaagaatgggtcacattgaacttgcgtctcccgttgcacatatttggttcttaaaatctcttccgtctagaatcgggctaatgctggatatgaccctgcgggatttagaaaggatactctactttgagcaatatgtagttgtagagcctggtttgacagacttgaaagcagggcaattactttcagaggaagaatatttagatgcgcaagatcaatatggcttggatgctttccaagcaggtattggggcggaagcaatcagggaaatgcttatggcgattgatgttgacgcagaggccgagaaacttagagaggagcttaaagaggcaacaggcgaacttaagccaaagaagataataaagagactgaagctagttgaaaattttagagaaagctccaacaagcctgaatggatgattatgacagtaattccagtcatcccccctgagttaaggcctttggttccgctggacggtggaaggtttgcgacttcagatctaaatgacctttacaggagggttattaatagaaataacaggttgaaaaggttaatggaattgaaagcacctgatatcattattagaaatgagaaaaggatgcttcaagagtcagttgacgctctctttgacaatgggcggcgtgggcgagtgataactggagggaacaaaaggcccttaaaatccctttctgatatgcttaaaggaaagcaaggtcgttttaggcagaatcttttagggaagcgggtcgactttt

SEQ ID NO: 255601 - DNA, 970 bp, Unknown
  Bacterial polypeptide expressing nucleotide sequence isolated from the Sargasso Sea
ggcatatagaactagcatccccaggtttcccacattttggtttttaaaatccctacctagcagaatatctttggcaatagatttaaaattaaaagaagttgagaaagttttatattttgaaagttttattgtaactgaacctggattaacaaaacttaaatacaaacaacttttaacagaagaacaatatctaaaagctcaagaagagtatggagaagattcttttgaggctggaattggagctgaatcaattagagaacttttattaaaattagatttaaacgcagaaaaaagtaaattaagagatgttttaaaggaagttaaatcaaaagtttcagaagagagaacaataaaaaggttaaaattaatagagtcatttatagaatctggaaacaaaccagaatggatgattttaacgagcataccagttatcccaccagaattaagacctttggttccattagatggtggtagatttgccacttcagatctaaatgatttatatagaagagtaataaatagaaataatagattaaaaagattaatagacttaaaagctcctgatattattgtacgaaatgaaaaaagaatgcttcaggagtcagtagatgcattatttgataatggaagaagaggtagagtaattactggtactggaaaacgacctctgaaatctttagctgaaatgttaaaaggtaaacagggaagatttagacaaaatttattaggtaaacgtgtagattattcaggtagatcagtaattgtagcgggaccagagttaaaattacatcaatgtggtcttccaaaaaaaatggctgttgaactatttaaaccatttttatacgcacgactagataagttaggattagccacaacaataaagcaagcgaaaagattagtggaaaaagagaaaagcgaagtgtgggatgcgttagaagctataattagagaacatcctgttattttaaat

SEQ ID NO: 255602 - DNA, 712 bp, Unknown
  Bacterial polypeptide expressing nucleotide sequence isolated from the Sargasso Sea
tatggaaggaacaactataattgataaaaattggaaatctttaacaaaacctaataaacttgaaattgaaagtaacgaggataagtctatagccaaagttgttgcgcaacccttagaaaaaggttttggtcaaacaatagggaattcattgaggagaattttgctttcctcaattcagggtgctgcagtcactgctatacaaatcgatggagttttacatgaattctcctcaattaaaggtgtcagagaagatgtaactgatattgttttaaatgtgaaaaatttagctattaaattagattctgacggtccaaaaaaattaattttagatgccaatggaccaaaagaaatcaaagctaaagatataactttagttgccggagtaagaattttaaatccagagcaaactatttgtaatttagatgaaaagacaaaattccatatggagatggttgtcaataacggtagaggctatgtattatcacaaaaaaataaatctgaagatacaccattagggatgatagcaattgactcgctttttagtcccgttaaaagagtttcatttaaagttgatagtacaagggagggagctgccttggattatgataaactattaatggaagtagaaacaaatggcacagttgccgctgaagatgctgtagcatttgcagcaagaattttccaagaccaattatcaatgtttgttaatttt

SEQ ID NO: 255603 - DNA, 840 bp, Unknown
  Bacterial polypeptide expressing nucleotide sequence isolated from the Sargasso Sea
cttatcgagtcatttatagaaacaggccaaaaacctgaatggatgattttgactgtggtaccagtaatcccacctgagttaagacctttagttcctctagatggaggtagatttgctacatctgatcttaatgatttgtatagaagagtaataaatagaaataatcgtttaaaaagattaatggacttaaaagctccagacataattgtaagaaatgagaaacgaatgcttcaagagtcggttgatgcactttttgataatggaagacgtggaagagttataactggcacaggtaaacgaccactaaaatctttagctgaaatgctcaaaggtaagcaaggtagatttagacaaaatttacttggtaaacgtgttgactattcaggtagatcggtaattgttgtaggtccagatttaaaacttcatgagtgtggccttccaaaaaaaatggctttagaactatttaagccttttttatatgcaagactaaataaattaggcttagcttccacaattaaacaagccaaaaagcttgttgaaaaagaaacaaatgctgtttgggatgcgcttgagctgatagttagagagcatccagttttattaaatagagcacctacattacatagattaggagtccaagcttttgaacctaaattaattgagggagatgctatagaattacacccattaacttgcgcagcttttaatgctgattttgatggagatcaaatggcagttcatgtgcctttaagtttggaagctcaattagaagcaagaattttgatgctttcaacaaataatattttatcgccttcaaacggaaaacctataattgtacca

SEQ ID NO: 255604 - DNA, 823 bp, Unknown
  Bacterial polypeptide expressing nucleotide sequence isolated from the Sargasso Sea
agtcaaaacttaggtgttcaagactttaatagcctaaaaatttcaatagcaagtcctgatgatataagatcatggtcgtttggtgagataaaaaagccagaaaccattaattacagaacttttaaaccagaaaaagatggattgttttgttcaagaatttttggacctgtaaaagattatgaatgcctatgtggaaaatataaaagaatgaagtttagaggtatcatttgtgaaaaatgtggagtggaagtgacattatcaaaagttaggcgtgatagaatgggtcatattgagttagctgctccagtttctcatatatggttcatgaaatctcttccaagcagaatagctacattgctcgatatgacaattaaaaatttagagaaagttctttattttgaacaatttattgttgttgaaccaggtttaactgatttaaaaaaaggcgatattatttctgaagatcaatatattgattatcaagatgaatatggcgaagattcatttagtgcagcaattggagctgaagcaattgaacaaatgcttctcaatattgatcttgaggctgattttaatcaaacaaaaaacgatcttttagaaacaaaatcagaacttaaaaaaacaaagctaacgaaaagattgaaattattagaatctttcatattttcaaaaaacaaacctgaatggatgattttaagagtacttccagtaattccaccagagctaagaccattagtgcctttagatggcggaagatttgctactagtgatttaaatgatctttatagaagggttataaatcgaaataataggttaaaaagac

SEQ ID NO: 255605 - DNA, 892 bp, Unknown
  Bacterial polypeptide expressing nucleotide sequence isolated from the Sargasso Sea
cctgaaactataaactaccgaacgtttaagccggaacgtgatggtttattttgcgcccgtatatttggtcccatcaaagactatgaatgcctatgtggaaaatacaaaaggatgaagtttagaggtataatttgcgagaagtgtggggtggaggtcacacttagtaaggtccggcgagaacggatggggcatattgagctagcgtcgccggttgcgcatatttggttccttaaatcgctaccaagccgtatcggtttattgctggacatgacactcaaagaattggagcgtattctctacttcgaaagttttgttgtcttagatgaaggttttacttcattaaatcgcaggcaattgatgtcggaggatgagtatttcgatgcaatggatgagtttggcgaagatacttttaaagcatccataggtgcagaagcacttaaagaaatgctgagcgagctcgatttagagcaagaggttgtagaaataagggaaggactccgtacgacgggttctgaaatgaaaagaaagaaatacgttaaaagattaaagctaatcgaagcctttatagagtctggttgtcgccctgaatggatgatattagatgtggtaccggttattccgccagagttacgtcccctcgttccgctagacggaggccggtttgctacgtctgacctaaacgacctatacagacgcgtaataaatagaaataataggcttaagcgccttattgaattacgagcccctgatataattgtcaggaacgaaaagcgtatgctccaagagtctgttgacgcgctatttgataatggacgacgtggacgagtaatcaccggggcaaacaaacgtcccttgaaatctctttctgatatgctcaaaggtaaacaaggga

SEQ ID NO: 255606 - DNA, 395 bp, Unknown
  Bacterial polypeptide expressing nucleotide sequence isolated from the Sargasso Sea
aatggaaactactgaagttaatgtaaaaaattggaaatcgatgattaaaccagggaagcttgatgtgcaattaagcgatgataaatcatatgctaaaattatagctgagccacttgaaaaaggttatggtttaacactaggaaattctttaagaagaattttattgtcatctattagaggaacagctgttacagcgattcaaattgatggtgtgttacatgaatttacttcaataaaaggtgtaagagaagatgtcaccgatatagttttaaatgttaaatctctagctttaaaaagtagctcagagggaaataaaaaattaattttagatgcgaaaggcccaggggaaattaaggcttcaaatataactccattagcagatattgaaattttaa

SEQ ID NO: 255607 - DNA, 826 bp, Unknown
  Bacterial polypeptide expressing nucleotide sequence isolated from the Sargasso Sea
gaagaagcatttacggcaggtattggtgctgaagcaattttagaaattcttaaatcaataaacttagaggaagaaagagatttattgataaaaaatataaaggagacaaaatcaaaagttaacgaagaaagatcaatcaaaagattaaaattaatagagtcatttattgaaactggaaataaaccagaatggatgatattgacaactgtaccagttataccaccagaactaaggcccctagtacccttggatggtggaagatttgccacttctgatttaaacgacttatataggagagttattaatagaaataataggttaaaaagactaatagatttaaaagctcccgatattattgtgagaaatgaaaaaagaatgttgcaagagtctgtggatgcactttttgataatggaagaagaggaagagttataactggaacaggaaaaagacctcttaaatcacttgctgaaatgttaaaaggtaaacaaggtagatttagacaaaacttgctaggaaaaagagtagattattctggtagatcagtaatagttgtgggcccagacttaaaattgcatgagtgtggacttccaaaaaaaatggctttagagctttttaaaccttttttgtatgcacgattaaataaactaggtttagcctcaacgataaaacaagctaaaaaattagtggaaaaagagagaaatgaggtgtgggatgccttagaactgatagtaagagagcatccagtaatattaaatagagcaccaactttacatagattaggtgtacaagcatttgaacctaaactaatcgagggtaatgcaattg

SEQ ID NO: 255608 - DNA, 829 bp, Unknown
  Bacterial polypeptide expressing nucleotide sequence isolated from the Sargasso Sea
actggaactggaaaaagaccgttaaaatcattagctgaaatgttgaagggtaaacagggaagattcagacaaaatcttttaggcaaaagggtagactattcaggcaggtcagtaatcgttgttggtccagaactaaaattacaccaatgtggtttacctaagaaaatggctctagaattatttaagccttttctgtatgcaagattagataaattgggattagccacaactataaaacaagcaaaaagaatggttgaaaagcaaaaaagtgaggtttgggatgcacttgaacacataataagagaacatcctgttatacttaatagagcaccaactttacacagactcggagtgcaagcttttgaagctaaattaatagaaggtaacgctattgaattacatcctttggtttgcgcagcttttaacgcagattttgatggtgatcaaatggcggttcatattccattaagtatagaagctcaattagaagctcgtgttttaatgatgtccactaacaatattttgagtccttcaaatggaaaacctataatagttccgagccaagatattgttttaggtatttattacttatcacaacacaaagaagatcgtgatagtaagccagttggtattttttcagatgttaacgaaatagaaaatgctcttgaaagacacaatataagcgttcattcaaaaatagtttctatatttaatacggttgataaagacggtaataaagtttcagaaaaatatacaagcacagcgggccgttttttattatctaaaacacttccaaaaaatcacagaattaagttttcattagtaaata

SEQ ID NO: 255609 - DNA, 841 bp, Unknown
  Bacterial polypeptide expressing nucleotide sequence isolated from the Sargasso Sea
tgggggagaaattaaaaagcccgaaacgattaattatagaacatttagacctgagaaagatggtctattttgtgcaagaatttttggtccagtaaaagattatgagtgcctttgtggaaaatataaaagaatgaagtttagaggcattgtatgtgaaaaatgtggtgtagaagtaaccaaatcaaaagtcagaagagaaagaatgggccacatcgatttagcttcacctgtagctcacatctggtttttgaaatctcttcctagccgtatctctttatctattgatatgaaattgaaagatgtggaaaaagttctttattttgaaagcttcattgtaattgagccaggtcttactgaattaaaaaaaggtcaactcctaaccgaagaggaatatttgaaatcacaagaaaagtatggtgaggatggattcactgcaggaattggagctgaagctgtaagggaaattttattgggaattgatttaaaacaagaaagagaaagattaagaaactctttaaaagaaattaagtctaaagttactgaagaaagaacacttaaaagattaaaacttttagagtcatttatagattcgggaaacaaacccgaagacatgattttaaccactgtcccagttattcctcctgaacttagacctttagttcctcttgacgggggtagatttgctacctctgatttaaacgacttatatagaagggttataaatagaaataatcgtttaaaaagattaatggatttgaaagccccagacataatagtcaggaatgaaaagagaatgctgcaagagtcagtagatgctttatttgacaacggtagaagagga

SEQ ID NO: 255610 - DNA, 924 bp, Unknown
  Bacterial polypeptide expressing nucleotide sequence isolated from the Sargasso Sea
aatggaagctactgatataaatattaaaaattggaaatcactaattaaacctggaaaacttgatattaaattaagtgatgacaaatcatatgctaaaattatagctgaacctttagaaaaaggttatgggttaactttaggaaattcattaagaagaatattgttatcctctataagaggaaccgctgttacagctattcaaatagatggagttcttcacgaattttcttcaataaaaggtgtaagagaagatgttacagatattgttctaaacgttaaatcattagctttgaaaagtaatattgaaggaacaaagaaattaatacttgatgcaaaaggtcctggtgaaattaaagcttccaatataattcctgttgctgatatagaaatattaaatccagatctggttatttgcaatttagatgaaaatacaaattttcatatggagatgacggttggaaatggtaaaggttatgtttctgctgacatgaataaaccagaagaacctcctttgggattaatacctatcgattcattatttagtcctgtaaaaaaagtttcatactctataagtacagcaagagaaggtaaggcgttagattatgataaacttattatggaagttgaaactaacggatctatttcagcagaagatgctgtggcttactctgcaagaatttttcaagatcaactaggaatgtttgttaattttgatgaaccacaagaagtcattgtaagagaggctccatcagaaccagaatttaataaaaatttacttagaaaagtagatgaacttgaattgtcggttagatcaatgaattgtctaaaaaatgataatattatttatattggtgatcttgttcaaaaatcagaaggagaaatgcttagaactccaaatttcggaagaaaatctttaaacgaaaa

SEQ ID NO: 255611 - DNA, 792 bp, Unknown
  Bacterial polypeptide expressing nucleotide sequence isolated from the Sargasso Sea
tagttttattaaagaaactaaatctaaagttaatgaagaaagagcaatcaagagattaaaattaatagagtcatttattgaaacaggtcaaaaaccagagtggatgattatgacagttgttccagttattcctcctgaattaagacctttagtcccactagatggtggtagatttgctacttcagatcttaacgatttatacagacgagtaattaacagaaataatagattaaaaagattaatggatcttaaagctccagacataattgttagaaatgaaaagagaatgttacaagaatctgttgatgcattgtttgataatggaagaagaggtcgagttattactggaacaggtaaaagaccacttaaatcacttgccgaaatgcttaaaggtaagcaaggtagatttagacaaaacttgttaggaaaaagagtagattactcaggaagatcagtaattgttgttggtccagatttaaaattacatgagtgtggtttgccaaaaaaaatggctttggaattatttaaaccttttttatacgcaagattaaataaattaggattagcatctacaattaaacaagctaaaaaattagttgaaaaagaaactaacgctgtatgggatgcattagaattaattgtacgggaacacccagttttattaaatagagcaccgacacttcatagactcggagttcaagcttttgaaccaaaattaattgaaggtgatgcaattgaactacatcctttaacttgtgcagcttttaatgctgattttgatggtgatcaaat

SEQ ID NO: 255612 - DNA, 789 bp, Unknown
  Bacterial polypeptide expressing nucleotide sequence isolated from the Sargasso Sea
aaatctgcaagaaaaatggttgagtctgagagaccagaggtttgggatatacttgatgaagtaataagagaacacccaattcttttaaatagagcacctacattacatagattaggaattcaggcgtttgaaccaattttaattgaaggtaaggccatccaactgcacccattagtatgtactgcatttaatgcagattttgatggtgatcagatggcagttcacatacctttaagtcttgaagcccaattagaagcaagggttttaatgatgagcactaataacattctttcaccttcaagtggaaaacctataatcgttccaagtcaagatatagttttgggcatttactatttgtcattaattaatgaaaatgaagagcctaagaagtattattcacatgttggagaggtagagtttgcattagaaaacaaaactatagagctacacacgcctattttatacaggactaaaatatacaattctgaaacagatagctttgaatacaaaaaattcaccacctctgctggtagagttatgctttttaaaacagtacctgacaacaaaaacttaccttttgatgtaattaataaagttcttacaaaaaaagatattagtaatcttttagacaatgtttacagattcacaggccaaaaggcgacttgcatatttgttgaccaaatcatgaacgtaggttttaagcatgctgcaaaagcaggtatttcatttggaaaagatgatttagtaatacctgaagaaaagaatgttttaattcaagatacacaaaaa

SEQ ID NO: 255613 - DNA, 883 bp, Unknown
  Bacterial polypeptide expressing nucleotide sequence isolated from the Sargasso Sea
tgttttgattgctgaacctttagaaaggggttttggtttaacacttggaaattccttaagaagaattttactttcatctcttcaaggggctgcaattacttcagtaaaacttaaaggagttgttcatgaattttctactattcctggtgtaaaagaagatttaacagacatattacttaatttgaaatctgtctgtttaaaggttcattcacctggtttaaaaaaaatgtatataagaacaaaaggtcctggtgaaatcagagcaggtaattttgaaactgattctgaaactgaaataatgaatccagatcaaattattatgactcttgatagtaatgctgatattgaacttgaggcaaatattgatactggaaaaggttatctttcagcagaagtagctgaagatgacgaaaaaattattggggaaattaagcttgacgcaatgtttagtcctgtaaagagggcatcttataaagtagaaaatagccgtgtaggacaagtaactgattatgataaattaattttagaagtagaaactaatggggctctttcacctgatgatgcaatagcactagctgcacgaattttgcaagatcagcttcagccatttattaattttgatgaacctgaagttcaaatggaaacctcttctcatgaaaagctatctttcaaccctaacttactcaaaaaagtagaagagctagaactgtctgttcgctctgctaattgtcttaaaaatgataatataatttatattggtgatttggttcaaaagacagaatctgagatgttaagaacacctaattttggaagaaaatcattaaatgaaattaaagaagttcttcagcaaatggagcttggtttaggcatttctgttcctgat

SEQ ID NO: 255614 - DNA, 697 bp, Unknown
  Bacterial polypeptide expressing nucleotide sequence isolated from the Sargasso Sea
aagagaagacgctctcaaaagacttaaagttgtaaaagattttgctcgtgatagaaacaataaacctgaatggatgatcgtttctattttgcctgtaataccacctgagttaagacctttagttccattagagggtggacgatttgctgcaagtgatcttaatgacttgtacagaagaattattattagaaataatagattaaagcaattaatggatattcaggcacctgaagtaattttaagaaatgaaaaaagaatgctgcaagagtctgtagatgcactttttgataatacaaaacgtaaaaccgcaattagaagcggttcaaagagaccattgaagtcaatttctgacatgcttagaggtaagcagggtagatttagacaaaaccttcttggtaaaagagttgattattctggaagatcagttattgtagttggtccagaattgagaatgactgaatgtggtattccaaagaatatggcattagaattatttaaacctcatttaattagagaattaataagaagagatttagctgcaacaccaagaagcgcaaaactaatgattgaaaataaagaatcatttgtttatgaaattcttgaaagtgtcgtcaaggatcacccagtattattgaaccgtgctcctacacttcatagactgggaattattgctttccaacctattcttattgatggt

SEQ ID NO: 255615 - DNA, 892 bp, Unknown
  Bacterial polypeptide expressing nucleotide sequence isolated from the Sargasso Sea
tgcggcaagtacagagaaatgaaattcagaggaattatatgtgaaaaatgtggtgttgaggttacaaagtcaaatgtaagacgtgaaagaatgggtcacattaatttagccactccagttgctcacatttggtttttaaaatcattaccaagcagaatatcccttgcgatagatatgaagcttaaagaggtagaaagagtactctattttgaaaacttcatagttattgaaccaggcttaacaggacttaaaaagaatcagcttttaggtgaagaagagcttataaaatatcaagatgagtatggtgaagagtcatttaccgcaggtattggagcagaagcaattctagaaattttaaaatcaatagacttagagcaagaaaaagagtccctaatcaaatcaattaaagagacaaaatcgaaagtttcagaagaaagatcaattaaaagattaaaactaattgagtcttttatagagacaggaaataaaccagaatggatgattttaactacgataccagtaatccctcctgagttaagaccattagtaccattagatggaggtagatttgctacctctgatctaaatgatttatacagaagggttataaatagaaacaaccgattaaaaagattaatggatctaaaggctccagatataattgtaagaaacgaaaagcgaatgcttcaagagtcagtagatgcattatttgacaatggtagaagaggaagagtaattacaggtacaggtaaaagaccactaaaatctttggcagaaatgttaaaaggtaagcaaggacgatttagacaaaatttattgggtaaaagggtcgattattcaggaagatcagtaatagtagttggtccagacttaaaattacatgaatgcggat

SEQ ID NO: 255616 - DNA, 874 bp, Unknown
  Bacterial polypeptide expressing nucleotide sequence isolated from the Sargasso Sea
aagaatattattatcttccataagaggaacggccgttacctcaatccagatagatggagtattacatgaattttcttctataaaaggtgtaagagaagatgttactgatattgttttgaatgttaaatcattggcattaaaaagcaatatggaaggaacaaaaaaattaatacttgatgcaaaaggaccaggtgaaattaaagcttcaaatatatcgccggttactgatattgaaatattaaaccccgatctagttatttgtaatttagatgaaaatacaaattttcatatggaaatgacagttggaaatggaaaaggatatgtttctgctgacatgaataaacctgaggaaccacctctaggattaataccaatagattcactttttagcccagttaaaaaagtttcttattctataagtactgcaagagaaggaaaagctttagattatgataaacttataatggaagttgaaacaaatggatctatttctgccgaagatgctgttgcatattctgcaagaatttttcaagatcaattaggaatgtttgttaactttgatgagcctcaagaggttattgtaagagaaactccttcagagccagaatttaataaaaacctattaagaaaggtagatgagttggaattatcagttagatcgatgaactgtctaaagaatgataatatcatatacattggggatcttgttcaaaaatcagaaggtgaaatgcttagaactccaaattttggtagaaaatcattaaatgaaataaaagaagttttaaacacaatgtccttgtatttaggcatggaaataccaaattggcctccagacaacattgcagaattatcaaaaaaacttgaagaagctata

SEQ ID NO: 255617 - DNA, 750 bp, Unknown
  Bacterial polypeptide expressing nucleotide sequence isolated from the Sargasso Sea
cttcttggtaaaagggtagactactctggaagatcagtgatagttgttggacctgatttaaaacttcatgaatgcggcctaccaaaaaaaatggctttagaattatttaaaccatttttgtatgcaaggttgaataaattaggtttagcttctacaattaaacaggctaaaaaacttgttgaaaaagaaaccaatgctgtttgggatgctttggaacttatagtaagagaacatccaatattattaaatcgagctccaacacttcatagattaggtgttcaagcatttgaaccaaaattaattgagggtgatgctatagaattacaccctttaacatgtgcagcttttaatgctgattttgatggtgatcaaatggctgtacatattccactaagcttagaggcgcagctcgaagcaagagttttaatgatgtctacaaataacattttaagtccatcgaatggaaaacctattattgtgccaagtcaagatatgattttgggtatttactatttatcacaaccgccttatcaaaatgaaaaagtagagggatattttgtaaacaattcagaaattgagcaaggattagaatcaggcagtataaatgttcactcaagaattatttcaaggtttgaaacaatggatgataaggggaatactgtacaacaaaaatatacaagtacagcaggaagatttttacttgctaatttattgccaaagcacaaagatataaatttttctttaattgat

SEQ ID NO: 255618 - DNA, 817 bp, Unknown
  Bacterial polypeptide expressing nucleotide sequence isolated from the Sargasso Sea
gatgatagagataatgataattatttttatgctactatgggcggagaagctatgaaggaaatgctgtccagaataagcatttcagaattgaaaaaagaattagttgatattgttaagacttcaaagtctaagcaaaaaaggaatgatgcgttaaaacgtctaaaagtagtccagtcctttgtaccagacccattaaaaaaacggttaaataaacctgaatggatgattgtttctatccttccagttataccaccagagttgaggccgctggtgcctttggaaggaggaaggtttgctgcttctgacttaaatgatttatatcgtagaattataataagaaacaatcgtttgaagcaattgatggagattaaagcgcccgatgtaatactccgaaatgagaaacgtatgcttcaagaagcagttgatgctctgtttgataataataggaggaagaccgcaataagaagtggttctcgccgtcctttaaaatccttatcggatatgctaagaggaaagactggtcgtttcaggcaaaacttgcttggtaaaagggtggattattctggtagatcagtaattgttgttggaccgcaattgaatttgcatgagtgcgggatgcctaaaaatatggctcttgagctttttaagcctcacatgattcatgaattaatggcaagaggctatgctcaaactccaagaagtgcaaagctaatggtggaaaatggtgattctgttgtctataaagttctagaatatgttgttcaggatcatccggttcttttaaatagggctccaactcttcataggcttggtattc

SEQ ID NO: 255619 - DNA, 836 bp, Unknown
  Bacterial polypeptide expressing nucleotide sequence isolated from the Sargasso Sea
tttgttttgtgcaagaatttttggaccaataaaagattatgagtgtttatgtggtaagtataaacgaatgaaatttagagggattatatgtgagaagtgtggtgttgaagttactaaatcaaatgtaagaagagagagaatgggtcacattaaccttgctactccagtagcacatatttggtttttaaagtctcttccaagcagaattgctttggcagtagatatgaagttaaaggaaattgaaagagttctgtattttgaaaacttcatagtaatagaacctggtttaactggtttacaaaaaaatcagcttttaaatgaagaggagttaacaaaataccaagatgaatttggtgaagaaagctttacagcgggaattggagcagaagctgttcttgaaatgttaaaaaatttagatttagaatttgaaagaaaaaatctggttagctttattaaagagactaaatcaaaagttaatgaagaaagagcaatcaaaagattaaaattgatagagtcatttattgaaacaggtcaaaaacctgagtggatgataatgactgttgtaccagttataccaccagaattaagaccattagttcctctagatggtggaagatttgctacttcagatcttaacgatttatacagaagagtaattaacagaaataacagattaaaaagattaatggatcttaaagctccagatatcattgttagaaatgaaaaaaggatgctgcaagaatctgttgatgctctttttgataacggaagaagaggtagagtaattacaggcacaggtaagcgaccacttaaatctcttgctgaaatgttaaaag

SEQ ID NO: 255620 - DNA, 961 bp, Unknown
  Bacterial polypeptide expressing nucleotide sequence isolated from the Sargasso Sea
gaaaattttatagtaatagagcctggtttaactggattacaaaaaaatcaacttttaaatgaagaagaattagctaaatatcaagacgaatttgttgaagaaagttttacagcaggaattggggcagaggctgttcttgagatgctaaaaaatttagatttagatttagagagaaaaaatcttgttagctttattaaagaaactaagtcaaaagttaacgaagaaagagcaataaaaagattaaaattaatcgagtcatttattgaaactggtcaaaaacctgaatggatgattatgactgtagttccagttataccacctgaattaagacctttagttccattagatggtggaagatttgctacttcagatcttaacgatttatacagaagagtaattaacagaaataatagattaaaaagactaatggatcttaaagctccagatattattgtaagaaatgaaaaaaggatgcttcaagagtctgtagatgctctatttgataacggtagaagaggtagagtgattacaggaaccggtaagagaccactcaaatctcttgcagaaatgctaaaaggtaagcaaggtagatttagacaaaatttattaggtaaaagggtagattattcgggaagatcagtaatagttgttggtccagatttaaaactacatgagtgtggattgccaaaaaaaatggctttagaattattcaaaccatttttatatgcaagattaaacaaattaggtttagcctcaacaattaaacaagctaaaaaattagttgaaaaagaaacaaatgcagtttgggatgctctagaattaattgttagagaacatcctgtgcttttaaatagagcaccaactcttcatagacttggagttcaagcatttgaaccaaaattaatcgaaggagacgcaatagaattacatcctttaacttgtgcagcttttaacgcaagat

SEQ ID NO: 255621 - DNA, 784 bp, Unknown
  Bacterial polypeptide expressing nucleotide sequence isolated from the Sargasso Sea
agaaataaagaaacctgagacgattaattatcgaacatttaaaccagaaagaagtggacttttttgcgcaaggatctttggtcccataaaagattacgaatgtgtctgtggtaaatataagaggatgaaatttaagggtataatttgcgaaaagtgtggagtagaagtaaccttaacaaaagtgagaagagagagaatgggacacattcctcttgctgctccagttgctcatatctggtttttaaaatctcttccaagtcgaattggacttctgttagatctggcattaaaagatttggagaaaattctgtattttgaaagttttattgttacagaaccaggtatggttaagtcattaaaaaaatttcaaattttaactgatgaagaaaactcctcacttaaagaagagtacggtgatagcttccaaagtatgattggagcagaagcaattcaaaaattactttcagaaattgatttaaaagatcaacaaaaaaaagttagagaagaattgtcttcaacttcatcagagacaaaaaagaaaaaacttgtcaaaaggttgaagcttgttgaagcttttttaaattcaaaattaaagccagaatggatgatcctgaatgttattcctgttattcctccagagctaagacctcttgttccattggatggaggacgttttgccacatctgatttaaatgatttgtaccgaagggtaataaatagaaataatcgtcttcaaagactcctaaatctaaaagctccagatataattgtgagaaatgaaaaa

SEQ ID NO: 255622 - DNA, 832 bp, Unknown
  Bacterial polypeptide expressing nucleotide sequence isolated from the Sargasso Sea
gatgatattaactgtaattcctgtaattcccccagaactcagaccactagtacccttagacggagggagatttgctacctctgatttaaacgatttatatagaagagtcataaacagaaataatcgtttaaaaagattaattgatttaaaagctccagatataattgtaagaaatgagaagagaatgctacaggaatcagttgatgcactttttgacaatggaagaagaggaagggtaattaccggaacaggaaaaagacctctaaaatcacttgccgaaatgttaaaaggaaaacaaggtagatttagacagaatcttttaggaaagagagtagattattcagggagatcggtaatagttgttggacctgatttaaaattacacgaatgcggtttaccaaaaaaaatggctttagaactatttaaaccatttttatatgctagattaaataagctaggattggcctcaacaattaaacaagcaaaaaaacttgttgaaaaagaaagaaatgaagtttgggactcgcttgaaataattgtaagagaacacccagtaattttaaatagagcaccgacattgcacaggttgggtgtacaggcatttgaaccaaaattaattgaaggagatgctattgaattacatccacttacatgcgcagcatttaacgcagattttgatggagatcaaatggcagttcatattccgttaagtttagaagcacaactagaagcaagagttctgatgatgtcaacaaataatattttaagtccatcaaatggaaaacctattattgttccaagtcaagatatgatacttggaatatattattta

SEQ ID NO: 255623 - DNA, 799 bp, Unknown
  Bacterial polypeptide expressing nucleotide sequence isolated from the Sargasso Sea
tagaggtgcagctgttacttctttacaaatagatggcgttttgcatgaatttacatcaataaaaggagtaagagaagatgttactgatattgttttaaatgtaaaatcattagcattaaaatgtaattctgaaggaaataaaaaactgatattggatgcaaaaggacctggagaaattaaagcttcacatatatctcctgttgcagatgttgaaattttaaatccagatttagttatttgtaatcttgatgaaaatacaaattttcatatggaaatgaatgtaaatacaggaaaaggttatgtgccagctgaactcaataaaccagaagagccacctttaggattgatagctgtagattctctatatagtccagttaaaaaagtctcttattcaataagtacagctagagaaggtaaagctcttgattacgataaactgataatggaagttgaaacaaacgggtcaatttcagcagaagatgcggtagcttattctgcaagaatttttcaagatcaattaaaaatgtttatcaattttgatgagcctgtagaagctcctgtaaaagaagtatcgacagaaccagaatttaacaaaaatttattaagaaaagtggatgagttagaattatcagtaagatctatgaattgtctgaaaaatgataatataatttatattggtgatcttgtgcaaaaatctgaaggtgaaatgcttagaacaccaaattttggtagaaaatctttaaatgaaatcaaagaagttttaactggtatgtcattatacctagggatggaaattcca

SEQ ID NO: 255624 - DNA, 922 bp, Unknown
  Bacterial polypeptide expressing nucleotide sequence isolated from the Sargasso Sea
aaatcaaatgtaagaagagagagaatgggtcatattaaccttgccacaccagttgcacatatttggtttttaaaatctctcccaagcagaatagcattagctgtagacatgaaactaaaagaagttgaaagagttttatattttgaaaattttatagtaattgaacctgggttaactggcttaaagccaaaccaacttttgaatgaggatgagcttttaaaataccaaaacgaatttggcgaagaatcttttactgctggtattggcgctgaagctattttagaaatattaaaatcaataaatcttgaggaagaaaaaaataaactaattaaaaatattaatgaaactaagtcaaaagtagctgaagaaagatctattaaaagattaaagttaattgactcatttatagaaactggaaataaacctgaatggatgatattaaccgttgttccggttattccaccagaacttagacctttagttcctttagatggaggacgttttgcaacttcggacttaaatgatttatatagaagagttattaatagaaacaatagattaaaaagattaatcgatcttaaagctcctgacataataatcagaaatgagaaaagaatgttgcaggagtcagtagatgccctattcgataatggaagaagaggtagagttattactggaactgggaaaagaccacttaaatctttagctgaaatgcttaaaggtaaacagggaagatttagacaaaatcttttaggaaaacgagttgattattcaggaagatcagtaattgtagttggtcctgatttaaaacttcatgaatgtggattgcctaaaaaaatggccttggaattatttaaaccatttctttatgctagacttaataaacttggattagcatctacaatcaagcaagcaaaaaaaa

SEQ ID NO: 255625 - DNA, 856 bp, Unknown
  Bacterial polypeptide expressing nucleotide sequence isolated from the Sargasso Sea
gattattctggaagatcagtaatagttgtaggtcctgatttaaaattacatgagtgtggtttaccgaaaaaaatggctttagaattatttaaaccatttttatatgcaagattaaataaattaggcttagcttcaacaattaaacaagctaaaaaattagttgaaaaagagacaaatgcagtttgggacgctttagaattaatagttagagagcatccggtacttttaaatcgagcaccaacacttcatagacttggagttcaagcgtttgagccaaaattaattgaaggagatgcaattgaattacatcctttaacttgtgcagcatttaacgcggacttcgatggtgaccaaatggcagttcacgtgccgttaagtttagaagctcaattagaggcaagaatattaatgttatctacaaataatattctttctccatcaaacggtaaaccaattattgttcctagtcaggatatgattttaggaatttactatctctcacaagaacctatatctgataaaccagctggatactttacaaattcagatcaaattgaatttgcattatcatctggtcaaataaatgtacatagcactatcatttcaagatttgagactgtagatgatcaaggtaataaaaaaatggaaaaatatacttctacagctggaagatttttattagcaaatttattacctaaaaatagcaacattaagttctctttagtagatagattattacctaaaaaagtagtttcagaaataattgatgttgtatttagattttgtggtcaaaaaacaacggtaattttctgtgacaagcttaaagatttaggatttaaacacgcatttaaagcag

SEQ ID NO: 255626 - DNA, 937 bp, Unknown
  Bacterial polypeptide expressing nucleotide sequence isolated from the Sargasso Sea
gacggcggaagatttgcaacttcagatcttaacgatttatacagaagagtaattaacagaaataacagattaaaaagattaatggatcttaaagcgcctgatatcattgtaagaaatgaaaaaaggatgcttcaagagtcggtagatgctctatttgataatggtagaagaggtagagtaattacaggtacaggtaagagaccactaaaatctcttgctgaaatgttaaaaggtaaacaaggtagatttagacaaaatttattaggtaaaagagttgactattcaggacgatcagtaattgttgttggtccagatttgaaactccatgaatgtggcttgccaaaaaaaatggctcttgagttatttaaaccatttttatatgcaagattaaataaattaggtttagcctcaacaattaaacaagctaaaaaattagttgaaaaagaaacaaatgcagtttgggacgctttagaattaatagttagagagcatccggtacttttaaatagagcaccaacacttcataggcttggagttcaagcttttgagccaaaattaattgaaggagatgcaattgaattacatcctttaacttgtgcagcatttaacgctgacttcgatggtgaccaaatggcagtacatgtgccgttaagtttagaagcacaattagaggcaagaattttaatgttatctacaaataatattctttctccatcaaacggcaaaccaattattgttccgagtcaggatatgattttaggaatctactatctgtcacaagaacctatatctgataaaccagctggatactttataaattcagatcaaattgaatttgcattatcatctggtcaaataaatgtacatagcactataatttcaagatacgagactgtagatgagcaagggaataagaaaatagaaaaatatacttcta

SEQ ID NO: 255627 - DNA, 250 bp, Unknown
  Bacterial polypeptide expressing nucleotide sequence isolated from the Sargasso Sea
atggaaaatactgatgtaaatattaaaaattggaaatcattaattaaaccaactaagcttgatgtagaatcaaatagtgaaaaaacatatgcaaaaattgtagctgaaccgttagaaaaaggttatggtcttactttaggaaatgcattaagaagaattttattatcatcaataagaggagcagctgttacagcaatacaaattgatggtgtattacatgaatttacatctataaaaggtgtgagagaag

SEQ ID NO: 255628 - DNA, 313 bp, Unknown
  Bacterial polypeptide expressing nucleotide sequence isolated from the Sargasso Sea
tatgcaaatatcagtaatagatttattagtaccaaccgagatacaagtcgaaaatgtttcagatactgtatcgaaggtaacgctagagccgcttgagagaggttttggtcatacgctaggtaatgccttaagaagaattcttctttcatcaatgcctggtgctgctgtaacagatgttgtgatcgatggtatttctcatgagtattcaacaattgagggtgttagagaggacgtaatagatattttattgaatcttaaagatatgccagtgaaactgattgaaggaaatgaagcagagcttaaactatctgtt

SEQ ID NO: 255629 - DNA, 781 bp, Unknown
  Bacterial polypeptide expressing nucleotide sequence isolated from the Sargasso Sea
acacagattaggtgttcaagcttttgaagcaaaattaatcgagggaaacgcaattgaattacaccctttagtctgtgcagctttcaatgcagatttcgatggtgatcaaatggccgtacatgtaccattaagtttagaagcacaaatcgaagcacgtgttcttatgatgtcaacaaacaacattctaagcccatcgaacggcaagccaataattgtaccgagccaagatattgtgcttgggatttattatttgtcccaacataaagaggactctaatgcaaaaccagttggtattttttctgacgtagatgagattgagaatgctattgaaagaaaagatataagcgttcactctaaaatagtttcggtatttaatacagtagataaagatggaaataaaatctcagagaaatatacaagtaccgccggacgtttcttgttatctaaaactttgccaaaaaatcatagaattaaatttgatcttgttaataaactattgactaaaaaagcagtttcagaggtaattgacactgtatacagatactgcggtcaaaaagaaacagtaattttttgtgatcgaataaaagatttaggattcaaacacgcttttaaagctggaatttcatttggaaaaaatgatttgattattccaaaaactaaagaaaaattggttagtcaaactaaaaaacaaatagaagattatgaaaaacaatatcaggatggacttattactagaggagagaaatataataaagttgtagatatttggtctaaatgcaca

SEQ ID NO: 255630 - DNA, 825 bp, Unknown
  Bacterial polypeptide expressing nucleotide sequence isolated from the Sargasso Sea
aaaggtcaattaaaagattaaaattaatagagtcatttatagaaactggaaataaaccagaatggatgattttaactactattccagtaataccgcctgaattaaggcctctggtgccgctagatggaggtcgatttgctacatctgatcttaatgatttatatagaagagttataaatagaaataatagacttaaaagattaatagatcttaaagctccagatattattattagaaatgaaaaaagaatgcttcaagaatccgttgatgcactatttgataatggaagaagaggaagagttataactggaacagggaaaagacctctgaaatcacttgctgaaatgttaaaaggtaaacaaggaagatttagacaaaacttattaggtaaaagagtagattattcaggtagatcagtcattgttgttggtcctgatcttaagctacatgaatgtggtttgcctaaaaaaatggcattagaattatttaaaccatttttgtacgcaagattgaataaattaggtttagcatcaacaatcaaacaagcaaaaaaattagttgaaaaagagagaaatgaagtttgggatgcgctagaattaattgttagagagcatccagttattttaaacagagctcccactttgcataggttgggtgttcaagcttttgaacctaaactaattgaaggtaatgctatagaattacacccattaacttgtgctgcatttaatgctgactttgacggtgaccagatggcagttcatgttccacttagtttagaagctcaattagaggcaagagttttaatgatgtctacaaaataat

SEQ ID NO: 255631 - DNA, 837 bp, Unknown
  Bacterial polypeptide expressing nucleotide sequence isolated from the Sargasso Sea
ttaaaaaatttagatctagaattagaaagaaaaaatttagttaattacataaaagaaacgaaatctaaagttaatgaagaaagagctattaaaagattaaaattaatagagtcattcattgaaacaggtcaaaaacctgagtggatgataatgacagttgttccagtaattccgcctgaattgaggcctttagttcccttagatggaggaagatttgctacttcagatttaaatgatctttataggagagtaataaatagaaataatagattgaaaagattaatggatcttaaagctccagatataatcgtaagaaacgagaaaagaatgttacaagagtctgttgatgctttatttgataatggaagaagaggaagagttataactggaactggtaaaagacctcttaaatctttagctgaaatgctaaaaggaaaacaaggaagatttagacaaaatttactaggtaaacgtgttgattattcaggaagatcagtaattgttgttggtcctgatttgaagcttcacgaatgtggtttaccaaaaaaaatggctttagaattatttaaaccatttttatatgctagattgaataagcttggtttagcttcaacaatcaaacaagcaaaaaaattagttgaaaaggagacaaatgctgtttgggatgctttagagctaatagtcagagagcatccagttttacttaatagggcaccaacacttcatagactaggtgttcaagctttcgaacctaagttaatagagggagatgctattgaattacacccactaacttgtgcagcttttaatgctgattttgatggggatcaaatggca

SEQ ID NO: 255632 - DNA, 769 bp, Unknown
  Bacterial polypeptide expressing nucleotide sequence isolated from the Sargasso Sea
tttagaaaagggttatggtttaactttaggtaactcattgagaagaattttattgtcttcgattagaggggcagcagtcacatcaatacaaatagatggagtactacacgagtttacttctataaaaggtgtgagagaagacgtaactgatatagttttaaatgtaaaatctttggcattaaagtcatcttctgaggggactaaaaaacttattttagatgcaaaaggacctggtgaaattaaagcttcggatataacttctgtagctgatgttgaaattttaaaccctgaattagtaatttgtaatttagatgaaaatacaagctttcatatggaaatgaatgttaataccggtaaagggtacgttccagcagaactaaataaacctgaggaaccacctttaggattaattgctatagattctttatacagtcctgttaaaaaagtctcttattctgtaagtactgctagagaaggaaaagccttagattatgataaacttacaatggaagttgaaacagatggttcaatttcagcagaggatgcggttgcttattctgcaagaattttccaagatcaacttaaaatgtttattaattttgatgagccagtagaggcaccagttaaagaagtttcaacagaaccagaatttaataaaaatctgttaagaaaagttgatgaattggaattatctgtgcgatcaatgaattgcctaaaaaatgataacataatttatattggtgatcttgtgcagaaatctgaaggggaa

SEQ ID NO: 255633 - DNA, 835 bp, Unknown
  Bacterial polypeptide expressing nucleotide sequence isolated from the Sargasso Sea
ttgaagccagaaagtttgaaacaagaaaagatcagtgatcgttcatactcgattacacttgagccatttgagccaggtttagggcatacaattggtaatgctttgagaagaattttgttgtcatcaatgccgggtgcggctgtggtagaggtacagattgaagacgttgaacacgagtacagcacagtcaaaaaagttcaagaagatgtggtcaatatcttattgaatgtgaaaggcctggcaattgagttagagggtcgggatgaagcaattttgcatgttgaaaaaagtgagccaggcgtgctaactgcggctgatattacagcagagccgggtgtccgcatagccaatcctgatcatgtattggcacatgttacagcgatgggtcagccttttaaaatgagcatgcgtgtgatgacaggacgtggttatttggcttcttcagaggtcaaaaaacagttgggtcaaggtggtactattggttccttatacctagatgccagttttggtcctgttcagcgtgtatcatttgttgttgaaagtgcgcgtgtagagaatcgcaccgatctagataagttgattttaaccatcgagactaatggcgctattgatccagacgtggcgattcgtcgcgctgcgactattttacagtaccaactctcgacatttgccgagattcatgcaggtgcaggccagcatgatgccagagacgaacaagaagttgacccactgttattaaaatcagttgatgatttagagttaacagttcgagcagctaattgtttgaaggcagagaatatttactatataggtgacttggtacagcgtttagaaa

SEQ ID NO: 255634 - DNA, 856 bp, Unknown
  Bacterial polypeptide expressing nucleotide sequence isolated from the Sargasso Sea
atgagcaaagaattaactgatttatttaaaacttcagaaattttagaaactcaaaactttaatagtattaaaattacactagctagtcctgaaaaaattaaatcctggacttatggtgaaattaaaaagccagagacaataaactatagaacttttagaccggaaaaagatggtttattttgtgcaagaatttttggcccaattaaagactatgaatgtttatgtgggaaatataaaagaatgaaatttaggggaattatatgtgaaaaatgtggtgttgaagttactaaatcaaatgtgagaagagaaagaatgggtcatataaatctcgctacacctgttgctcatatttggtttttaaaatctttaccaagtagaatatctttgacagtagatatgaaacttaaagaagttgaaagagttttgtatttcgaaaattttattgtaattgaaccaggattaacaaatcttaaaaaaaatcaacttttaggagaagaagagttaattaaatatcaagaagaatatggagaagaatcatttacggcaggaattggtgctgaagctattttagaaatattaaagtctattaatcttgaggaagaaaaaaaatctttaattaaaataataaaagagactaaatcaaaagtttctgaggaaagatctataaaaagattaaaactaatagagtcatttatagaaactggaaataaaccagaatggatgattttaactactattcctgtaattcctcccgaactaagaccattggttccactagatggtggtagatttgcaacgtcagatcttaatgatctttatagaagagttataaatagaaataatcgtcttaaaagat

SEQ ID NO: 255635 - DNA, 781 bp, Unknown
  Bacterial polypeptide expressing nucleotide sequence isolated from the Sargasso Sea
aatgacaaatagcaacttaagaactgaaaatcactttgattacgtaaaaatttcaattgcttctccacaaagaataatggactggggacaaaggacattacccaatggacaagtagttggtgaagttaccaaacctgaaactattaactacagaacacttaaaccagagatggatggtctgttttgtgaaaagatttttggaccctctaaagattgggaatgtcattgtggtaagtataagagagtaagacatcgaggcattgtttgtgaaagatgcggagttgaggtaaccgaaagtagagttagaagacatagaatgggatatattaagcttgctgcgccggtatcccatgtttggtatttaaaaggaatccctagttatgtcgcaattcttctggatataccccttagagatgtagaacaaattgtttattttaattgttatgttgttttagacccaggtgatcataaagaactcaagtataagcaattattgactgaggatgaatggttggaaattgaagatgaaatttatgctgaagattcaacaattgaaaatgaaccttttgtaggcattggagcagaagctctaaagcaattacttgaggatcttgatttaaatcaggttgctgaggatctaagagaagaaattacaagtagtaaagggcagaaaagggcaaaacttataaaaagaataagagttattgataattttattgcaaccaatgcgaaaccagaatggatggttttagatgcaattcccgtgatacctccagatctt

SEQ ID NO: 255636 - DNA, 616 bp, Unknown
  Bacterial polypeptide expressing nucleotide sequence isolated from the Sargasso Sea
aatggaaactgaaaatgttaatattaaaaattggaaatcacttattaaacccacaaaattagatgttcaaattagtgatgatctaacacacgcaaaaattatagcagagccacttgaaaaaggttttggtttaacattaggtaattctttaagaagaatattattatcttcaataagaggtgctgcagttacttcaattcaaatagatggtgttttacacgaatttacttcaattaaaggtgtaagagaagatgttactgacatagtattaaatgttaaatccttagcgttgaaatgttctgcagaaggaacaaaaaaattagttttagatgcaaaaggtcctggtgaaattaaagcttcagatatcacagcggtaactgatgttgaaatattaaaccctgatttagttatttgtaatttggatgaaaatacaaattttcatatggaaatgaatgttaatactggaaaaggttatgtgccagctgatttaaataaacctgaggaaccaccattaggattaattgcgatagattctttgtacagtccagtaaaaaaagtttcatattcagtaagtaccgcaagagagggaaaggctcttgattatgacaaattgaca

SEQ ID NO: 255637 - DNA, 859 bp, Unknown
  Bacterial polypeptide expressing nucleotide sequence isolated from the Sargasso Sea
cagggtgccgcggtaacagctattcaaatagatggtgttttacatgaattttcttctattaaaggagtgagggaagacgttactgatatagttttaaatgtaaaaaatttagctataaaatcaacttcaacaagcacaaaaaaaattattttagatattaaaggacctaaagaagttaaagctaaagatattaaaacaataccagaaattgaaattttgaaccccgaacaaactatttgtaatttagatgaaaaaactcagtttcatatggagctgatgattgataatggtaaaggatatgttcctgctccaaaaaatagatctgaagaaagtcctttaggattaatttcgattgattctttatttagcccagtaaaaaaagtttcattttccgtagaaaatacaagagcgggaagtgcattagattatgacaagttaattatgactgttgaaacaaatggaacaattgctgcagaagatgcaattgcatattcagcaagaatatttcaagatcaattatctatgtttgttaattttgaggaccccaaagaagttattaaagaagtcaaatcttcagaacctgaatttaatagaaatttattaaaaagagtcgaagaattagaactttcagtaagatcaatgaattgtctaaaaaatgataatataatttatataggagacttagtacaaaagaccgaaccagaaatgttaagaactcctaattttggaaggaaatcattaaatgaaattaaggaagttttgaatactatgtctttatatttaggtatggaaatacctaactggccacctgataatatcgctgaattgtcaaaaaaacttgaggagaataattactaat

SEQ ID NO: 255638 - DNA, 457 bp, Unknown
  Bacterial polypeptide expressing nucleotide sequence isolated from the Sargasso Sea
atgacaaacagcaacttaagaactgaaaatcactttgattacgtaaaaatttcaatagcttctccacaaagaataatggattgggggcaaaggacattacccaatggtcaagtagttggtgaagttactaaacctgaaactattaactacaggacactgaaaccagaaatggatggattgttttgtgaaaagatttttggtccctctaaagattgggaatgccattgcggaaagtataaaagagtaagacatcgagggattgtttgtgagagatgcggggttgaagtaactgaaagtagagttagaagacataggatgggttacataaaacttgccgcgcccgtttcccatgtttggtacttaaagggaattcctagttacgttgcaattctgctggatattcctctgagagatgtagaacaaatagtttatttcatattgttatgttgttctagat

SEQ ID NO: 255639 - DNA, 286 bp, Unknown
  Bacterial polypeptide expressing nucleotide sequence isolated from the Sargasso Sea
tatgcaaatatcagtaatagatttattagtaccaaccgagatacaagtcgaaaatgtttcagatactgtatcgaaggtaacgctagagccgcttgagagaggttttggtcatacgctaggtaatgccttaagaagaattcttctttcatcaatgcctggtgctgctgtaacagatgttgtgatcgatggtatttctcacgagtattcaacaattgagggtgttagagaggacgtaaaaaatattctattgaatcttaaagatatgccagtgaaactgatgaaggaa

SEQ ID NO: 255640 - DNA, 768 bp, Unknown
  Bacterial polypeptide expressing nucleotide sequence isolated from the Sargasso Sea
gctgcaataccagattgaccgcatcgagcatcagatggaagaggatcgctcccagtgtggggtgttcctcatcggtccccttgagcggggtcaggcgaccaccttgggcaacgccctgcgacgtgtcctcatgggcggcctcgaaggcagtgccgtcaccgccattcggatcgctggtgtcaaccacgaatacgccaccatacccggtgtgcgtgaggacgttctcgacatccttctgaactgcaaggagctctccgtcgacagccggtcgcctgagctggagatcggtcgtcttgtggtggctggccctgctgaagtgaccgccaacgatctgcagttttcctcccaggttgaggtggtggactgcaaccgtcccatcgccaccgtggccgacggttatagcctcgagcttgaggtccacgtggaacgcggcgtgggctaccgaccggtggatcgccacagcgaggacaccagcgccatcgacctgcttcagatcgatgctgtgttcatgccggtgatccgggtgaatttcaccatcgatgaaaccgccgttgccgagggtggatccgcccgagagcgtctgcgcatggagatcgtcaccgacggctccatcacccccgatgacgctctggctcaatcagccaaccacctaatcgagttgttccaacctctcgccacggtgaccctcgtggaggagccggggatcgaacctgagccttctgcagaagccctgatcccgctggaggaactcaacctctccgtgcgggc

SEQ ID NO: 255641 - DNA, 745 bp, Unknown
  Bacterial polypeptide expressing nucleotide sequence isolated from the Sargasso Sea
ataagaggtacagcggtgacctcgatacaaatagatggtgttttgcatgaattcacatcaattaaaggtgttcgtgaagatgtaaccgatattgtacttaacattaaagaactggcattaaaaagtaattcagatgtagaaaaaaaattaatattagatgtaaaaggaccgggtgaaattaaagcatcagatataacgcctgtaacagaaattgagattttaaatccagatttagtaatttgtaatttggacgaaaatacaaattttcatatggaaatgactgtaggaaccggaaaaggttatgtttctgcagacatgaataagcctgatgaaccaccgttaggtttaatacctattgattcactatttagtccagtcaagaaagtttcgtattctgttagcactgcaagagaaggtaaagcattagactatgataaattaacaatggaagttcaaacaaatggttcaatctctgcagaagatgccgtggcatactcagcaagaattttccaagatcaattaggtatgtttgttaattttgatgaacctcaagaagttattgtaagagaaaaaccaagtgaaccagaatttaataaaaatttattgagaaaagttgatgaattagaactttccgtaagatcaatgaactgtttaaaaaatgataatattatttatattggagatttggttcaaaaatctgaaggagaaatgcttagaacccctaatttggaagaaaatctttaaa

SEQ ID NO: 255642 - DNA, 361 bp, Unknown
  Bacterial polypeptide expressing nucleotide sequence isolated from the Sargasso Sea
atgataaagggtaaaggcggcaggtttagacaaaatcttttaggtaaaagagttgattattctggcaggtctgtaattgttgtcggtcctacacttaggttacatcaatgtggcattccaaaaaaaatggctttagagctattcaaaccccatatttttggaaagcttcaaactagaggtattactacaacgatcaagtcagcaaaaaaagttgttgaaaaagagggtgaagaggtttgggatattttagaagagataattaaggaatatcctgttcttttaaatcgagcaccaacattacatcgattaggcatacaagcgtttgagcctgttttgattgagggtaaagccatacaacttc

SEQ ID NO: 255643 - DNA, 721 bp, Unknown
  Bacterial polypeptide expressing nucleotide sequence isolated from the Sargasso Sea
aatggaaagtatagatgtaaatgcaaaaaactggaaatcacttataaaaccaactaaattggagatacaacaaactgacgataaatctaatgccaaaataattgctgaaccacttgaaaaaggctatggcttaactttaggcaattctttaagaagaatattattatcttcaattagaggtacagctgttactgctattcaaattgatggagtgcttcatgaatttacgtccattaaaggtgtaagagaagatgttactgatattgttttaaacgttaaatctttggctttaaaaagtcagtcagaaggcgtaaaaaaattaattttagatgccaaaggtcctggagaaataaaagcatctgatataacttcaatcccagatgtagaaatactgaatcctgatcttgtaatttgtaatcttgatgaaaaaacaaattttcatatggaaatgactgttggttcaggaaaaggttatgtttctgctgatatgaataaacctgaagagccaccactaggtttaattcctatagattctttattcagtccagtaaaaaaagtatcttattcaataagtaccgctagagaaggaaaagctcttgattatgataaattaattatggaagttgaaactaatggttcaatatctgctgaagatgcagtagcttattcagctagaatatttcaggatcaattaggtatgtttattaattttaatgaacca

SEQ ID NO: 255644 - DNA, 847 bp, Unknown
  Bacterial polypeptide expressing nucleotide sequence isolated from the Sargasso Sea
taaacttgatatttatggatgggcaaataccataaaagcagcaaaaaaacttgttgaaaaagaagatcctagggtttgggatattttagaggaggtgattagagagcatcctgttcttttaaatagagcgccaactcttcatagattaggtatccaggcatttgaaccaattttaattgaaggaaaatctattcaattgcatccacttgtatgtaccgcttttaatgctgattttgatggtgatcaaatggctgtccatgttcctttaagtcttgaagcacaacttgaagctagagtactaatgatgagtactaacaatattttatctccatcaagtggaaaaccgataatagttccatcacaagacatcgttttgggtatttattacctttccattgttagagataaacaaatcggtgaaggtcgcagctttgttgacttaaatgaaatacttaaagcgttagaaaatggtgacgtaagtcttcattcaaaaatcactgcacgaatagagactattgatggaaatttgactaaagtggagactacaccgggtagaatgatacttggcaacattctgccaaagaatgaaaatatagactatgcgatgataaataaagtacttacaaaaaaagaagtaagtaatattatagattcagtttacagattttgtggacaaaaagagacagttctattcgcagatcacattatgcaaattggttttaaatatgcagcaatagctggtatttcttttggtaaagacgatctcattataccatctgataaaaatgatcttttaaatgaaacacaattaaaagttcaagagtatgaaaatcagtatcaggatgga

SEQ ID NO: 255645 - DNA, 865 bp, Unknown
  Bacterial polypeptide expressing nucleotide sequence isolated from the Sargasso Sea
ttcagaagctcaaaattttaatagtattaaaattactttagcaagccctgaaaaaattaaatcatggacatatggtgaaatcaaaaaacctgaaacaataaattatagaacttttagaccagaaaaagatggtcttttctgcgcaagaatttttggaccaataaaagattatgagtgcttgtgtggaaaatacaaacgaatgaaatttagaggaattatatgtgagaaatgtggtgtagaagttacaaaatcaaatgtaagaagagaaagaatgggccacataaaccttgcaacacctgttgctcatatatggtttttaaagtcacttccaagcagaatatcattagcaattgatatgaaacttaaagaggtagagcgagttctttattttgaaaactttatagttattgaacctggattaactggattaaagaaaaatcaattacttggtgaagaggaattaataaaatatcaagatgaatatggagaagagtcttttacagctggcattggtgcagaggcaatacttgaaattttaaaatcaatcaatcttgaagagcaaagaaatagtttaataaaaacaataaaagagactaaatcaaaagtatcagaagaaagatcaataaaaagattaaagctaattgaatcttttatagaaactggaaataagccagaatggatgattttaacaacaattcctgttattcctccagaattaagacctttagttccattagatggtggtagatttgcaacttcagatttgaacgatctatatagaagagtaatcaatcgaaataacagactaaagagattaatggatcttaaagctccagatattattgttagaaacgaaaaaagaatg

SEQ ID NO: 255646 - DNA, 538 bp, Unknown
  Bacterial polypeptide expressing nucleotide sequence isolated from the Sargasso Sea
atgcaaaacacaactatcaatgataattggaaagctttaattaaaccgagtaaacttaatatacaaagtagtgatgataaatctcttactacagtaatagcagaaccactagaaaaaggttatgcacttactattggaaactctctaagaagaattttactttcttcaatacaaggttcagcaataacagcattacaaatagatggagtgttacatgaattttcatctattaaaggtgtccgagaggatgttactgacatagttttaaatgttaagatgttatctattcaagttatgtcagaagaatctaaaaaattaattttagatgttaaaggaccaggagaaattaaggctaaagatattcaaccaaacccagatgtcaaaattttaaatccagatttagttttgtgtcatttagatgaaaatactaaatttcatatggaattagtagcaagtagaggcaaaggttatcgtcctgcagaaaaaaataaaaaggaagatgctcctttaggattaattgcaaaagattcactttttt

SEQ ID NO: 255647 - DNA, 887 bp, Unknown
  Bacterial polypeptide expressing nucleotide sequence isolated from the Sargasso Sea
cctgggtctaacaagtttaaaaaagaaccagcttttaaatgaagatgagttaaataaatatcaagaggaatttggtgatgaggcttttacagcaggtattggagccgaagctattttagaaatcttaaaatcaatagatctaaataaagaaagagagatccttcttaaaaatataaatgagactaaatctaaagttgcagaggagagatccataaaaagattaaaattaatcgactcatttattgaaactggaaacaagccggagtggatgatattaactacaattccagttattccacctgaattgagacctttagttcctctcgatggtggacgatttgctacttcagatcttaacgatctttacagaagagtgataaatagaaataacagacttaaaagattaatggatttaaaagctcctgatataattgtaagaaatgaaaaaagaatgcttcaggaatcggttgatgcattattcgataatggtagaagaggcagagtaatcacaggcactggaaaacgacctttaaaatcacttgcagaaatgttgaagggtaaacaaggaagatttagacaaaacctcctaggtaaaagagtagattattctggtagatctgtaattgttgttggacctgatttaaaattacacgaatgtggtttaccgaaaaaaatggcgcttgaattgtttaaaccttttctctacgcaagattaaataaacttggactagcctctacaataaaacaagctaaaaaattagtcgaaaaagagacaaacgcagtatgggatgcacttgagcttattgtaagagaacatcctattttattaaatagagcaccaactttacacagattgggtgttcaggcatttgagccaaaactaattg

SEQ ID NO: 255648 - DNA, 628 bp, Unknown
  Bacterial polypeptide expressing nucleotide sequence isolated from the Sargasso Sea
aatggaggtgaaggctaatgatattcaattctcctctcaagttgaaattgttgatggcgaaaaaccgatcgcaactattcaggagggtcataatttagagttggaaatccatgttgaaagaggtgttggatatagacccgttgaccgtaagagtgaagagacaactgctattgatttacttcaaatagacgctgtatttatgccagtgaagagagtgaattttacgattgatgaaactgctgtagcagaaggggggacaggaagagaaagattaaaaatggaagtagtaacagatggctcaacaagtcctgacgatgctatttctgaagctgcaaatcagttaatagaactttttcaacctcttgctacggtcacaatggttgaggaaattcctgaagaacctgaaccatctcctgaagctcaaattcctcttgaggaactaaacttgtccgttagagcatataattgtttaaaaagggcgcaagttaactcagtttcggatttaatgggcttcagttatgaagatcttcttgaaattaaaaactttggctctaaatctgctgatgaggttattgaggctcttgagcggatcggtatttctattccacaaagcagaacatctgtttag

SEQ ID NO: 255649 - DNA, 918 bp, Unknown
  Bacterial polypeptide expressing nucleotide sequence isolated from the Sargasso Sea
aagaggtaaattagagaacatcctggttctactcaatagagctccaactttacacagattaggtattcaggcttttgagccagttttaatagaaggaaaatcaatacaattacatccactagtatgtactgcttttaatgctgattttgatggtgatcaaatggctgttcacgttccattaagtctagaagctcaattagaggcccgagttcttatgatgagtactaacaacatactttctccatccagtggaaaacctataattgtaccatctcaggatattgttttaggaatttattatttatcaattatgcgcaataatcaaaaaggtgaaggtagaaattttcttgatacaaacgaaatattaaaagcagttgaattaaaagatattaatcttcactcaaaaataaatgtaagaattaaaaactttgatggctcattttcaaaggtagagacaactgcaggaagaatgttgctggctgattctttacctaaaaatcaaaaaataaattttggtttaattaataagatcttaactaaaaaagaagttagtaatttgattgatacagtctatcgtttctgcggacaaaaagaaacggttctttttgcagatagtataatgcaaataggttttaaatatgcagctattgcgggaatttcatttggaaaagatgatttaattattccagaagaaaaacaaatcttacttgatgaaactcaatctaaagttcaagaatatgaaaatcaatatcaggatggtcttattactcaaggtgaaaaatataacaaagtagtagatgcttggtcagaatgcacaaacagggttgctgataaaatgctagatgtaatttcaaatccagaggatgatcgaccaattaactctgtatacatgatggcccattcaggagctcgtgggtc

SEQ ID NO: 255650 - DNA, 855 bp, Unknown
  Bacterial polypeptide expressing nucleotide sequence isolated from the Sargasso Sea
cttgctgaaatgcttaaaggtaagcaaggtagatttagacaaaatttattaggaaaacgtgtagattactctggtagatctgtaattgttgttggtccagatttaaaacttcatgagtgtggtttaccaaaaaaaatggctttagaattatttaagccatttttatacgcaagattaaataaattaggtttagcctcaacaattaaacaagctaaaaaacttgttgaaaaagagtcaaatgcagtctgggatgcacttgagctaatagttagagaacaccctgttttactaaatagagcaccaacacttcatagacttggtgtacaagcatttgaaccaaaattaattgagggagacgcaattgaacttcaccctctaacatgtgcagcatttaacgctgattttgatggtgaccagatggcggtacacgtaccattgagcctagaggctcagctagaagcaagaattttaatgttatcaacaaataatattctttcaccatcaaatggtaaacctattattgttccaagtcaggatatgatcctagggatttattatctatcacaagagccagttactgataaacctgctggttactttgttgactctgatcaaattgaattcgcattatcttctggacagataaaagtacatagtacaattatatctagatttgaaactatagatgataaaggaaataaaaaatttgaaaaatatacctcaacagctgggagatttttactagcaaatttattaccaaaaaatagtaatattaaattctctttaatagatagattgttacctaaaaaagtagtttcagaaattattgatattgtctttagattttgtggtcaa

SEQ ID NO: 255651 - DNA, 305 bp, Unknown
  Bacterial polypeptide expressing nucleotide sequence isolated from the Sargasso Sea
aatggaagtcgaaaatgttaatgtaaaaaattggaagtcattaattaagccatctaagttagatgttcaaataagtgatgacttaacacatgcaaaaattgtagcagaacctttggaaaaaggttatggattaactttaggaaactctttaagaagaattctattatcgtcaataagaggtgctgctgtaacatcaattcaaattgatggagttttacacgaattcacctcaataaaaggagttagagaagatgttaccgatatcgttttaaacgtaaaatctttagcattaaaaagtaattcag

SEQ ID NO: 255652 - DNA, 856 bp, Unknown
  Bacterial polypeptide expressing nucleotide sequence isolated from the Sargasso Sea
aacacaattaaagcagcaaagaaacttgtagaaaaggaagatccaagagtatgggacattcttgaagaagttattagggaacatcctgtgcttttaaaccgagcgccaactcttcacagattaggaattcaagcttttgagccaatattaattgagggtaaatcaattcaacttcatcctcttgtatgtacagctttcaatgctgatttcgatggagatcaaatggcagttcatgttccattaagtctggaagctcaactagaggcgagggtacttatgatgagtactaataatattttatctccatcaagtggaaaaccaataatagttccatcacaagatattgtcttaggtatttattatttatctataattagatcaaatcaagctggagaaggacgatcttttatagatttaaatgaaattttaaaagcaattgagaataaagatataagtttacattctaaaattactgcaagaataacagattttgatggaaattttcaaaaggtagagacaacaccaggtaggatgattttaggaagcgctcttccaaaaaataaacatataaattatgaaatggttaataaaattcttactaaaaaagaagttagtaatatcattgatacagtttatagattttgcggtcaaaaagagactgtattatttgcagataagattatgcaaactggatttaagtatgccgcaattgctggtatttcttttggtaaagatgatttaataattcctgatgataaacaaaaacttttagacaatactcaatcaaaagttaaggaatatgaaagtcaatatcaagatggttttattactcagggtgaaaatataataaagtagt

SEQ ID NO: 255653 - DNA, 907 bp, Unknown
  Bacterial polypeptide expressing nucleotide sequence isolated from the Sargasso Sea
agatccatttaaaaaaacaaatttagtagatgaacagaattttgctagtataaaaattactctagcaagtcctgaaaaaattaaatcatggacttatggtgaaataaaaaaacctgaaactataaattacagaacatttagacctgaaaaagatgggttattttgtgcaagaatatttggtccaattaaagattacgaatgtttgtgcggaaaatataaacgaatgaaatttagaggtattatctgcgaaaaatgtggtgttgaggtaacaaaatcaaatgtgagaagagaaagaatgggacatattaacttagcaacgcctgttgcacatatatggtttttaaaatcactgccaagccgaatagctttagcaatagacatgaaactaaaagaagttgaaagagtattatattttgaaagttttatagttattgaacctggtttaaccggtttaaagcaaaaccaacttttaaatgaagatgagcttttaaaataccaaaatgagtttggtgaagactcttttacctcaggaataggtgcggaagctatcttagaaatacttaaatcaataaatcttgaagaagaaaaaaataaattaattaaaaatattaatgaaacaaaatctaaagttgccgaagaaagatcaattaaaagactaaaactaatagattcttttattgaaactggaaataaacctgaatggatgattttaacagttattccagttattccacctgaactaagacctcttgttcctttagacggaggacgttttgcaacatcagatttaaacgatttatacagaagagttattaatagaaataatagattgaaaagattaattgatcttaaagctcctgatatcataattagaaatgaaaaaagaatgttgcaagagtctgtagat

SEQ ID NO: 255654 - DNA, 901 bp, Unknown
  Bacterial polypeptide expressing nucleotide sequence isolated from the Sargasso Sea
agatttaaatgacctttataggagggtgatcaataggaataatagacttcaaagattactggatctcaatgcaccagacatcattgtaagaaatgaaaagaggatgttacaaaaatctgttgatgcactcttagacaatggaagaatgggtagagcggttacaggctctaataagagaccacttaagtctcttgcggatatgataaaaggaaagcaaggacgatttagacagaatttgttaggcaaaagggttgattactctggcaggtctgtgattgttgtagggccaaccttaaaacttcatcagtgcggtattcctaaaaagatggcattagagcttttcaagccatttgttttcagtaagcttatttaccaaggtgaggcgtcaacaatcaagtctgctaaaagacttgtagagctagagggggcagagatttgggatattttagacggagttataaggcagcatccaatcttacttaatcgtgcaccaactcttcacagacttgggattcaagcttttgagcctgtcttggttgaaggaaaggcaattcagttgcatcctcttgtatgcaaagcctttaatgccgactttgatggagatcagatggcagttcatgttccactatcgattgaggcacaactcgagagtagggcattgatgatgtcatctaataatatcctttcacctgcaaatggcgagcccattattgttccatcacaggatgtagttttaggcctttattacatgactagggagaaagtcaaagataaaggtgagggcggtatttttgcaaatattgatgaggtagaaagagcatttcataatagatttctcggtctacacgctaaaataaaattgaagattgcgacgcaaaatgaggaaaagcctacagagatt

SEQ ID NO: 255655 - DNA, 784 bp, Unknown
  Bacterial polypeptide expressing nucleotide sequence isolated from the Sargasso Sea
atgcagagcacaaatactaatgtaatagacaaaaattggaaagctttaattaaaccaaataaattaaatattacaagtaacgatgatcgttcaatagcaaaagtaatagctgaaccactagaaaagggttttggtcaaacaataggtaattctctcagacggattttgctttcatcaattcaaggtgcagcggtcacagcaatccaaatagacggagtactccatgaattttcttcaattaaaggcgtaagagaagatgtcactgatattgttttgaatgttaaaaacttagctataaagtcaaattcttcttcccaaaagaaaataatattagatattaaaggaccaaaggaagtaaaagctaaagatataactttagttcaagatattgaaatattaaatccggaacaaactatttgtaatttagatgaaaagacacattttcatatggaactgatggtaagtacaggcaaagggtatgtacaagccccaaaaaataaatcagaagatagtcctttaggtttaatatctattgactcattatttagccctgtaaaaaaagtttctttctcagttgagaatactagagcaggaagtgctttagactatgataaattaataatgacagttgaaacaaatggaactgtagatgccgaagatgcgattgcttattcagcaagaatttttcaagatcaattatcaatgtttataaattttgacgatcctcaagaagtcgtaaaagaagttaagtcttccgagcctgaatttaatagaaatcttctaa

SEQ ID NO: 255656 - DNA, 841 bp, Unknown
  Bacterial polypeptide expressing nucleotide sequence isolated from the Sargasso Sea
tacaactttaggtaactctcttagaagagtccttatgggaggacttgaagggagtgcagttactgcagtaagaatagcaggaattaatcatgaatatgcgactattcctggagtgagagaagacgttttagatattcttctcaactgcaagcaactatcaataaatagttctaatccagagctcgaaatcggtaggttagtcgcgagtggtccaatggaggtgaaggcgaatgacattcaattctcctctcaagttgaaattgttgatggcgaaaaaccgattgcgactattcaggagggtcataacctagaattggaaatccatgttgaaagaggtgttggatatagacctgtcgaccgtaagagtgaagagactaccgctattgatttacttcaaatagatgctgtatttatgccagttaagagagttaattttacgattgatgaaactgctgtagccgaaggcggaacaggaagagaaagattaaaaatggaagtagtaacagatggttcaacaagtcctgacgatgctattgcagaagctgcaaatcaattaatagaactctttcaacctcttgctaccgtgacaatggttgaggaaattcctgaagaacccgaaccatctcctgaagctcaaattcctcttgaggaactaaatttgtccgttagagcatataattgtttaaaaagggcgcaagttaactcagtttcagatttaatgggcttcagctacgaagatcttcttgaaattaagaactttggctctaaatctgcagatgaggttattgaggctcttgagcgcatcggcatttctattccacaaagtagaacatctgtctaa

SEQ ID NO: 255657 - DNA, 880 bp, Unknown
  Bacterial polypeptide expressing nucleotide sequence isolated from the Sargasso Sea
aagaaccaattactttcggaggacgaattaatcaaatatcaaaatgagtatggagatgaatcttttacagcaggaattggagcagaagcaatattagaaattctaaaaaatattaacttagagcaagaaagagaaattctagtaaaaaatattaatgaaacaaaatctaaagtttcagaggagagatcaataaaaagattaaaattaattgactcatttatcaaaactgggaataaacctgaatggatgattttaacagtaatacctgtgataccaccagagttaagacctttagtgccattggatggaggtaggtttgctacttcagatttaaatgatttatatagaagagtaattaatcgaaataatcgacttaaaagattaatggatctaaaagctccagatataatcgtcagaaatgaaaaaagaatgttgcaagagtctgtcgatgcactctttgataatggacgaagagggagagtaattactggtactggaaaacgtccactaaaatctttagcagaaatgcttaaaggtaaacaaggaagatttagacaaaatcttttaggtaaaagagtagattattctggaaggtcagtaatagtggttggtccagatctaaaacttcatgaatgtggtttgccaaaaaaaatggctttagaattgttcaaaccttttttatatgcaagactaaataaacttggtttagcttcaacaattaaacaagctaagaaacttgttgaaaaagaaactaatgctgtttgggacgctttagaagttattgtaagagagcatccagttatacttaacagagcgccaacgcttcacaggttaggtgttcaggcttttgaacctaaattgatagaaggagatgcaatga

SEQ ID NO: 255658 - DNA, 924 bp, Unknown
  Bacterial polypeptide expressing nucleotide sequence isolated from the Sargasso Sea
ccagatgatattagatcttggtcatttggtgaaatcaaaaaacctgaaacaatcaattacagaacatttaaaccagaaaaagatgggctattttgttctagaatttttgggccagtaaaagattacgagtgcttatgtggcaaatataaaagaatgaaatttagaggtataatatgtgaaaaatgtggtgttgaagtcacactatcaaaggttagaagagatagaatgggacatattgaattggcagccccagtatctcatatttggtttatgaaatctttacctagcagaatagcaacacttcttgatatgacaataaaaaatttggaaaaagttctttattttgaacaatttattgttgtcgagccagggttaacagatttgaaaaaaggtgaaatcatttcagaggaacaatatattgattaccaagatgaatatggagaagattcattcagtgctgcaattggagcagaagcaattgagcaaatgcttttaagtattgatctccaatctgattacaaccaattaaaaattgatcttactgaaactaaatctgaactaaaaaaaacaaaaattacaaaaagacttaagcttttagaatcatttattgtatcaaagaataaaccagaatggatgattatgagagttcttcctgtaatacctcctgaattaagaccattagttccactcgatggaggtagatttgctacaagtgatctaaatgatttatacagaagagtaattaatagaaataacagactaaaaagattaattgatttaagagctcctgacataataattagaaatgaaaaaagaatgctttcagagtcagttgatgcactttttgataatggtagaagagggagagtaatcacatctactaataaaagaccttctaaatcattgtctgatatgttgaagggt

SEQ ID NO: 255659 - DNA, 793 bp, Unknown
  Bacterial polypeptide expressing nucleotide sequence isolated from the Sargasso Sea
ccagaattaaggccacttgttccacttgatggaggaagatttgcatcgagtgatttaaatgatttgtatagaagagtcattaacagaaataacagactatctagacttattgaattgagagcgccggatataattattagaaatgaaaagaggatgcttcaagaatccgttgacgccctatttgacaatggaagaaggggaagagtcatcactggaacaaataaaagacctctaaaatcacttgctgaaatgctaaagggtaaacagggtcgatttagacaaaatttattaggtaaaagagttgattactcgggaagatctgtaattgtcgtaggtcccgaattaaaattacatcagtgcggcttaccaaagaaaatggcaatcgagctatttaaaccattcatatatgctaggttagagtctctagggttagcgactacgcttaagcaagctaagaaaatggttgaaaaagaacgtccagaagtatgggacgtgttagatcgcgtaattagggagcatccagtaatattaaatagggcaccaacacttcacaggcttggtgtacaggcctttgagccagttttaattgaaggtaaggcaattcaacttcatcccttagtatgtactgcatttaatgctgattttgatggtgatcagatggctgtacatgtacctttaagcttagaagctcagcttgaggcaagagttcttatgatgtcaacaaacaatatactcaatcctgcaaatggaaaacccagttattgttccaagtcaggatattgtattaggcatt

SEQ ID NO: 255660 - DNA, 799 bp, Unknown
  Bacterial polypeptide expressing nucleotide sequence isolated from the Sargasso Sea
agtgatctaaatgatctttatagaagagtaataaatagaaataatcgtctaaaaagactaattgatttgagggcgccagatataattattagaaatgaaaaaagaatgcttcaggagtcagtagacgcactatttgataatggtagaagaggtagagttataacttcaaccaataaaaggcctctaaagtctctatctgacatgttaaaaggaaaacaaggtagatttagacaaaatcttcttggaaaaagagtagattattcaggtagatcagtaatagttgttggtccaaatcttaaattacatcaatgtggaattccaaaaaaaatggcacttgaactttttaaaccatttatttttcataaattagatatttacggatgggctaacacaatcaaagcagcaaaaaaactagttgaaaaagaggatcctagagtatgggatattttagaagatgtaatcagggagcatcctattcttttaaatagagcgccaactttacatagactcggtattcaggcttttgaacctattctaattgaaggtaaatcaatccaattacatccattggtatgtacagcttttaacgctgactttgatggtgatcaaatggctgttcatgttcctcttagtctcgaagctcagcttgaagcaagagtactgatgatgagtacaaataacattctacatccagcaagtggcaaaccaattatcgttccttctcaagatattattttaggtatttattatttatcaataatgagagaaaaacagattggggaaggtcgaagttttatag

SEQ ID NO: 255661 - DNA, 944 bp, Unknown
  Bacterial polypeptide expressing nucleotide sequence isolated from the Sargasso Sea
cctagcagaatatctctagttgtggacatgaagctaaaagaagtagaaagagttttgtattttgaaaattttatagtaattgagccaggattaactgatttaaagaagaaccagttattaggtgaagaagagttaattaaataccaagatgaatatggagaagaggcatttactgctggtatcggtgccgaagcaattttagaaattttaaaatcaataaaccttgaagaagaaagagatttattaataaaaaacattaaagaaacaaaatctaaagttaacgaggaaagatcaattaaaagattaaagttaatagagtcctttatcgaaactgggaataaacctgagtggatgatattaactactgttccagtaataccaccagaattaagacctcttgttcctttggatggaggaagatttgcaacgtctgatttgaatgatttatatagaagagtaataaatagaaataatagacttaaaagactaatagatttaaaagcaccagatatcattgtaagaaatgaaaaaagaatgttgcaagagtcagtagatgcacttttcgataacggcagaagaggaagagttataacaggaactggcaaaagaccccttaaatcattagcagaaatgctaaagggaaaacaaggaagatttagacaaaatcttttaggaaaaagagttgattattctggaaggtcagtaattgttgtcggtccagacttaaaacttcatgagtgtgggttacctaaaaaaatggccctagaactattcaaaccatttttatatgctaggctaaataaactaggtttagcctcaaccattaaacaagctaaaaaattagtagaaagagaaagaactgaagtttgggatgcgttagaacttattgttagagaacatccggtaatcttaaacagagctcctacattgcacagacttggtgt

SEQ ID NO: 255662 - DNA, 787 bp, Unknown
  Bacterial polypeptide expressing nucleotide sequence isolated from the Sargasso Sea
agagataatttctgaggaacagtatattgaatatcaggatgaatatggagaagattcgtttagtgcagctataggagcagaagcaattgaacaaatgttgctaagtattgatttagaagcagattttaatcaactgaaaattgaattaaacgaaactaaatctgaattaaaaaaaactaaaattactaagagacttaagctaattgaatcatttattatatctaaaaataaaccagaatggatgatacttaaagtattacctgtaataccacctgagctaagacctctagttcctttagatggaggtagatttgctacaagtgatttaaatgatttatatagaagagttattaatagaaacaatcgtcttaaaagattaatcgatcttagagctccagacataatcgttagaaatgaaaaaagaatgcttcaggaatctgtagatgctttatttgataatggaagaagaggtagagttattacttctacaaataaaagacctcttaaatcattatctgatatgttaaaaggtaaacaaggaagatttcgtcaaaatctcttaggtaaaagagtagattactcaggtagatctgtaattgtagttggtccaaccttgaagttacatcaatgtggaattccaaagaaaatggctcttgaattatttaaaccatttatattccataaattagacatttatggatgggcaaatactataaaagcagcaaaaaaattagttgaaaaagaggatcctagagtttgggatatattggaggaagtaatacgagag

SEQ ID NO: 255663 - DNA, 337 bp, Unknown
  Bacterial polypeptide expressing nucleotide sequence isolated from the Sargasso Sea
atggaaacagaaaatgtaaatataaaaaattggaaatcacttattaagccagcaaaattagatgttaaaattagtgatgatttaacacatgcaacgattattgctgaacctcttgaaaaaggttatggcctgactttaggtaattcattaagaagaattttgttatcatcaattagaggtgctgctgttacatcaattcaaattgatggagtattacacgaatttacttcaattaaaggagtacgtgaagatgttactgatattgttttaaatataaagtcattagctcttaaatgttcatctgagggaacaaaaaaattagttttagatgctaaag

SEQ ID NO: 255664 - DNA, 842 bp, Unknown
  Bacterial polypeptide expressing nucleotide sequence isolated from the Sargasso Sea
taagtcacttgcagatatgatcaaaggaaagcagggcagattcagacaaaatttgttaggaaaaagggtcgattactctggtagatcggtgattgtagttggaccaactttgaagcttcatcagtgtgggattccaaagaaaatggcattagagctattcaaaccattcgtcttcagtaaattgatttatcaaggtgaagcgtcaacaattaaatcagcaaaaagactggtagagcttgaggggcctgagatttgggatattttagacggtgtaataagacaacaccccgtgctgttgaatcgtgctcctacccttcataggcttggaatacaagctttcgaacctgttttggttgaaggtaaagcgatacaattacacccacttgtttgcaaggcattcaatgctgactttgatggtgaccagatggctgttcatgttccactatcaattgaggcgcaacttgaaagtagggcattgatgatgtcatccaataatatcctttcccctgcgaatggtgagcctattattgttccatctcaggatgtggttttaggcctctattacatgacaagagaaaaagttaaagatattggtgagggtagtatttttgcaaacattgaagaggttgagagatcatttcataatggcttccttggcttgcatgcaaaaatcaaactcaaaatttctatccaaaatgaagaaaagccaacagaaatagtagaaaccactactgggagggctttattctctaaaatcgttccagatgagattccatttgatgtaataaacaaaacaatggatagcaaggagatctccagattgatcaatcgttgttatcgtg

SEQ ID NO: 255665 - DNA, 242 bp, Unknown
  Bacterial polypeptide expressing nucleotide sequence isolated from the Sargasso Sea
aatgcaaaccacatctaacgtaatagataaaaattggaaaagtttaattaaaccaaacaagcttgatatcaagagtaatgaagataaaacaattgcaaaagtagtggctgagcccttagaaaaaggttttggtcaaacaattggtaactctttaagaagaattttactttcttcaattcaaggagcagcagttacagctatacaaattgatggagttttacatgaattctcatcaataaaag

SEQ ID NO: 255666 - DNA, 885 bp, Unknown
  Bacterial polypeptide expressing nucleotide sequence isolated from the Sargasso Sea
tataagagaatgaaatttaagggaataatatgtgagaaatgtggtgttgaagttactaaaaaagatgtaaggagagaaagaatggggcatattcaattagccgctccagtcgctcatatttggttcttaaagtctctaccaagtagaattgctctaatgatggatatgaaactaaaagacctcgagaaagttttatattttgagaaatttatggtgactaaccctggattaactggattatttcagaatcagttattggatgaagatgagctagaaaaagctcgagaagagtatggagaggattttgaagctagtattggagctgaagctgtaagatctgttttagagaaaatagaattacagcctgaattagataatttaagaactaaattatctgaaactaaggctgtagccctctctgaaaaacttgtaaaaagaataaaactttttgagtcatttttatcttcgggaaatagacccgagtggatgattttaacttctgttccagttattcctccagaattaagacctctggtgcctcttgatggtggtagatttgcatcttctgaccttaatgatttgtatagaagagttattaatagaaacaatagattatctaggctaatagaattaagagctcctgatattataattagaaatgaaaaaagaatgcttcaagaatcagttgatgctctttttgataatggaagaaggggtagagtaattactggaacaaataagaggcctctaaaatccttagcggaaatgttaaaaggtaagcaaggaagatttaggcaaaatcttcttggtaaaagagttgattattcaggtaggtcagtaatagttgttggaccagaacttaagcttcatcaatgtgggccttca

SEQ ID NO: 255667 - DNA, 760 bp, Unknown
  Bacterial polypeptide expressing nucleotide sequence isolated from the Sargasso Sea
taacgtaaaagctttagccttaaaatcatcatcagaaggtacaaaaaaacttgttcttgatgccaaaggaccaggtgaaataaaagcctctgatattactcaagttactgatgttgaaatattaaatccggacttagttatatgtaaccttgatgaaaatacaaactttcatatggaaatgaatgtaaatactggtaagggctatgttcctgcagaattaaataaacctgaggaacctccattgggtttaatagctatagactcattatacagtccagttaaaaaagtctcatattcagtcagtactgctagagaaggaaaagctttagactatgataaacttacaatggaagttgaaacaaatggatcaatttctgctgaagatgctgtagcttattcggcaagaatttttcaagatcaattaaaaatgtttattaattttgatgagccagtagaagttccagtaaaagaagtttctacagagccagaatttaataaaaatttattaagaaaagtcgatgaacttgagttatctgtaagatcgatgaattgtttaaagaatgataatataatttatattggagatttagttcaaaaatcagaaggtgagatgttaagaacacctaattttgggagaaaatctttaaatgaaattaaagaagtattaactggaatgtctttatatttaggtatggaaattccaaattggcctccagacaatattgctgaaatgtctaaaaaattagaggaagctatttaa

SEQ ID NO: 255668 - DNA, 927 bp, Unknown
  Bacterial polypeptide expressing nucleotide sequence isolated from the Sargasso Sea
aaaaaacttaaatcagatgctgaaataaaagtaattgaagaagccttccaaacattaaaaactttaaagcctaaaactttaattgaaaatgacacactatggcgcgaaatgattgataaatatgatgaatactttactgggggaatgggagcagaagcagtcagagagcttgtaggattagttgatttaaaatcagaaatggaaaaacttaaatctgatctagattctaaatctgctcaaagaaggcaacgagcaattcaaagaatgaaggtaattaaacctttttcagatggaaagaatccaccagaagccatgattttagaagtaattccagtaattcctccagagttaaggcctatggtacaacttgacggcggcaggtttgcgacatctgatttaaatgacttatacagaagattaataaatagaaataacagattaaagaagctactcgagctcggtgctccagagataatcataagtaatgaaaaaagaatgcttcaagaatcagtagatgctttatttgataatggtagaagaggacgagctgttgcaggagctggaggaagaggtttaaaatcactttctgacatgcttaagggtaaacaaggaagatttaggcagaacttacttggaaaaagagttgattactcagcaaggtctgtaattgttgttggtcctcatttagatttacaacaatgtggtcttccaaaaatgatggccttagaactatttaaaccttttgttatgaaaaggcttgttgaacttggtttgtctcagaatataaaatctgcaaaaagaatggtggagagatcaagagctcaagtttgggatgtgttagctgaagtcatcgaagaacatccagtattattaaatcgagctccaactctacatagattaggaattcaagcctttgagccaattctt

SEQ ID NO: 255669 - DNA, 915 bp, Unknown
  Bacterial polypeptide expressing nucleotide sequence isolated from the Sargasso Sea
gatggggcacatcactttggcagtgccaattgtgcatatttggtacctacgttctataccaagtaaacttgcttatttgactggtttaaaaacaaaagaactagagcgtattatatattatgaaacattcgttgtaattgaaccaggaaaaagtggccgtgagtctatggaattacttgatgaggaagagtactttgaattagagaaagaatttggtttttatgctgttagcgaagaagagagagataatgacgactatttttacgcaactatgggcggtgaagcaataaaagaaatgttagcaagaataaacttgttcgagttaaaaaagaatctggaagaaattatagatacatcaaaatctaagcaaaagcgtacagaagctctgaataggttaaagattgctaaaacttttctaccttcattatcaaagaaaagaattaaccaaccagaatggatggtgatttctgttttaccagttatacctccagagctaaggcctttggttccattagaaggaggtagatttgcagctagcgatttaaatgatttatatcgtaggataattattagaaataatcgtttaaagcagttaattgagattggcgctcctgatgttatcttaagaaatgaaaaaagaatgttgcaagaagctgtagatgcattatttgataatagtcgtagaaaaacagctattagaagtggaactagacggcctttaaaatcaatatctgatatgttgagaggtaaaactggtcgttttagacaaaatttactaggaaaaagggtagattattctggacgatctgtgatagttgttggccctaaattaagaatgagtgaatgtggtttacctaagaatatggcgcttgaactatttaagcctcacatgatttatgaattaatggccagagg

SEQ ID NO: 255670 - DNA, 929 bp, Unknown
  Bacterial polypeptide expressing nucleotide sequence isolated from the Sargasso Sea
ttttagggatcttagagataaatttggagaagtatttaaggcctcaatgggagcggaggcgatacttgaaattctaaaaagtactgatctagattctattagaaatgaattaaaatcagaaatcaatactacatcagggcaacgtagaaaaaaagcaattaagagattaagggtaattgaggcttttagaaaaagtggaaataaacctgagtggatgataatggaaaacttgccagttttacctccagaattacatccaatggttcaacttgatggaggaaggtttgcaactagtgacttaaatgatctatatagaagggtaattaatagaaataatagattaaggcacctaattgaactattagcaccagagattatagttcgtaatgaaaaaagaatgttacaagaagctgttgatgcattaattgataacggtagaagaggccgggccattcaaggaagtcacaatcatcaacttaaatcattaactcatctattgcgaggtaaacaagggcggtttcgtcaaaatcttttaggtaaaagagtcgattatagtggaaggtctgtaattatatctggtcctcagttgcgaatgaatgaatgtggtttgcctagaaaaatggcattagagttgtttaagccctttgttatgaatgcgctggttgtaaaaggttatgcacataatataaaaagtgcaaaacgtatgactgagagggctcgaccagagatttgggatattcttgaagaagtaatacaaaatcatcctgtcatgcttaatagggctccgacacttcacaggttaggaattcaagcttttcagccagtattagttgatggttttgctatacaaattcatcctttagtctgtacagctttcaatgcagatttcgatggagacctaaatggctgtgcatgtacctctgtctaaa

SEQ ID NO: 255671 - DNA, 313 bp, Unknown
  Bacterial polypeptide expressing nucleotide sequence isolated from the Sargasso Sea
ttgatagagaataattggataacgttggttaaaccaaacaaagttgattataaaataagtgataataaaaaatttggaactgttgtcattgaacctttggaaaaaggttttggtactacattaggtaatgccttgagaagagtacttttatcatcactacaaggcacagctatttcatctattaaaattaatggtgtgcttcatgaattttcaacaattgagggtgttagagaagatgtaactgatattattatgaacctaaaaaatgtaacttttaattcgaaaagtaatcattctcaaaaactaagtttaa

SEQ ID NO: 255672 - DNA, 751 bp, Unknown
  Bacterial polypeptide expressing nucleotide sequence isolated from the Sargasso Sea
atcttcaattcaaggcgcagctgtcacagctatccaaattgatggagttctacacgaattttcttcaataaaaggtgttagagaagacgtcacagatattgttctgaatgtgaaaaacttagcaatcaaatcatcatcttcaggttctaaaaaaataattttagatatcaaaggacctaaagaagtaaaagcaaaagatataacattagtaccagaggtagaaatattaaatccagatcaaaccatatgtaatctagatgaaaaaactcactttcatatggaattaatggtaagtactggaaaaggatatgtgcaagcaaaaaaaaataaatcagaagatagtccactcggtttaatttctatcgattctctctttagtccagtaaaaaaagtttctttttcagttgaaaatacaagagctggtagcgcccttgattatgataaattaattatgatagttgaaacaaatggaacagttgatgcggaggatgctatagcttattcagctagaattttccaagaccaattatcaatgtttgtaaatttcgaggatcctcaagaaatagttaaagaggcaaaaccttcagaacctgaatttaatagaaatcttttaaaaagagtggaggagctagaactttcagtgagatcaatgaattgcttaaaaaatgacaatatcatttatattggagatctagtacaaaaaactgaaccagaaatgttaaggacacctaattcggaagaaaatcgctta

SEQ ID NO: 255673 - DNA, 889 bp, Unknown
  Bacterial polypeptide expressing nucleotide sequence isolated from the Sargasso Sea
attgagctggctgctccagtttctcatatttggttcatgaagtctttacctagcaggattgcaacacttttggatatgacaatcaaaaatcttgagaaagtactttattttgaacagtttatagttgttgaaccaggtctaactgatttaaagaagggtgaaataatttcagaagaacaatacattgactatcaagatgaatacggtgaagactcatttagtgccgcaattggagccgaagctattgaacaaatgcttctaagtattgatttagaagctgattacaaccaactaaaaattgatcttaccgaaaccaaatcagaactgaaaaaaactaaaattactaaaagattaaaacttatagagtcttttattttttcaaaaaataaaccagaatggatgatcatgagagttttaccagtaattccacctgagttacggcccttagtacctcttgacggaggtagatttgcgactagtgatttaaatgacttatatagaagagtaattaatagaaataacagattaaaaagattaattgatttaagagctccggacataataataaggaatgaaaaaagaatgcttcaagagtctgttgatgcattatttgataacggaagaagaggtagagtaataacatctactaataaaagacctcttaaatccttgtccgatatgcttaagggtaagcagggaagatttagacaaaatttattagggaaaagagttgattattcaggaagatctgtaattgttgtaggtccaaatcttaaactccatcaatgtggtattccaaaaaaaatggctcttgaactttttaaaccgttcatatttcataaacttgatatttacggttgggcaaatacaattaaagcagcaaaaaaac

SEQ ID NO: 255674 - DNA, 916 bp, Unknown
  Bacterial polypeptide expressing nucleotide sequence isolated from the Sargasso Sea
tgggagcgagggtttggacatacactccgaaacgcgcttcgaagaatcctgctttcgtccatgccaggctgcgccattttatcggctgaaatagaaggggtgcttcacgagtacagcacaatagagggagtgcaagaggatgttattgagatattgctcaacttaaagggagttgcagtaaacttaaactccatcgatgagactgaaattagcctaaacaagtctggaccagggctcgtaaccgcagcggactttgagctcacccatgacgtggagattgcgaatcctgatcacgtcatagcgaatcttaatgaaaacggtaagctcgttcttagggcggctgtgggcagaggtaggggatatgaacctgcggaccagagggcggctgatgatgaagaaaatccaaagccgattggagccctaatgcttgatgcttcctacagcccagtacggaaggtcgcgtataaagttgatagcgcgagagtggagcaacgtacagacctagataaactaataatagaccttgagaccaatggaacaatcgaccccgaagaagcaataaggcgggctgcaacgatccttcaacagcaggttgctgtttttgttgatctgcagagcgaagcagagccggaggaaatagaggaagaggatgagattgatcctattttgttaagaccagtagacgatctagaattgacggtcagatcggcaaattgtttgaaagcagagaacatatattacataggagatctaattaggcgaaccgaggttgagctacttaagactccaaatttgggaaaaaaatcgcttactgagataaaagatgttttggcgtcaagagggctatcattgggaatgcgtctcgaaaactggccgccttctgccctgcggggggatgaacgagttttaggctaag

SEQ ID NO: 255675 - DNA, 532 bp, Unknown
  Bacterial polypeptide expressing nucleotide sequence isolated from the Sargasso Sea
taaaactggaaggggttacgagccagctgactcaagaggtgaagaggagactgctgttggggctctaaaagtggacgcatcttttagtccagttcggcgagtcgcatatacagtcgagaatgcaagatttgaaaaaagaactgacttggataagttaatagtcgaattggaaaccgatggtactttagatccaaaaaaagcaattgagcacgctgcaactattatgcaacagcaacttgctgcatttgttgatttagacgctatagcagaacaagaggctaagaaagatcagaatgactttgatccattcttaatgaggtcaattgaagagctagagctcacagttagatcaactaactgcctaaaagctgagagcatctttttaattggtgacttacttcaaagaacagaattcgatttattaaaaaccccaaatctaggtaaaaaatctttaaatgaaattaaggatgttcttgcatctaaaggcttttctcttggtacaaccctagagaactggccgccaatgggttaa

SEQ ID NO: 255676 - DNA, 665 bp, Unknown
  Bacterial polypeptide expressing nucleotide sequence isolated from the Sargasso Sea
gaagtttagaggaataatatgtgagaagtgtggtgtcgaggtaacactttcaaaagttagaagagatagaatgggtcacatagaattggctgctcctgtttctcacatttggtttatgaaatctttaccaagtagaatagccacattactagatatgacaatcaagaaccttgaaaaagttttatatttcgagcagtttattgttgttgaacctggtttaactgacttaaaaaaaggtgaaataatttctgaggaacaatatattgactatcaagatgaatatggagaagattcttttagtgcatctataggagcagaggcaatagaacaaatgcttcttagtatcgatttagaaagtgattataatcaattaaaaattgacttatctgaaactaaatcagagttaaaaaaaactaaaattactaaaagattaaaattaattgagtcatttattatttcaaaaaataaacctgagtggatgataatgagagttttaccagttattccacctgagttaagacctcttgttccgctagacggcggtaggtttgccacatctgatttaaatgatctgtatagaagggttattaatagaaacaatcgtttgaagagattaattgatctaagagctcctgatataattataagaaatgaaaaaaggatgc

SEQ ID NO: 255677 - DNA, 936 bp, Unknown
  Bacterial polypeptide expressing nucleotide sequence isolated from the Sargasso Sea
attcctcctgaacttagacccttagtacctttagatggaggccgttttgcaacatccgatttaaacgatttatatagaagggttataaatagaaataatagacttaaaaggttaatggatctaaaggctcctgacattatcgtcaggaatgaaaaaagaatgttgcaggagtccgttgatgcactgtttgacaatggacgaagaggaagagtaataactggaacaggaaaaagaccattaaaatctcttgctgaaatgttaaaagggaaacaaggaaggtttagacaaaatttacttggtaaaagagtagattactcaggaagatcagtaattgttgtaggtccagacttaaaattgcatgaatgtggcttaccaaagaaaatggcattagagttatttaaaccatttttatatgcaaggttaaataaattaggattggcctcaactataaaacaagcaaaaaaattagttgaaagagaaagaactgaagtctgggacgcattagaattaattgtaagagaacacccagtaatattgaatagagcgcctactttgcatagattaggtgtgcaggcatttgaacctaaattaattgagggaaatgcaatagaactacatccattaacttgcgcagcatttaatgcagattttgatggtgaccaaatggctgttcacgtgccattaagtttagaagcacaattggaggccagagttttgatgatgtctactaataatattttaagcccgtcaaatgggaaaccaataattgtaccaagtcaagatatgatccttggaatttattatttatctcaacctccagttcaaacagaaaaaattgatggatattttgtaaacacttctgaaatagagcatgctttagaaacaggacaaatcaaagtacactcaagaatagtgtcaagatttgaaactttagat

SEQ ID NO: 255678 - DNA, 383 bp, Unknown
  Bacterial polypeptide expressing nucleotide sequence isolated from the Sargasso Sea
aatgacaaacagcaacctaaggacagaaaatcattttgattacgtcaaaatttcaatagcctctccaaaaagaataatggattggggacagagaactttgcccaatggacaagtagtgggtgaagttactaaacctgaaactattaattacagaacactgaaaccagaaatggatggattgttttgcgaaaaaatttttgggccatctaaagattgggaatgccattgtggtaagtataaaagagttaggcatcgtggcattgtttgtgagagatgtggagttgaagtaacggagagtagagttagaagacataggatgggctacataaaacttgctgcgccagtttctcatgtttggtatttgaaaggaattcctagttatg

SEQ ID NO: 255679 - DNA, 859 bp, Unknown
  Bacterial polypeptide expressing nucleotide sequence isolated from the Sargasso Sea
tttgataatgggcgaagaggaagagttataactggaacaggcaaaagacctctcaaatctctagctgaaatgttaaaaggaaaacaaggacgtttcagacaaaacttattaggtaaaagagtagattattctggaagatcagtaattgtagtaggaccagacttgaaattacatgagtgtgggctcccaaagaaaatggcattagaattattcaaaccttttctttatgcaagattaaataaattaggattggcttcaacaattaaacaagccaagaaattagtcgaaaaagaaagagatgaagtatgggatgcattagaaataatagtaagagaacatccagtgttattaaatagagctccaacattgcatagattaggtgttcaagcgtttgagcccaaacttatcgagggagatgcaattcagctccatccattaacatgtgcagcttttaacgcggattttgatggagaccaaatggcagttcatgtccctttaagtttagaagcacaattagaagcaagagtattaatgatgtctacaaataatattttaagtccatcaaatggtaaaccaattattgttccaagtcaggatatgatcttaggtatatattatttatctcaaccaccatatcaaacagaaaagaccgagggttattttgtaaatactgacgaaattctacaagcacttgaaaatggtagcatcaaaattcattcaagaataatttcaaggttcgaaacagttgatgaaaaaggtaataaaaaattagaaaaatatactagcactgcaggaaggttcttactagcaaacattattccaaaaaatataaataataaattttcattaattgatagac

SEQ ID NO: 255680 - DNA, 650 bp, Unknown
  Bacterial polypeptide expressing nucleotide sequence isolated from the Sargasso Sea
ttaaaaggtgtgtctcttcgcatggaagtagaaggacctaaacgccttacagtttcatccaaaggaccaggcgttgtcactgcaggtgatatcgaagaaaccgctggtattgaaattttgaataaagaccatgttatttgtcatctagatgatggagcagaccttaacatggagctgacagtcaacactggaaatggttatgttgctgctgaaaaaaataagcctgaagacgctccaatcggattaatcccaattgacgcaatatattcgccggtcaagaaagtgtcatatgacgtgcagcccacaagagaaggtcaagttcttgattatgacaagttgacaatgaatattgaaactgatggttctgtctcacctgatgacgctcttgcctttgctgcgagaattttacaagatcagctgtcgattttcgttaattttgacgaacctgaagcagcaaaccagagtgacgaggacgatggtttagagttcaatccgttacttcttaagaaggttgatgaactcgaattgtctgtgcgttctgcaaattgcctgaaaaatgacaacatcgtttacattggtgatttaattcaaaaaacggaagcagagatgttgagaacgccaaactttggccgaaagtcattgaatgaaat

SEQ ID NO: 255681 - DNA, 958 bp, Unknown
  Bacterial polypeptide expressing nucleotide sequence isolated from the Sargasso Sea
agaaatacctcaaactagatctgaagcaaagattaagaagattacaaaaaggttaaagcttttaaggtcatttaaagattctggaaataaacctgaatggatggttcttgaggtactgcctgtattgcctcctgatttaaggccccttgtacctttggagggaggaaggtttgccacttcagacttaaatgatttatatagaagagttattaatagaaataatagacttaaaagattattagacttaaacgctccagatattattactagaaatgagaaaaggatgcttcaggagtccgtagatgctctcttggacaatggaagaagaggtagggcggtaacaggaacaaacaagagacccctaaaatctttagcagacatgattaaaggaaagcagggaagatttagacaaaatctcttaggtaagagggttgattattctggaaggtcagtaattgtagtagggcctactctgaaacttcaccagtgtggcctaccaaaaaaaatggctttggaacttttcaagccttttgtttttggaagacttcaagatttagaaatggcaagtactattaagcttgcaaagaaaatggtagaaagagaagagccagaagtatgggatattcttgcagaagttattagagaacacccagttttacttaatagagctccgactcttcataggctaggtattcaagcttttgaaccagttttagttgaaggaaaggccattcaactccatcctttagtttgtaaagcgtataacgcagactttgatggagaccaaatggctgttcatgtgccacttactatagaggcccaattggaatgcagagctcttatgatggcaacaaataatattctctcgcctgctaatgggaagcctattattgatccatctcaagatgtagttttaggaatctattatatgactagagaaaagattaatgtaaaggcg

SEQ ID NO: 255682 - DNA, 907 bp, Unknown
  Bacterial polypeptide expressing nucleotide sequence isolated from the Sargasso Sea
aaagaaacgaaatctaaagtagccgaagaaagatcaacaaaaagattaaaattgattgaatcatttatagatacaggaaacaaacctgaatggatgatacttactgttatacctgttataccgccggaattaagacctttagtaccactcgacggaggtagatttgccacttctgatctcaatgatttgtatagaagagtaattaacagaaataatcgtttgaaaagattaatagatttaaaagctccagacattatcgttagaaatgaaaaaagaatgcttcaagaatctgtcgatgctttgtttgataatggaagaagaggtcgtgtaataactggaactggcaagagacctcttaaatctttagctgaaatgcttaaaggtaaacagggtagattcagacaaaacttattaggaaaaagagtagattattcaggaagatcggtaattgtagttggtccagatttaaagctacatgaatgtggattaccaaaaaaaatggctttagaattatttaagccttttttatacgcaagattaaataaattaggattggcatcaactattaaacaagcaaaaaaattagttgaaaaagagagagatgaagtttgggatgctcttgaaataattgttagagaacacccagtaattttaaacagagctccaacattacatagattaggagttcaagctttcgaaccaaaattaatagaaggtgatgcaatcgaactacaccctttaacttgtgctgcatttaatgcagattttgatggagatcaaatggccgtacacattcccttaagtttagaagctcagttggaggcaagagttttaatgatgtcgacaaataacattttaagcccatcaaatggaaagccaattatagtaccaagtcaagatatgatac

SEQ ID NO: 255683 - DNA, 832 bp, Unknown
  Bacterial polypeptide expressing nucleotide sequence isolated from the Sargasso Sea
tacaatagatggtgtattacatgaatttacttctataaaaggtgtacgagaggatgtgacagatattgttttaaatgttaagtctttagctttaaaaagtgattcagaaggtaccaaaaaattaattttggatgctaaaggtcctggagaaattaaagcatctgatattactcctgttgcagatgtagaaattcttaatccagatttagtaatttgtaatttggatgaaaaaacttcttttcatatggaaatgaatgttaatactggaaagggttacgtacctgcagaactaaataaacctgaagaaccaccattaggtcttattgcgattgattctttatatagtccagtaaaaaaagtttcatattcagtaagcacagctagagaaggtaaagcactagattatgataaattgacaatggaagtagaaacagatgggtctatttctgctgaagatgctgtagcctattctgctagaatttttcaagatcagcttaaaatgtttatcaattttgatgaacctgttgaagctcctgttaaagaggtttctaacgagccagagtttaataaaaacttgttaagaaaagtcgatgagctagagctatctgtcagatcaatgaattgtcttaaaaatgataatataatttatataggagatttagttcaaaaatctgagggagaaatgcttagaactccaaattttggtagaaaatcattaaatgagataaaagaagttctaactggtatgtctttatatttaggaatggaaattcctaactggccaccagacaatattgcagaaatgtctaaaaaattggaggaagcaatttaa

SEQ ID NO: 255684 - DNA, 685 bp, Unknown
  Bacterial polypeptide expressing nucleotide sequence isolated from the Sargasso Sea
tgcaaaaaaattaatacaaaaagctgatgatgaagtcatgcaagtacttcaggaagtaattgaaggtcaccctattcttttaaatagagcacctactcttcataggttaggaattcaagctttcgaaccaaaattagttggaggtagagcaatacaacttcatcctttagtttgtcctgcatttaatgctgactttgatggtgatcaaatggcagtacatgttcctttagctttagaggcacaaactgaagcacgcatgctcatgttggctagtaataacattctctctcctgctactggagaaccaattgttacgccatcacaggatatggttttgggatcgtattatctgactgcgctgcaacctaattatcaaaaacctgattttggtgataataagactacttttgcttcactagaagatgttatttttgcttttgaagataaaagaatcagcttacatcaatgggtatgggttagatttaatggagaagttgaagatgaagaagaaatgagaaacccaaaaaaaatagaagagctagaagatggctcaagattagaaatatggaatttaagaagagacagatttgactctcagaataatctaattagtagattcgttttgacaactgtcgggagagtagttatgaactataccatcattgattctgtatctacaacgtaa

SEQ ID NO: 255685 - DNA, 872 bp, Unknown
  Bacterial polypeptide expressing nucleotide sequence isolated from the Sargasso Sea
tcgattgaagcgacttcttgatttaaatgctccagatatcattacaagaaatgaaaaaagaatgttgcaggaatcagtcgacgcactattggataacggaagaagaggaagggctgtaaccggttccaataaaagacctttaaaatctcttgcagatatgatcaaaggtaaacaaggaaggttcagacaaaacctgcttggcaagagagtagattattcaggacgttcagtaatagtagtaggccctactcttaaattacatcaatgtggattgcctaagaaaatggctcttgagcttttcaagccatttgtttttggaaaacttcaacaattagaattagctaatacaatcaaacttgcaaaacgtatggtggacagagaggaacctgaagtttgggatattttagacgaagttatcagagaacatcctgtcatgcttaatcgtgcaccaactttgcatagattaggtattcaagcttttgaaccagtactagtggaaggtaaggctattcaacttcacccactagtttgtaaggcatataacgcagactttgacggagatcagatggctgtacatgttcctttaacgttggaagctcagcttgaatgtagagctttgatgatggctacaaacaatatactctcaccgtcaaatggtaagcctatcatcgatccttcacaagatgtagttctaggactctattatatgtctagagaaaagattaatgatctgggtgagggaagggtcatgtcttcaccggatgaggtaaatagagcttattattctggaaccgtcggtcttcaggcaaagatcaaggtaagattaaaacctaataaactagatgatgaaccttctcagatagtagaaacaa

SEQ ID NO: 255686 - DNA, 707 bp, Unknown
  Bacterial polypeptide expressing nucleotide sequence isolated from the Sargasso Sea
acaaatagtttattttaattgttatgttgttttagacccaggtgatcataaagaactcaaatacaagcaattgctcacagaagatgagtggcttgaaattgaagatgaaatttatgctgaagagtcaactattgaaaatgaaccttttgttggaattggtgctgaggccctgaagcaattacttgaggacctcgatttaaatcaagttgctgaggagcttagagaagagattactaatagcaaagggcaaaagagggcaaaacttataaaaaggataagagttattgataatttcatagcaactaatgcaaaaccagaatggatggtattagatgcaataccagttatacctcctgatctcagacctatggttcagcttgatggaggaagatttgcaacttcagatttaaacgatttatatagaagagttataaatagaaataatagattagctaggcttcaagaaattttagctcctgaaattatcgtaagaaatgaaaaaagaatgcttcaggaggctgtcgatgcccttatagataatggaaggagaggaaggactgttgttggagccaataacagagctcttaagtccctaagtgacataattgagggaaaacaaggaagatttagacagaatcttcttggaaagcgtgttgactattcaggaagatctgtaatagttgtgggtcctaaattaaaaatgcacc

SEQ ID NO: 255687 - DNA, 313 bp, Unknown
  Bacterial polypeptide expressing nucleotide sequence isolated from the Sargasso Sea
atgttaaaaacagaacgatcatttgattatgtaaaaataaacctcgcctcgccagaacgaattcgtagttggggggaaagaacccttccaaatggtgaaattgttggcgaggttacaaaaccagaaacgataaactatagaaccttaaaacctgaaatgggtgggcttttttgcgaacgtatttttggtcctgttaatgattgggaatgccattgtggaaaatacaaaagagttaggtataaaggcattatttgtgaaaaatgtggcgtggaagtaatcgaatcgaacgttcgacgccaccgtataggtttgt

SEQ ID NO: 255688 - DNA, 871 bp, Unknown
  Bacterial polypeptide expressing nucleotide sequence isolated from the Sargasso Sea
tcagatttaaatgatttatatagaagagttataaatagaaataatagactagctaggcttcaggaaattttagcccctgaaattatagtaagaaatgaaaaaagaatgcttcaggaggcagttgatgctcttatagataatggaagaagagggaggactgttgttggagcaaataatagagctcttaagtccctaagtgacataattgaaggaaaacaaggtagatttagacagaatcttcttggaaagcgtgttgactattcaggaagatctgtaatagttgtcggtcctaaattaaaaatgcatcagtgtggtctcccaaaagaaatggcaatagagctctttcagccttttgtaatccatagattgatacgacaaaatattgtgaataatattaaagccgcaaaaaaattaatacaaaaagctgatgacgaagttatgcaggtacttcaggaagttattgaaggtcatccaattctcttaaatagagcccctacgttacatcgtttaggaattcaagcttttgaaccgaaattagttggaggtagagcaatacaacttcatcctttagtttgtcctgcattcaatgctgactttgatggagatcaaatggcagttcatgttcctttggctttagaggcacaaactgaagcacgaatgcttatgttggcgagtaataatattctttctcctgctacaggggaaccaattgtgactccatcacaagatatggttttaggatcttattatctgacggctttgcaaccgaattatcaacaaccagaattcggagataataagactacttttgcttcattagaaaaggtcatttttgcctttgaagataaaaggctcagcctgcatgaatggg

SEQ ID NO: 255689 - DNA, 918 bp, Unknown
  Bacterial polypeptide expressing nucleotide sequence isolated from the Sargasso Sea
agtatcagagtcacagaattttagtagtattaagattacattagcgagtcctgaaaaaattaaatcatggacttatggagaaataaaaaaaccagaaacaattaattacagaacttttagacctgaaaaagatggtttattttgtgcaaggatttttggtccaataaaagattacgagtgtctatgtggaaagtataaaagaatgaagtttagaggaattatatgtgaaaaatgtggcgttgaagtaactaaatctaacgttcgaagagagagaatgggtcatataaatctagcgactcctgttgcacatatttggtttttaaaatcattgccaagtagaatttcacttgtaattgatatgaaacttaaagacgtagagaaagtactttattttgaaaattttattgtaattgagcctggtttaacaggattaaaaaagaaccaactattatctgaggaagaattaattaaatttcaagaccagtatggtgaggagtctttctcagcaggtattggtgctgaagcaatattagaaatattaaaatctatagatttaaaagatgagagagaaaaattatctaagtcaataaaagaaaccaaatctaaagttacagaagagagaaatgtaaaaagattgaaacttatagattcattcttggaaacaggaaataaacctgagtggatgatattaacaacaataccagttataccacctgagttaagaccattggtacctttagatggcgggagatttgcaacatcagatttaaatgatttatatagaagagtcatcaatagaaataatagacttaaaagattaatggatttaaaagcaccagatataataattagaaacgaaaaaagaatgttacaagagtctgtggatgctctttttgataatggtagaagaggaagagt

SEQ ID NO: 255690 - DNA, 622 bp, Unknown
  Bacterial polypeptide expressing nucleotide sequence isolated from the Sargasso Sea
atggaaacatcggtaatagatcttttagtcccaactgacattcaagttgatgacgctgagaacaatacatctaaaataactttagagccattagagagaggctttggccatactctaggaaatgctttaagaagaatactcttatcatctatgccaggttcagcaattactgatgtgacaatagatggcatctcgcatgagtactccacgattgaaggagtaagagaagatgtaatagatattttattaaatctaaaagacatgcctataaatcttattgaaggaaataatgcagtgatcaagctagacgtttctggtccatgtgaggtcacatcaaattcatttgaagttcctggtaatgttgaattgcctgatgcagaacatcatgttgcctctatagtagataaagtaagtctgtctcttacagctactgttaagactggaaggggttatgagcctgcagattccagaggtgaagaagaaactgcagttggagcattgaaagttgatgcgtcctttagcccagttagaagagtggcatattcagttgagaatgcaagatttgaaaaaagaactgatctagataaattaatagtagaattagaaacaaatggggactcta

SEQ ID NO: 255691 - DNA, 763 bp, Unknown
  Bacterial polypeptide expressing nucleotide sequence isolated from the Sargasso Sea
atgacaaatagcaacttaagaactgaaaatcactttgattacgtcaaaatttcaatagcctctcctcaaagaataatggaatggggacagagaactttacccaatggacaagtggtgggtgaagttacgaaacctgaaactattaattacaggacacttaaaccagaaatggatggattgttttgtgaaaagatttttgggccttctaaagattgggaatgccattgtggtaagtataaaagagttagacatcgaggcattgtttgtgagagatgcggggttgaagtaactgaaagtagagttagaagacataggatggggtacataaaacttgctgcgccagtttctcatgtttggtatttgaaaggaattcctagttatgttgcaattcttttggatattccactaagagatgtagaacaaatagtttattttaattgttatgttgttttagaccccggtgatcataaagaactcaaatataagcaattacttactgaggatgaatggctagaaattgaagatgaaatctatgctgaagattcaacaattgaaaatgaaccttttgttggtattggtgctgaggccctgaagcaattacttgaagaccttgatttaagtcaagttgctgaggagctcagagaagaaattacacaaagtaagggacagaaaagggcaaaacttattaaaaggataagagttattgataatttcatcgcaactaacgctaagcctgaatggatggtcttagatgctattccag

SEQ ID NO: 255692 - DNA, 577 bp, Unknown
  Bacterial polypeptide expressing nucleotide sequence isolated from the Sargasso Sea
atggaaaatattaatataatagataaaaattggaaatctctaacaaaaccaaaaaaattagaaatagaaagcagcgaagacaaatctattgcaactgttacagctgaacctttagaaaaaggttttggtcaaactataggtaattctcttagaagaattttgttatcttcaattcaaggtgctgcagttacagcaattcaaatagacggtgtattacatgaattttcttcaataaaaggtgttagggaagatgtaactgacattgttttgaatgttaaaaatttagcgctaaaattaaattcagatggaccaaaaaaattaattttagactcagttggcccaaaagaggttaaagcaaaagatattacacagattgcagacgtagaaatattaaatccagaacaaacaatttgtaatttagatgaaaaaactaaatttcatatggaattaattgtaaataatggaagaggctatgtgcttgcacaaaaaaataaatctgaggatacaccgctaggtatgattgcaatagactctctttttagtcctgtaaaaaaggtgtcatttaaaattagatagc

SEQ ID NO: 255693 - DNA, 414 bp, Unknown
  Bacterial polypeptide expressing nucleotide sequence isolated from the Sargasso Sea
aatggaaactgagaatgtaaatgtaaaaaattggaaatctttaattaaaccaactaaactagatgtcaagattagtgatgacctcacacacgcaactattgttgctgagccattggaaaaaggttatgggttaacattaggaaattctttaagaagaatacttttatcatcaataagaggtgctgctgttacttcaattcaaattgatggagttttacatgaatttacctctataaaaggtgttagagaggatgttacagatatagttttaaatgtaaaatctctagcattaaaatgttcatctgaaggtacaaaaaaattagttttagatgctaaaggacctggagaaatcaaagcatcaaatattacttctgttgcagacgttgaaatacttaatcctgatttagtaatatg

SEQ ID NO: 255694 - DNA, 914 bp, Unknown
  Bacterial polypeptide expressing nucleotide sequence isolated from the Sargasso Sea
cctgggaaagttagatattaacttaaatgatgataaatcatacgctaaaattgtagctgaaccacttgaaaaaggttatggtttaactttaggtaactcactaagaagaattttattgtcttcaattagaggtactgctgtgacagcaatccaaattgatggagtgcttcatgagtttacttctattaaaggtgtgagagaagatgtaactgatattgtgcttaatgttaaatctttagcattaaaaagtacttctgaaggatcaaaaaaactagtgcttgatgcaaaaggcccaggcgtaattaaagcatctgatataacaaaaattaatgaaatagaaattttaaatcctgatttagtaatttgtaatttagatgaaaatacaaatttccatatggagatgacagtaggtagtggaaagggttatgtgcctgctgaactaaataaaccagatgaacctccactaggtcttatacctatagactcactttttagtccagtaaaaaaagtatcatattccgtaagtaccgctcgggaaggtaaagctttagattatgacaaattaactatggaaatagaaactaatggttctatctcagcagaagatgcattagcttattcagctagaatttttcaagatcaattaggaatgtttgttaattttgacgaacctcaagaagttgttattactgaaaaaccaagtgaaccagagtttaacaaaaacttattaagaaaagttgatgaattagaactttctgtaaggtcaatgaactgtctaaaaaatgataatattatttatatcggagatttagttcaaaagtcagagggagaaatgctaagaacaccaaacttcggaagaaaatcgctaaatgagattaaggaggttttaaatggaatgtcactttatttaggca

SEQ ID NO: 255695 - DNA, 298 bp, Unknown
  Bacterial polypeptide expressing nucleotide sequence isolated from the Sargasso Sea
atgacaaacagcaacttaagaactgaaaatcactttgattacgtcaaaatttctatagcctctccacaaaggataatggattggggtcagagaacattacctaatggacaagtagttggtgaagttaccaaaccagaaactataaactacaggactcttaaaccagaaatggatggattgttttgtgaaaagatttttggcccatctaaagattgggaatgccattgtggaaagtacaaaagggtaagacatcgcggtattgtttgtgagagatgcggagttgaagtaactgagagta

SEQ ID NO: 255696 - DNA, 741 bp, Unknown
  Bacterial polypeptide expressing nucleotide sequence isolated from the Sargasso Sea
ttagtacctttagatggaggaaggtttgctacctcagatcttaatgatctctatagaagagtgataaatagaaataacagattaaagcggctgttagatctaaaagccccagaaattattgttagaaatgaaaaaagaatgttgcaggagtccgttgatgctttatttgataacggaagaagaggaagagtaattaccggtaccggaaaaagaccactaaaatctttagccgaaatgctaaaaggaaaacaaggtagatttagacaaaatttacttggaaaaagagtcgattactcaggaagatccgttatcgttgttggtccagaattaaaattgcaccaatgtggattgccaaaaaaaatggctttagaactttttaaaccttttttatacgctagacttgctaaacttggtttagcaacaacaatcaagcaagcaaaaagaatggttgaaaagcaaagaagtgaagtatgggactctttagaatatattatccgagaacatcctatattattaaatagagcaccaactttacacagattaggcgtccaagcatttgaggcaaaactaatcgaaggaaatgcgattgaattacaccctttagtttgtgcagcattcaatgcagattttgatggcgaccaaatggctgtgcatataccattaagtttagaagctcaacttgaagcaagagtacttatgatgtccacaaacaatatattaagcccatcaaacggaaaacca

SEQ ID NO: 255697 - DNA, 844 bp, Unknown
  Bacterial polypeptide expressing nucleotide sequence isolated from the Sargasso Sea
attcctcccgagcttcgcccgctagttccgcttgaaggtggtaggttcgctgcttcggatttgaatgatttatacaggcgaatcattattagaaacaatcgcttaaagcagttaatggaaatcaaggcacctgatgtaatcctaagaaacgaaaaaagaatgctccaggaggctgttgatgcgcttttcgataataatagacgcaagactgctataaggagtggctcacgtagaccattaaagtcattatccgatatgcttagaggtaaaactgggcgttttagacaaaatctacttggtaaacgggttgattattctggtcgttcagttattgttgttgggcctcaattgcaattgcatgagtgcggtatgcctaaaaatatggcactagaattattcaaaccgcatatgattcatgagctcatggccaggggatatacacagacacctagaagtgcaaaattaatggtagaaaatagagagcctgttgtatataaggttcttgaatatgttgtgcaagaccacccagtattgttgaatcgagctcctactctacataggttgggtattcaagcttttcaacctgtccttgtcgatggaaaagcaatacagcttcaccccctagtttgtgctgcattcaatgctgattttgacggtgaccagatggcagtccatgttccattggcattagaggctcaaatggaagccagaatgttaatgctttcaagtcataatattcttcatcctgcaaatggacaacctatcgcagttccatctcaagatatggttttaggatgttattatctcactaggccaaaaataggagataagggggaaggtaaaa

SEQ ID NO: 255698 - DNA, 982 bp, Unknown
  Bacterial polypeptide expressing nucleotide sequence isolated from the Sargasso Sea
gatgaacaaagaaatcacaaacccatttaacccaaatccacagattagatcctttgatcaaataaagatttcactggcatcaccagaaaagatagttagttggtcttttggtgagattcggaagccagagacaattaattatcgaacctttaagcctgaacgggacggtttattttgcgcaagaatttttggtccaataaaagactatgagtgtctatgcggaaaatacaaacggatgaaatacagaggtgtgacctgtgaaaagtgtggtgttgaggttacacttcagaaggttcgtagagaaagaatgggtcatatcgatttagcttcccctgttgcgcacatatggtttctgaaatcactaccatcccgtattggtttaatgctggatatgaccctcagggacctagagagagttttatattttgagcagtatattgttattgagcctggcttaaccgatctaaaacatggccaaatgttgactgaagaagagtttgtggactttcaggaccaatttggttcagactcctttactgcgggtataggtgctgaggcaataagagaaatgctatcttcaataaatcttgagaccgaagctgaaaaattgagagctgagttggttgaagcgacgggcgagttaaagccaaaaaaaattatcaagcgacttaagttggttgaaaattttattgagggtggtaatcggccggagtggatgattttaacggtcataccagttatacctcctgagcttaggcctctagtgccattagatgggggacgttttgcaacttcagatttaaacgatctatataggagagttataaatagaaataaccgcttaaaacgtcttatagaacttagagctcccgatataatcattcgcaatgagaaaagaatgctccaggagtctgttgacgctttatttgacaatggaagaaggggtagggtaattactggtggaaataaaagacccctaaaa

SEQ ID NO: 255699 - DNA, 880 bp, Unknown
  Bacterial polypeptide expressing nucleotide sequence isolated from the Sargasso Sea
tggggagacgagtttgaagcaggaatgggagctgaatctatccaaactcttttaaaagaattggatttagaggctgcaatcagagatatccaagaagaaatgcctcttactaagtcagaagcaaaactaaaaaaatatgccaaaagattgaaattgctcaagtcatttaacgagtcaggaaatagacctgaatggatggtgcttgaagttttaccaatattgcctccagacttaagaccccttgttcctcttgaaggtggaagatttgctacttcagatttaaatgacttatatagaagagtaataaatagaaacaataggcttaaaagattattagatcttaatgcaccggacatcattactcgtaatgaaaaaaggatgttacaggaatcagttgatgcccttttagataatggcagaagaggaagggctgtgacaggttcaaataagcgacctctcaagtctcttgcagatatgataaaaggtaagcaaggtcgatttaggcaaaatcttcttggtaagagggtggattactcaggacgttcagtcatagttgtcggaccaactcttaaattacatcaatgtggacttcctaaaaaaatggctttggaattattcaagccatttgttttcggtagacttcagcaactcgaattagctaatactataaaacttgcaaagaggatggttgatagagaagaacctgaagtttgggatatccttgatgaggtaattagagagcatcctgtcatgctaaaccgtgcaccaacactgcatagattaggtattcaggcattcgagcctgttttggttgaaggcaaggctattcaattacatcctttagtttgtaaggcttacaacgcagactttgatgagatca

SEQ ID NO: 255700 - DNA, 772 bp, Unknown
  Bacterial polypeptide expressing nucleotide sequence isolated from the Sargasso Sea
aataatagactaaagaggctaattgatcttagagctcctgatataataataagaaatgaaaaaaggatgcttcaagaatcagttgatgctttgtttgataatggaagaagaggaagagtaataacatctactaataaaagacctctgaaatctctatcagatatgttaaaaggcaaacaaggacgttttagacaaaatcttttaggaaaaagagttgattactctggtagatcagtaattgtagttggtccaaatcttaaacttcatcaatgtggtataccaaaaaaaatggctcttgagttgtttaaaccttttatttttcataaattagatatctatggttgggctaatactatcaaggctgcaaaaaaactagttgaaaaagaagatccaagggtatgggatatccttgaagaggtaattagagagcatccagtattgctgaatagagctccaacacttcatagattaggtattcaggcatttgaaccaatattaattgaaggaaaatcaattcaattacatccactcgtttgtacagcattcaacgctgactttgatggagatcagatggcagttcatgttcctttaagtctagagtctcaactagaagctcgtgtattaatgatgagtacgaataatattttatccccttctagcggcaaaccaataatagttccatcacaagatatagttttaggaatctattacttgtcaataatcagaacaaatcaaaaaggtcaaggacgttattttgtagatttaaatgaaa

SEQ ID NO: 255701 - DNA, 797 bp, Unknown
  Bacterial polypeptide expressing nucleotide sequence isolated from the Sargasso Sea
aaactagtagactcatttattgcaacaggtaacaaacctgaatggatgatacttactgtagttcccgttattccacctgaattaagaccactagttcctttagatggaggtagatttgctacttcagatttaaacgatttgtatagaagagtaatcaatagaaataatagattaaaaagattaatggatttgaaagctcctgatataattatcaggaatgaaaaaagaatgctccaagagtcggttgatgcactatttgataatgggagaagaggaagagtaataactggaactggaaaaagacctttaaaatctcttgcagaaatgctgaagggaaaacaaggaagatttagacaaaatttacttggtaaaagagtggattattctggcagatcagtaattgtagttgggccagatttaaaattacatgaatgtggtttgccaaaaaaaatggctttagagttatttaaaccttttctttatgctagattgaataaattaggtttagcctcaacaattaaacaagctaaaaaaatagtagaaaaagaacgtaatgaagtatgggatgctttagaagtgatagttagagaacatccgatacttttaaatagagctccaacacttcatagattaggagtccaagcttttgaaccaaaattaattgaaggagatgctatagaattacacccactcgtttgtgcggcattcaatgctgattttgatggcgatcaaatggcagtacacataccgttaagtttagaagcacaactggaagcaagggttttaatgatgtcaac

SEQ ID NO: 255702 - DNA, 924 bp, Unknown
  Bacterial polypeptide expressing nucleotide sequence isolated from the Sargasso Sea
aaaattattgctgaaccacttgaaaagggttatgggctaactttaggtaattcactaagaagaattttactttcttctataagaggaacagctgttaaatctattcaaatcgacggtgtcttgcacgaatttacttcaataaagggtgttagggaagatgttactgatattgttttaaatgtaaaagaattggcattaaaaagtagttctgaaggagataaaaaactaattttagatgctaaaggtcctggagaaattaaagcctctaacattttacctgttgcagatatagaaatattgaatccagatttagtaatttgcaacctagatgaaaatactaattttcatatggaaatgaacgtaggttcaggaaaaggttatatatctgctgatatgaataaacctgaggaacctccattaggattaatacctatagactcattgtttagtcctgtaaaaaaagtatcttattcagtcagtacagctagagaaggaaaagctttagattatgataaattaactatggaagttcaaacaaatggatcaatttctgctgaagatgccgtggcatattctgcaagaatatttcaagatcaattgggaatgtttgttaattttgatgaaccacaagaagttataattagagataaaccaacagaacctgaattcaataaaaatttattgagaaaggttgatgaattagaactttcagtaagatcaatgaattgtttaaaaaatgataatattatttatataggagatttggttcaaaaatcagaaggagaaatgcttagaacaccaaattttggaagaaaatctttaaatgaaataaaggaagtgttaacaggaatgtcattgtatttaggaatggaaataccaaactggccaccagaaaatattgctgaattgtcaaaaaaacttgaa

SEQ ID NO: 255703 - DNA, 909 bp, Unknown
  Bacterial polypeptide expressing nucleotide sequence isolated from the Sargasso Sea
aattgaacttctatcaagaattgatttagaagaattatcatatgaactaagacataaagcaaataacgaaacttcaaagcaaagaaaaacagaagcacttaaaaggcttcaagttgttgaatccttcagagaagctaatcagagaaaggaaaaccttcctgaatggatgattgtaaaagttatccctgttattccgcctgaattaaggccacttgtccctcttgatggaggaaggtttgcaacttcagatctaaatgatctatatagaagggttatcattagaaataatagattgaaaagactagtagaaattaaagcacctgaggtaatacttagaaatgaaaaaagaatgcttcaagaatcagttgattcattgtttgataatacaagaaagtcttctgcagttaaaacagaatcaaataggccattaaaatcattatctgattcattgaaaggaaagcaagggagatttagacaaaacttattaggtaaaagggtagattattctgctaggtcagtaattgttgtaggacctgaattaaagttgtatgaatgcggacttcctaaagatatggcagcagaactatataaaccttttataattagaaaacttattgaaaggggtatcgtaaagactgtaaagtctgccaaaaaaattattgacagaagagagcctattgtatgggatatacttgaaaatgttcttaagggtcacccagttcttcttaatagagctccaactcttcatagacttggaatacaggcatttcaacctaaattaatagaaggaaaagctattcaacttcacccattaacttgtaccgcatttaatgcagatttcgatggagaccaaatggctgttcatcttcctttaggtcctgaagcaatacttgagtcacaattattaat

SEQ ID NO: 255704 - DNA, 394 bp, Unknown
  Bacterial polypeptide expressing nucleotide sequence isolated from the Sargasso Sea
aatggaagtcgaaaatgttaatgtaaaaaattggaaatctttaatcaagccatctaaattagatgttcaaataagtgatgacttaacacatgcaaaaattatagcagagcctttagaaaaaggttatggattaactttaggaaattctttaagaagaattcttttatcatcaataagaggcgctgctgttacatctattcaaattgatggagttttacatgagtttacttcaataaaaggtgttagagaagatgttactgatattgtattaaacgttaaatctttagcattaaaaagtgattcagagggtacaaaaaaattaattttagatgcaaaaggacctggagaaattaaagcctcagatataaccccagtgcagacgtcgaaatattaa

SEQ ID NO: 255705 - DNA, 870 bp, Unknown
  Bacterial polypeptide expressing nucleotide sequence isolated from the Sargasso Sea
aatgcaaactacaaataacgtgatagacaaaaattggaaagcactaataaaaccgaacaaactagatatcacaagcaatgatgacaaaacaatcgcaaaagttattgcggagcctcttgaaaaaggttttgggcaaactatcggtaactcattaagaagaatactactttcatctattcaaggtgcagcagtgacagcaatacaaattgatggagttttacatgaattttcatctataaaaggtgttagagaagacgttactgatatagttttaaatgtaaagaatttagcaatcaaatcttcatcctctagtccaaaaaaaatagtattagatattaaagggccaaaagaagtaaaagctaaagatataacgctagttcctgaaattgaaatattaaatccaaatcaaattatttgtaatttagacgataacactcattttcatatggaattaatggtaagtaccggtaaaggttatgtgcaagcaccaaaaaataaatctgaggatagtcctcttggactaatttctattgactcattatttagtccagtaaaaaaagtttcattttcagttgagaataccagagcaggaagtgcactagattacgataaattaataatgaatgttgaaactaatggaacagttgatgctgaagatgccatcgcttattctgctaggatttttcaagaccaactatcgatgtttgtgaattttgacgaccctcaagaaatcattaaagaagtaaaatcaactgagcctgaatttaatagaaatcttttaaaacgtgttgaagaactagaattatctgtaagatctatgaactgtttaaaaaatgacaatataatttacattggtgatttagtacagaa

SEQ ID NO: 255706 - DNA, 885 bp, Unknown
  Bacterial polypeptide expressing nucleotide sequence isolated from the Sargasso Sea
aaattacattggcaagtcctgacaagataaaatcctggtcttttggtgaaataaaaaagccagagacaatcaattatagaacttttaggcctgaaaaagatggattattctgttcaagaatatttggtccagtaaaagattatgaatgtttatgtggaaaatacaaaagaatgaagtttagaggaataatttgtgagaaatgtggagttgaggttactaagtcgaatgttagaagagaaagaatgggccatatcgatttagcttgtcctgtcgcacacatttggtttttaaaatcattacctagtagaatttctttagcaatagatatgaaacttaaagaggtagaaaaagttctctattttgaaagttttatagttgtggaaccaggtttgacgaaattaaaaaaaggtcaacttttaaccgaggaggaacttacaaaagctcaagacgagtttggtgaagacgcttttacagctggtattggggcggaagcagtgagagaaattcttttatctctagacttaaaaaaagagcaagaaaaattaagagagtcattaaaagaaattaaatcaaaagttactgaagagagaacaatcaaaagattaaagttgatagagtcttttattaattcaggaaacaaaccagaatggatgattttgacttctattccagttataccaccagaattaagaccattagttccattggatggaggaaggtttgcaacttcagacttgaacgacctatatagaagagtaataaacagaaataacagattaaaaagacttttagaccttaaagctccagacataatagttagaaatgaaaaaagaatgctacaagagtctgttgatgctttatttgataatggtagaaggaggtaga

SEQ ID NO: 255707 - DNA, 931 bp, Unknown
  Bacterial polypeptide expressing nucleotide sequence isolated from the Sargasso Sea
atggatgatataacttcagtgcctgtaattccacccgagcttagacctttagttccactagacggaggaaggtttgctacatcagatttaaatgatttatatagacgagttataaatagaaataatcgtttaaaaagattattagatttaaaagctccagatattatcgttaggaatgagaaaagaatgctacaagagtctgtagacgctctttttgacaacggcagaagaggaagagtgataactggtacaggcaagagaccattaaaatctttagcggaaatgttaaaagggaaacaaggaagatttagacaaaatctacttggaaaaagagttgactattctggaagatcagtaattgtagttggcccagaacttaagctacatcaatgtggtttaccaaaaaaaatggctttagaattattcaaaccatttttatatgcaagattagataagctgggtttagctactacaattaaacaagctaaaagactagttgagaaagagaaaagtgaagtctgggactctttagaacaaataattagagagcacccaattctattaaatagggcgccaacactacatagacttggtgtgcaggcatttgaggcaaaattaattgagggaaatgctatagaattacatccgcttgtttgtgcagcttttaacgctgattttgacggtgaccagatggcagttcatatacctcttagtttagaagcgcaactagaagctagagtattaatgatgtctacaaacaatattttaagtccatctaatggtaagcctatcattgttccaagtcaggacattgttttaggtatatattatttatctcaagaagaagaggatgagaaaaaaaaaccgaaaggaatattttctggggttgaagaaatagagcaagcactagaaaacaaatctataagttaca

SEQ ID NO: 255708 - DNA, 895 bp, Unknown
  Bacterial polypeptide expressing nucleotide sequence isolated from the Sargasso Sea
acatcagtaatcgatttattagtacctactgaaatacaagttgatgatgtatcaccaactctatcaaaagtaaccttagaaccacttgagaggggttttggccatactttaggtaatgctctcagaaggattcttttatcttcaatgcctggagcagctgtgacagacgttgctattgatggtatttcacatgaatacagcaccattgaaggtattagagaagatgtaatagatattcttttaaatattaaagatatgcctattaatttaattgaaggagatactgctgaagttactcttgatgtgaccggtccatgtgatgttcttgcttcttcttttgatgctcctggaaatgttgaattagttgaccaagactttcacgtagctactattgtagacaagattagtttaaaaatgactctaactgtaaaaactggacgaggatatgagccagctgatttgagagatgatgaagacagggttgtaggtgctctaaaagtagatgcctcatatagtcctgtaagaagggtatcttatactgttgataatgctagatttggcaaaagaactgacttagataaactagtcgttgaattagaaacggacggaacgcttgatccaaaaatggctatcgagcattcagcaacaattctccaacagcaattaagtgcatttgttgatttggatgctattgcagaacaagaagccaagaaagatcaaaatgattttgatccaatccttcttagatcaattgaagaacttgagctcactgttagatctacaaattgtttgaaagcagaaagcatatttttaattggtgatcttattcacagatcagaatttgatttgcttaagactccaaatttaggaaagaaatcattaaatgagatcaaag

SEQ ID NO: 255709 - DNA, 859 bp, Unknown
  Bacterial polypeptide expressing nucleotide sequence isolated from the Sargasso Sea
tccaaatttaaaactacatcaatgtggattccaaaaaaaatggctctagaattatttaaaccttttatttttcacaaattggatatttatggttgggcaaatacaataaaagcagcaaaaaaattagttgaaaaagaagatcctcgcgtttgggatatattagaggaggttattagagaacatccagtattattaaacagggctccaacactacataggttgggtattcaggcttttgaacctatgttaattgagggaaaatcaatacaattacacccacttgtttgcactgcatttaatgcagatttcgatggtgatcaaatggccgttcacgtaccacttagtcttgaagcacaacttgaagccagagtattaatgatgagtacaaataatatattgtctccatcaagtggaaaaccaataattgttccatcgcaagatattgttttaggcatatattatttgtctattgagagagataaccaaaaaggtcaaggtagatattttattgatctaaatgaaattctaaaagctttagagaacaaagatatcacacttcataccaaaataatttccagagttaaaaactttgatggcagtttttcaaaagtagaaactacacctgggagaatgatacttggagataaattacctataagcaatcaaattaaatttgatatggtaaataaaattcttactaaaaaagaagttagtaatattatagatacagtttatagattctgtggccaaaaagagacagttatatttgctgataattttatgcaaattggattcaaatatgcggcagttgcaggtatttcttttggaaaagatgatttaattattccaccaagataag

SEQ ID NO: 255710 - DNA, 830 bp, Unknown
  Bacterial polypeptide expressing nucleotide sequence isolated from the Sargasso Sea
catgatccataaaaactgggccgaatttttaaaacccgcacaactagaagtaaaacaggcaaatgaccctactcgtcagggtactgtaatcgctgagcctcttgaacgaggtttcggtttaacaattggcaacgcacttaggcgagtacttatgagtagtctccagggtgctgctataaccagtgtgcaaattgataacgttttacatgaattttcatcagtggctggggtcagagaggacgtgacagatattgttctcaacttaaaaggcgtttcacttagcatggaagttgaaggaccgaagcgacttactgtttcatcaaagggtcctggcgtcgtaacagcaggtaatattgaagaaactgctggtattgaaattttgaataaagaccacgtgatttgtcatttagacgatggggctgacttgaacatggagctaaccgtaaatactggaaatggctatgttgcagcagaaaaaaataagcctgaagatgcgccaatagggttgatccccattgatgcaatttattctccggtcaaaaaggtatcatacgacgttcaacctactagagaaggtcaagttctagactatgataaattgactatgaatatcgaaactgatggctcagtttcgcctgatgatgcgctcgcattcgcggctaggatactgcaggatcaactgtcgatctttgtgaattttgacgaaccggaagctgcaaatcaaaatgatgaagacgatgggttggagttcaatccactactacttaagaaggtagatgaacttgaactgtcagttcgatctgcaaactgtcttaaaaatgataacatcg

SEQ ID NO: 255711 - DNA, 599 bp, Unknown
  Bacterial polypeptide expressing nucleotide sequence isolated from the Sargasso Sea
aatgaattttaaacatgattttgactatataaaaattaatttagcttcaccaaaaaggataaaagagtggggagaaagaactctccccaatggacaaatagtaggagaagtaactaaatcagagaccataaattacagaacctttaaaccagaaatggatggtctattttgtgaaaaaatcttcggtcctgtaaaaaattgggaatgctactgcggaaaatacaaacgtgtagaaccaaatgaagtattaatctgtgagcgttgtggtgtcgaggttaccgaatctcgagttcgtagacatcgaatgggatacattgatttagtttcaccagtaacacacgtttggtacctaaaaggtattcctagttatctaagtctactcttaaaacgacgcctaagaatacttgaagaaataatctattttaaccaatacttagtttttaataacgaaccatttcaaaatgtagaaaataatatagacaataatttaaactttgaggattacttgtattcctcagatgatgataattatatctttgaagatacccgagcaaaaattggggctgaagctattaaatatttactagaaaaactagatc

SEQ ID NO: 255712 - DNA, 747 bp, Unknown
  Bacterial polypeptide expressing nucleotide sequence isolated from the Sargasso Sea
gagccattagaaaaaggatatggtttaactttaggaaattcaataagaagaatacttctttcatctattagaggtgcagctgttacttcaatacaaattgatggtgtactgcatgaatttacttcgattaaaggtgttagagaagatgttactgatatagttttaaatgtaaaatctcttgctctcaaaagttcgtctgatgaaaataaaaaacttattttagatgccaaaggtcctggagaaataaaagcatccaatattactccagttcaggatattgaaatacttaatccagatttagtgatttgtaatttagatgaaaatactaattttcatatggaaatgatggttggtaatggtaaaggttatgtttcagctgaaatgaacaagccagaggaacctcctttaggtttaattcctattgactcattatttagtccagttaaaaaagtttcttattcagtaagtacagcgagagagggaaaagcattagattatgataaattaactatggaagtagaaactaatggatcaatttctgcagaagatgctgtggcttactcagctagaatctttcaggatcaattatctatgtttgtaaattttgatgaacctcaagaagttctagtaagagaaaaaccaactgaacctgaatttaatagaaatttattgagaaaagttgatgaactagaactttcagtaagatctatgaattgtctaaaaaatgataatataatttatattgga

SEQ ID NO: 255713 - DNA, 685 bp, Unknown
  Bacterial polypeptide expressing nucleotide sequence isolated from the Sargasso Sea
ctcttttgtgcaaaaatattcggtccagttaaggattatgaatgtatgtgtggaaaatataaaaggatgaaacatagaggtgttgtctgtgaaaaatgtggagttgaagtaactcttgcaaaggttagaagagaaaggatgggacatattgaattggcagctcctgttgcacacatatggttcttaaaatcattaccttcgagaattggacttttattgaatgttactttgagagaaatagaaagagtgctatattttgaaagttatatagttactgatccagggctcactgaactagaaaaaggtcaaatccttactgaagaagaatgggtagaaaagtatgaagaatttggagatgagtttactgcaggaatgggtgctgaagctgtccagattttacttcaagagctcgatatagaagatgaaattaggattataagagaagaaatacctcaaactaattttgaaacaaaacttaaaaaactttctaaaagattaaaattattagaggcatttaataaatctggcaataaacctgaatggatggttatgaatgttttgccagtcttacccccagatttaaggcctttagtacctatagagggtggcagattcgcaacttcagatttaaatgatttatatagaagagtaattaataggaacaatagattaaaaagactattag

SEQ ID NO: 255714 - DNA, 553 bp, Unknown
  Bacterial polypeptide expressing nucleotide sequence isolated from the Sargasso Sea
atggaagtagaaaacgttaatgttaaaaattggaaatctttgattaaaccatctaaattagatgttcaaattagtgacgacttaactcatgctaagattatagctgaacctttagaaaagggttacggattaactcttggaaactctttacgaagaattttactttcttcaattagaggagctgcagttacttcaattcaaatagatggtgttctacacgaatttacgtcaattaaaggtgtaagagaggacgtaacagatattgtattaaatgtaaaatcattagccttaaaatgtaattctgaaggtacaaaaaaattagttttagatgcaaaaggcccgggtgaaataaaagcttcggacattgcttcagtgacagatgtagaaatattaaatccagacttagtaatatgtaacttagatgaaaatacaacttttcacatggaaatgaatgtaaatactggaaaaggttatgttccagctgagctaaacaaaccagaggagccaccattaggtttaattgctattgactctttgtacagccctgtaaaaa

SEQ ID NO: 255715 - DNA, 355 bp, Unknown
  Bacterial polypeptide expressing nucleotide sequence isolated from the Sargasso Sea
aatggaaactgaaaatgtaaatattaaaaattggaaatccttaattaaaccatcaaagatagatgttcagatgagtgatgacttgtctcgagctaagatagtggctgagcctcttgaaaaaggttatggtttaacattaggaaattcattaagaagaatcttattatcatcaataagaggggctgccgtaacatctatacaaatagatggtgtattgcatgaatttacatctatcaaaggtgtgagagaagatgttacagatatagtactaaatgttaaatcattagcattaaaatcatcttctgaaggtacaaaaaaacttattttggatgcaaaaggaccaggagaaattaaa

SEQ ID NO: 255716 - DNA, 970 bp, Unknown
  Bacterial polypeptide expressing nucleotide sequence isolated from the Sargasso Sea
atgagtaaagaattatcagatttatttaagtcatcagaaatatctgaggctcaaaattttaacagcataaaaataactttagcaagtcctgaaaaaattaaatcatggacgtttggagagataaaaaaacctgaaacaattaattatagaacctttagacctgaaaaagatggattattttgtgcaagaatatttggaccaatcaaagactacgagtgtttgtgtggaaaatataagagaatgaaatttagaggtattatatgtgaaaaatgtggtgttgaggtaacaaaatcaaatgttcgaagagagagaatgggacatataaacttagccactccagtagcgcatatttggtttttaaaatcattaccaagtagaatttctctcgcaattgacatgaaactcaaagaagttgagcgagttttgtattttgaaaactttatagttatagagcctggtcttacaggattaaaaaaaaatcagttattaggtgaagaagagttaataaaatatcaagatgattacggtgaggaggccttcacagcaggaattggagcagaagcaatattagaaatcttaaaatcaattaatttaaaggaagaaagagaagctttaattaaaagtataaaagagacaaaatctaaagtttctgaagaaagatctattaaaagactgaaactaatagagtcttttattgaaactggaaacaaaccagagtggatgatattaacaactgtaccagttattcctccagaactgagacctctggttcctctagatggaggtcgatttgctacatcagacttaaatgatctttatagaagggtaattaataggaataatagattaaagagactgatagatcttaaagctccagatataatagttagaaatgaaaaaagaatgttgcaggagtctgtggacgcacttttcgataatggaagaagagggagagtaattacaggaacag

SEQ ID NO: 255717 - DNA, 450 bp, Unknown
  Bacterial polypeptide expressing nucleotide sequence isolated from the Sargasso Sea
aatgcaatcaactacaaatattattgataaaaattggaaagcacttataaaaccaaataaacttgaaattaatagcaatgaagacagaacaattgcaaaagttgttgctgaacctctagaaaaaggttttggtcaaactattggcaattcattaagaagaatacttctttcatcaattcaaggagcagctgtcactgcaatacaaatagacggggtattacatgaattttcttcaattaaaggtgtaagagaagacgtaaccgatatagttcttaatgttaaaaatttagcaattaaatcctcatcttcaaatccaaaaaaaattatcctagatattaaaggaccaaaagaagtgaaagccaaagatattactttagtgcctgaaattgagatactaaatccagaacaaacaatttgtaacttagatgaaaaaactaactttcatatgga

SEQ ID NO: 255718 - DNA, 906 bp, Unknown
  Bacterial polypeptide expressing nucleotide sequence isolated from the Sargasso Sea
gaagtaattagagagcatccagttttattaaatagggcgcctactttacatagacttggaatacaggcatttgaaccaatactcatcgaaggaaagtccattcagcttcatccattagtttgcactgcatttaatgctgattttgatggagatcagatggctgttcatgtccctttaagtttagaatctcaattagaggcgagagtacttatgatgagtactaataatattttatctccttcaagtggcaagccaataattgttccttcgcaggatatagttttgggtatttactatctctcaattcttagaaaaaatcaaataggtgaaggaagaagctttttagatttaaatgaaattatgaaagcactcgaaaacaaagatattactttgcattctcaaataattgctagagtaaaaaattttgagggtaatcttagcacaatagaaactactgctggacgtatgatacttggagatattttacctaataatgaaaatataaaattcgatatgttaaataaagttttaacaaaaaaagaagtaagtaatataattgatacagtttatcgattttgtggacaaaaagaaactgttctttttgcagatagaataatgggtataggttttagatatgccgctatggcaggaatatcttttggcaaagatgatttaatcatacctgaagataaaaattctttacttgaaaaaacccaaagtaaagttcaagaatatgaaaatcaataccaagatggattaataactcaaggagaaaaatataataaagttgttgatgcatggtccgattgtacaaatcaagttgctgccaaaatgttggaaacgatatcaaatccagaagatgacaaacctgttaactctgtttatatgatggctcattctggcgct

SEQ ID NO: 255719 - DNA, 883 bp, Unknown
  Bacterial polypeptide expressing nucleotide sequence isolated from the Sargasso Sea
agacaaaatttattaggtaaaagagtagattattcaggaaggtctgtaattgtagtcgggcctgagctaaagttgcatcaatgtggtttacccaaaaaattagcacttgagctttttaaaccttttatttattcaaggcttgaatcattaggaatttcatcaacagtcaaacaagctaaaagaatggtcgaaaaacaaaccaccgaggtctgggatattttagaagaagtcattagggagcacccagttttactaaatcgtgctccaactctccacagacttggaattcaagctttcgaacctgttcttatcgagggcaaagcaatacaattacatccacttgtctgtgccgcttttaatgctgattttgatggagatcagatggctgtacatgtgcctttatcattggaagcgcaacttgaagcaagagttttaatgatgtccacaaataatatcttacatcctgcaaatggagatccaattattgttcctagtcaagatattattttaggcttgtactatctatctcaaatgaaacaaaatgagccaggagaaggaagacattttgatgatgtgaacgagattgattttgcgttagaaaataaagatataacccttcattcaaagataagttttagattcaatacagatgatggctatgaaaaattcgatacaactccgggtagaatattaatttctaaagaattacctaaaaatgaaaatatttctttcgaaattgttaataagcttttaacaaaaaaagaaatttctaggatgatagatgacgtttatagacattgtggccagaaagaaactgttattttttgtgatcatattatgaaattaggctttaaacatgcgtgtaacgccggcatctcttttg

SEQ ID NO: 255720 - DNA, 877 bp, Unknown
  Bacterial polypeptide expressing nucleotide sequence isolated from the Sargasso Sea
ttgtgcggtaaatacaaacggatgaaatttagaggaataatatgcgaaaaatgcggcgtagaggttactaaatcaaatgtaagaagagatagaatgggacatattgagcttgcttgtccagttgctcatatttggtttttaaagtcattacctagcagaatatcctcagctatagacatgaaactaaaagatgtggaaaaagttttatattttgaaagttttatggtggtagaaccaggtcttactaaacttaaaaaaaatcaacttctttcagaagaggaactaataaaagctcaagaagaatatggtgaagattcatttgaagcaggtattggcgctgaaacaattagaaaaattttactaaatttagatcttaaagccgaaagagacaaattaagatctatattaaaagaagttaaatcaaaagttgccgaagaaagaactataaaaagattaaaattaatagagtcttttataagttcaggaaacaaacctgaatggatgattttaacaagcatccctgttattccacctgaattacgacctcttgttcctcttgatggtggaagatttgctacatcggatttaaatgatctatacagaagagtaataaatagaaataatagattaaaaagattaatagatttaaaagctccggatataatagtaagaaatgaaaaaagaatgttacaagaatctgttgacgctttgtttgataacggtaggagaggtagagttataaccggtacaggtaaacgcccacttaaatctcttgcagaaatgttaaaaggtaaacaaggaagatttagacagaatttattaggaaaaagagtagattactcaggaagatctgtaatagtagctggccccgaactaa

SEQ ID NO: 255721 - DNA, 776 bp, Unknown
  Bacterial polypeptide expressing nucleotide sequence isolated from the Sargasso Sea
accaactttacacagacttggtattcaagcttttgaaccaattttaattgaaggtaaatcaatccaattacatccattggtgtgtacagcttttaatgctgactttgatggtgaccaaatggcagttcatgttccgttaagtctggaagctcagcttgaagcaagagtactgatgatgagtacaaataatattttacacccagcaagtggcaaaccaattattgttccctctcaagatattattttaggaatttattatttatcaataatgagagataaacaaattggagaagggcgaagttttgttgatttaaacgaaatattaaaagctttagaaaataatgacattacacttcattcaaagattgtagcaagaatagaaacgtatgaaggtaacttatctaaagttgaaactactccagggagaatgatactaggaaatattctacctaagaataaaaatataaactttgaaattataaataaagttcttacaaaaaaagaagttagtaacataattgatgcagtttatagattctgtggacaaaaagagactgtcttatttgcggatcatattatgcaaatcggatttaaatatgctgcaatagctggtatttcatttggtaaagatgatcttattattccatctgacaaaaatgaacttttaaatactacgcagttaaaagttcaagaatatgaagaccaatatcaagatggattaattactcaaggagaaaaatataataaagtagttgatgcctggtcagagtgtacca

SEQ ID NO: 255722 - DNA, 491 bp, Unknown
  Bacterial polypeptide expressing nucleotide sequence isolated from the Sargasso Sea
ggttgttaaagcttctataaaaatagaaaacagtagagttggacaagttacagattatgataaacttgtatttgaggttgaaacaaatggagtaatttcaccagatgatgcaatcgcattagcagctagaattttacaagatcaacttcaaccattcattaattttgatgaaccagaaattatgcctgatcagtctcaagtagaaaaactctcatttaattctaatctcttaaagaaagttgaagaactggagctatcagttagatcagctaactgtcttaaaaatgataatattatttatataggagatctagttcaaaaatctgagtcggaaatgcttagaacaccaaattttggaagaaaatctctaaatgaaattaaagaagttttgcagcaaatggaacttaacttaggaatgtctgttccagattggccacctgagaatattgatgagctcgcaaaaaaatatgaggatccttttaataagtaaa

SEQ ID NO: 255723 - DNA, 850 bp, Unknown
  Bacterial polypeptide expressing nucleotide sequence isolated from the Sargasso Sea
atgaaaaaagaattaacagatttatttaaaggcagcgaaatttcagaagcacagaattttaatagtataaaaatttctttagccagtcctgagaaaattaaatcttggacatttggagaaataaaaaaaccagaaactataaattatagaacttttagacctgaaaaagacggtctattctgtgcaagaatttttggtccaattaaagattatgaatgtttatgcggcaagtataaacgaatgaaatttagaggcattatttgtgagaagtgtggagttgaggtaacaaaatcaaatgtaagaagagaaagaatggggcacattaatcttgcaactcctgtggcacatatttggttcttaaaatcattgccaagtagaattgcacttgcagtagatatgaaattgaaagaaattgaaagagttctttattttgaaaactttatagtaattgaaccaggattaactggtttacaaaaaaaccaacttttgaatgaggaagaattagcgaaataccaagatgaatttggagaggaaagctttactgcaggtattggagcagaagctgttctcgagatgttaaaaaatcttgacttagaattagagagaaaaaatctagttagctttattaaagaaactaaatctaaagttaatgaagaaagagcaatcaagagattaaaattaatagaatcatttattgaaactggtcaaaaacctgagtggatgattatgactgttgttccagttattcctccagaattaagacctttggttccactagacggaggtagatttgccacttctgatcttaacgatctatacagaagagtaattaacaggaacaatagatgaa

SEQ ID NO: 255724 - DNA, 688 bp, Unknown
  Bacterial polypeptide expressing nucleotide sequence isolated from the Sargasso Sea
gaaggcaatacagctgaaatttcacttgatattaccggtccctgtgatgtaacagcttcttcgtttgaggtgcctggtaacgttgaattagtaaatcaagattttcacatagctactatagtagataaggtaaatttaaagatgacattaactgtgaaaactggaagaggttatgagccagctgatcttagagatgatgaagatagagttgttggtggtttaaaagttgatgcatccttcagccctgtaaggcgtgtttcatacactgtagataacgcaagatttgaaaaaagaacagaccttgacaaacttttaattgagcttgaaacagatggaactcttgatcctaagatggccattgaacacgcagctacaatcattcaacaacaattaggagcatttgttgatcttgatgctattgctgaacaagaggctaaaaaagatcagaatgatttcgatccattattattaagatcaattgaagaactagaattaactgttcgatcaacaaattgcctaaaagcagaaagtatttttctcattggagacttaatacatagatcagaatttgatttacttaaaacgcctaatttaggaaaaaaatccttaaatgaaattaaagatgtcctggcatcaaaaaacttatcattaggtatgaatgttgaaaactggccaccagtggtataaa

SEQ ID NO: 255725 - DNA, 442 bp, Unknown
  Bacterial polypeptide expressing nucleotide sequence isolated from the Sargasso Sea
aatgcaaacaactacaaatgtaatagataaaaattggaaggctttaataaaaccagataaactagaaattactagtaatgaagataagacaatagctaaagtaatagcagaaccgttagaaaaaggatttggccaaactattggaaattctttaagaagaattttactttcctccatacaaggtgcagctgttacggctatacaaattgatggagttttgcatgagttttcttctatcaaaggagtaagagaagacgttactgatattgttttaaacgtaaaaaatttagctattaagtcttcatcttctagctctaaaaaaattattttagatataaaaggaccaaaagaagttaaagctaaagatattactctggtgccagaagtacaaattttgaacccagaacaaacaatatgtaacttagacgaaaaaacaaacttt

SEQ ID NO: 255726 - DNA, 421 bp, Unknown
  Bacterial polypeptide expressing nucleotide sequence isolated from the Sargasso Sea
atgcaaacatcaataattgatttactagtaccaacagaaatacaagttgaaactgtaagcgatcaggtcgcaaaaattactctcgagccgttagagagaggttttggccacactcttggtaatgctttgcgaagaatacttttatcatctatgccaggcgccgccattactaatgtaagtattgaaggcatctcacatgaatactctactatagatggagtaagagaggacgtcatagatattctcttgaacttgaaagatatgccaatcaatattattgaaggttctacagcagaaattaagcttgatgtttcagggccatcagaggtaaaagctggaatgtttgaagtgcctgggaatgtagaattagttaatgaggaccatcatattgcctcgcttgttgataaagtaaaattatcgc

SEQ ID NO: 255727 - DNA, 928 bp, Unknown
  Bacterial polypeptide expressing nucleotide sequence isolated from the Sargasso Sea
gcattaaaagaaagtggccaaaaacctgaatggatgatcatgaacgtgctcccagtcttgccaccagacttaagaccgcttgttcccttagatggaggtaggtttgcaacttctgatctcaatgatctttacagaagagtaattaatagaaataacagattgaaacgtttgcttgagcttggggctccagaaattattgttaggaacgaaaaaagaatgctgcaagaatctgtagacgcactgctggataacggtcgaagaggtagagctatattaggaactaataaaagaccgctcaaatctcttgcagatatgattaaaggtaagcaaggaaggtttagacaaaatttacttggtaaaagagttgattattctggtagatcagtagtagtctcaggcccaacattgaaactacatcaatgtggtttgccgaaaaaaatggcattggagctatttaaaccatttatttttaataaacttgagcaaaaaggcataactatcacaatcaaagcagctaaacagctagttgaagaagagacaccagaagtttgggattgtcttgacgaagtgataagagaacatcctgttttattaaatagagctcctaccttacataggcttggtatacaagcatttgaaccggtgctaattgaaggaaaagctattcagctccatccactagtttgtgtggcatttaatgctgactttgatggcgatcaaatggctgttcatgtccctctttcactggaagcacagcttgaagcaagagctttaatgatgtcaacaaataatatactttcgccagctagcggtgaacctattattcagccaaatcaggatgtagtgctcggaatttattacttaactaaagaagatttcaatcttccgggagaaggcagatcattcgttgatgtgcacgaagtaaaaa

SEQ ID NO: 255728 - DNA, 908 bp, Unknown
  Bacterial polypeptide expressing nucleotide sequence isolated from the Sargasso Sea
acaggaactggtaagcgaccacttaaatctcttgctgaaatgttaaaaggtaaacaaggaagatttagacaaaatttattaggtaaacgagttgattattctggaagatcagtaattgttgtcggtcctgatttaaaactacatgaatgtggtttaccaaaaaaaatggctcttgagttatttaaaccatttttatatgcaagattaaataaattaggtttagcttcaacgattaaacaagctaaaaaattagttgaaaaagaaacaaatgcagtttgggacgctttagaattgatagttagagagcacccggtacttttaaacagagcaccaacacttcatagacttggagttcaagcatttgagccaaaattaattgaaggagatgcaattgaattacaccctttaacttgtgcagcatttaacgctgacttcgatggtgaccaaatggcagtgcacgtgccgttaagtttagaagcacaattagaggcaagaattttaatgttatctacaaacaatattctttctccatcaaacggtaaaccaattattgttccgagtcaggatatgattttaggaatctactatctgtcacaagaacctatatctgataaaccagcaggatactttacaaactcagatcaaattgaattcgcattatcatctggccaaataaatgtacatagcactatcatttcaagattcgagactgtagatgatcaaggtaataaaaaaatggaaaaatacacttctacagctggacgatttttattagcaaatttattacctaaaaatagcaacattaagttctctttaattgatagattattacctaaaaaagtagtttcagaaataattgatgttgtatttagattttgtggtcaaaaaacaacagtaattttctgtga

SEQ ID NO: 255729 - DNA, 473 bp, Unknown
  Bacterial polypeptide expressing nucleotide sequence isolated from the Sargasso Sea
aatggaaaatgctgatgtaaatataaaaaattggaaatcattaattaaaccttcaaaattagatgttaaacttagtgatgataaatcatacgcaaaaattattgctgaacctttagagaaaggttatggacttactttaggaaattctttaaggagaatattactttcatccattagaggaactgcggttactgcaatccaaattgacggtgtattacatgaatttacatcaataaaaggtgtaagggaagatgtaacagatatagtgttaaatgttaaatcattagcacttaagtgtggtactgatacctcaaaaaaattaattttagatgctaagggacctggtgaaatcaaagcatcagatataactcctgtaacagatattgaaatattaaatcctgatttagtaatatgtaatttggacgaaaatactaattttcacatggaaatggttattggatctggcaaaggtt

SEQ ID NO: 255730 - DNA, 916 bp, Unknown
  Bacterial polypeptide expressing nucleotide sequence isolated from the Sargasso Sea
cttcgacccctagtacctctcgatggtggaagatttgcaacgagtgatctaaatgatttgtacagaagggtaataaacagaaacaacaggttaaaaagactaatagatttaagagcccctgatattattattcgaaatgaaaaaagaatgcttcaagagtctgttgatgctctatttgataatggaagaagaggcagggtcataacgtcaacaaataaaagaccgcttaagtcattatccgatatgctaaaaggtaaacaaggaaggtttagacaaaacctacttggtaaaagagttgattattctggaaggtccgtaatagttgtagggccaacattaaaattacaccaatgtggtattccaaaaaaaatggctttagaactttttaaaccatttatatttcataaactcgacgtttatggatgggcaaatacaattaaagctgcaaaaaaacttgtagaaaaagaagatccaagggtttgggatattcttgaagaagtaataagagagcaccccgttttgcttaacagagctcctactcttcatagattgggaatacaagcctttgaaccaattttaattgaaggtaagtcaattcagttacaccctttggtatgcactgcttttaatgctgattttgatggggatcaaatggcagttcatgtacctttaagtttagaagctcaactagaagctagggtgctaatgatgagtactaataatattttatctccatctagtggaaagccaatcattgttccatctcaagatatagtattaggaatatattacttatcaataatgagagaaaatcaaaaaggtgaaaatagatactttttagatattaatgaaatattaaaagctcttgagaacaaagatgtatcattacatacaaaaatattagcaagagtaaaaa

SEQ ID NO: 255731 - DNA, 700 bp, Unknown
  Bacterial polypeptide expressing nucleotide sequence isolated from the Sargasso Sea
aatggcactagaattatttaaaccttttctttacgctagattagataaattgggtttagcaacaacaataaaacaagccaaaagattagttgaaaaggaaaaaagtgaagtatgggattcgttagaacatattattagagaacatccaattcttttaaatagagctcccacattacacaggttaggagttcaggcttttgaagcaaaattaattgaaggaaatgcaatagagttgcatccactagtttgtgcagcatttaatgcagactttgatggtgatcaaatggcagttcatattcctttaagtttagaggctcaattagaagcaagagtcttgatgatgtcaacaaataacattttaagcccatcaaatggtaaacctattatagttccaagtcaggatattgttttaggtatttattacctttctcaagctgctgaaaaaagtgatagcaagccaaaaggtatattttcatcagttgaagagattgagcaagctctagagaataaatcaataagtttgcacacaaaaatcatatctacattcaaaactttagataaaaacggtgaaaaagtttttgagaaacatacaagcactgctggtagatttttgttagcaaatttattacctatcaatcataatataaaatttaacttggttaacaaacttctcacaaaaaaaaatgtttctgaagtgatt

SEQ ID NO: 255732 - DNA, 661 bp, Unknown
  Bacterial polypeptide expressing nucleotide sequence isolated from the Sargasso Sea
atttggtttttaaaatctttgccaagcagaatttcattagctattgatatgaaacttaaagaagtagaaaaagtcttatactttgagagttttattgtggtcgagcctggcttaactactctaaagaaaggacagttattatctgaggaggcgctaattaaagcacaagatgaatttggagaagatgctttcacagctggaataggcgctgaagctgttagagaaatattactaaatttagatttaaaaaaggaacaaaaaaaattaagagattcattaaacgagattaagtctaaagtgaccgaggagcgaactattaaacgtttaaaattaatagagtcgtttatctcatctgggaataaacctgagtggatgattttaacctctgtacctgtaataccaccagagcttcgacctttagttcctttagatggcggaagatttgctacatcagacttaaacgatttatatagaagggtaataaacagaaacaatcgtcttaaaagattattagatcttaaagctccagatattatcgttaggaacgaaaaaagaatgcttcaagagtccgttgatgcattatttgataacggtagaagaggtagagtaattactggaactggcaaaagaccattaaaatctttggcggaaatgttaaaag

SEQ ID NO: 255733 - DNA, 967 bp, Unknown
  Bacterial polypeptide expressing nucleotide sequence isolated from the Sargasso Sea
agattagttgaaaaagaaaaaagcgaagtttggatgcccttggaacatataataagagaacatcctgtaattttaaatagagcccctactttacatagactaggtgttcaagcttttgaagcgaaattaatagaaggtaatgctatagagctacaccctctcgtgtgtgcagcttttaatgcagactttgatggagaccagatggccgttcatattccattaagtttggaagcacaactggagtcaagagttttaatgatgtctacaaataatattttgagtccatctaatggtagaccaattatagttcccagtcaggatatagtattaggtatatactacctttcacaatctagtaataaagatgaaaaaattaaaggaatattctcaagtattgaagaaatagaacaagctttagaaaataaatcgataagtcttcattctaaaataatctctctttttaaaacagtagactctaacggcaagaaagtgaatcataaatatcaaagtacagcaggtagatttttgcttgctaatgttttaccaaaaaatgaaaaaattaaatttactttagtagacaggctacttacaaaaaaaaatgtttccgaagttattgatacaatttttagatactgcggtcaaaaagaaacagttattttttgtgacaaaataaaatctctaggttttaagcatgcatttaaagcaggaatttcttttggaaaaaatgacttaataataccaaagactaaaatagatttgattaatacgaccaagaaaaaaatcgaagaatatgaaaaacaatattcagacggacttataactagaggagaaaagtataataaagttgtagatatatggtctaaatgtactgatacagttgctaacgaaatgatgaaagaaatttcctcagccgaaaaaatatatccagacgatcgaatagaaactaactcagtatttatgatggctg

SEQ ID NO: 255734 - DNA, 920 bp, Unknown
  Bacterial polypeptide expressing nucleotide sequence isolated from the Sargasso Sea
aagaaaacagaagcacttaaaaggcttcaagttgttgaatccttcagagaagctaatcagagaaaggaaaaccttcctgaatggatgattgtaaaagttatccctgttattccacctgaattaaggccacttgtgcctcttgatggaggaaggtttgcaacttcagatctaaatgatctgtatagaagggttatcattagaaataatagattgaaaaggctagtagaaattaaagctcctgaggtaatacttagaaatgaaaaaagaatgcttcaagaatcagttgattcattatttgataatacaagaaaatcttctgcagttaaaacagaatcaaataggccattaaaatcattatctgattcattaaaaggaaagcaagggagatttaggcaaaacttattaggtaaaagggtagattattctgctaggtcagtaattgttgtaggtcctgaattaaagttgtatgaatgtggacttcctaaagatatggcggcagaattatataagccttttataattagaaaacttattgaaaggggaattgtaaagacagtaaagtctgccaaaaaaattattgatagaagagagcctattgtatgggatatacttgaaaatgttcttaagggtcacccggttcttcttaatagagctccaactcttcatagacttggaatacaggcatttcaacctaaattaatagaaggaaaagctattcaacttcacccattaacttgtactgcatttaatgcagattttgatggagaccaaatggctgttcatcttcctttaggtcctgaagcaatacttgaggcacaattattaatgttagggtctcataatattcttaaccctgctaatggttctccaattactgttccatctcaagatatggttcttggactttactatatgactaa

SEQ ID NO: 255735 - DNA, 871 bp, Unknown
  Bacterial polypeptide expressing nucleotide sequence isolated from the Sargasso Sea
atggtcattaagttggagtctcagaatgagctccattcaagagtatcaatagagccttttgaaagaggttttggctatacactaggtaatgcgatcagaagagtgctgctatctagcctcccaggttatgcaattacggaagctcagatagatggtgtattgcatgagtatactacgattgaaggcgttcaagaggatgtcgttgagatcttattaaacctcaaaggtgttgccatcaatattcatgatagagattcagccgattttgtggttagcaaaaaaggaccatgtaaagtgactgctggagatattcaggtcgatggagatacagagattgtaaatcctgatcatcatattgcaacaattagctcaaaaaaagagttgaaaatgcaaattaagattgagaaagggacaggatatcgcccagtccctacacaaagcaaagatgctgatgtaacaattggtttgctaaagctagatgcatcatttagtccaattaaaacagttacatattcagtcgaagctgcgagagtagagaatagaactgatttggataaacttattgttgatttagaaacagatggaacaatagatccagaaagggcaattaaatatgccggcgcaatccttcaaaaccagctcagtatatttacaaatttgacaagagtacaagagcagaagaaagaagaagaggaagttcttatagatccaattatgctcagacctgtagatgagctcgaattgactgtgaggtctgcaaattgtctgaaagcagagaatgctaattatatcggtgatcttgttcaaaaaactgaagttgaattactgcgtactccgaacttgggtaagaaatctcttaatgagatcaaag

SEQ ID NO: 255736 - DNA, 909 bp, Unknown
  Bacterial polypeptide expressing nucleotide sequence isolated from the Sargasso Sea
ttttaaatctcttccaagcagaatagccttagctgttgatatgaaattgaaagaaatagaaagagtactttattttgaaaattttattgtaatagaaccagggttaacaggtttaaaaaaaaatcaattactaaatgaggaagaattagcaaaatatcaagacgaatttggtgaggaagcatttactgcaggtattggagctgaagctgttttagaaatgcttaaaaacctagatttagaattagagaaaaaaaatcttgcaagctacataaaagaaacaaaatcaaaagttaatgaagaaagagcaattaaaagacttaagttaattgagtcttttttagatacaggtcagaaacctgagtggatgattatgactgtagttccagttatcccacctgagttaagacctcttgttccattggatggaggtagatttgccacttctgatttaaatgatctttatagaagagttataaatagaaataacagactaaaaagacttatggatcttaaggctccagatattattgtacgaaacgagaaaagaatgcttcaagagtcagttgacgcattatttgataatggaagaagaggaagagtaataactggcacaggaaaaagacccctaaaatctcttgctgaaatgctgaaaggtaaacaaggaagatttagacaaaacttgttgggtaaaagagttgattattctggtagatcagtaattgtagttggtcctgatttaaaattacatgaatgtggtttgccaaaaaaaatggctttggaattatttaaaccatttctttacgcaagactaaataagcttggtttagcatcaactattaaacaagctaagaaattagttgaaaaagaaactaacgctgtgtgggatgctttagaattaatcgtaagaga

SEQ ID NO: 255737 - DNA, 700 bp, Unknown
  Bacterial polypeptide expressing nucleotide sequence isolated from the Sargasso Sea
gctgagatgttaaaaggaaaacaaggaagatttagacaaaatcttcttggtaaaagagttgattactctggtcgttcagtcatcgtagtaggtccagacctaaaattacacgaatgtggattgccaaaaaaaatggcgttagagttatttaaaccatttttatatgcaagacttaataaactaggtttagcttcaacaattaaacaagcaaaaaaattagttgagaaagaaactaacgctgtctgggatgcacttgaattaattgttagagaacatccagttttactaaatagagctccaacacttcataaaatgggagtccaagcttttgaaccaaaattaattgagggagatgcgattgaattacaccctttaacatgtgctgcgtttaatgcagattttgatggtgatcaaatggctgttcacgttcctctaagtttggaggcacaacttgaggccagaatattaatgctatcaactaacaatattctttctccatctaacggaaaaccaataattgtcccaagtcaggatatgattttaggaatttattatttatctcaagaaccagtcactgataagccagctggatattttttaaatgcggatcaaattgaatttgcgctttcttctggtcaaataaaagtccatagtacgattatttatagatttgaaacaattgatgaaaaaggtaatcaaa

SEQ ID NO: 255738 - DNA, 820 bp, Unknown
  Bacterial polypeptide expressing nucleotide sequence isolated from the Sargasso Sea
tttttaacagaagaagagtatttagatattttagatgaacttccaaaggaaaatcaatttttagaagattcagacccaaataaatttatcgcaaaaatgggtgctgatgcaattcatgatttacttaagaatcttgatttagatcaattatcttatgacttaagacacaaggcgaatacagaaacttcagtacagcgtaaaaatgaagctttaaaaagacttcaagttgttgaggcgatgcgtggttctcaaaaaagaatcgacaatcaaccggagtggatgattgttaaggttgttccagttatccctccagaattaagacctctagttccattagatggaggtaggttcgctacttctgatttaaatgatttatatcgaagggtgattattcgtaataatagacttaaacgattaatagaaattaaagcaccggaagtcattttaagaaatgaaaaaaggatgttacaagaatcggtagattctttgtttgataattcaagaaaatcaagtgctgttaaaacagaagcaaatagacctcttaaatctctttcggactcattaaaagggaaacaaggacgtttccgtcaaaatcttttagggaaaagggtggattattcagcacgttcggtgattgttgttggtccaaatcttaagtttcatgaatgtggattgccaaagaatatggcagctgaattatataagccttttattatccgaaaaatgatagaaagaggaattgttaagacggttaaatctgcgaaaaaaattgtagacagaaaagagcctgtagtttgggatattttagaaaatgtttaaa

SEQ ID NO: 255739 - DNA, 573 bp, Unknown
  Bacterial polypeptide expressing nucleotide sequence isolated from the Sargasso Sea
gaacttataaagccaaataaaatagaaataaaggaagataactctggtaaaaatgtctcaagactcacagtagaaccacttgagaaaggcttcgggttaacaataggtaattctttgcgtagaatcctattatcctcattgcagggtagcgcaataacttcagtcaaaattgatggagttttgcatgaattttcagcaatatcaggggtaagagaggacgtaactgacataatattgaatattaaagacgttgcccttaaaatgcatattgatactgaaataaaaatgatcttaaacaaaactggaccatgtactgttgttgcgggagatattgagtcatctacggatgtagaaatactcaatccagagacggtcatatgcacgcttgatgacaaggttaatgttcgtatggaatttattgcaagaacaggaagaggttatgtgcctgcagaaaaaaataggtctgaagatgaaccagttggattgataccaatagatagcttattttcacctgtgaagcgtgtctcttatgaaatcgaaaatacaagggaggggcaaattctggactacgat

SEQ ID NO: 255740 - DNA, 881 bp, Unknown
  Bacterial polypeptide expressing nucleotide sequence isolated from the Sargasso Sea
tatgaacaaagtaatgaaaagtttagaaaatatgaataacgattttgatctcattaaaatttccatagctagtcccgaaaaaattaggtcatggtcttttggagaagtaaaaaaaccagaaacgattaattacagaacgtttaagccagaaagggaaggacttttttgtgctaaaatatttggtccagtaaaagattatgaatgtctttgtgggaagtataaaagaatgaaacacagaggaattgtttgtgaaaagtgtggagttgaagtaattcaatctaaagttagaagagaaagaatgggccatatagagttagcagctcctgttgctcacatatggtttttaaaatctttaccatctagaataagtctattgttagatatggctatgaaagatgtagagagagtcttatactttgaaaatcatattgtaatagaaccaggtttaacaagtttaaaatttaaacaaatattatctgacgaagaatttaacaaggctctagatgaaaatcctgcagactcattttcagcaggtattggagctgaagcaataagaaaaatctttgagtcaatgaatatggaggaggaaagagaaaatattaaagaagaactaagtacctcaaaatctgatattaaaaagaagaaattattgagaagactaaagttagtagaacagtttattttttcaggtaacaagccggaatggatgattttaactagtttgcctgttattccacctgatttaagacccttagttcctctagatggtggaaggtttgccacttccgacttaaatgatttatatagaagagttatcaatagaaacaatagattaaggcgtcttaaagatctcaaggctccagatataattgttagaaatg

SEQ ID NO: 255741 - DNA, 929 bp, Unknown
  Bacterial polypeptide expressing nucleotide sequence isolated from the Sargasso Sea
agtaacgctagcaaaagttagaagagaaaggatgggccatattgagttagcggctccagttgctcatatatggtttttaaaatcattgccatcaaggataggactgcttttgaatgttactctaagagaaattgagcgagtattatattttgaaagttatatagttacagatccaggtcttacagaattagagaaaggcgatattttaaccgaagaagaatgggttgaaaaatatgaagaatttggcgatgaatttactgctggaatgggagctgaagcagttcagatattgttagaagagcttgatattgatgatgaaattagaattattagagaagagattcctgaaacaaattcagagactaaacttaaaaagttatccaaaaggttaaaattattagaggcttttaataattctggaaataagcctgaatggatgattatgaatgtcttacctgttttaccaccagatttaagacctcttgtgcctcttgaaggtggaaggtttgcaacatcagacttgaatgatttatatagaagagtaattaatagaaataatagactaaaaagattattagaattaaacgcacctgaaataattgttagaaatgagaaaagaatgctacaagagtctgtggatgctttattggacaacggaagaagagggcgagttatcactggaactaataagagacctttaaaatctttagcagacatgattaagggtaaaggaggtcgatttagacaaaatttattaggaaaaagagtagattattccggtagatcagttattgttgctggtcctaatctaagattgcatcaatgcggactgccaaagaagatggctttagagctatttaaaccttttgtatatgggaagcttgagcaaagagagcttgctacaactataaaaggcgctaagaaattag

SEQ ID NO: 255742 - DNA, 937 bp, Unknown
  Bacterial polypeptide expressing nucleotide sequence isolated from the Sargasso Sea
caaaaaccagaatggatgataatgacagttgttcctgttattcctcctgaattaagacctctggttccacttgatggaggtcgttttgctacttcagatttaaatgatttgtatagaagagtaattaacagaaacaatcgtttaaaaagattaatggatcttaaagctcctgacataatagttagaaacgaaaagagaatgcttcaggagtctgtagatgcattatttgacaatggtagaagaggtagagtaattacaggaacaggtaagagacctctcaaatctttggctgaaatgctaaaaggtaagcaaggtagatttagacaaaatcttcttggtaaacgggtcgattattccggaagatctgtaattgtagttggtccagatttaaaattacacgaatgtggtcttccaaaaaaaatggctttagagttatttaaaccatttttatacgcgagattaaataaacttgggttagcctctacaatcaaacaggcaaaaaaattagttgaaaaagagactaatgcagtttgggacgcattagaacttattgtaagggaacatcctgtattgttaaatagagctccaactcttcacagattaggagttcaagcttttgaacctaagttaattgagggagatgcaatcgaattacacccattaacttgtgcagcatttaatgctgatttcgatggagatcaaatggcagtacatgtccctttaagtttagaggcgcagttagaggcaagaatattgatgttatctacaaataatattttgtcaccatcaaacggtaagccaatcatagttccaagtcaggatatgatattaggtatttattatttgtcacaagagcctttaacagataaacctgctggatattttttaaatgctgaccaaatagagtttgctttatcatcaggtcaactaaaagttc

SEQ ID NO: 255743 - DNA, 819 bp, Unknown
  Bacterial polypeptide expressing nucleotide sequence isolated from the Sargasso Sea
tacgcgaagcgcctgaaggtcctcgaggcattccagcgctcgggcatcaagcccgagtggatgatcctcgaagtgctgccggtgctgccgccggaactgcgtccgctcgtgccgctggacggcggccgtttcgcgacgtcggacctgaacgacctgtatcgccgcgtgatcaaccgtaacaaccggttgaagcgtctgctcgagctgaaggcacctgaaatcatcgtccgcaacgaaaagcggatgctgcaggaagccgtcgactcgctgctcgacaacggtcgtcgcggcaaggcgatgacgggcgccaacaagcgtccgctgaagtcgctcgccgacatgatcaagggtaagggcggtcgtttccgtcagaacctgctgggcaagcgcgtcgactactcgggccgttcggtcatcgtggtcggcccgacgctgaagctgcaccagtgcggtctgccgaagctgatggcgctcgagctgttcaagccgttcatcttcaacaagctggaagtgatgggcgtcgcgacgaccatcaaggctgcgaagaaggaagtcgagaaccagacgccggtggtgtgggacatcctcgaagaggtgatccgcgagcacccggtgatgctgaaccgtgcgccgacgctgcaccgtctcggtatccaggcgttcgagccggtgctgatcgaaggcaaggcaatccagctgcacccgctcgtctgcgcggcgttcaacgccgacttcgacggtgaccagatggccgttcacgtgccgctgtcgctcgaagcgcagatggaagcgcgtacgctgatgctggcgtcgaacaac

SEQ ID NO: 255744 - DNA, 478 bp, Unknown
  Bacterial polypeptide expressing nucleotide sequence isolated from the Sargasso Sea
aatgcaaacaacttcaaatattgtagataaaaattggaaagctttaattaaaccaaataaattagatattaagagcaatgatgataaaacagttgcaaaagttattgctgaacccttagaaaaaggttttggtcaaactattggtaattcattaagaagaattttattatcatcaattcaaggagcagcagtcactgcaatccaaattgatggagttcttcatgaattttcatcaataaaaggagttagagaagatgttactgatattgtcttaaatgtaaaaaatcttgcaattaaatcatcatcaacaagttctaagaaaattatcttagacatcaaaggtccaaaagaagttaaagcaaaagatattactcttgctccagaaatagaaattttgaatccggaacaaacaatttgcaacttagatgaaaaaactcattttcatatggaattaatgattagtacaggaaaaggttat

SEQ ID NO: 255745 - DNA, 567 bp, Unknown
  Bacterial polypeptide expressing nucleotide sequence isolated from the Sargasso Sea
aatggagaatacaaatatttttgataaaaactggaagtcattaactaagccaagtaagcttgaaattgagagtaacgaagacaaatctcttgctaaagttatagctgagccattagaaaaaggttttggccagacaattggaaattctttgagaagaattttgctttcctctattcaaggagctgctgttactgcaattcaaatagatggcgtattgcatgaattttcttctataaaaggagtgagagaggatgttacagatattgtattgaatgtaaaaaatttagctataaaactagactctgatggaccaaaaaaattagtgttagatgctgaaggcccaaaagaagttaaagccaaggatatatctttggtttcagatataaaaatattaaatccagaccaaactatttgcaacttagatgaaaaaaccaaatttcatatggagttaatagttaacaacggaagaggatatgttttagctcaaaaaaataaatctgaagatacaccgttaggcatgatcgcaatcgattctctatttagtcctgttaaaaaagtttcttttaa

SEQ ID NO: 255746 - DNA, 937 bp, Unknown
  Bacterial polypeptide expressing nucleotide sequence isolated from the Sargasso Sea
gggattagagttatcgataattttattgctactaatgcaaaaccagaatggatgttcttagatgcaattccctgttatcccacccagatcttagggcctatggttcagcttgatgggggaagattcgcgacttctgatttaaatgatctgtatagaagagttataaatagaaataatagactagctaggcttcaggaaattttagctcctgaaattattgtaaggaatgaaaaaagaatgcttcaagaggctgtggatgctcttatagataatggaaggaggggaaggactgtggtaggagcaaacaatagagctcttaagtcccttagtgacatcattgaaggaaaacaaggaagatttagacagaatcttctaggtaagcgtgttgattattcaggaagatctgtcatagttgttggccccaaattaaaaatgcatgagtgtggtcttccaaaggaaatggcaattgagctctttcaaccttttgtaattcatagattaatacgccaaaatattgtaaataatattaaagctgcaaaaaaattaatacaaaaggctgatgatgaggtgatgcaagtacttcaggaagttattgacggtcacccaatccttctaaatagagcccctacactgcatcgtctcggaattcaagccttcgaaccaaaattagttggaggtagagcaatacaacttcatcctttagtttgtcctgcatttaatgctgacttcgatggagatcaaatggcagtccatgttcctttagctttagaagcacaaactgaagcacgaatgcttatgttggcaagtaataatattttgtcgcctgctactggggaaccaattgttactccatctcaagatatggttttgggatcttattatctgacggctttgcaaccaaattatcaaaaacctaattttggagataataaaactt

SEQ ID NO: 255747 - DNA, 660 bp, Unknown
  Bacterial polypeptide expressing nucleotide sequence isolated from the Sargasso Sea
agggttatcactggtgttaataaaagaccattaaaatctttatctgacatgcttaaaggaaagcaaggtcgatttaggcaaaacttacttggaaaaagagttgattactctgggcgatcagtaattgttgtgggtcctaatctgaaacttcatcaatgtgggcttccaaaaaagatggcactcgaattatttaagccatttatttatgctaaattagagctttatgggatggctacaacgattaaggctgcaaagcgcatggttgaaaaagaccgtcctgaagtttgggatatacttgaagaggtgattagagaacatccggtattgttaaatagagcgccaactttacataggcttggtgttcaggcttttgaacctattttagttgaaggtaaagctataagattgcaccctcttgtttgcactgcatttaatgctgattttgatggtgatcaaatggctgtgcatgttccactgtctatagaatctcagttagaagctcgagtattgatgatgtcaacaaataacattctatcgccagcaaatggaaagccaataatcgttccatctcaagacataatccttggtttatattttatgacaatggaaagagataatgaaaaaggcgaaggtatgaaatttgccgataagactgaagtt

SEQ ID NO: 255748 - DNA, 926 bp, Unknown
  Bacterial polypeptide expressing nucleotide sequence isolated from the Sargasso Sea
aatgcaagcaacatcagatgttatagataaaaattggaaagctttaattaaaccaaataaattagaaattacaagtaacgaggataaaacaattgcaaaagttgtagctgaaccgcttgaaaaaggttttggtcaaacaataggaaattctcttagaagaatattattatcgtcaattcaaggttcagctgttacagcgatacaaattgacggagtgcttcatgaattttcatcgataaaaggtgtaagagaagatgttactgatattgtattaaatgttaaaaatttagcaatcaaatcatcatctacaagtgccaaaaaaattatcttagatattaaaggacctaaggaagtaaaggctaaagatatttcattagtatctgaaattgaaattttaaatccagagcaaactatatgtaatttagatgaaaaaactcattttcatatggaactaatgatcaatacaggaaaaggctatgttccagctccaaaaaataaatctgaggatagcccactcggtttaatctctatagactctttatttagtcccgttaaaaaggtttctttttcagttgaaaatactagagcaggaagtgcattagattatgataagctagttatgacagttgaaacaaacggtacaattgctgcagaagatgccatcgcatattctgcaagaatttttcaggatcaactatcaatgtttgttaactttgaagatccgaaagaagttgttaaagaagttaaatcttctgaacctgagtttaatagaaatttgttgaaacgagtagaagaacttgaactttcagtaagatctatgaattgtttgaagaatgataatattatttatattggtgacttagttcaaaaaactgagcccgaaatgctacgaacacctaattttggaagaaaatcttttaatgaaa

SEQ ID NO: 255749 - DNA, 856 bp, Unknown
  Bacterial polypeptide expressing nucleotide sequence isolated from the Sargasso Sea
aatgggtcatataaatttagcaacacccgttgcccatatctggttcttaaaatctctaccaagtagaatttcattggcaattgatatgaaattaaaagaggtagaaagagtactatactttgaaaattttattgttatagaacccggattgacagggctaaagaaaaatcaattattaggagaagaagaacttataaaatatcaagatgaatttggtgaagaatcattcacggctggaataggtgcagaagcgattttagaaatacttaaatcgattgatcttgaatctgaaaaagccctactaataaaaactattaaagaaactaagtcaaaagtttcagaagaaagatctataaagagacttaaattaatagaatcatttattgaaacaggtaacaaacctgagtggatgattttaacaacaataccagtcattccacctgagctcagacctttggtacctttagatgggggcagatttgctacatcagatttaaatgatctttatagaagagtaataaatagaaataatagactaaaaagattaatggatcttaaggcgccagatataatagtgagaaacgaaaaaagaatgctccaagaatctgtcgatgcactttttgataatggtcgaagaggaagagttattactggtactggaaaaagacctcttaaatctcttgcagaaatgctaaaaggaaaacaaggaagattcagacaaaatttacttggaaaaagagtagattactcaggaagatcagtcattgttgtaggaccagatctaaaattacacgaatgtggtttaccaaaaaaaatggcattagaactttttaaccatttttatatgcacgattaa

SEQ ID NO: 255750 - DNA, 918 bp, Unknown
  Bacterial polypeptide expressing nucleotide sequence isolated from the Sargasso Sea
cgatatcaaaagaggctcaaacttatagaatcactaatttcttctggaaatagaccagaatggatgattctaaaagttcttcctatattaccacctgacttaaggccactcgttcctctagacgggggaagatttgctacatcagatttaaatgacctctataggagggtgataaatagaaataatagacttcaaagattattggatcttaatgcgccagatatcattgtaagaaatgaaaagaggatgttacaaaaatctgttgatgcactactagacaatggaagaatgggtagagcggttacaggatctaataagagaccccttaagtctcttgcagatatgattaaagggaagcagggccgatttagacagaatttgttaggcaaaagggttgattactctggtaggtctgtaattgttgtagggccgaccctaaagcttcatcagtgtggtattcccaagaagatggcattagagctattcaagccatttgtatttagtaagcttatttacaaaggcgaggcgtcaacaatcaaatctgccaaaagactagtagagcttgaggggccagagatttgggatatcttagacggagtcataaggcagcacccaatcctacttaatcgtgcaccaacacttcacagacttggtatacaagcttttgagcctgttttggttgaaggaaaagccattcagttgcaccctcttgtatgtaaagcctttaacgcagattttgatggagatcagatggcagttcatgtcccactatcgatcgaggcacagctagagagtagggcattgatgatgtcatctaataatattctttcacctgcgaacggcgagcccattattgttccatcacaggatgtagttttaggtctttattatatgactagagagaaagtcaaagataaa

SEQ ID NO: 255751 - DNA, 802 bp, Unknown
  Bacterial polypeptide expressing nucleotide sequence isolated from the Sargasso Sea
ttcatcaattaaaggtgttcgtgaagatgttacggatatagttttaaatgttaaagctttatctttaaaaattacatctgatggaccaaaaaaattaatactagatgttaaaggacctggtgtaattaaagccaaagatattcaaccaaattctgaagttactattttaaatcctgatctagttatttgtcatttagatgataatacaaaattccacatggaacttatagccaatacaggaaagggatatcttccagcagataaaaataaaaaggatgatgctccattaggtttaattgctatagattctttttttagccctgttaaaaaagtttcttacacagtagaaaatgcaagagaaggaaaatctttagattatgataaacttgttatggttgttgagacagatggttcaatttctggcgaagatgcagtagcatatgctgccagaatttttcaagatcaattatcaatgtttattaattttgaggaacctaaagaagttgagcaaaaacctaaatctattgaaccagaatttaataaaaatttattgaaaaaagttgatgaattggaattatctgtaagatcaatgaattgtttaaaaaatgataatattgtttatataggtgacttagttcaaaaaacggaacctgaaatgcttcggacgccaaattttggaagaaaatcactgaacgaaattaaggaagttctaaattctatgtcactttatttaggaatggaaattcctaattggccaccagataatatagctgaattatcaaaaaaatttgaagaaaattaa

SEQ ID NO: 255752 - DNA, 865 bp, Unknown
  Bacterial polypeptide expressing nucleotide sequence isolated from the Sargasso Sea
gttttggtctacgctaggtaatgccttaagaagaattcttctttcatcaatgcctggtgctgctgtaacagatgttgtgatcgatggtatttctcatgagtattcaacaattgagggtgttagagaggacgtaatagatattctattgaatcttaaagatatgccagtgaaactgattgaaggaaatgaagcagaacttaaactatctgttgatggaccatgcgaagtaacatcctcttcatttgaggctcctggaaatgttgagttaacagatgccgatcaccatgttgtttcacttgtagataaaattaaattaaatatgtcagtttttgtaagaactggaagaggttatgagcctgcagatattagagatgatgaaaataatactgtaggaggtttaaaagtagatgcttcatttagtccagtaaaaagagtttcttattctgtagagaatgcaagatttgagaaaagaacagacttagacaaattaatacttgagttagaaactgatgggactatcgatgcaaaaatggctatagagcattctgcaactataatgcagcaacagcttgcagcctttgttgatttagaagcaattgcagaacaagaagctaaaaaagagcaaaatgactttgacccactactccttaggtctatagaagaacttgagctaactgtaaggtcaactaattgtttaaaagcagaaagtattttcttaattggtgatttaattcaaagatctgaatttgatcttctaaaaacacctaatcttggtaaaaagtctcttaatgagattaaagatgtcctagcttcaaaaggactttctttaggcatggtgttagataactggccaccgatgggttaa

SEQ ID NO: 255753 - DNA, 561 bp, Unknown
  Bacterial polypeptide expressing nucleotide sequence isolated from the Sargasso Sea
aatgggagccgaggctatccagacactccttagaagaatcgaactagaagatctagaaaatcaattacaaatagagatgcgtgaagttaattctgaaacgcgtcgcaaacggatcgcaaaaagactcaatgtaataggatcacttttaaagtctgggaatgctgtagattcaatgatcatcgacaatctccctgtactaccgcctgaattgagacctttggtccctcttgaaggtggaaggtttgcaacaagtgatcttaatgatttataccgtcgagttattcatagaaacaatcgtctcaagcgccttatcgagcttcgggcgccaggaataattgtcaaaaatgaaaaacgcatgcttcaggaatctgtagacgccctttttgataatggacgtcgtggtcgtccaatggttggttcaaacaaaaggccactcaagtctataagtgatatgctaaagggcaaacagggacgtttccgacaaaatctactgggcaaacgtgtagattattccggacggactgtaatagtcgtcggtcctgagttaaaacttcatcaatg

SEQ ID NO: 255754 - DNA, 898 bp, Unknown
  Bacterial polypeptide expressing nucleotide sequence isolated from the Sargasso Sea
ttaaaatctcttgatttagaattagaaagaaaaaatttagttaattatattaaagaaacaaaatcaaaagtaaatgaggaaagagctatcaaaagattaaaattaattgagtcctttatcgaaacaggtcagaaacctgagtggatgatcatgactgttgttccagtaatccctcctgaattaagacctttagttccacttgatggtggtagatttgcgacctcagatcttaacgatctttatagaagagtgatcaacagaaataatcgtttaaaaagattaatggatcttaaggctccagatataattgtgcgaaatgaaaaacgaatgctccaagaatcagtagatgcattatttgacaatggtagacgcggaagagtaataactggaactggaaagagaccactaaaatccttagctgaaatgttaaaaggcaaacaaggtagatttaggcaaaacttattaggaaaaagagttgattactctggccggtcagtaattgttgtcggaccagaccttaaattacatgaatgtggtttaccaaaaaaaatggcactggaattatttaaaccctttttatatgctaggcttaacaaattaggattagcctcaacaataaaacaagctaaaaaacttgtagaaaaagaaacaaatgctgtttgggatgctttagagttaattgtaagggaacatcctgtattattgaacagagcacctacacttcataggcttggtgttcaagcttttgagcctaaattgattgagggtgatgctattgaactccatcctcttacttgtgcagcgtttaacgctgattttgatggagatcaaatggctgtgcatgttcctttaagtcttgaagcacagttagaagcaagaatattaatgttatcaacta

SEQ ID NO: 255755 - DNA, 913 bp, Unknown
  Bacterial polypeptide expressing nucleotide sequence isolated from the Sargasso Sea
agtaagaagagatagaatgggacatattgagctagctgctccagtttcacatatttggtttatgaaatctcttccaagtagaattgcaacattattagacatgaccattaaaaatttggaaaaagttttatattttgagcagtttatagttgttgaacctggactcactgatttgaagaaaggcgaaataatttctgaagaacaatacatagattatcaagatgaatatggtgaagacgcatttacagctgctattggagcagaggcaattgaacaaatgctattaaatatagatttggatgcagattttaaacagatgaaaatagatctaactgaaactaaatcggaacttaagaaaacaaaaattactaaaagactaaaattaattgaatcttttattgtgtccaagaataaaccagaatggatgattttaaaagttttacctgtaattccaccagagttaagaccattagtaccattagatggtggaaggtttgcaacaagcgaccttaatgatctttatagaagagtaataaatagaaataacagactaaaaaggttaattgatcttagggcacctgatataatcattagaaatgaaaaaagaatgctacaagagtctgttgatgcattgtttgataacggtagaagaggaagaattatcacatctacaaataaaagacctttaaaatctttatctgatatgttgaaaggtaaacaaggaagatttagacaaaatttattagggaagagagtagattattctggaagatctgtaatagttgttgggccaaatttgaaacttcatcaatgtggtatcccaaaaaaaatggcactggaacttttcaaaccttttattttccacaaacttgatatctatggttgggcaaacactattaaagcggcaaaaaaa

SEQ ID NO: 255756 - DNA, 614 bp, Unknown
  Bacterial polypeptide expressing nucleotide sequence isolated from the Sargasso Sea
aatggaacaaactgaagtaaatacaaaaaactggaaatcattaattaaacctgcaaaattagatgttcaattaagcgatgataattcttttgctaaaattatagccgaacctttagaaaaaggttatggattaactctgggtaatgcactaagaagaattcttttatcttctattagaggaactgcagttacatcaattcaaatagatggtgtattacatgaattcacatcaatcaaaggtgtaagagaagatgtaacggatattgtattaaatgtaaaatctttagcgcttaaaagttcatctgacgagccaaaaaaattaatacttgatgcaaaaggtccaggagaaattaaagcatccgatataacttcagtagctgatattgaaattttaaatccagatttagttatatgtaacttggacgaaaacactaagtttcacatggaaatgtcagttggaacaggaaaaggatatgtttcagctgatatgaataaaccagaggaaccaccattaggtttaatcccaatagattcattatttagtccagttaaaaaagtttcttacacagtaagcacagcaagagaaggcaaagcattggactatgataaactaa

SEQ ID NO: 255757 - DNA, 790 bp, Unknown
  Bacterial polypeptide expressing nucleotide sequence isolated from the Sargasso Sea
gtgagggaagatgtgacagatattgttttaaacattaaatccttagcactaaaaagtaacgcagaaggaaataaaaaattaattttagatgcaaaaggtcctggtgaaataaaagcatcacaaataacccctaatccagatatagaaattttaaatccagatctagtaatttgtaatttagacgaaaatactaactttcatatggagctttatgtaggtaatggaaaaggatatgtgtctgccgaattaaataaacctgaagaaccaccattaggccttataccaattgactctttatttagtccggttaaaaaagtttcctattcagtgagtactgctagagaaggaaaagctttggattatgacaaacttacaattgaaatagaaacaaatggctcaataactgctgaagatgctttagcttattcagcaagaatatttcaagatcaattaggtatgttcgtcaatttcgatgaacccaaagaaatcaaaattcaagatcaaccaaaagaaccagaatttaatcaaaacttacttagaaaagttgatgaattggaattatcagtaagatcaatgaattgtttaaagaatgataacataatttatattggagatttagttcaaaaatcagaaggtgaaatgcttagaactccaaattttggaaggaaatcattaaacgaaataaaagaagttttaagtggcatgtcgctatatttaggtatggaaattcctaattggcctccagataatattgctgaattatcaaaaaaattagaagatgcaatttaaa

SEQ ID NO: 255758 - DNA, 824 bp, Unknown
  Bacterial polypeptide expressing nucleotide sequence isolated from the Sargasso Sea
ttattttaatgcctatgttattactaatccacgtaatgccaataatctagtttataaacaacttttaactgaaaacgactggattgctctagattatgaaaacgatgagtcagcaccagttgaaatagcaatgggtgctgaggctataaaaaaattattacaacagattgatcttgaatatgaatcaaaaaacattcgtaaccaactgccgtatgttaaacgaccagaacgggataaattaattaagaaacttcgaattgttgaccaattacttgcctcaaattgcgatccagcatggatggttctagaaattattcctgttttacctcctgatttaaggccgatggtacaactagatggtggacgtttcgcaacatcagatttaaatgacttatataggcgtgtcattaatcgaaataatcgattatcccggttccaagaaattatggcaccagagcttattatacgtaatgagaaacgaatgttacaagaagcagttgatgcactcatcgataatggacgacgtggtaaagcagtagttggtttaaacaatcgaccgttaaaatcattatcagatattattgaaggaaaacaaggacgttttcgtcaaaatttattaggcaaacgagttgattattcaggtcgttcagtaattattgtcggacccgaattaaagttaaatcagtgcggtttaccaagagaaatggcgatcgaattattccaaccattcgttattcatcgtttaatttatgacgggttagtaaataatattaaagcggctaaaaatattatacaaagtaacgaaacattagcatgggatattc

SEQ ID NO: 255759 - DNA, 952 bp, Unknown
  Bacterial polypeptide expressing nucleotide sequence isolated from the Sargasso Sea
agaatgaaatttagaggaattatatgtgaaaaatgtggagtagaggttacaaaatcaaatgttagaagagagagaatgggtcatattaatttagctacacctgttgctcatatttggtttttaaaatctttaccaagtagaatatctttagttatcgatatgaagctaaaagaagtagaaaaagttttatattttgaaaattttatagttattgaaccaggtttaaccagcctaaggaagaatcaattattatctgaagaagaattaattaaataccaagaccaatatggtgaggagtcttttacagctggtataggagctgaagcaatattggaaattttaaaatcaattgatttatcacaagaaaaagaaaaactttcaaaatcaattaaagaaacaaaatctaaagttactgaggaaagaaatgttaaaagattaaaattaattgattcatttattgaaactggaaataaacctgagtggatgattttaacaactataccagtaattccacctgaattaagaccgcttgttccacttgatggtggtagattcgctacatcagatcttaacgatttatatagaagagtaattaatagaaataaccgattaaaaagattaatggaccttaaggctcctgacattatcataagaaatgaaaaaagaatgcttcaagaatcagttgatgctctgtttgacaatggaagaagagggagagtaatcacaggaacgggtaaaagaccattaaagtctttagccgaaatgttaaaaggtaaacaaggacgttttagacaaaatttattaggaaaacgagtagattattctggaagatctgtgattgttgtgggtccagatctaaaattacacgagtgtggtttaccaaaaaaaatggctttagagttattcaagccttttttatatgcaagattaaataaattaggattagcatcaa

SEQ ID NO: 255760 - DNA, 679 bp, Unknown
  Bacterial polypeptide expressing nucleotide sequence isolated from the Sargasso Sea
gccagagtggatgatcttaaaagtactgtttgtgttaccacctgacttacgtccgctggtaccgctcgatggcggccgcttcgcgacttcagatctgaacgatctgtaccgccgcgtgatcaaccgtaacaaccgtttgaagcgtctgttagatttagctgcgccggacatcatcgtacgcaacgaaaagcgtatgttacaagagtctgttgatgcgctattagataacggtcgtcgtggtcgtgctattaccggttctaacaagcgtcctctgaaatctttggccgacatgatcaaaggtaaacaaggtcgtttccgtcagaacttgttaggtaagcgtgttgactactcaggtcgttcggtaattaccgtaggtcctactttacgtctgcaccaatgtggtcttcctaagaagatggcactggaactgttcaagccattcatctatggcaagctggaaggtcgtggcttagcgacaaccatcaaagcggctaagaagatggtagagcgtgaagtggcggaagtttgggacgttcttgatgaagtgatccgcgaacatccagtgatgcttaaccgtgcaccaacactgcacagactgggtatccaagcgttcgaacctgtactgattgaaggtaaagcgatccagttacacccactcgtttgtgcggcatataacgcc

SEQ ID NO: 255761 - DNA, 256 bp, Unknown
  Bacterial polypeptide expressing nucleotide sequence isolated from the Sargasso Sea
atggagcaaacagaagtaaattcaaaaaattggaaatcattaattaaaccagcaaaactagatgttcaattaagtgatgataaagcatttgcaaagatcactgctgaaccactagaaaaaggatatgggttaacccttggcaattcattaagaagaattcttctatcttcaattagaggaactgctgtaacatctattcaaatagatggtgtattacatgaatttacatcaattaaaggtgtgagagaagacgtaa

SEQ ID NO: 255762 - DNA, 862 bp, Unknown
  Bacterial polypeptide expressing nucleotide sequence isolated from the Sargasso Sea
aagtgaagataaatcatacgctaaaattgtagctgaacctcttgaaaaaggttatggtttaactttaggtaactcactaagaaggattttattgtcttcgattagagggactgctgtaacagcaattcaaattgatggagtacttcatgaatttacctctattaaaggtgtgagagaagatgtaactgacattgttcttaatgtaaaatctttagcattaaaaagtacctctgagggtcaaaaaaaattagtgttagatgcaaaaggtccaggagtaattaaagcatctgatataacaaaagttaatgaaatagaaattttaaatccagacttggtaatttgtaatttagatgaaaatacaaatttccacatggagatgacaataggtaatggaaaaggttatgttcctgctgaacttaacaaacctgatgaaccacctttaggtcttatacctattgactcactttttagtccagttaaaaaagtatcttattccgtgagcacagctcgtgaaggtaaagctttagattatgacaaattaacaatggaaatagaaactaatggttctatatctgcagaggatgcgttagcgtattcagctagaattttccaagatcaattaggaatgttcgttaattttgatgaaccacaagaagttactattactgaaaaaccaagcgaaccagagtttaacaaaaacttgttaagaaaagttgacgaattagagctttctgtaaggtcaatgaactgtctaaaaaatgataatatcatttatattggtgatttagttcaaaagtcagaaggtgaaatgttaagaactccaaattttggaagaaaatctcttaatgagataaaagaagtt

SEQ ID NO: 255763 - DNA, 613 bp, Unknown
  Bacterial polypeptide expressing nucleotide sequence isolated from the Sargasso Sea
gatctgtaccgccgcgtgatcaaccgtaacaaccgtttgaagcgtctgttagatttagctgcgccggacatcatcgtacgcaacgaaaagcgtatgttacaagagtctgttgatgcgctattagataacggtcgtcgtggtcgtgctattaccggttctaacaagcgtcctctgaaatctttggccgacatgatcaaaggtaaacaaggtcgtttccgtcagaacttgttaggtaagcgtgttgactactcaggtcgttcggtaattaccgtaggtcctactttacgtctgcaccaatgtggtcttcctaagaagatggcactggaactgttcaagccattcatctatggcaagctggaaggtcgtggcttagcgacaaccatcaaagcggctaagaagatggtagagcgtgaagtggcggaagtttgggacgttcttgatgaagtgatccgcgaacatccagtgatgcttaaccgtgcaccaacactgcacagactgggtatccaagcgttcgaacctgtactgattgaaggtaaagcgatccagttacacccactcgtttgtgcggcatataacgccgacttcgacggtgaccaaatggcggtacacgtac

SEQ ID NO: 255764 - DNA, 376 bp, Unknown
  Bacterial polypeptide expressing nucleotide sequence isolated from the Sargasso Sea
atggaaacagaaaatgtaaatgttaaaaattggaaatcattaattaaaccagcaaaattagacgtaaagataagtgatgattttactcaagcaactatagtcgcagaacccttagaaaaaggctacgggttaactctaggtaattctttgagaagaattcttttatcttctataagaggtgcggcagtaacttcaattcaaatcgatggtgttttacatgaatttacttcaataaaaggtgtgagagaagatgtaactgatattgtattaaatgttaaatcgttagctctaaaatgtgcctctgaaggaacaaaaaaattagttttagatgctaaaggacctggagaaattaaagcatcagatattactcacagtg

SEQ ID NO: 255765 - DNA, 955 bp, Unknown
  Bacterial polypeptide expressing nucleotide sequence isolated from the Sargasso Sea
ctccacagattaggtattcaagcttttgaaccaattttaatagaaggtaaagctatacagcttcacccattagtttgtaccgcttttaatgcagattttgatggtgatcagatggcagttcacatacctcttagtcttgaagcccagttagaggcaagagtgttaatgatgagcactaacaatattctttcaccctctagcggaaaacctattattgttccaagtcaagatatcgttttgggtatttactacttatcattgattgatgaaaagaaagaagcaaataaatattactctcatgtaggtgaagtagaatttgctttagaaaataaaacaatagaattgcatacacctattttatatagaacaaaaaagtacaactcaaagacggatagttttgactaccataaatatactacttctgcgggaagagttatactttttaaaacagttcctgagaacaaatatttacctttcgatgttatcaataaagtcctgacaaaaaaagatataagcaacttattagacaatgtttacagatttacaggtcagaaagcgacgtgcatattcgttgatcaaattatgaatgttggatttaaatatgctgctaaagcaggtatttcattcggaaaagacgatttagtaataccggaggaaaagaatgttttaattcaagatacacaaaaactagtaaacagtttagaaaatcaataccaagaaggccttattactgaaagagaaaaatataacaaagtcgtgggcttgtggtctacctgtacagacaaagtagcaaaagctatgatgaaaactgtttcatctaataaagatagccaaattaattctgtttatattatggctgactctggtgcacgaggttctgaagctcagcttaaacaattagcaggtatgaggggtttaatggcaagaccttcaggtgaaattattgaaaatccaa

SEQ ID NO: 255766 - DNA, 646 bp, Unknown
  Bacterial polypeptide expressing nucleotide sequence isolated from the Sargasso Sea
tttgttgtcttcaattaggggtactgcggtgacggcaattcaaattgatggagtacttcatgaatttacctctattaagggtgtgagagaagatgtgactgatattgtgctaaatgttaagtccttagcattaaagagtacttctgagggatcaaaaaaattagtgttagatgcaaaaggtccaggtgtaattaaagcatctgatataacaaaaattaatgaaatagaaattttaaatccagacttggtaatttgcaatttagatgaaaatacaaatttccatatggaaatgacaataggaaatggaaaaggttatgtacctgctgaacttaacaaaccagatgaaccacctttaggtcttatacctattgactcactttttagtcctgttaaaaaagtatcttattctgtgagcactgctcgagagggtaaagctttagactatgacaaattaacaatggaaatagaaactaatggttctatttcagcagaagatgcattagcttactcagctagaatttttcaagatcaattaggaatgtttgttaattttgatgaacctcaagaagttaccattactgaaaaaccaagtgaaccagaatttaacaaaaacttattaagaaaagttgatgaattagagctttct

SEQ ID NO: 255767 - DNA, 322 bp, Unknown
  Bacterial polypeptide expressing nucleotide sequence isolated from the Sargasso Sea
atacttgtaaaaaatatcaatgagacagagtctaaagtttcagaggagagatcaataaaaaggttaaaattaattgattcatttattaagactggtaacaaccctgagtggatgattttaacagtaataccagtgataccaccagagctaagacccttagtgcccttagatggaggtagatttgctacttcagatttaaatgatttatatagaagagtaattaatagaaataatagactgaaaagattaatgggtctaaaagctccagatataatcgtcagaaatgaaaaaagaatgttacaagcgtccgtcgatgccctct

SEQ ID NO: 255768 - DNA, 718 bp, Unknown
  Bacterial polypeptide expressing nucleotide sequence isolated from the Sargasso Sea
aatggaaacagtagatgtaaatgttaaaaattggaaatcgctaattaaaccagcaaaattagatgttaatttaagcaatgacaaatcttatgcaaaaattatagctgaacctttagaaaagggatatggtttaacattaggaaactcattaagaagagtactactatcttctataagaggaacagcagtaacagcaatccaaattgatggtgtacttcacgaatttacatcaataaaaggtgtaagagaggatgtaacagatatagttttaaatgttaaatcacttgcattaaaatgtgcttctgagagtaataaaaaattaattttagatgctaaaggacctggtgaaataaaagcttcagatataactccggttgcagatgtagaaatattaaatccagatctagttatttgtaatttagatgaaaaaactaattttcacatggagatgacagtaggaagtggaaaaggatatgtttctgctgatatgaacaagcctgaagaacctcctctaggattaatatctattgactcattatttagtcctgtaaaaaaagtttcttactctgtaagcactgcaagagaaggaaaagcattagactacgataaattgataatggaaattgaaacaaatggatctatatctgctgaagatgctgtagcatattctgctagaatttttcaagatcaattaaatatgttcgtaaattttgacgaa

SEQ ID NO: 255769 - DNA, 855 bp, Unknown
  Bacterial polypeptide expressing nucleotide sequence isolated from the Sargasso Sea
aatgggtgcagaaacggtcaaagaacttcttttggaaattgatcttccaagtctgaatgagcaacttcgtaaagaaatgcgggaagtaacttctgaaacccgaaggaagcgtatccataaacgcctcaatttggtcagtgccctggttgattctggaaatacgtcaagttccatgatcattgaaaatttaccggtactgcccccggaattgaggccgttggttccgctcgaaggaggcaggtttgcgaccagtgacctgaatgatctttatcgccgtgttattcaccgaaataaccgactcaagcgattgatcgaattacgtgctccgggaatcatcgttaaaaatgagaagaggatgctccaggaatccgtggatgctctttttgataatggacgaagaggacggcctatggtcggttctaacaaacgtccgctgaaatcccttagcgatatgctgaaaggaaagcagggacgtttccgacaaaacctgcttggtaaacgagtcgattattcgggaaggacggtgattgttgtcggtccggatctcaaactgcaccaatgtggacttcccaaaaaaatggccctggaattattcaagccctttattttccatagattgatcgattaccaggaagttcatacgatcaaaaacgctaagcgcaaattggaggaaaatgatcctcgggtttgggctatccttgaagaagtagtcaaggaacatccaattttgctcaaccgtgcaccgaccttacaccgcctcggtatccaggcttttgaaccggtactgattgagggtaaagcaattcagttgcatcctctggtctgtactgcatttaacgcggactttgacgggga

SEQ ID NO: 255770 - DNA, 883 bp, Unknown
  Bacterial polypeptide expressing nucleotide sequence isolated from the Sargasso Sea
attccgcctgaactaagacctttagttcccttggaaggtggtagatttgctacatctgatttaaatgatttatatagaagggttattaatagaaataacagacttaaaagacttttagatcttagagcaccagacatcattgtcagaaatgaaaaaagaatgctccaagagtcagttgatgctttattcgataatggaagaagaggaagagtaataacaagcactaataaaagaccattaaaatctttatctgaaatgcttaaaggtaaacaagggagatttagacaaaaccttctaggtaagcgggttgactactccggtagatctgtgattgttgtaggccctgagttaaaacttcatcaatgtggtcttccaaagaaaatggctttggagctttttaaaccatttatatataacaaacttgaatcttacggctttgcctcgactcttaaatctgccagaaaaatggttgaatctgaaagaccagaagtgtgggatatattagatgaagttattagagaacatcctatccttttaaatagagctccaacacttcatagactagggatccaagcatttgaaccaattttaatagaaggtaaagcaatacagctacatccacttgtatgtaccgcctttaacgcagactttgatggtgaccaaatggctgtccatattccactgagcctagaagcacagctagaagcaagagttttaatgatgagcactaacaatattctttctccatcttctggaaaaccaatcattgtaccaagtcaagatattgttttaggtatttactacctttctttaatcaacgataatgaagaaactaagaaatatttttctcatataggtgaagttgaattcgctttagaaaaca

SEQ ID NO: 255771 - DNA, 877 bp, Unknown
  Bacterial polypeptide expressing nucleotide sequence isolated from the Sargasso Sea
gatggtgctcgatgtcgtgccggtgatcccacccgatctgcggccattggtcctgctggaatccggcaacttcgccaccagcgacctcaatgacctctaccggcgcatcatcaaccgaaacaaccgcctcaagaagctgatggacctcaacgcacccgaggtcatcatccgcaacgagaagcgaatgctgcagcaggccgtcgatgcactgttcgacaacggccgttgccgtcgccccgtcctgggttcatcgaatcgaccgctcaagtccctgaccgacatgatcaagggcaagcagggtcgcttccgtgagaatctcctgggcaagcgcgtcgactactcggctcgttcggtcatcgtggtcggtccggaactgaaactgcatcaatgcggccttcccaagaagatcgctctggaactcttccagccgttcatcattcgcaagctcaaggaacacgggcttgccgacacgatcaagtcggccaagcgcatgctcgagcggcgcgatccggaggtctgggacatcctcgagcaggtcatcgaccagcatccggtgctcttgaaccgtgctccgaccctgcaccgcatgggcatccaggcattcgaaccagttctggtcgaaggaaacgccatcaccctgcacccactggtgtgcaccgggtacaacgccgactttgatggcgaccagatggcggtccacctgccgctgtcgatcgaagcgcaggtcgaaagccatgtgttgatgctgtcaacgcacaacatcttctcaccggccaacggcaatccgatcgtctcccccagtcaggacatcctgatgggcgtgttcttcctcacctacatggccgaggacgactcacgtgcgccggagcaactccgc

SEQ ID NO: 255772 - DNA, 835 bp, Unknown
  Bacterial polypeptide expressing nucleotide sequence isolated from the Sargasso Sea
gacaaaactattgctaaagttatagctgagcctttagaaaaaggttttggtcaaactattggaaattctttacgtaggatattattatcatctattcaaggtgcagcagttactgcaattcaaattgatggagttctacacgagttttcttcaattaaaggtgtaagagaagatgtaactgacattgttttaaatgttaaaaatttagctataaaatcctcttcctctagttcaaaaaaaattattttagatataaaaggtcctaaagaggtcaaagcaaaagatatcactttagtacctgatgttgaaattttaaaccccgaacaaacaatttgtaatttagacgaaaaaactcatttccacatggagcttatggtaagtaccggtaaaggttatgttcaggcaaaaaaaaataaatcagaagatagtccacttggcttgatatcaatagactcactcttcagtcctgtaaaaaaagttgcattctcagttgaaaatactcgtgcaggaagtgcattagattacgataaattaataatgactgttgaaacaaatggaacagtagatgcagaggatgcgatagcatactcagctagaatttttcaagatcagctggcgatgtttgtaaattttgaggatcctcaagaggttgttaaagaagttaaatcttcagaacccgaatttaatagaaatttattaaaaagagtagaggagttagagttatcagtgagatctatgaattgtttaaaaaatgacaatatcatttatattggtgacttagttcaaaaaactgaaccagagatgctaaggactccaaatttggaagaaaatcttt

SEQ ID NO: 255773 - DNA, 730 bp, Unknown
  Bacterial polypeptide expressing nucleotide sequence isolated from the Sargasso Sea
aatggaaactgaaaatgtgaatattaaaaattggaaatcactaattaaaccatcaaaaattgatgtgcaaatgagtgatgatttatctaaagcaaagatagtagctgagcctctagaaaaaggttatggtttaactttgggtaattcattaagaagaattttattatcttcaataagaggtgcagcagttacatccatacaaatagatggtgtgctacacgagtttacttctataaaaggcgtgagagaagatgtaaccgatatagttttgaatgtaaaatctttggcattaaagtcatcttctgagggaactaaaaaacttattttagatgcaaaaggacctggggaaataaaagcttcagatataactccagtagctgatgttgaaattttaaatcctgaattagtaatttgtaatctagatgagaatacaagctttcatatggaaatgaatgttaataccggaaaggggtatgttccagcagaactaaataaacctgaggaaccacctttaggattaattgctatagattctttatacagtcccgtgaaaaaagtttcttattctgtaagcactgcgagagaaggaaaagccttagactatgataaacttacaatggaagttgaaacagatggttcaatatcagcagaagatgccgtggcctattctgcaagaatttttcaagatcaacttaaaatgtttattaattttgatgagccagtagaggca

SEQ ID NO: 255774 - DNA, 554 bp, Unknown
  Bacterial polypeptide expressing nucleotide sequence isolated from the Sargasso Sea
aatggaaggcacaaatatatttgataaaaattggaaatcattaactaagcctagtaagctagaagtagagagtaacgaagataaatctatagcaaaggtagtcgcgcaacctttagaaaaaggctttggccaaacaattggaaattccttaagaagaattttactttcttcaattcaaggcgcagctgtcacggcaatacaaattgatggtgttttgcatgaattctcttcaatcaaaggtgttagagaagatgttacagatatagttttaaatgtaaagaatttagcaattaagttaaattcagatggtccaaaaaaattaattttagatgcagaaggtcctaaagaggtaaaagcgaaagatatcactttaatttctgatgttaagattttaaatcctgatcaaactatttgtaacttagatgagaagacgaaatttcatatggagttagtagtaaacaatggacgaggttatgttttggcgcagcaaaataaatctgaggatacacctttaggcatgataccaatagattccctttttagtcctgtaaaaa

SEQ ID NO: 255775 - DNA, 832 bp, Unknown
  Bacterial polypeptide expressing nucleotide sequence isolated from the Sargasso Sea
tatgtttgggacgtacttcgaggaaataattaagggacagcctgttttgttaaaccgtgcaccaactcttcaccgtttaggtattcaagcttttgatccaatcttagttgaaggatctgctattcaagtgcatcctttggtttgtactgcatttaatgcagactttgatggtgatcagatggccgttcatgttcctctttcattagaggcacaggcagagtgtcgtttattggttatgtctacaaacaatttaatttcaccatcaaatggtcgtcctatcgtaacgcctactcaagatatgattcttggtatttatttccttactgttgaaaaccctgaagaagaaagagggaaagggaagtactttttggatatagatgaaggcttacgtgcttttgaggccaggcttatttttattcatactccgatacagattcgtattaacggtgagacttacaaaactacaattggtagggttatatttaataacgtcttagagagtactttaaagaagcatggtgttgagtctgttgactttataaattatgcgattggaaaaaaacaattgagtgagcttattcttaattgtttttatgcttatggcagtgacatttgttcagacttactaaatgaacttaaaaatgttggtttcaagtatgcgacattgtctgggatttcaatttcaattgatgatatgagagtaccgtctgaaaaacataaacttcttgaaaaagctgataaagagatctctaaacttgagaaaagctttgaaaaaggagccatgtcaagggaagagatggtattacgtagtaatgaagtatggcgtggcgtt

SEQ ID NO: 255776 - DNA, 871 bp, Unknown
  Bacterial polypeptide expressing nucleotide sequence isolated from the Sargasso Sea
atattttgaaaattttattgttattgaacctggactaactggattagccaaaaaccaacttttaaatgaagaggaattagcaaaatatcaagatgaatttggtgaagaggccttcacagcaggtattggtgcagaagccgtacttgagatgttaaaaagtttagatctagaattagaacgaaaaaatttagccaattatattaaagaaactaagtcaaaagttaatgaagaaagagcaattaaaagattaaaattaatcgagtcttttatagaaacaggtcaaaaaccagagtggatgataatgacagttgttcctgttattccaccagaattaagaccacttgttcctttagacggtggaagatttgctacttcggatctaaatgatctttatagaagagttattaacagaaataatagattaaaaagattaatggatcttaaggctccagatataattgtaagaaatgaaaaacgtatgcttcaagagtcagtagatgcattatttgataatggtagaagaggaagagtaattactggaactggtaaaagaccacttaaatccttggcagagatgctaaaaggaaaacaaggaagatttagacaaaatttacttggtaaaagggttgattactcaggtaggtctgtgattgtagtaggtccggatttgaaacttcatgagtgtggtttaccaaaaaaaatggctttagaattatttaaaccatttttatatgcgagattaaataaacttggtttggcttccactataaaacaagccaaaaaattagtagagaaagaaacaaacgctgtttgggacgcccttgaattaattgttagagaacatcctgttcttttaaatagagctcctact

SEQ ID NO: 255777 - DNA, 672 bp, Unknown
  Bacterial polypeptide expressing nucleotide sequence isolated from the Sargasso Sea
aatgacaaatagcaacttaagaacagaaaatcatttcgattacgtcaaaatctcaatagcttctccacaaagaataatggattggggacaaaggacattacctaatggacaagtggttggtgaagttacgaaacctgaaactattaattacagaacactcaaaccagaaatggatggactgttttgtgaaaagatttttggaccctctaaagattgggaatgccactgtggtaagtacaaaagagttagacacagaggtatcgtttgtgagaggtgcggggttgaggtaactgaaagtagggttagaagacatagaatgggctatataaaacttgctgcgccagtttcccatgtttggtatttaaaaggaatacctagttatgttgcaattcttcttgatattccgcttagagatgtagaacagatagtttactttaattgttatgttgtcttggatccaggagatcataaagaacttaaatacaagcaattacttactgaagatgaatggctagaaattgaagatgaaatctatgctgaagactcaactattgaaaatgaaccttttgttggtattggggctgaagctttaaaacaattacttgaagacctagatttaaatcaggttgctgaggagctcagagaagagattactaatagtaaaggtcagaa

SEQ ID NO: 255778 - DNA, 844 bp, Unknown
  Bacterial polypeptide expressing nucleotide sequence isolated from the Sargasso Sea
gaagccaagcgcaagaaactggtcaagcgtctcaagctgattgaggccttccaggaatccggcgcacgcccggaatggatgatccttgaagtgatcccggtcattccgccggaactgcgcccgctggttccgcttgatggtggccgtttcgcgacttcggatctgaacgatctgtatcgtcgtgtcatcaaccgtaacaaccgtctgaagcgcctgatcgagcttcgtgcgcccgatatcatcgtgcgtaacgaaaaacgtatgcttcaggaatcggttgatgcgctgtttgacaacggtcgtcgcggtcgtccgatcaccggtgccaacaagcgtccgctcaaatcgatgtcggacatgctcaaaggtaaacagggtcgtttccgtcagaaccttctgggtaaacgcgtcgactattccggtcgttccgttattaccgtgggtccgaacctgaaactgcatcagtgcggtctgccgaagaaaatggccctcgagctgttcaagccgttcgtttacgcgaagctggaactgtacgggatggccaccaccatcaaggctgcaaagcgcatggtggaaaaagagcgcgccgaagtttgggatatcctcgagcaggttatccgcgaacatccggtcatgctcaaccgtgcaccgaccctgcaccgtcttggtatccaggcgttcgagcctaccctgatcgaaggtaaggccatccagctgcacccgctcgtttgtactgcgtttaacgcggacttcgacggtgaccagatggctgtccacgtaccgctgtcgcttgaagcccagcttgaagcacgtaccctgatgatgtcgaccaacaacatcctgt

SEQ ID NO: 255779 - DNA, 779 bp, Unknown
  Bacterial polypeptide expressing nucleotide sequence isolated from the Sargasso Sea
aataaaaggcgttagagaagatgttactgacatcgttttaaacgtgaaatctttagcattaaaaagtaactctgagggcacaaaaaaattaattttagacgcaaaaggaccaggagaaattaaagcttcagatatagctccagttacagatgttgagattttaaatcctgatttagttatttgtaacctagacgaaaatactacttttcatatggagatgaatgttaacacaggtaaaggatatgttcctgcagagctaaacaaacctgaagagccaccattaggccttattgctattgactcactttatagcccagttaaaaaagtttcatattcagtaagtactgctagggaaggtaaagcattagattatgataagttaattatggaagttgaaactaatggatcaatttctgctgaagatgctgtagcttattcagctagaattttccaagatcaacttaaaatgtttataaactttgatgaaccagttgaagctccggtaaaagaagtttctacagaacctgaatttaacaaaaatttactaagaaaagtggatgagttagagttgtcagttagatcaatgaactgcttaaaaaatgacaatattatttatatcggtgacctggttcaaaaatctgaaggtgaaatgttgagaacacctaattttggaagaaaatcattaaatgaaattaaagaagttttaacaggtatgtctttatatttaggaatggaaatacctaattggccacctagacaatattgcagaaatgtctaag

SEQ ID NO: 255780 - DNA, 808 bp, Unknown
  Bacterial polypeptide expressing nucleotide sequence isolated from the Sargasso Sea
ttctctattgatggagtaagagaagacgttacagatatagtgttaaatattaagtccctgtctttaaatatgcattctgaaggtgtaagaaaaatgaatctcaatgtaactggtccaggagagattactgcgggtatgataaatacaccatctgaaattgatattataaatccagagttagttatctgtaatcttgatgacaatactgagtttaatatggagcttaccgtggcaaaaggcaaaggttatgttgccgctgaacataacaaaccagaggactctgcaataggtctgattcctatagactctatatttagcccagtaaaacaagtttcatacagtatagaaaacactagagaaggaaaagtcctagactatgataagcttacaatgtcaattgaaacaaatggatcagtatcacctgaggatgctattgcttttgcagcaagaataatacaagaccaattgcaatcgtttattaattttgaagaacctgaagttgtacaggaagaacctgatgcattggaacctcaatttaataaaaatcttttaagaaaagttgaagagcttgaactttcagtgagatctatgaattgcttgagaaatgataatattatttacataggagaccttgttcaaaaaagtgaaattgaaatgttgcgtacacccaattttggtcgtaagtctctaaatgaaataaaagaagtactaggcactatgtcactatatttaggcatggaagtgcctaactggccacctgaaaatatcgaggaaatggcaagaaagattgaagatccatataactaaa

SEQ ID NO: 255781 - DNA, 742 bp, Unknown
  Bacterial polypeptide expressing nucleotide sequence isolated from the Sargasso Sea
atggaaacggctaatgtaaatttaaaaaattggaaatcattaattaaacctggaaagttagatattaatttaaatgatgacaaatcatacgctaaaattgtggctgaaccacttgaaaaaggttatggtttaactttaggtaactcactaagaagaattctattgtcttcaataagaggtactgctgtaactgcaattcaaattgatggagtacttcatgagtttacttctattaaaggagtaagagaagatgtaactgatattgttcttaatgtaaaatctttagcattaaaaagcacttctgaaggttcaaaaaaattagtgcttgacgcaaaaggaccaggcgtaattaaagcatcagatataacaaaaattaatgaaatagaaattttaaaccctgatttggtgatttgtaatttagatgaaaatacaaatttccatatggagatgacaataggtaacggaaaaggttatgtacccgctgaacttaacaaaccagatgaaccaccattgggtctaataccaatagactcactttttagtccagtaaaaaaagtgtcatattctgttagcactgctagagagggtaaagctttagactatgacaaattaacaatggaaatagaaactaatggatctatctcagcagaagatgcgttagcgtactcagctagaatttttcaagaccaattaggaatgtttgttaattttgatgaacctcaagaaagttactattactgaa

SEQ ID NO: 255782 - DNA, 848 bp, Unknown
  Bacterial polypeptide expressing nucleotide sequence isolated from the Sargasso Sea
agagcgtggctttggcctactctgggtaatgccttacgccgtatacttttatcatctatgcctggatgtgcagtaactgaagttgaaatcgacggtgtattgcatgagtacagcgcgaaagaaggcgtacaagaagacatcattgaaatactactaaacctaaaaggtctagcagtaacgttagaaggcaaagatgaagtttttctgaccctgactaaatctggtgtaggccctgtgactgcggctgatattcagcacgatggcgatgtaacaattgctaatccagatcacgttatttgtcatttaacgacagatagcagcgagatcagcatgcgtattcgtgttgagcgtggtcgtggttatgtgccggcatctagtcgtttatcctctgatgacgatgagcgtccaattggtcgattgctgcttgatgcatcattcagcccagttgaacgtattgcgtactcggttgaatcagcccgtgttgagcaacgtacagacttagacaagttaatcattgatatggaaacaaacggcaccttagatcctgaagaagcgatccgccgtgcgtctactatcttagctgagcaattagatgcattcgtagatttacgtgatgtaactgagccagaagagaaagaagagaagccagaattcgatcctattctacttcgtccagttgatgatcttgaactaacagtacgttcagcaaactgtttgaaagccgagcaaattcaatatatcggtgatttagttcagcgcactgaagttgagcttcttaaaacgcctaacctaagcaagaagtctctaactgaaataaaagacgtgctagcttcacgtggtctttctct

SEQ ID NO: 255783 - DNA, 830 bp, Unknown
  Bacterial polypeptide expressing nucleotide sequence isolated from the Sargasso Sea
tgctgatgtaaacatcaaaaattggaaatcgttaattaaaccacctaaactagatattaaattaagtgatgataaatcacatgccagaattacggctgaaccacttgaaaagggttacggacttacattaggtaactcgttaagaagaattttattgtcatcaattagaggtgctgcagtaacttcagttcaaatagatggtgtgttacatgaatttagctcaattaagggtgtaagagaggatgttacagacattgttctaaacattaaatcactagcccttaagagtcactcagaaggtacaaaaaagcttattcttgatgcaaaaggtccaggagaaattaaagcttcaaatatcacaccagttactgatatagaaatattaaatcctgatcttgtaatatgtaacttggatgaaaatacaaattttcatatggaaatgaatgtaagtacaggtaaaggatatgtatcggcggatttaaataaacctgaggatccacctctaggattaatcccaatagattctttatatagcccagtaaaaagagtttcgtattcagtgagtacagctagagaaggaaaagccttagattatgataaattaattatggaagttgagacaaatggttcgatttcagcggaggatgcagtagcttatgcagcaagaatttttcaagatcaattaggaatgtttgttaattttgacgagccacaagagataattgtcagagataaaccaactgaacctgaatttaataaaaatttattgagaaaagttgatgaattagaattatcagtaagatcgatgaattgtttgaaaaatgaataat

SEQ ID NO: 255784 - DNA, 929 bp, Unknown
  Bacterial polypeptide expressing nucleotide sequence isolated from the Sargasso Sea
aagtttagagaaagttttatactttgaacagtttattgttgttgaaccaggattaactgatcttaaaaaaggtgaaatcatctctgaagaacaatatattgattatcaagatgaatacggtgaagattcatttagtgctgctataggagcggaagcaattgaacaaatgcttctcaatattgatttagagtctgattataaacaattaaaagttgatttatcagagacaaaatcagaactaaaaaaaacaaagattactaaaagattaaagttaattgaatcatttataaattcaaagaataaacctgaatggatgattttaagagttcttccagttataccccctgaattaaggccattagtccctctagatggaggcagatttgctactagtgatcttaatgacttatatagaagggttatcaatagaaataatagacttaaaagactaatagatctcagagcacctgatataattattaggaatgaaaaaagaatgcttcaagagtcagttgatgctttatttgataacggcagaagaggtagagtaataacttcaacaaataagagacctttaaaatcgctttctgatatgcttaaaggaaaacaagggcgatttagacaaaatttattaggtaaaagagttgattattctggtagatcagtaattgttgttggtccaaatttaaaacttcatcaatgtggtattccaaaaaaaatggctcttgaattgtttaagccttttatttttcacaaacttgacatctatggttgggctaatactataaaagctgcaaaaaaattagttgaaaaagaggatccaagagtttgggatatacttgaagatgttattagagaacatccagtattgcttaacagagctccaacacttcatagactaggtatacaggctttgaaccaatattaat

SEQ ID NO: 255785 - DNA, 936 bp, Unknown
  Bacterial polypeptide expressing nucleotide sequence isolated from the Sargasso Sea
aagttagacattcagctaagtgatgataaaacttatgcaaaagttattgctgaacctttagaaaaaggttatggattgacattaggaaattcattaagaagaattttattatcatcaattagaggatcggctgtaacagcagttcaaatagatggcgttctacatgagtttacatccataaaaggtgttagagaagatgtaacagatattatcttaaatgttaaatcgcttgcattaaaaagttcatctgaaggtgttaaaaaactaattttagatgctaagggaccaggtataattaaagcatctgatattactcttgtttcagatatagagatattaaatccagatttagtaatttgtaatttagatgaaaatactaatttccatatggaaatgaatgttggatcaggaaaagggtatgtgccttcagtaatgaataaacctgaagaaccaccattaggattaataccagtagattcattatttagtccagttaaaaaagtatcttattctgttagcaccgctagagaaggaaaagcacttgattatgataaactaaccatggaagttcaaaccaatggttcaatatcagctgaagatgcagtagcgtatgcagcgaaaatctttcaagatcaacttaacatgtttgttaattttgatgagccagaagaaattccaactcgtgaacaaccaagtgaacctgaatttaacaaaaacttattaagaaaagtagatgaattagaactgtctgttagatctatgaattgcttaaaaaatgacaatattatttacattggcgacctagtgcaaaaatctgaaggtgaaatgctaagaactccaaattttggtagaaaatcacttaacgaaattaaagaggttttaactagtatgtctctatatttaggaatggaaattcctaattggcctccagacaat

SEQ ID NO: 255786 - DNA, 892 bp, Unknown
  Bacterial polypeptide expressing nucleotide sequence isolated from the Sargasso Sea
tttgattaaaccatctaaattagatgttcaaattagtgatgacttaacacatgccaagattgtagctgagcctttagaaaaaggttacggattaactttaggaaactccttaagaagaattttactttcttcaatcagaggagctgcagttacttcaattcaaatagatggtgttctacatgaatttacatcaattaaaggtgtaagagaggacgtaacagatatagtattaaatgttaaatcactagctttaaaatgtaattctgaaggtactaaaaaattagttttggatgcaaaaggtccaggtgaaataaaagcttcagacattgctcctgtgactgatgtagaaatattaaatcccgagttagtaatttgtaacttagatgaaaatactacttttcacatggaaatgaatgtaaacactggaaaaggttatgttccagctgagctaaataaaccagaggaaccaccgttaggtttaattgcgattgactctttgtacagccctgtaaaaaaagtttcttattctgttagcacagcaagagaaggaaaagctcttgattatgataaattaacaatggaagtagagaccaatggttcaatttctgcagaagatgctgttgcgtattctgctaggatttttcaagaccagttgaaaatgtttgttaattttgatgagccagttgaagttccagtaaaagaagtttcatctgaacctgaatttaataagaatttactgagaaaagttgatgaactagagctatctgttagatcaatgaattgcttaaaaaatgacaacataatttatattggtgatttagttcaaaaatctgagggtgaaatgttaagaacaccaaattttggtagaaaatctttaaatgagattaaagaa

SEQ ID NO: 255787 - DNA, 902 bp, Unknown
  Bacterial polypeptide expressing nucleotide sequence isolated from the Sargasso Sea
cttattaggtaaaagagtagattattcgggtaggtcagttattgttgctggtcctaatcttagattacatcaatgcggattaccaaagaagatggctttagagctattcaaaccttttgtttatgggaagcttgaacaaagagagcttgctacaactataaaaggagctaagaaattagtagaaagagaaacaccagaggtatgggaagtactagaagaagttataagagagcatccagttttattaaatagagctccaactcttcataggcttggcctgcaagcatttgaaccaaaattaattgaaggtaaggcaattcagttacatccattggtttgtgttgctttcaatgccgactttgatggtgaccaaatggcagttcatgtgccacttactttagaagctcagctagaagcaagggcattaatgatgtcaactaataacatactttcaccagctgacgggtctccaattataaatccaactcaagatattgtattaggcctatattatatgactcgagacaatgcaaatgcttcaggagctggaagagtttttagtaattctgatgaagttttaagagcatatgagacagaaagtctagaaatccattctcctataaaagtaagaattgatcatggtaatggtgaaagttcccttgaagaaacaaccgtcggtaggatattaatatggagaattacgccaacagaggtaggttttaaaaatattaatgatgttttaaataaaaaattaatctcaaagcttgttgatatttcatacagaaaagcaggactaaagaaaacagttatttttgctgatcagcttatgtatttaggttttgatttttcaacgagatcaggttcttctatcggggttaatgattttgttattcctaaagaaa

SEQ ID NO: 255788 - DNA, 889 bp, Unknown
  Bacterial polypeptide expressing nucleotide sequence isolated from the Sargasso Sea
aatgcaccccgatattattgtcagaaacgagaagcgaatgttgcaagaagccgttgatgcgcttctcgataacggacgcaggggaagagcaataacaggctcgaataaaagacctcttaagtcattggcagatatgattaaaggtaagcaggggagatttagacaaaatctactcgggaagcgggtagactactccggtcgctcggtaattgtggttggtccagctctaaagcttcatcaatgtggcttgccaaaaaaaatggctttggaattattcaaaccatttatttttggcaagctcgaacgtcgaggtttagccactacaataaaagctgcaaagaaaatggtagaacgggagaccgccgaggtgtgggacatactcgctgaagtaatacgcgagcacccagtacttctgaacagagccccgactctgcataggcttggtatacaagcctttgagcctgtgctaatcgagggaaaagcaattcaactgcatccgttagtttgcgccgcttataatgcagactttgatggtgatcaaatggcggttcatgttcctttaactctggaagcccagttagaggctcgtacgttgatgatgtcaacaaataacatcttagctcctgctaatggggagccaataattgtgccttcacaggatgtggttttaggattgtattacatgactcgagagagaataaatgcaaagggagagggcatgatatttgccgacgcaaaggaagtgcaaagagcatacgataccggccaagttcacttgcaggccaaaattaaagtacgggtcgttgagaaacttgaaaatgagagtggaaccctaaaagaggctagtgaaattttcgataccactgttggccgagtcttactatacaac

SEQ ID NO: 255789 - DNA, 968 bp, Unknown
  Bacterial polypeptide expressing nucleotide sequence isolated from the Sargasso Sea
agagtctgttgatgcactatttgataatggtagaagaggaagagtaattactggaacagaaaaaagacctctaaaatccttggcagaaatgttaaaaggtaagcaaggaagatttagacaaaacttattaggaaaaagggtagattactcaggaagatcagtaattgtggttggaccagatttaaaattgcacgaatgtggtcttcctaaaaaaatggctttagagttattcaaaccttttttatatgctaggcttaataaattaggattggcctcaacaataaaacaagcaaaaaaattagtagaaaaagaaagagatgaagtttgggatgcacttgagataattgttcgagaacatcctgtattattgaatagagctccaacattacacagacttggtgttcaagcatttgaaccaaaattaattgaaggtgacgcaatacaacttcatcctttaacatgcgcagcatttaatgcagattttgatggtgatcaaatggcggttcacgttcctttaagtttagaggcacaacttgaagctagagtactgatgatgtctacaaacaatattttaagcccttcaaatggaaaacctattatagtccctagtcaagatatgatcttaggtatatattatttatctcaaccaccttatcaaaataaaaaagtagagggttattttgttaatacaaatgaaattttacaagctcttgaaaatagaagtattaaaatccattccagagttatatctagatttgaaacaattgatgaaaatggtaataaaaaatatgaaaagtatactagtacagctggaagattcttattagcggacataatcccaaaaaatattaacaataagttctctttaattgatcgattgttaccaaaaagaacagtatctgaggtaatagatcatattttcagattctctggtcaaaaaaacacagtgattttttgtgataaatgaa

SEQ ID NO: 255790 - DNA, 628 bp, Unknown
  Bacterial polypeptide expressing nucleotide sequence isolated from the Sargasso Sea
tttgttatcatctattagaggtgcagctgttacttcgatccaaattgatggagttttacatgagtttacttcaattaaaggagttagagaagatgtaactgatatagtgttaaacgttaaatctttagcattaaaatctaattcagaaggtactaaaaaattagttttagatgccaaaggacctggtgaaattaaagcttctgatatagctcctgtagctgatgttgaaattctaaatccagatttagttatatgtaatcttgatgaaaatactaatttccatatggaaatgaatgtaaatactggaaaaggatacgttcctgcagatttaaataaaccagaggagccacctttaggtcttattgcgatagactcattatatagtccagttaaaaaagtttcatactcaataagcaccgcaagagaaggtaaagcattagactatgacaaattaactatggaagttgaaactaacggggcaatctctgcagaggacgcagtggcctattctgcaagaatttttcaagatcaattgaaaatgtttgttaattttgatgagcctgtagaagcaccggttaaagaagtttcgacagaacctgagtttaataaaaatttactgagaaaagtt

SEQ ID NO: 255791 - DNA, 736 bp, Unknown
  Bacterial polypeptide expressing nucleotide sequence isolated from the Sargasso Sea
aatggaagttgatgggccaaagagattaagacttaatgcaaagggcccattatcagttactgctgatatgattgaattaacttcagatatcgaaataatgaatccagaacatcatatatgtacacttgataagggatcatctttgaatgttgagtttattgtcgagaccggaaaaggttatgttccagcaaattctagttcacaagttgaaatgccaataggtttaatacctgtggatgctttatttagtcctataaaacaagtagcttatagagttgaaaatacaagagttggtcaacaaacagattatgataaactcctttttgatattgagacagatggcacagttactccagaagatgctattgcatttggtgcaagaatattaactgaacaattaaaaccgtttattaattttgatgaaccagaaccagaaattgaagaagatttagaaagtgtattgccttttagcagaaatttactaaaaaaggtggacgaattagagttaagtgttaggtcagctaattgcttgaaaaatgataatatagtttatataggtgatctagttcaaaaaaccgaacctgaaatgcttagaactccaaattttggtagaaaatcattaaatgaaattaaagaggtccttaaaatgatgtccttagaattagggatggatgttgagggatggccaccagaaaatattgaagaattagcaaaaaaacatgaagatccatattaa

SEQ ID NO: 255792 - DNA, 1260 bp, Unknown
  Bacterial polypeptide expressing nucleotide sequence isolated from the Sargasso Sea
attggcttctcctcaacaaattagatcttggtcttatggggaagtgaaaaagcctgagactattaattacagaacctttaaaccagaaagagacggattattttgctccaagatatttggccctattaaagattacgaatgcatatgtgggaaatataaacgtatgaaacatagaggcgttgtttgtgagaaatgcggagttgaagtaaccctttctaaggtcagaagagaaaggatgggacatattgaacttgccgccccggttgcccatatttggttcttaaagtcattaccttctcgattagcgcttgctcttgatctgactttaaaagatttagaaagagttttgtattttgaatctttcatagtaattgaacctggaatgactgatttagaggtaggccaactattaactgatgaagaatattatgaggctttagaaacttggggagatgaattcgaagcaggtatgggagctgagtctattcaaactctcttaaaagaattggatttagaatctgctataaaggatattcaagatgagatgcctttaacaaaatcagaagctaagttaaagaagtttgctaaaagattaaaattacttaagtcttttaatgaatctggaaatagacctgaatggatggttctagaagttttacctattctaccacccgatctaaggcctttagtgccattagaaggtggaaggtttgccacttctgatttaaatgatctatatagaagggtcataaatagaaataataggcttaagagactcttggatttaaatgctccagaaataattactagaaatgaaaaaagaatgttacaggagtcagttgacgcattattagacaatggaagaagaggaagggcggtaacaggctcaaacaagagacctcttaaatctctagctgacatgataaaagggaaacagggaagatttaggcagaaccttttaggaaagagagtggattattcaggtcgttcagtgatcgtagtaggtccaactttaaagcttcatcaatgtggattacctaagaaaatggctcttgaactatttaaaccatttgtctttggtagattgcagcaacttgagcttgctaatactattaagcttgctaaaagaatggtagacagagaagagcctgaagtttgggacatattggatgaagttattcgagaacatcctgttatgcttaatcgggcacctactctacacaggctaggaatttcagcctttcgaacctgtttggttga

SEQ ID NO: 255793 - DNA, 1033 bp, Unknown
  Bacterial polypeptide expressing nucleotide sequence isolated from the Sargasso Sea
aatggagaatattaatataatagacaaaaattggaaaacattaattaagccttctaaacttgcgataacaagcaacgatgataaatcaatggcgaaagtaatcgcagaacctttagaaaaaggttttggtcaaacaataggaaatgcgcttagaagaattcttttatcatctatccaaggtgcagcagtgaccgcgattcaaattgatggagtgctgcatgaattttcatcaataaaaggtgttagagaggatgttacagacattgtgctaaatgtaaagaatttagcagtaaaattaaatacttcaggatcaaaaaaattaattttagatgcaactggacccaaagaagttaaagcaaaagatataacaccggtaaatggtgttgaaattttaaaccttgatcagacaatttgtaatcttgatgaaaaaactaagtttcatatggaattagttgttaataacggaagaggctatgttttagctcaaaaaaataaaacagaagacactccccttggtttgattgcgattgactcattattcagtcctgtaaaaaaagtttcttattcaattgacactacaagagaaggtgatgctttagactatgataaattgacaatgcaagttgaaacaaatggaacaattccagcagaagatgccgtagcatttgctgctagaatatttcaagatcagctttcaatgtttgtaaattttgaagatccaaaagaaattcctacacaaactaaatcaagtgaacctgaatttaataagaatttacttaaaagagtagaggagttagaactttctgtacgatcaatgaattgtttaaagaacgacaacatcatctatattggtgatcttgtacaaaaatctgaatcagaaatgttgagaactcctaactttggaagaaagtctctaaatgagattaaagaggtgctaagttctatgtctttatacctaggcatggaaatacccaattggccaccagataatattgtagagttgtctaaaaaattggaagagagcacatattaa

SEQ ID NO: 255794 - DNA, 733 bp, Unknown
  Bacterial polypeptide expressing nucleotide sequence isolated from the Sargasso Sea
ctgcagtaccagatcgatcgcatcgagcatcaagttgatgaggaccgcgcccagaccggcgtgtttctcatcggccccctcgagcgcggccaggccaccactcttggcaacgccctgcgccgggtcctgatgggaggcctggaaggcagtgcggtcaccgccatccgcatcgcaggcgtcaatcacgagtacgccaccgttccgggcgttcgcgaggacgtgctcgacatcctgctgaactgcaagcagctgtcgatcaacaaccgatcgggtgagctggagatcggccgtcttgtgatcgcgggccccgccgatgtgaaagcaggcgatctgcagttctcctcccaggttcaggtggtggatgtcaaccgtccgatcgcgacggttgccgatggccacagcctggagctggaggtgcatgtggagcgaggcgtcggctaccgccccgtcgaccgccacaacgaggacaccagcgccattgatctgctccagatcgatgccgtgttcatgccggtgatccgggtgaacttcagcattgatgagacagccgtggccgaaggcggttccgcccgcgagcgtctcaagatctcgatcgtcaccgatggatccatcactcccgacgacgctctggcacaggcagccaaccagctgatcgagctattccagcccctggccacggtgactctggtggaggaaccccggtgtcgaacccggagccctccgcagaagccca

SEQ ID NO: 255795 - DNA, 1542 bp, Unknown
  Bacterial polypeptide expressing nucleotide sequence isolated from the Sargasso Sea
tgaagaatactacgaagccttagagacttggggtgatgagtttgaggcaggaatgggcgcggaatctatccaaactttattgaaagaacttgatctagaggctgctattaaagacatccaagaggaaatgcctttaactaagtcagaagctaagcttaagaaatatgctaagagacttaaattacttaaatcattcaatgaatcaggtaatagaccagaatggatgattttagaagtacttcccattttgccgcccgatttgagacccctggtgcctttagaaggaggaagatttgctacatcagacttaaatgatttatatagaagggttataaacagaaataatagattgaagcgacttcttgatctgaatgctccagatattattacaagaaatgaaaaaaggatgttgcaagaatcagtcgatgcactattggataatggaagaagaggaagagcagtgactggttctaataaaagacctttaaagtctcttgccgatatgatcaaaggtaaacaaggaaggttcagacaaaacctgcttggcaagagagtagattattcaggacgttcagtgattgtagttggacctactcttaaattacatcaatgtggattgccaaagaaaatggctcttgagcttttcaagccatttgtttttggaaagcttcagcaattggagttagctaacacaattaaacttgccaaacgtatggtggatagagaggaacctgaagtctgggatattttagacgaagttatcagagaacatcctgtaatgcttaatcgcgcaccaactttgcatagattaggtattcaagcttttgaaccagttttagtagaaggtaaagctattcaacttcacccattagtttgtaaggcatataacgcagactttgatggagatcagatggctgttcatgtccctttaacattagaggcacagcttgaatgtagagctttgatgatggctacaaacaatattctctcaccgtcaaatggtaagcccattatcgatccttcacaagatgtagttctaggtctttattacatgtctagagaaaagatcaatgatctgggtgagggaaggatcatgtcttcaccggatgaggtaaatagagcttattattctggaactgtcggtcttcaagctaagatcaaggttagattgaaacctaacaaactagatgatgaaccgtctcagatagtagaaacaactactggaagaactctcctctatgagctcctaccagaaggaatgtcctttgatcttgtaaacaaaacattggatagcaaacagatttctacacttatcgattttgtatatagaaaagccggtttaaaaagtacagttattttcgctgatagactgatgtatatgggctacgaattctcaactaaatcaggttcttctattggaatagacgatttcgtaattcctgatgataaacaaaaaatagttagtgaggctgaacaggaagttaaagatattgagtcgcagtttgcctcgggacttgttacaaaaggcgaaaaatataataa

SEQ ID NO: 255796 - DNA, 836 bp, Unknown
  Bacterial polypeptide expressing nucleotide sequence isolated from the Sargasso Sea
tcattcaatcgatggagtgcttcatgaatttacatctatcaaaggtgtaagagaagatgttactgacattgtattaaacgttaaatctctagcattaaaatgtgctgctgagggaacaaaaaaactggtattagatgcaaaaggacctggtgaaataaaagcgtctgacattgcatcagttcctgatgttgaaattttgaatcctgacttagttatttgtaatttggatgaaaatactcacttccatatggaaatgaatgttaacactggaaaaggttatgttccagctgatttaaataaaccagaagaaccacctttgggtttaattgcaatagactcattatatagtcctgttaaaaaagtttcctattcagtaagtactgcaagagaaggcaaggctttagattacgataaattaacgatggaagttgaaacaaacggatcaatttctgctgaagatgcagttgcttattctgctagaatttttcaagatcaattaaaaatgtttattaattttgatgaacctgtggaagctccagttaaagaagtttcaacagagcctgaatttaataaaaatttattaagaaaagtagacgagcttgaattatctgttagatcaatgaattgtcttaaaaatgataatataatttatattggtgatttagttcaaaaatctgagggcgagatgttaagaaccccaaattttggaagaaaatcattaaatgaaattaaagaagttttaactggtatgtctctttatttaggtatggaaattccaaattggccaccagataatatcgcagaaatgtctaaaaaattagaggaaagtatataat

SEQ ID NO: 255797 - DNA, 1019 bp, Unknown
  Bacterial polypeptide expressing nucleotide sequence isolated from the Sargasso Sea
aatgaaaaaagatattaaagatttttttaaagaaactgccatatcagactctcaaaattttaatagtattaaaattactttagcaagccctgaaaagataaagtcatggacttatggagaaataaaaaaacccgaaactattaattatagaactttcagacctgaaaaagacggcctattttgtgcgagaatatttggtccaataaaagattacgaatgtttatgtggaaaatataaaagaatgaagttcagaggaattatttgtgagaagtgtggcgtagaggttactaaatcaaatgttcgtagagaaagaatggggcacatcaatttatcaaccccagttgcacatatttggtttttaaaatctttaccaagtagaatttcactagctattgatatgaagcttaaagaggttgaaagagttctatactttgaaagttttattgttatagagcctggattaactagtcttaaaaaaaatcaacttttaaacgaagatgaattaaataaatatcaagaggagtttggtgaagaatcctttactgcaggaataggagcagaggcgatactagagattttaaaatctatagacttgaataaagagagagaaattttattaaaaaatataaatgagacaaaatcaaaggttgctgaagaaagatctataaaaagattaaaactgatcgattcatttattgaaactggtaacaaaccagaatggatgattttaactactatacctgtaataccaccagagttaaggccacttgttcctctagatggaggtagatttgcaacatcagatctaaacgatttgtatagaagagttataaatagaaataatagattgaaaagattaatggatcttaaagctccagatataattattagaaatgaaaaacgaatgttgcaagagtcagtggatgctttattcgataatggcagaagaggcagagtaattacaggaactggtaaacgtccattaaaatctttggctgaaatgcttaaaggaaaacaag

SEQ ID NO: 255798 - DNA, 979 bp, Unknown
  Bacterial polypeptide expressing nucleotide sequence isolated from the Sargasso Sea
tatgcaaaccagtttgttgaagcccaagatcatcgcagttgaatcgcttggtgagagccacgcgaaagtggtcatggaaccgtttgaacgcggttatggccacaccttgggtaacgcgcttcggcgcgtgctgttgtcgtcgatggtgggttacgcgcctaccgaagtgacgatcgcaggcgtcgtacatgagtattcgacgctcgacggtgtgcaagaggatgtggtcaacctgttgttgaacctgaagggcgtagtgttcaagctgcataaccgtgacgaagtgacggttacgctgcgcaaggaaggcgaaggcgttgtcaccgctggggacatcgaactcgcgcacgattgcgaagtgattaacccggatcacgtgattgcgcacctgtcgaagggcggcaagctcgacgtgcagatcaaggtcgaaaaaggccgtggttatgtgccgggcaatgtgcgtcgttacggcgaagaatcggccaagatcatcggccgtatcgtgctggacgcgtcgttctcgccggttcgccgcgtgagctacgccgttgaaagcgctcgcgtcgaacagcgtaccgacctcgacaagctcgtgatgaacatcgagaccaacggcgtgatctcgccggaagaagcgatccgtcaatcggcgcgtattctggttgatcaactgtcggtgttcgctgcactggaaggtaccgaagcaacggctgaagcgccgtcgcgtgcgccgcagatcgatccgatcctgctgcgtccggttgatgatctcgaactgacggttcgttccgcgaactgcctgaaggccgagaacatttactacatcggcgacctgatccagcgcacggaaaacgagttgctcaagaccccgaatctgggtcgcaagtcgttgaacgaaatcaaggaagtactggcgtcgcgtggtttgacgctgggcatgaaactcgaaaactggccgccggcaggtttggacaagtaa

SEQ ID NO: 255799 - DNA, 1042 bp, Unknown
  Bacterial polypeptide expressing nucleotide sequence isolated from the Sargasso Sea
atgaataaagaactttcaaatatatttaatcaaaatttaggtgttcaaaattttaatagtttaaaaatatcaattgcaagcccagaagatgtaagatcttggtcttttggtgaaattaaaaaacctgaaacaattaattatagaacatttaaacctgagaaagatgggctgttttgttccagaatatttggacctgttaaggattacgaatgtttgtgtggaaaatacaaaagaatgaaatttagaggaattatatgcgaaaaatgtggtgttgaagttactctttcaaaagtaagaagagacagaatgggtcatattgagctagctgctcctgtgtctcacatttggtttatgaaatctcttccaagtagaattgcaactttattagatatgaccataaaaaatcttgagaaggttttatattttgaacaatttattgttgttgagcctggattaactgacttaaaaaaaggtgaaattatttcagaagaacaattcatagattatcaagatgaatatggtgaagactcttttagtgcagcaataggggccgaagctattgagcaaatgcttttaaatatagatcttgaagctgattttaagcaaatgaaaattgatttatctgaaacaaaatctgaactaaaaaaaacaaaaattactaaaagattaaaattaattgagtcatttattgtttctaaaaataaacctgagtggatgatattaagagttcttccagttatacctccagaattaagacctttagttcctttagatggaggaaggtttgccacaagtgatcttaacgatttatatcgaagagtaattaatagaaataatagattaaaaagacttatagatttaagagctcctgacataataataagaaatgaaaaaagaatgcttcaggagtctgttgatgcactttttgataatggaagaagaggtcgcgttataactttcacaaacaaaagacctctaaaatcattatccgatatgttaaaaggtaaacaaggtcgttttagacaaaaacttcttgggtaaa

SEQ ID NO: 255800 - DNA, 2980 bp, Unknown
  Bacterial polypeptide expressing nucleotide sequence isolated from the Sargasso Sea
atgaaagatttaactaatttatttaaaactaacactcaaacattaaattttgatcagattaaaatttctgtttcaagccctgagcaaataagatcttggtcttttggtgaaataaaaaaacctgagactataaattacagaaccttcaaacctgaaagagaaggtttgttctgtgctagaatatttggacctacaaaagattatgagtgtttgtgtggaaaatataaaagaatgaagtttaaaggcattacatgtgaaaagtgtggtgtcgaagttacactctctaaagtaagaagagaaagaatggctcatattgaattagccgctcctgtagcccatatttggtttttaaaatcactacctagtagaataggccttgcacttgatataactctaaaaaatcttgaaaaggttttatattttgaaagtcatatagttatagaccctttaatgtctggtttaaacccaaatcaattattaaatgatgaagaattagaggaagctattgatcaatttggtgaagactctttcaaacatggaattggcgcagaagctgttcaagaaatattatctaaaatcgatttagtggcagaaatagaaaaacttgtagaagaaagtgaagctacatcatctgaaactaaaaagaaaaaaatactaaaaagaatgaaggttatggaaggttttaaaaactcgaatattaaacctgaatggatggttttaaaggtacttccagttataccacctgaattaagacctctagttcctttagaaggtggacgttttgctacttctgacctaaacgatttgtatcgaagagtaatcaatagaaacaatagattaaaaagactgttagatcttagagctcctgacattattgttagaaacgaaaaaagaatgcttcaagagtctgtagacgcattatttgataatggaagaagaggaagagtaatcacaagtaccaacaagagacctctaaaatctctatctgaaatgttaaaaggaaaacaaggaagatttagacaaaacttattaggtaaaagagtcgattattctggtcgttcagtaattgttgttggacctgaattaaaacttcatcaatgcggtttacctaagaaaatggctttagagctttttaaaccctttatatacaataaattggagtcctatggttttgcctcaacgttaaaatctgcaagaaaaatggtagagtctgagagaccagaagtttgggatatcttagatgaagtaattagagagcatccaattcttttaaatcgtgcaccaacacttcacagattaggtattcaagcatttgaaccaattttaattgaaggtaaagctatccaacttcatccattagtttgtactgcgttcaatgcagactttgatggtgaccaaatggcagttcacatacctttgagccttgaagcacaattagaagcgagagttttaatgatgagtacgaataatattctctctccttcaagtggaaagccaattatcgtaccaagtcaagatattgtgttgggtatatattatttatcattgataaatgaaaaagaagaaccaaagaaatattattcacatgtcggtgaggtagagtttgctttagaaaacaaaactattgaacttcacacacccattctttatagaactaaagtttataactcagaaaaagatagctttgaatataaaaaatataccacttctgcaggtagagttatcctttttaaaacagtgcctgagagcaaaaacttaccttttgatgtaataaataaggttcttacaaaaaaagacattagtaacttattagataatgtttatagatttacaggtcaaaaggcgacttgcatatttgttgatcaaattatgactgttggctttaagtatgctgcaaaagcaggtatctcctttggtaaagatgatttagtcattcctgaagaaaagaatattttaattcaagatactcaaaaattagtaaacagccttgaaaaccaatatcaagaaggacttataactgaaagagaaaaatataataaagttgttggtttatggtctacttgtacagataaagttgcaaaagcaatgatgaaaactgtttcatctagtaaagatagtcaaattaattctgtttatattatggctgactctggtgctcgtggttctgaagctcagctaaaacagctggctggtatgagaggtttaatggcaagaccatctggtgaaattattgaaaaccctatcacatctaactttaaagatggtttaacagttcttgagtattttaattctacacacggtgcaagaaaaggtttagcagatactgctcttaaaacagcaagttcaggttatttaactagaagattagttgatgttgcacaagatttaacaattacatgtaaggactgtacatgtaaaaatggtttaacagtagacaccatttatgaatcaggtgaggtttctataccactaacagaaagagtttttggcagatatctagctgacgatgtaaaaaataaaaaaggtgaggtcattcttaaaaatgatgattacatttcacatgaagaaattgagttattagaaaaagaaaacattacatctgtaagaataaaatcacctataacttgtggaacaacacatggtatctgtgctaaatcttatggaagagacttagctaaaggagtgccagtaaacaccggtgaggccgtaggaattatagcagcccagtctattggtgaaccaggtactcagttaacaatgagaactttccacgtgggtggtgttgcaagttcttcagccgagaaatctaattttgagtcaccaagtgatggtaaagtaaaaattaaaaaccttagatcagttacaaacggatctggcagtgaaatcattattaatagaactactgaacttgaaatatttgataacaacaaaacgctagtttcatcattcagagcaccatatggatcaacattattagtaa

SEQ ID NO: 255801 - DNA, 865 bp, Unknown
  Bacterial polypeptide expressing nucleotide sequence isolated from the Sargasso Sea
catgagtataataaataattggcaaacattaataaagccatcaaaattgaaattaacgaacgatgaaaactcacagtataaagcaactttagtagcagagcctctagaaagaggatttggattaacattaggcaatgctttgaggagagtccttttatcttctttgcaaggtaccgcagttacagctattaaaatagataatgtgctacatgaattttcttctattgacggtgttcgtgaagatgtaactgatattgttttgaatattaaatcgttatctttaaatatgcattcagagggtgtcaggaagatgaacctcaacgtaacaggccctggtgaaattacagcaggaatgattaatactccttcagagattgatattataaatccagaactagttatatgtaaccttgatgataatacagaattcaatatggaattaactgtaactaaaggaaaaggatacgttgccgctgagcataataaacctgaagattctgcaataggattaatacctattgactcaatctttagtccggtaaaacaagtttcatacagcattgaaaataccagagaaggtaaagttctagattatgataaattaatacttactatagaaactaacgggtcagtaacacctgatgactccattgctttcgcagcgaggatcattcaggatcagcttcaatcctttattaatttcgaggagcctgaagaaatacaagaggagcctgatactttagagcctcagtttaataaaaatttactaagaaaagttgaagaacttgaattatctgttagatctatgaattgtcttcgcaatgataatataatctatataggtgatcttgttcaaaaaaagtga

SEQ ID NO: 255802 - DNA, 1558 bp, Unknown
  Bacterial polypeptide expressing nucleotide sequence isolated from the Sargasso Sea
ggtgctgaagcaatattagaaatacttaaatcaatagatttaaattcagaaagagagaaactatcaaaatctattaaagaaactaaatcaaaagttactgaagaaagaaatgtaaaaagattaaaattaatagactcttttatcgaaactggaaataaaccagaatggatgatacttaccacaatccctgtgataccacctgaattaagaccacttgttccattagacggtggtagatttgctacatctgatttaaacgatttgtataggagagtaattaatagaaataacagacttaaaagattaatggatcttaaagctccagatataataattcgaaatgagaaaagaatgttacaggagtcagtagatgccctttttgataacggtcggagaggtagagtaattaccggaactggaaaaagacctcttaaatctttagcagaaatgttgaagggtaaacagggaaggtttagacaaaatttactaggaaaacgtgtagactattcaggtagatctgtaatagttgttggtccagatttaaaattacatgaatgtggtcttcctaaaaaaatggccttggaactatttaaaccatttttatatgcaagacttaacaaattaggtctagcctctacaattaagcaagcaaaaaagttagtagagaaagagagagatgaagtttgggatgctttagagattatagtaagggaacatcctgttctattaaatagagcccctacactacatagacttggtgttcaagcatttgaaccaaagttaatagaaggtgatgctatacaattacatcctttaacatgtgcagcgtttaacgccgattttgatggagatcaaatggcagttcatgttccattaagtcttgaggcacaacttgaggctagagttttaatgatgtctacgaataatatattaagtccatcaaatggaaaaccaattattgtaccaagtcaagatatgattttaggaatatattatttatctcaaccaccatatcaaacagataaagtagagggatattttgttaatacagatgaaattttacaagccctagaaaacaaaagtataaaaattcattcaagaattatttcaaggtatgaaacaattgatgaaaaaggaaataaaaaactggaaaaatatactagtacagttggtagattcctgctggcagatataattccaaaaaatgttaataataaattttcacttatagataggctactgccaaaacgaatagtatcagaagtaattgatcacatatttagattttctggacaaaaaagtactgttattttttgtgataaattaaaagatttgggttttaaatatgcatttaaagctggaatttcttttggaaaagatgacttggtaatcccagaaaacaaagaaattttaattgaagaaacaaaaaaactaatttctgagtatgaaaatcaatattcggagggcttaattaccagaggagaaaaatataacaaagtagttgatgcttggtcgaaatgtacagataaagttgcatctgagatgatgaaaagaattt

SEQ ID NO: 255803 - DNA, 1175 bp, Unknown
  Bacterial polypeptide expressing nucleotide sequence isolated from the Sargasso Sea
tatgaaaaaagaattaacagatttatttaaaaattcagaaatttctgaggctcaaaactttaatagtattaaaattactcttgccagtcctgaaaaaattaaatcatggacttatggtgagataaaaaaacctgaaactataaattacagaacatttagaccagaaaaagatgggcttttctgtgcaagaatatttggtcctataaaagattatgaatgtttatgtggaaaatataagagaatgaaatttagaggaattatatgtgaaaaatgtggagtagaagttactaaatcaaatgttagaagagagagaatgggtcatattaatttagctacacctgtagcccatatatggtttttaaaatctttacctagcagaatttctttaacaatagacatgaagttaaaggatgtagaaagagttttatactttgaaaattttattgttattgaaccaggtctaactagcttaaaaaaacatcagttattaaatgaagaagagcttattaaatatcaagatcaatatggggaagaggcttttactgcgggtattggtgctgaagcgatacttgagatattaaaatctataaatttagaagatgaaaaagctttactaattaagacaataaaagaaactaaatccaaagttgctgaagaaagatcaataaaaagattaaaattgatcgactcatttattgaaacaggtaataagcctgaatggatgatattaacggttgttccggttattccgccagaattaagacctttggttccactagatggtggaagatttgctacatctgatcttaacgatttatacagaagagttataaatagaaataatcgattaaaaagacttattgatttaaaagcaccagatataattgtacgtaatgaaaaaagaatgcttcaggagtcagtcgatgcactttttgataatggtagaagaggcagagtaattacaggtactggcaaaagaccactgaaatctttagctgaaatgttaaaaggaaaacaaggaagatttagacaaaatttattaggtaaaagagttgattattcaggaagatcagtaattgttgttggtccagatttaaaattacatgaatgtggattgccaaaaaaaatggcattagaattatttaaaccatttttatatgctagattaaataaac

SEQ ID NO: 255804 - DNA, 1030 bp, Unknown
  Bacterial polypeptide expressing nucleotide sequence isolated from the Sargasso Sea
attttgtgcgagaatttttggtccaataaaagattatgaatgtttatgtggtaaatataaaagaatgaaattcagaggaattatttgtgaaaaatgtggtgtagaggtcactaaatctaatgttcgaagggaaagaatgggtcatatcaatcttgctactcctgtcgcacatatttggtttttaaaatcacttcctagcagaattgcattagcagtagatatgaagcttaaagaaatagaaagggtattatattttgaaaatttcatagtgatagaaccaggattaacaggcttacaaaaaaatcaacttttaaatgaggaagaattagcaaaatatcaagatgaatttggtgatgaggcttttactgcgggtattggtgcggaagcagttttagaaatgcttaaaaatttagatttagatttagagagaaaaaatttaataaattatataaaagagacaaaatcaaaagttaacgaagaaagagcaattaaaagattaaaattaatagaatcatttattgagacgggtcaaaaacctgaatggatgatcatgactgttgtaccagttattccaccagagttaagaccactggtaccattagatggcgggagatttgctacatcagatcttaatgacttatacagaagagttataaacagaaacaatcgattaaaaaggttgatggacctaaaagctccagacattattgtaagaaatgaaaaaagaatgcttcaagagtctgtagatgcattattcgataatggaagaaggggaagagttattactgggacgggaaaaagacctttaaaatctttagcagaaatgctcaaaggtaaacaaggtagatttagacaaaatttattaggcaaaagagtcgattattctggtagatcggtaatagttgtaggtccagatttaaaacttcacgagtgtggacttccaaaaaaaatggctttgggattatttaaaccatttttatatgctagactaaataaattaggattagcatccactataaaacaagcaaaa

SEQ ID NO: 255805 - DNA, 802 bp, Unknown
  Bacterial polypeptide expressing nucleotide sequence isolated from the Sargasso Sea
aatggagcaaacagaagtaaattcaaaaaattggaaatcattaattaaaccagcaaaactggatgttcaattaagtgatgataaagcatttgcaaaaatcactgcagagccactggaaaaaggatatgggttaactcttggtaattcattaagaagaatacttttatcctctattagaggaaccgctgtaacctctattcagatagatggtgtattacatgaatttacatcaattaaaggtgttagagaagatgtcactgatattgtattaaatgtaaaatctttagctttaaaaagtacatctgatgacccaaaaaaattaatacttgatgccaaaggtcctggagaaataaaggcttctgatataacacctgttgctgatattgaaatattaaatcctgatttggttatttgtaatttggatgaaaatactaaatttcacatggaaatgtcagtaggaactggaaaaggatatgtatctgctgatatgaacaaacccgaagaaccgccacttggtttaattccaatagattcactatttagtccagtaaaaaaagtttcatattcagttagcactgctagagaaggaaaagcattagattatgacaaattaacaatggaagtagagacaaacggatcaatctcagctgaagatgcggtagcttattcagcaagaatattccaagatcagctaggaatgtttgttaattttgatgagccacaggaagttattgttaaagaacaaccctcagagccagaatttaataaaaatttattgagaaaagttgatgaattggaactt

SEQ ID NO: 255806 - DNA, 937 bp, Unknown
  Bacterial polypeptide expressing nucleotide sequence isolated from the Sargasso Sea
gttgcaataccagattgacagaatcgatcatcaaacatcagatgaccgctcccaaacaggaacatttttaattggccctttagaaagaggacaagctacaactctcggtaactctttaagaagagttcttatgggaggacttgaaggaagtgctgttactgctgtaagaatagcaggaattaatcatgaatatgccactatcccaggagttagagaagatgttttagatattcttttaaattgtaagcaactttctattaatagttctaacccagaacttgagattggaagattagttgtaagtggcccaatggaagtaaaggcaaatgacatacaattttcttctcaagttgagattgttgatggtgaaaaacctattgcaacaattcaagcaggacataatctagagctggaaattcatgtagaaagaggagttggttatagacctgtagatcgcagaaaccaagaaactacagctattgacttacttcaaattgatgctgtttttatgcctgtcaagagagttaattttacaatagatgaaactgctgtggcagaaggaggaactggtagagaaagattaaaaatggaagttgtaacggatggttcaacgagccctgatgatgcaattgctgaagcagcaaaccagttaattgaactctttcagcccctagcaaccgttacaatggttgaagaaatacctgaagaaccagaaccttctcctgaagctcaaattccattagaagaactaaacttgtccgttagagcgtataattgtttgaaaagagcacaagttaattctgtatcagatttgatggggttcagttacgaagatcttttagaaattaagaacttcggctcgaaatctgcggatgaggttattgaagctcttgagcgaataggaatttcaattccacaaagcaggacatctgtttaa

SEQ ID NO: 255807 - DNA, 1510 bp, Unknown
  Bacterial polypeptide expressing nucleotide sequence isolated from the Sargasso Sea
aacagaggatcagtatatgattatcaagatgaatatggtgaagattcgtttaatgctgctataggtgcagaagcaatagagcaaatgctccttaatattgatctagaagctgatttcaatcaaacaaaaaatgatcttttagaaactaagtctgaacttaagaaaactaaacttacaaaaagattaaaattactagagtcttttatattttccaagaataaacctgaatggatgatattaagagtattgcctgttatacctcctgaactaagacctctagtacctctggatggaggaagatttgcaactagtgacttaaatgatctttacagaagagttataaacagaaacaatagattaaaaagattaattgatttgagggcaccagatataataataagaaatgaaaaaagaatgcttcaggagtctgtagatgcattatttgacaatggaagaagaggaagagttataacctcaactaataaacgtccacttaaatctttatctgatatgcttaaaggtaaacaaggaagattcaggcaaaaccttttaggaaaaagagtggattattcaggtagatcagtaattgtagtaggtccaaatttaaaattacaccaatgcggtattccaaaaaaaatggcattagagttgttcaagccatttatttttcataagttagacatttatggttgggcaaatacaataaaagctgctaaaaaattagtagaaaaagaagatccaagggtatgggatatacttgaagaagtgattagggagcacccagtcctactgaatagagcgccaactttacatagattgggaatacaggcttttgaacctgttttgattgagggtaaatcaatacagttacatccattagtttgcactgcttttaatgctgattttgatggagatcaaatggccgttcatgttccattgagtcttgaggcccaattagaggctagagttcttatgatgagcactaataatatactttctccatctagtggaaaaccaattattgttccatcacaagacatcgtattagggatttattatttatcaattatgagaaataatcaaaaaggggaaggaagaaatttcatagatactaatgaaattttaaaagcagttgaattaaaagacataaatcttcactcaaaaattaatgtaagaattaaaaattttgatggctcatcttcaaaagtagaaacaactgcaggaagaatgttactagctgactctcttccaataaattcaaaaataaatttcagcttaatcaataaaactcttacaaaaaaagaagttagtaatttgattgacactgtttatagattttgtggccaaaaagaaactgttctatttgctgatagcataatgcaaataggttttaaatatgctgccatagctggtatttcttttggaaaagatgatttaataataccagaagaaaaacaaaaattgcttgatgaaactcaatcaaaggttcaggaatatgaaaatcaatatc

SEQ ID NO: 255808 - DNA, 1033 bp, Unknown
  Bacterial polypeptide expressing nucleotide sequence isolated from the Sargasso Sea
aatggaagtcgaaaatgttaatgtaaaaaattggaagtcattaatcaaaccatctaaattagatgttaaaataagtgatgatttaacacatgcaaaaattgtagctgagccattagaaaaaggttatggcctaactttaggaaattctttaagaagaattttattatcttcaataagaggtgctgccgtaacatctattcaaattgatggagttttacatgaattcacttcaataaaaggtgttagagaggatgttactgatatcgttttaaatgtaaaatctttagcattaaaaagtaattcagagggtacaaaaaaattagttttagatgcaaaaggacctggtgaaattaaagcttcagatatagctcctgttgcagatgttgaaattttaaatcctgatttagttatctgtaatctagatgaaaaaactacttttcatatggaaatgaatgtgaatactggaaaaggctacgttcctgcagagctaaataaacctgaagagccaccattaggtcttattgctatcgactcactttatagtccagttaaaaaggtttcatattcagtaagtacagctagagagggtaaagctttggattatgataagttaatcatggaagttgaaactaatggatcaatttctgctgaagatgctgtagcttattcagctagaattttccaagatcagcttaaaatgttcattaactttgatgaaccagttgaagcccctgtaaaagaagtttctacagagcctgaatttaataaaaatttattaagaaaagtggatgaattagagctatctgttagatcgatgaactgcctaaaaaatgataatattatttatattggtgaccttgttcaaaaatctgagggtgaaatgcttagaacacctaattttggaagaaaatcactaaatgaaattaaagaagttttaacaggtatgtctttatatttagggatggaaatacctaactggccaccagacaatattgcagaaatgtctaagaaattggaggaagcaattttatga

SEQ ID NO: 255809 - DNA, 976 bp, Unknown
  Bacterial polypeptide expressing nucleotide sequence isolated from the Sargasso Sea
taaactagagatacaacaaaccgatgataaatctcatgccaaaatagtcgctgaaccacttgaaaaaggttatggtttaacattaggtaattctttaagaagaatattattatcttcaatcagaggtacagctgttactgctattcaaattgatggagtacttcatgaatttacatccattaaaggtgtaagagaagatgttactgatattgttttaaatgttaaatctttggctttaaaaagtgagtcagaaggggtaaaaaaattaattttagatgctaaaggacctggagaaataaaagcatcgaatataacctcaattccagatgtagaaatacttaatcctgatcttgttatttgtaatcttgatgaaaaaacaaattttcatatggaaatgaccgttggttcaggaaaaggttatgtttctgctgatatgaacaaaccagaggagccgccgctaggtttaatccccatagattctttatttagtccagtaaaaaaagtttcttattcaataagtactgctagagagggaaaagctcttgattatgataaattaattatggaagttgaaactaatggttcaatatctgcagaagacgctgtagcttattcagccagaatatttcaggatcaattaggtatgttcattaattttaatgaaccacaagaaattcctgtaaaagaaactagtacagaacctgaatttaacaaaaatcttttaagaaaagttgacgaacttgaattatctgtaagatctatgaattgtttaaaaaatgataatattatttatataggagatttagtgcaaaaatctgagggtgaaatgcttagaacaccaaatttcggtagaaaatctttaaatgagataaaagaagttttaactggaatgtcattatatcttggaatggaaatacccaattggccaccagaaaatatagcagagttgtcaaaaaaacttgaagaatcaatataa

SEQ ID NO: 255810 - DNA, 703 bp, Unknown
  Bacterial polypeptide expressing nucleotide sequence isolated from the Sargasso Sea
aatggaaagtacaggaatttttgataaaaattggaaagcacttattaaaccatcaaaacttcaaattacaagtaatgaagataaatcagttgcgaaagttattgcggaacctttagaaaaaggttttgcacaaacattaggaaattctttaagaagaatattgctttcatcaattcaaggagcagcagttaccgcaatccaaattgacggagttttacatgaattttcatcaattaaaggcgttagagaggatgtaacggacatagttcttaatgtaaaaaatttagctattaaattatcctcagaaggaccaaaaaaaataattcttgatgctgtaggtcccaaggaagttaaggcaaaagatatatctttagtttcagatgttgaaattataaatcccgagcaaacgatttgtaatttagatgaaaaaactaagtttcatatggaacttatagtaaacactggtagaggatatgttttagctcaaaaaaataaatctgaagaaacaccacttggtatgattgcaattgactctctttttagtcctgtaaaaagagtctcttataaaattgataccactagagaaggtgctgcattagattatgacaagttagttatggaagtagaaacaaatggaacagtgccagcagaggactcagtggcatttgctgcaagaatatttcaggatcaactttcgatgttc

SEQ ID NO: 255811 - DNA, 1342 bp, Unknown
  Bacterial polypeptide expressing nucleotide sequence isolated from the Sargasso Sea
atgagtaaagaattatcaaatctttttaaaaatacagaaattacagactctcaaaattttaatagtattaaaatatctttagcaagtcctgaaaagattaaatcatggacttatggtgaaattaaaaagcctgaaacaattaactatcgtacttttagaccagagaaagacggtctattctgcgcgagaatttttggtcccattaaagattatgaatgtttgtgtggaaaatataaaagaatgaaatttagaggaataatttgtgaaaaatgtggcgtcgaagtaacaaaatcaaatgttcgaagagaacgtatgggacatattaatttagctacaccagttgcacatatatggtttctaaaatctctaccaagcagaatagctttagctgtagatatgaaattaaaagaaatagaaagagtattatactttgaaaactttattgtaattgaacctggcttgacaggattaaaaaaaaatcaacttttaaatgaagaagaattagcgaaatatcaagatgaatttggtgaagaagcttttacagcaggcattggagcagaggctgttttagagatgttaaaaaatttagatttagagttagaaaaaaaaaatttagtgaattacatcaaagaaactaagtctaaggtcaatgaagaaagagcaattaaaagattaaaactaatcgaatcttttatcgagacaggtcaaaaaccagagtggatgataatgacagttgttcctgtcatccctccagaattaagaccacttgttccacttgatggaggtcgtttcgctacttcagatctaaatgatttgtatagaagagttataaatagaaacaatcgtttaaaaagactaatggatttaaaagctcctgatattatagttagaaacgaaaaaagaatgcttcaggagtcggtagatgcactattcgacaatggtagaagaggtagagtaattacaggaacaggtaagagacctcttaaatctttggctgaaatgttaaaaggaaaacaaggtagatttagacaaaatcttcttggtaaacgagtagattattctggaaggtctgtaattgtggttggtccagatttaaaattacacgaatgtggtctaccaaaaaaaatggctttggaattatttaagccatttttatatgcgagacttaacaagctaggattagcctcaacaatcaaacaagctaaaaagttagtcgagaaagagacaaatgcagtatgggacgcattagagcttattgttagagaacatcctgtattattaaacagagctccaactcttcacagattaggagttcaagcttttgagcctaagttaattgagg

SEQ ID NO: 255812 - DNA, 1243 bp, Unknown
  Bacterial polypeptide expressing nucleotide sequence isolated from the Sargasso Sea
tatgaaaaaagaaattacagatatatttaaaaattcagaaatttcagactcacaaaattttaatagcattaaaatcacacttgcaagtcctgaaaaaataaaatcatggacatatggagagataaaaaaacctgaaacaataaactacagaacatttagacctgaaaaagatggtttattttgtgcgagaatttttggaccaataaaagactatgaatgtttatgtggtaaatacaaaaggatgaaatttagaggaataatatgtgaaaaatgtggagttgaaataacaaaatctaatgttcgaagagaaagaatgggccacataaatcttgcaacaccagttgcacatatatggttcttaaaatcattacctagtcgtatttcattagcaatagatatgaaactaaaagaagtagaaagagtattatattttgagcattttattgtaatagaaccaggtttgacaaatcttaaaaaaaatcaattactcactgaagaagaactgattaagtatcaagatgagtatggagaagaagcatttacagcaggaattggagccgaagccattcttgaaattttaaaatcaatcaacttaagtgaagaaagagaaaaactggtcaaaactataaaagaaactaaatctaaagtagctgaagaaagatcaattaaaagacttaaattaatagaatcatttatagaaactggaaataaacctgagtggatgatattaacagttataccagttataccacctgaattaagacctttagtacctcttgatggaggaagatttgctacatcagatttgaatgatttgtatcgtagagtaataaacagaaataatcgattaaaaagactaattgatttaaaggctccagatataattgtaagaaatgaaaaaagaatgctccaagagtctgttgatgcactttttgataatggtagaagaggcagagtaattacgggtacaggcaaaagacctttaaaatctttggcagagatgttgaagggtaaacaaggaagatttagacagaacttattgggaaaaagagtagattattcaggacgttcagtgatagttgttggaccagatctcaagttacatgaatgtggtcttccaaaaaaaatggctttggaattgtttaaaccatttctttatgcaagattaaataaattaggattagcttcaacaatcaaacaagcaaaaaaaatagtagagaaagagagagaagaagtttgggat

SEQ ID NO: 255813 - DNA, 1750 bp, Unknown
  Bacterial polypeptide expressing nucleotide sequence isolated from the Sargasso Sea
ggtcggtcatatcaacttagttgtgcctgttgctcacatttggttcttcagatcccttccaaataaaatcggttatctgctaggtttgccaacaaaaaaattggatatgattatttactacgaaaggtatgtggttgtccaagctggtttagccgttgatgaagaaggtaatccactaaacaaaatggatttcttaactgaagaagagtatctaaatattttagaaaaattgccacctgaaaatcagtttttggaggatgcggatccaaacaaatttattgcgaaaatgggtgctgaatgtttaattgagttattatcaagaattgaccttaatgaattatcttatgaattaagacataaagcaaacacagaaacatcaaagcaaagaaagacagaatcattgaaaagactacaagttgttgaatccttcagagaagcaaatacaaacagagaaaataaacctgagtggatgattttaaaggccataccagttattccgcctgagctaaggccgcttgtaccccttgatggaggtagatttgctacatctgatttaaatgacttatatagaagagttattataagaaataacagacttaaaagattagtagaaataaaagcacctgaagttattctgcgaaatgaaaaaagaatgttacaagaatcagttgattcattatttgataacacgagaaaatcctctgctgttaaaactgaagcaaatagaccattaaaatctctctcagattcattaaaaggaaaacaaggtagatttagacaaaacttacttggtaagagagttgattattctgcaagatctgtaattgttggtggaccaacattaaaattatatgaatgtggtattcctaaggatatggccgctgaattatataagccttttattgttaaaaaattgatcgaaagaggagtagttaagacggtaaaatctgccaagaaaattatagacaagagagaacctttagtttgggatatactagagaatgttttgaagggacaccctgtactattaaacagagcccccacactccatcgacttggaattcaagcatttcaacctattcttattgaaggtaaagcaatccaagttcatccacttgtttgtactgcatttaatgcagactttgatggggatcaaatggcagtacatcttcctttgggtcctgaagcaattttagagtcacagttattaatgttagcgtctcacaatattttaaatcccgctaatggatcacctattacagtaccttcacaagatatggttttaggactttactacatgactaagaaaaaactaagtacaaaagatgagcttgtcaaaggagaggggttgattttttattcacatgaagaagtaaaaatagcttacaatgaaaataaagttgacctgaatgcgagcataaagttaagaactaaagacttggatcaaaatggagaactcataaataaaattattgaaactacagttggtagagttatgtttaatgaggttgttcctgagaaagctggttatataaatgaagtattaaccaaaaaatctctcagagatattattggtagaattttaaatttaacgagtgttcctgaaactgctgagttccttgataaaatcaaagatatgggatttggttatgccttccgcggaggtctttcatttagtttaggtgatattataatacctggagaaaaaattgatatgattggtgatgcaaacaaagaagtgacactataa

SEQ ID NO: 255814 - DNA, 2064 bp, Unknown
  Bacterial polypeptide expressing nucleotide sequence isolated from the Sargasso Sea
aagaggaattagaaaatgctaaagaagaatacggtgtagactccttttcggcaggaattggagcagaagctgtaagaaaagttttagaaagagttgaacttgaggctgaacttgagttattaaaatcaaaacttgccgaaactaaggcggtcgcactttcagaaaagcttgttaaaagaataaaaatatttgaagccttcatatcctctggaaatagacccgaatggatgattttaacatctgtaccagtaattccgcctgagcttagaccactagttcctttggatggaggaaggtttgcttcatctgatttaaacgacttatatagacgagtgattaataggaataatagattatcgagacttatagaattaagagcgccagatattattattagaaatgaaaaaagaatgctgcaagagtcagtagatgcattatttgataatggacgaaggggtagagtaattacaggaactaataaacgacctctcaaatcactcgctgaaatgcttaaaggtaaacaaggccgattcagacaaaatcttcttggaaaaagagttgattactctggtaggtcagtaattgttgttggaccagagctcaaattacaccagtgtggcctgcctaaaaaaatggcaatagaattatttaaaccatttatatatgcacgtttggagtcattaggtctagcaactactctaaaacaagccaagaaaatggttgaaaaggaaagacctgaggtctgggatgtgctggatagagtcataagagagcatccaattattttaaatagagcgccaacgcttcataggttaggtgttcaagcttttgaaccaaccttaattgaaggaaaagcgattcaactacaccctcttgtttgtactgcattcaatgcagattttgatggcgatcaaatggcagttcatgtaccgcttagtttagaagcacagctggaagcaagggttttaatgatgtccacaaataatatattaaacccagctaatggtaagccagtaattgttccaagtcaggatatagtgttgggtatttattttctatctcaggaaaaagataatgaacctggtcagggagcaatatacaaagatatttttgaagttcaacaagcaatcgaaaatggcgtgacaactgttcatgcaaaaattgaagcaagaattaatttcactaattctgaaggaaaagttgatactaaaagaattagcacaacacctggtagaatgcttttgtggaatttaatacctcaacataaagatcttgatccaaagcttgtcaatcgtcttcttggcaagaaagaagtttctagcttaattgatactgtctatagatactgcggtcaaaaagatacagtcatatttgctgatcaattaatggcacttggtttccattacgcatacaaggctggtatttcttttggtaaggatgatatgataatacctgagactaaagaaaaaatggtttttgaaacatcagtacaaattgaaaaatatgaaaagcaatataatgatggtttaattactaatagagaaaaatataacaaagtaattgacgcctgggcgaaatgtacagatagagttgcacaagaaatgatgaatgaaatttcttctgtcaaagttgatgaaacaacaaaaagagaacttcctattaactctatctatatgatggcaaattcaggagccaggggttcagcggcccaaatgaagcagttatctggaatgcgtggtcttatggccaaaccatctggagatattattgagacccctattatatctaattttaaagagggcttaaatgtccttgaatattttaattctacccacggagcaagaaaaggactagctgatactgcattgaagacagctaattctggctacttgacaagaagattgtgtgatgttgcacaagattgtaccatttcagatcacgactgtggaactgatagtggtgtatggatatctgacgtagttgaaggtggagaagtaataatatcaattgcagatagattactcggtagattcttgcaaaaagaatattgttcatcccagtgac

SEQ ID NO: 255815 - DNA, 894 bp, Unknown
  Bacterial polypeptide expressing nucleotide sequence isolated from the Sargasso Sea
ttggtaattctttaagaagaatattgttatcatcaataagaggtacagctgtaactgctattcagattgatggtgtacaacatgaatatagttccattaaaggagtgagagaagacgttactgatatagttctaaacattaaatctttagcattaaaaagtaatttagagggcaataaaaaattaatactagatgcaactggaccaggtgaaattaaagcatcacaaataactcctgtatctgatattgaaatactaaatcctgatttagttatatgtaacttagatgaaaatacgaaatttcatatggaattatttgttagtaatggaaaaggatatgtgtctgccgagcaaaataaacctgaagaacctcctttaggtttaatacctatagattcgttgttcagtcctgttaaaaaagtatcttattctgttagcacagctagagagggtaaagctctcgattatgataaacttacaatggaaattgaaacaaatggatcaataactgcagaagatgctttagcatattccgctagaatttttcaagatcagttaaaaatgtttgtaaattttgatgaaccacaagaagttaaaattcaagatcaaccaaaagaacctgaatttaatcaaaatcttttaagaaaagttgatgaattagaactttcagtcagatctatgaattgcttaaaaaatgataatataatttatattggtgatttagttcagaaatcagaaggagaaatgcttagaaccccaaattttggaagaaaatctttaaatgaaattaaagaagttttaaatggaatgtctttatatttaggaatggaaataccgaattggcccccagataatattgctgaattatcaaaaaaactagaggacgcgatttaat

SEQ ID NO: 255816 - DNA, 1331 bp, Unknown
  Bacterial polypeptide expressing nucleotide sequence isolated from the Sargasso Sea
aaaaaattagttaaaagacttaagttggtagaatcttttatccagtcaggttcaaaacctgaatggatgattttggaagtggttcctgtaataccacctgagttgagaccattagtgcctttagatggaggtaggtttgctacgtcggatctaaatgatctatataggagagtgataaataggaataataggttaaagagactattggagttgagggcacctgatattatcattagaaacgaaaaaagaatgcttcaggagtcagttgatgcattatttgataatggaagaagaggaagagttataactggtgttaataaacgcccgcttaaatcactatctgatatgttaaaaggaaaacaaggtaggtttaggcaaaatttacttggaaaaagggttgattactctggtagatctgtgattgttgttggacctgaactcaaacttcatcaatgtggtttacccaagaagatggctttagagctctttaagccatttatttatgctaaattggaattatatgggatggctaatactattaaggccgcgaaaaggatggtagaaaaagaaagacccgaagtatgggatattttagaagaagtaataagagaacatccggttctgcttaacagagctccaaccttgcatagattaggtatccaagcttttgaacccgttttgatagaaggaaaggctatcaatttgcatcctttagtatgtactgcatttaatgctgattttgatggagatcaaatggcagtccatgttccgctatctttagaagctcaattagaagcacgagttcttatgatgtcaaccaataatattttgtctccatcaagcggaaagccaattattgttccgtctcaagatatcattttaggtctttactatttgtcaatgattacaaataaagctgaaggtgaaggtatgattttttcatcaccggatgaggcattagtagcattggatcatcaaaaggttgatttgcaagctaaagttaaaattagagtttcaaaatatgatgatcaaggaaataaaaaatcggaattaattgaaacaactcccggaagagcaaagatatcgaaggttttacctaatcatccatcggtgaaatatgaaattataaacaaacttatgacaaaaaaagaagtcacaaatgtgattgattatgtttatagacattgtggtcaaaaagaaactgtaatattttgtgacagaatgatggctatgggatttaatcatgcttgtattgcaggaatttctttcggtatttctgatcttgagactcctaaagctaaacttgaattagtttcagaggcagaaaaaaa

SEQ ID NO: 255817 - DNA, 991 bp, Unknown
  Bacterial polypeptide expressing nucleotide sequence isolated from the Sargasso Sea
aatgcagggttctgttacagaatttcttaaaccgcgtctcgttgatatcgagcaggttaactcaacacgtgccaaggttactttggaaccgcttgagcgtggtttcggccacactttaggtaacgcgttgcgtcgcatcctattgtcgtctatgcccggctgcgcggttaccgaagtcgagattgacggcgtactgcacgaatacagcagtaaggaaggcgtacaagaagatatccttgaaatcttgcttaatctgaaaggattagcagtgactatcgagggtaaagacgaggctatgcttacattaagcaagtccggcgcaggccctgtcatcgcagcagatatcacgcatgatggtgatgtcactatcgtgaatcctgatcatgttatctgtcatttaacaggtaacaatgatatcagcatgcgtattcgcgttgagcgtggtcgtggttatgtgccagcatctgctcgtgcacagacagaagacgatgatcgcccaatcggccgcttgctggttgatgcttctttctcgccagtcgcacgtattgcctacaatgtagaagcagctcgtgttgaacagcgtactgacttggataaactcgttatcgatatgaccactaatggtactattgatcctgaggaagctatccgtcgttctgcaaccatcttagctgaacagctggatgcgtttgttgagctgcgtgacgtgactgagccagaaatgaaggaagagaagccggagttcgatccgattctgttgcgtcctgtcgacgatttagagctaactgtacgttcggctaactgtttgaaagccgaagcgattcattacatcggagatctggtacagcgtactgaagttgagctgctgaaaacccctaacttaggtaagaaatctcttactgaaattaaggacgttttagcttctcgcggactgtcgttaggtatgcgtctggaaaactggcctccagctagtttagcagacgacctataa

SEQ ID NO: 255818 - DNA, 967 bp, Unknown
  Bacterial polypeptide expressing nucleotide sequence isolated from the Sargasso Sea
tatggaaacatcagtaatcgatcttttagtcccaactgacatccaagttgatgacgcagagaataatacatctaaaataactttagagccattagaaagaggttttgggcacactctaggaaatgcattgagaagaatactcttatcgtctatgcctggctcagccataaccgatgtaacaatcgatggtatttcgcatgagtattctacgattgaaggagttagagaagatgtaatagatattttattaaatctaaaagatctgcccataactcttattgaaggaaatagtgcagtaattaaactagacgtctcaggtccatgtgaagtcacagccagttcgtttgaagttccaggaaacgttgaattgcctgacgctgagcatcatgttgcttcgttggtagataaagtaagcctttcactaactgctactgtaaaaactggcagaggttatgagccagcagattcaaggggtgaagaggaaaccgcagttggagctttgaaagtagatgcatcttttagtccagttagaagagtggcttattcggttgaaaatgcaagatttgaaaaaagaactgatttagataaactgattgttgagttggagacaaatggaacacttgatccaaagaaagccattgagcatgctgcaactatcatgcaacagcaattagctgcatttgtaaatttagatgcaattgctgaacaagaggctaaaaaagatcaaaatgactttgatccattcctaatgaggtcaattgaagagcttgaattaactgttaggtccacgaactgcttgaaggcagaaagcatcttcttgataggggatctattgcaaagaacagagtttgatttgttaaaaacaccaaatttaggtaaaaaatccttaaatgagatcaaggatgttcttgcttcaaaaggtttttctctaggtacaacattagagaattggccgccaatgggttaa

SEQ ID NO: 255819 - DNA, 1165 bp, Unknown
  Bacterial polypeptide expressing nucleotide sequence isolated from the Sargasso Sea
caaattaaaatcaaacgttatcaaaagaggttaaagctaatagagtcattgatttcttctggaaataggcctgaatggatgattctaaaagttcttcctattttgccaccagacttaagacctcttgttccacttgatggcggtagatttgctacgtcagatcttaatgatctctatagaagggttattaatagaaataatagactccaaagattactcgatctaaatgctccagatatcattgttagaaatgaaaaaaggatgttgcaaaaatctgttgattcacttcttgataatggaagaatgggcagagccgtgactggttcaaataagcgaccactaaagtcacttgcagacatgatcaaaggaaagcagggtagattcagacagaatttgttaggaaaaagagtcgattactctggtagatcagtgattgtagttggaccaactttgaagcttcatcaatgtggtataccaaaaaaaatggcattggagctattcaaaccatttgtctttagtaaattgatttatcaaggtgaggcttccacaatcaaatctgcaaaaagactagtagagcttgagggagccgagatttgggatattttagacggtgttataagacaacaccctgtgcttcttaatcgcgctccaacccttcataggctgggaatacaagcttttgagcctgttttggttgaaggtaaagcgattcaattacatcctcttgtttgcaaggcattcaatgctgactttgatggtgaccagatggctgttcatgttccactatcaattgaggctcaacttgaaagtagggcattgatgatgtcatccaacaatattctatcgcctgcgaatggcgagcctattattgttccatctcaggatgtagttttaggtctctattacatgacaagagaaaaagttaaagatactggtgagggtggtatttttgcaaacatagaagaggttgagagagcatttcataatgacttccttggtctgcatgcaaagattaaactaaaaatttcaacccaaaatgaagaaaagcccacagaaattgtagaaactactacaggtagggctctattctcgaagatcgtaccagatgaaattccatttgctgtaataaataaaacaatggatagcaaggagatctccagactga

SEQ ID NO: 255820 - DNA, 1309 bp, Unknown
  Bacterial polypeptide expressing nucleotide sequence isolated from the Sargasso Sea
atgaaaaaagaattatcagatctatttaagggcagcgaaatttcagaagctcaaaattttaatagcattaaaatttctcttgctagcccagagaaaattaaatcttggacatttggtgaaattaaaaagcctgaaacaattaattatagaacgtttagacctgaaaaagacggtttgttctgtgcaaggatttttggaccaataaaagattatgagtgtttatgcggtaagtataaacgaatgaaatttagaggaattatatgtgagaaatgtggtgttgaagtcacaaagtcaaatgtaagaagagaaagaatgggccacattaatcttgctacaccggtagcacatatttggttcttgaagtctcttccaagcagaattgctttagcagtagatatgaaattaaaagaaatagagagagttctttattttgaaaactttatagtaatagaacctggtttaactggtttacaaagaaatcaactcttaaatgaagaagaattagcaaaataccaggatgaatttggtgaagaaagttttacagcgggaataggagctgaagctgttcttgagatgctaaaaaatttagatttagaattagaaagaaaaaatcttgttagctttataaaagaaaccaaatcaaaagttaatgaagaaagagcaattaaaagattaaaattaatagagtcatttattgaaacaggtcaaaaacctgagtggatgattatgactgttgtaccagttataccaccagaattaagaccattagttcctctagacggtggaagatttgctacttcagatcttaacgatttatacagaagagtaattaacagaaataatagattaaaaagattaatggatcttaaagctccagatatcattgtaagaaatgaaaaaaggatgcttcaagagtctgtagacgctctatttgataatggtagaagaggcagggtaataacaggaacaggtaagcgaccacttaaatctcttgctgaaatgttaaaaggtaaacaaggaagatttagacaaaatttattgggtaaacgggttgattattctggaagatcagtaatcgttgtcggtcccgatttaaaactacatgagtgtggtttaccgaaaaaaatggctcttgagttatttaaaccatttttatatgcaagattaaacaaattaggcttagcttcaacaattaaacaagctaaaaaattagttgaaaaagaaacaaatgcagtttgggacgctttagaattgatagttagagagcatccggtacttttgaatagagcaccaacacttcatagactag

SEQ ID NO: 255821 - DNA, 1066 bp, Unknown
  Bacterial polypeptide expressing nucleotide sequence isolated from the Sargasso Sea
gttcaagcgactagtaacatccaaaagcgaagaaaacttataaaaagactgaaggtaatagacgctttcaggaattccggtaatcgtccagaatggatgattttagaagttattcctgtattacctcctgaattaagaccacttgttcctcttgacgggggaaggtttgcaactagtgatttaaatgatctttatcgtagagttattaataggaataatagactcttgcgtcttcaagaactaaaagcacctgatatcattatacgtaacgaaagacggatgctacaagaagcagtagatgctctttttgataacggcagaagaggtaggcttcttaggggtgctaatagaaggccactgaaaagtttgtctgatatgttgaaggggaagcagggtagattcagacagaatcttttgggtaaaagagttgattattcaggacgttcagtaattgttgtgggtccagaattacaatttaatcaatgcggaattccaaagaaaatggctttagaactatttaagccatttatatataataatttgcaagaaaaagggatagtatcaaccattaaaactgcaaaaaaaatggtagaagaacaagaacctgaagtctgggatgctttagaagaaattgtaaagaatcatccagtaatattaaatagagcgccaactcttcataggcttggtatgcaagcttttatgccaattctagtagaaggaaaagctataagagtacacccacttgtttgttctgctttcaatgccgattttgacggagatcagatggccgttcacgtccctctttctgtagaagcaatagaagaagcacgtgttttgatgttgtcgactaataatatactttctccatcaaatggaatgccaatagctgtacctagtcaagatataattttagggtgttattatttaacgaaacccagaggaggtacaaaggggcagggacagatttttggttcctcaaaagaagtagttattgcctatgaacatggagaagttgcaatgcaaactccgataactctaagagtggatgatgctttggttgaaacta

SEQ ID NO: 255822 - DNA, 773 bp, Unknown
  Bacterial polypeptide expressing nucleotide sequence isolated from the Sargasso Sea
aatggaaaacacaaatatttttgataaaaattggaaatcacttacaaaacctaataatcttgacattcaaagcaatgatgacaagtcaattgctaaagttatagccgaaccattagaaaaaggttttggtcaaacaataggaaattctctaagaagaattttactatcatccattcaaggagctgcagtaacagcaattcaaattgatggtgttttacatgaattctcatctataaaaggagttagggaagatgttaccgatattgttttaaatgtaaaaaatttagcaataaaattaaattctgatggacctaaaaaattaattttagactctgaaggaccaaaagaaattaaagccaaggatataacactagtttcaggtgttgaaatattaaaccccgaacaaacaatttgcaatttagatgaaaaaactaaatttcatatggaactagttgtaaaaaatgggagaggttatgtattagctcaaaaaaataaatcagaagacactcctctaggtatgatagctattgactcactttttagtccagttaaaaaagtatcttttaaagtagatagcacaagagcaggttctgcacttgattatgataaattagtaatggaagttgaaacaaatggaactgtagccgcagaggatgcaatagcatttgctgccagaatttttcaggatcaattatcaatgttcgttaattttgaagatcctaaagaagttccaaaaccaactacttcatctgaacctgaatttaataaaaatt

SEQ ID NO: 255823 - DNA, 1648 bp, Unknown
  Bacterial polypeptide expressing nucleotide sequence isolated from the Sargasso Sea
atgagtagagagttatcagatctttttaaagaaaaatctatttcagagtctcaaaattttaatagcatcaaaattacattagcaagcccagaaaaaattaaatcatggacatatggtgaaattaaaaaacctgaaactataaattatagaacatttagacccgaaaaagatggtttattttgtgcaagaatttttgggccaataaaagattatgaatgcttatgtggtaaatacaaaaggatgaaatttagaggtattatatgcgaaaaatgtggcgttgaagtaactaaatcaaacgtaagaagagaaagaatgggccatattaatcttgctacacctgttgctcatatttggtttttgaaatcattgccaagtagaatttctttagttattgatatgaagttaaaagaggttgaaaaagttctttactttgaaaattttatagtaattgaaccagggttaactaatttaagaaaaaatcaattactttctgaagaagaattaattaaatatcaagatcaatatggagaagagtctttctcagctggtatcggtgcagaagctattttagaaattttaaagtcaatagatttaaaagaagaaagagaaaaactttctaaatcgattaaagaaaccaaatctaaagtaacagaagaaagaaatgtaaaaagattgaaactaatagattcttttattgatactggaaataaacctgagtggatgattttaacaacaatacctgtaataccacctgaattaagaccattagtcccacttgatggaggtagatttgcaacttctgatctaaatgatttgtatagaagagtaatcaatagaaacaatagattaaagagattaatcgatcttaaagctccagatataattataagaaatgaaaaaaggatgctgcaagagtcagtagacgcattgtttgataatggtagaagaggtagagttataactggaacgggtaaaagaccattaaaatcactggctgaaatgctaaagggaaagcaaggaagatttagacaaaatcttttagggaaaagagtagattattcaggtagatcagtaattgtcgttggtccagatttaaaattgcacgaatgcggattaccaaaaaaaatggctctagaattatttaaacctttcctttatgctagacttaataaactaggattagcttcaacaataaaacaagcaaaaaaattagttgaaaaagaaagagatgaagtttgggatgctttagaaattattgttagagagcatccagttttgttaaatagagctccaactttacatagattaggtgttcaagcatttgaaccaaaattaattgaaggtgatgcaatacaactgcaccctttaacttgtgcggctttcaacgcagattttgacggagatcaaatggctgttcatgtgccattaagtttagaagctcaactcgaagctagagttttaatgatgtctacaaataatatattaagcccatcaaatggaaaaccaattattgttccaagtcaagatatgattttaggtatttattatttgtcacaaccttcatatcaaaaagataaagtagaaggttattttgtaaatacagatgaaatacttcaagcgcttgaaaatggaaacattaaaatacatt

SEQ ID NO: 255824 - DNA, 1030 bp, Unknown
  Bacterial polypeptide expressing nucleotide sequence isolated from the Sargasso Sea
atggaagtagaaaacgtaaatgtaaagaattggaaatcattaatcaaaccatctaaattagatgttcaaattagtgatgacttaactcatgcaaagatagtagctgaaccacttgagaaaggttatggattaactttaggtaattctttgagaaggattctactttcctcaataagaggagcggctgtgacctctattcaaattgatggtgttttacatgaatttacttctataaaaggtgttagagaagatgtgactgatattgtattaaacgtaaaatctttagcattaaaaagcaattcagaaggaacaaaaaaattagttttagatgcaaaaggacctggagaaattaaagcttcagatataactcaagttgcagatgtcgaaattttaaaccctgatttagttatttgtaatttagatgaaaatactagttttcatatggagatgaatgttaatacaggtaaaggatatgttcctgcggagttgaataaacctgaagaaccacctttaggacttattgctatagattcactttacagtccagtcaaaaaagtatcatattctgttagtacagctagagaaggtaaagcgttagattatgataagctaataatggaagtagaaacagatggatcaatttctgctgaagatgctgtggcttattcagctagaattttccaagaccagcttaaaatgttcataaattttgatgagccagtagaagctcctgtaaaagaagtttctaaagagcccgaatttaacaaaaacttattaagaaaagttgatgagctagagttatctgttagatcaatgaactgcttaaaaaatgacaatattatttatattggtgatttggttcaaaaatctgaaggtgaaatgttgagaacacctaatttcgggagaaaatcactaaatgaaattaaagaagttttaacaggtatgtctttatatttaggaatggaaatacctaactggccaccagacaatattgcagaaatgtctaaaaaattggaggaagcaatttaat

SEQ ID NO: 255825 - DNA, 1582 bp, Unknown
  Bacterial polypeptide expressing nucleotide sequence isolated from the Sargasso Sea
gttataagagaacaccctgtattattaaatagggctccaactttacacagacttggtattcaggcatttgaaccaactttaattgaaggaaaatcaatacaacttcatcctttagtctgtactgcttttaatgccgatttcgatggcgatcaaatggccgttcatgtacccttgagcttagaagctcagctagaagcaagagttctaatgatgagcacaaataatatattatcaccttctagtggtaaaccaattattgttccttcccaggatattgttctaggtatttattatctgtctattcaaagggacaatcaaaaaggtcaggatagacaatttgttgatcttaatgaaattttaaaagcacttgagtataatgatatttctttacatacaagaattaaagctagagtaaaaaattcggaaggtgtctataaagtatttgaaactactcctggaagaatgatattaggaaatatacttcctattgataatagaattacttttgacatggttaataaagtattaactaaaaaagaggttagtaacataatcgatactgtttatagatactgtggtcagaaaaaaactgtaatttttgctgatcaaattatgcaaataggttttaagtatgctgctttagccggtatttcttttgggaaggacgatttaataattccaagcgataaagaaaaattattggatgaaactcaattaaaagtacatcagtatgaaagtcaataccaggacggacttattactcagggtgaaaagtacaacaaggttgtagatgcttggtctgaatgcacaaataaagtagcagacaaaatgttagaagtaatttcaaacccaactgattctcaaccaataaactctgtctatatgatggcacactcaggtgcaagaggttctgcagcacaacttaaacagctttcagggatgagaggattgatggccaaaccttctggcgaaataattgaaaacccaataaaatcaaattttaaagaaggtctctctgtcttagaatattttacctcaactcatggtgctagaaaaggattggctgatacagctttaaaaactgcaagtagcggatatttaactagaagactagtagatgttgctcaggatgcagtaataagagaagaagattgtggcacttctaatggtgttcttgttgaagaaattgttgaatcaggaaacataacctcacctctttcagaaagggtgttgggaaggacacccgtagagaaaattattgatgctagcggagatgtaattgttgaagctggagaaataatttctgaaaaacatttagaagaaatctcaaaaattggattaagatctctaaagatacgatctgttctaacttgtgaaactgaggatggaatttgtgcaaaatgctacggaagagatttagctagagggactgaagtcaatattggtgaagctgttggaataatagctgcacaatcaattggtgagccaggcactcaattaacaatgagaacttttcatattggaggtgcagcaagttcttcagttgagcaatcaaattctatatctccaataggtggaaaaa

SEQ ID NO: 255826 - DNA, 1396 bp, Unknown
  Bacterial polypeptide expressing nucleotide sequence isolated from the Sargasso Sea
aatgaaagatatcctaaacttttttaaacaacaaaatgcatctgatgattttgactcaataagagtttcattagcatcacctgaaatgattcgctcatggtcgtttggtgaggttaaaaaacctgaaacaattaactacaggacttttaaacctgaaagagacggactattttgcgcaaaaatttttgggcctattaaagactatgaatgtttatgtgggaaatataagagacttaaacatagaggagttgtttgtgaaaagtgtggtgttgaagttactttaacaaaagtaagaagagaaagaatggggcatatagaattagcctgccctgttgcacatatttggtttttaaaatcccttccttcgagaataggtttgctcttggatatgaccttaagagatatcgaaagaatattgtattttgaagcttttgttgtaattgatccaggtatgacagaactagaaaaatctcaacttcttactgacgaatcttattatgatgctattgaacagtacggagatgaatttgatgcaaaaatgggagcggaagctgttcttcaaatgctcaaagaattagatctcgaatctgagattactaaattaaaacaagatttatctgaaactaaatctgaagcaaaaatcaaaagacttacaaaaagacttaaacttatcgaaagctttatacagtctggaaataaacccgagtggatgattctgcatacattgcctgttcttccacctgacttaagacctttagttccacttgatggcggaagatttgctacatctgatcttaatgacttatacagaagggtaataaatagaaacaatagattgaaaagactactagaattaaacgctcctgacataattgttagaaatgaaaagagaatgttgcaagaagccgttgatgcattacttgataacggcagaagaggcagagcaatcactggaagtaacaaacgtcctcttaagtcacttgcagaactaataaaaggaaaacaaggaaggtttagacaaaacttattaggtaaaagagttgactattctggccgttcagtaattgttgttggtccaaccctaagattacaccaatgtggcattccaaaaaaaatggcacttgaattatttaagccatacatatttagtaaacttcacactagaggcttagttactacaataaaagctgctaagaaattagtagaaaaagagggaccagaggtttgggatattttagatgaagtaataagagaacatcctgtactattaaatagagcgccaacgcttcatagactcggtatacaggcttttgagccaatattgattgaaggcaaagcaattcaattacaccctttagtttgcgcggcttttaatgctgattttgatggagatcaa

SEQ ID NO: 255827 - DNA, 1875 bp, Unknown
  Bacterial polypeptide expressing nucleotide sequence isolated from the Sargasso Sea
aaaccgtatgggacatatactttagctgttccagtagtacatatctggttttttaaatcaataccaagtaagctaagttatattttaggtaaaagtgcaaaacaattagaaagtgtaatctattatgaaaattacctagtcattaatcctggtaaaagtggttataagagatttgaattaattgatgaggaagctttccttgaattagatcaagaatttggatatgatgctgcttctcaggaagaaagagaagaagaatcatatttccaggcttccatgggcggagaagctattaaagatgctcttgctgaaatggacttattagagcttaaacatgagctagaaacaataagttcaacaacaaaatcaaagcaaaaaagagaagacgctctcaaaagacttaaagttgtaaaagattttgctcaagatagaaacaataagcctgaatggatgatcgtttctattttgcctgtaatgccacctgagttaagacctttagttccattagagggcgggcgatttgctgcaagcgatcttaatgacttgtacagaagaattattattagaaataatagattaaagcaattaatggatattcaggcacctgaagtaattttaagaaatgaaaaaagaatgctgcaagagtctgttgatgcactttttgataatacaaaacgtaaaaccgcaattagaagcggttcaaagagaccattgaagtcaatttctgacatgcttagaggtaagcaaggtagatttagacaaaaccttcttggtaaaagagttgattattctggaagatcagttattgtagttggtccagaattaagaatgactgaatgcggtattccaaagaatatggcattagaattatttaaacctcatttaattagagaattaataagaagagatttagctgcaacaccaagaagcgcaaaactaatgattgaaaataaagaatcatttgtttatgaaattcttgaaagtgtcgttaaggatcacccagtattattgaatcgtgctcctacacttcatagactgggaattattgctttccaaccaattcttattgatggtaaagctattcgagtccatccacttgtatgttcagcttttaatgctgatttcgatggagaccaaatggctgttcatgttccattgtcaataccttcacaattagaagcaagagtattgatgatggcaagtcagaatgttttacatccagctagtggaaaacctattacattaccttcgcaagacatgattttaggctgttactatctaactagagacaaaaaaggtcagattggtgagggaatgtcatttgggtcaattgacgaagttaaaattgcttatgataatggtaaagttgctatgcatgcaattattaacgtcagacataatggcatttggcataaaaatactactgcaggaagagcaatatttaattccattatcccagatgaattaggctattatgatgaaattgtttctaagaaaaaacttagttttatcattggtgaatcttttgtaaaagccggaaaccaacgtacagtccaattgcttgatgatcttaaagatattggtttcaaaactgctactatgagcggagtatcaatttcaataagtgatgttatcattcctgacgcaaagcacgatataatcgatagagcagagcaagaagttgataaaatacaacagcgttttgatagacatgttttgactgaaggtgaaagatataataaagtcattgatgtttggacaaaagctacaagtgatgtggcagatgtgatgatggatggtttaagatcagatgatcaaggttttaatgcattgtatatttcatctgattcaggagctcgaggtagtggagaccaa

SEQ ID NO: 255828 - DNA, 1170 bp, Unknown
  Bacterial polypeptide expressing nucleotide sequence isolated from the Sargasso Sea
atttaagggcagcgaaatttcagaagctcaaaattttaatagcattaaaatttcacttgctagcccagagaaaattaaatcttggacatttggtgaaattaaaaagcctgaaacaattaattatagaacgtttagacctgaaaaagacggtctgttctgtgcaaggatttttggaccaataaaagattatgagtgtttatgcggtaagtataaacgaatgaaatttagaggaattatatgtgagaaatgtggtgttgaggttacaaaatcaaatgtaagaagagaaagaatgggccacattaatcttgctacaccggttgctcatatttggttcttaaagtctcttccaagcagaattgctttagcagtagacatgaaattaaaagaaatagagagagttctttattttgaaaactttatagtaatagaacctggtttaactggtttacaaaaaaatcaactcttaaatgaggaagaattagctaaatatcaggatgagtttggtgaagagagctttacagcaggaattggagcagaagccgttctagagatgctgaaaaatttagatttagaattagagagaaaaaatcttgttagctttattaaagagactaaatcaaaagttaacgaggaaagagcaattaaaagattaaaattaatagagtcatttattgagacaggtcaaaaacctgaatggatgattatgactgttgtaccagttataccaccagaattaagaccattagttcctctagatggtggaagatttgctacttcagatcttaacgatttatacagaagagtaattaacagaaataacagattaaaaagattaatggatcttaaagcgcccgatatcattgttagaaatgaaaaaagaatgctgcaagaatctgtagatgctctatttgataacggtagaagaggcagggtaataacaggaactggtaagcgaccacttaaatctcttgctgaaatgttaaaaggtaaacaaggaagatttagacaaaatttattaggtaaacgagttgattattctggaagatcagtaatcgttgtaggtcctgatttaaaactacatgaatgtggtttaccaaaaaaaatggctcttgagttatttaaaccatttttatatgaaagattaaataaattaggcttagcttcaacaat

SEQ ID NO: 255829 - DNA, 1915 bp, Unknown
  Bacterial polypeptide expressing nucleotide sequence isolated from the Sargasso Sea
aaaaattaaatcctggacatatggtgaaattaaaaaacctgaaacgataaactatagaactttcaggcctgaaaaagacggtttattttgtgcaagaatttttggaccaacaaaagattacgaatgtttgtgtggaaaatacaagcgaatgaaatttagagggattatttgtgagaaatgtggtgttgaggttacaaaatcaaatgtaagaagagaaagaatgggccatatcaatttagctacacctgtagcacatatatggtttttaaaatctctacctagcagaatcgcacttgctgtagatatgaagcttaaagaaattgagagagttctttactttgagaattttattgtcatagaacctggtttaactggtttacaaaaaaatcaattattaaatgaagaagaattagctaaatatcaagatgagtttggtgaagagtcgtttactgcaggaataggtgctgaagctgttcttgaaatgcttaagaatttagatttagaacaagagagaaaaaatttagttaattttattaaagaaacaaaatcaaaagttaacgaagaaagagctattaaaagattaaaacttgtagagtcatttattgaaactggtcaaaaaccagagtggatgattatgacagttgttcctgtaattccaccagaactgagaccacttgtcccattagatggtggtaggtttgcaacttctgatctgaatgatctttatagaagagtaatcaacagaaataatagattaaaaagattaatggatcttaaagctccagacattattgtgcgaaatgaaaaaagaatgcttcaagagtcagttgatgcactatttgataatggaagaagaggaagagtaattactggcacaggtaaaagacctcttaaatcacttgctgaaatgcttaaaggtaaacaaggtagatttagacaaaacttattgggaaaacgtgttgattactctggtagatctgtaatcgttgttggtccagatttaaaactacatgaatgtggtttaccaaaaaaaatggcattagaattatttaaaccatttttgtatgctagattaaataaattaggtttagcatcaacaattaagcaggctaaaaaacttgttgaaaaggaaaccaatgcagtttgggatgcacttgagttaattgttagagagcacccagtattactaaatagagcaccaacacttcatagacttggtgtacaggcatttgaaccaaaattaattgagggagatgcaattgaacttcaccctctaacatgtgcagcatttaatgctgattttgatggcgaccagatggcggtacatgtaccattaagtttagaggctcagttagaggcgagaattttaatgttatcgactaataacattctttcaccttctaacggtaaacctattatcgttccaagtcaggatatgatcttaggaatttattatctttctcaagaaccagttactgataagccagctggatactttgttgactctgaccaaatcgaatttgcattatcttctggtcaaattaaagtacatagtacaattatttctagatttgaaactgttgatgataaaggaaataaaaaatttgaaaaatatacttcaactgctggaagatttttattggcaaatttattaccaaaaaatagtaatataaaattctctttgatagatagattgctgcctaaaaaagtagtttcagaaattattgatattgtttttagattttgtggacaaaaaacgactgttatattctgtgacaaattaaaagatctaggatttaagcatgcatttaaagctggaatatcatttggaaaagatgatctagtaattcctgagagcaaaacacaattaattgatgatactaaaaaattaattgctgattatgaaacacagtat

SEQ ID NO: 255830 - DNA, 1945 bp, Unknown
  Bacterial polypeptide expressing nucleotide sequence isolated from the Sargasso Sea
atgagaaaagagctatcaaaagaaagaagagcaaatatatctgaaaagaattttaatcatattaaaattacattagctagcccagaaaaaataaaatcttggtctttcggagaaataaaaaaacctgaaacaataaattatagaacattcaaacctgaaaaggatggattattttgtgcaagaatttttggtccaattaaagattatgaatgtctatgtggaaaatataaaagaatgaagtttaggggaattatttgtgagaaatgcggagtagaagtaactaaatcaaatgtaagaagagaaagaatgggtcatattgatcttgcatgtccagttgcacatatttggtttttaaaatcacttccaagcagaatatcactagctatagatatgaagctcaaggaagttgaaaaaattttatactttgaaagttttattgtgattgaacccggattaaccgaactaaagaaaggtcaattactaacagaagatgaatatataaaagcacaagaaaaatatggtgaagatggcttcacagcgggtattggagcagaagcagtaagagaaatattattaagtatagatttagaagccgaaagaaaaaaattacgtgaatcattaaaaagtataaaatctaaagtaactgaggaaaggactcttaaaagattaaaattaatagagtcatttattgattctggaaataaacctgagtggatgattttaacaacagttcctgtaatccctcctgaacttagaccattggtacctttagatggaggtagatttgcaacatctgatttgaacgacctttatagaagagtaataaatcgtaataacagactaaagaggttattagatctaaaagcaccagatatcatagtaagaaatgaaaaaagaatgctccaagaatctgtagatgcactttttgataatggaagaagaggcagagtaattactggaacggggaaaagacctctaaaatctttagcagaaatgttgaagggtaaacaaggaagatttagacaaaatcttttaggcaaaagagtagactattctggtagatcagtgattgttgtaggaccagagctaaaacttcatcagtgtggattaccaaaaaaaatggctttggaattgtttaaaccttttttatacgcccgtttggacaaactgggatttgctacaaccattaaacaagcaaagagaatggttgaaaaacaaaaaagtgaggtatgggatgcattagaacatattattagagagcaccctgtaattttaaatagagctccaactttacatagattaggcgttcaagcttttgaagcaaaactgattgagggtaatgctatagaacttcatcctttagtttgcgctgcatttaatgctgattttgatggtgatcaaatggcagtacatgttccactaagtttagaagcacaaatagaagcccgtgtgctaatgatgtcaacaaataatattttaagtccatcaaacggtaaaccaataattgtacccagccaagatattgttttaggtatatattatttatctcaacataaagaggatacaaaaactaaacctgtaggaattttttctgatgtaaatgaaattgagaatgctattgaaagaaaagatataagtgttcactctaagatagtatcagtattcgatactttagataaagatggaaataaaatttcagagaaatacacaagtacagccggaagatttttactatctaaaactttaccaaaaaaccataaaattaaatttgaactagttaacaaaattcttaccaaaaaagcagtttcagaagttattgataccgtttacagatattgtggacaaaaggagactgtaattttttgtgacagaataaaagatctaggttttaaacacgcttttaaagctggtatttcatttggtaagaacgatttaattataccaa

SEQ ID NO: 255831 - DNA, 1906 bp, Unknown
  Bacterial polypeptide expressing nucleotide sequence isolated from the Sargasso Sea
aatgacaaacagcaacttaagaactgaaaatcactttgattacgtcaaaatttcgatagcttctccacaaagaataatggattggggtcagaggacattgcccaatggacaagtagttggtgaagtaactaaacctgaaactatcaattacaggacacttaaacctgaaatggatggattattttgtgaaaagatttttgggccatctaaagattgggaatgccattgtggaaagtataaaagagtaagacatcgcggcattgtttgtgagagatgtggggttgaagtaactgaaagtagagtcagaagacataggatgggatatataaaactcgctgcgccagtttcccatgtttggtatttgaaaggaatccctagttacgttgcaatacttttggatattccgcttagggatgtagaacaaatagtttattttaattgttacgtcgttttagatccaggtgatcataaagagcttaagtataagcaattactcactgaggatgagtggctggaaattgaagatgaaatttatgctgaagattcaactatagaaaatgaaccttttgttggaattggtgctgaagcactgaagcaattacttgaggaccttgatttaaatcaggttgctgaggagcttagagaagaaattactaatagcaaggggcaaaagagagcaaagcttataaaaagaataagagttattgataatttcattgcaactaacgcaaaaccagaatggatggttttagatgcaataccagtaatacctcctgatctgagacctatggtacagcttgatggaggaagatttgcaacttcagatttaaatgatttatacagaagagttataaatagaaataatagactagctaggcttcaagaaattttagctcctgaaatcatagtaagaaatgaaaaaagaatgcttcaggaggcagttgatgcccttatagataatggaagaagagggaggactgttgttggagcaaataatagagctcttaagtctctaagtgacataattgaaggaaagcaaggaagatttagacagaatcttcttggaaaacgtgttgactattcaggaagatctgtaatagtagtgggtcctaaattaaaaatgcatcagtgtggtctcccaaaagaaatggctttagagctctttcagccttttgtaatccatagattgatacgacaaaacattgtgaataatattaaagctgcaaaaaaattaatacaaaaagctgatgacgaagttatgcaggtacttcaggaagttattgaaggtcatccaattctcttaaatagagcccccaccctgcatcgtttaggaattcaagcttttgaacctaaattagttggaggtagagcaatacaacttcatcctttagtttgtcctgcattcaatgctgactttgatggagatcaaatggcagttcatgttcctttagctttagaggcacaaaccgaagcacgcatgcttatgttggctagtaataatattctttctcccgctactggagaaccaattgtgactccatcacaagatatggttttaggatcttattatctgactgctttgcaaccgaattatcaaaaaccagaatttggagataataagactacttttgcttcattagaagatgttatttttgcctttgaagataaaagactatgcctgcatgaatgggtttgggttagatttaatggagaagttgaagatgaagacgaaatgcgtagcccacaaaaaactcaagagctagaagatggttcaaaattagaaatctggaatttaagaagagacagatttgactctaataataatttaataagtagatttgtgctgacaactgttgggagagtagttatgaactataccatcatcgattctgtatctaaaacttaa

SEQ ID NO: 255832 - DNA, 1192 bp, Unknown
  Bacterial polypeptide expressing nucleotide sequence isolated from the Sargasso Sea
atgacggatctgtcaaaaggccaaatgctgtctgaagagcaatatattgaagcattagagatgtatggcgatgatttttctgctgcaatgggagctgaagcaatacatgatattctaaaagatctagatctccaagataaccttaatcaaattcaagaagacatggaagcaaccgcttcacagatcaaaattaaacggtatcaaaaaaggttgaagctaatagagtcactcatttcttctggcaataggccagaatggatgattctaaaagttctaccaattttaccacctgacttaaggcctttggtgcctcttgatggaggtagatttgcaacatcagacctgaatgatctctatagaagggtcatcaacagaaacaatagactccaaagattacttgatctaaacgctccggacatcatagttagaaatgaaaagaggatgctacaaaaatctgttgatgcactccttgataatggacgaatgggaagagcagttacaggttctaataagaggcctcttaaatcgcttgctgatatgatcaaaggaaagcagggtagattcaggcagaatttgttaggaaaaagggttgattactctggtaggtcagtaatagttgttggacctacattaaagcttcaccagtgtggtatcccaaagaaaatggcactggaactctttaaaccatttgtatttagtaaactgatctatcaaggtgaggcttctacaatcaaatctgcaaaaaggcttgtagagcttgaggggccagaaatttgggacattttagatggtgtcatacgacaacaccccgttcttctaaatcgtgctccaacacttcacaggcttggaattcaagcttttgaacctgttttagttgaaggtaaagccattcaattgcatccacttgtttgtaaagcatttaatgctgactttgatggagaccagatggcagttcatgttccactatcaattgaagcgcaacttgaaagcagggcattaatgatgtcatctaataatatactctcaccagcaaatggtgagccgattattgttccatctcaagatgtagttttaggcctatattatatgaccagagaaaaagttaaagatactggtgagggcggaatttttgcaaatatagaagaggttgagagagcatttcacaatgggttccttggtctgcatgcaaaga

SEQ ID NO: 255833 - DNA, 979 bp, Unknown
  Bacterial polypeptide expressing nucleotide sequence isolated from the Sargasso Sea
aatgtctgattttttgacccctgataaaattgatgttcaatcggcatcgccgtttaaagctcgtgtcgtgctagaaccgctcgaaagaggatttggtcatacactcggaaatacattaagacgaatacttttgtcctcaatgaatggctctgcgattacggaagtccagatcgatggagtagagcatgagtacacgaccatagaaggcgtgcaagaagatgtgattgatattctgctgaacctaaaaaacgtatctgtgctgatgcataatcaagaggacgcctatattactttgtctaagcaagggccttgtacagttaaagctggggattttgctttgggacatgatatcgaagttgctaatcccgaccatattctatgtaccttaaatgaaaaaggtgcaataaatattgaagcccgagtgaccaaagggaggggctatgttcctgccgatgcattagctgatgaggaagaaacaagggagataggggtgttaagactagatgcttcttatagcccattgaagaatgtagcttatagcgtggagagtacgagggtagaacagagaacggacttagataagctaatattagagcttgagactaatggaacaattgaccctgaagaagcgataagaagagctgcgaccatacttcagcaacaattagctgtattcgtagatttggatagtgaggtaatagaagaggaggaggaagaagaggaacaggtggatccgattcttttgagaccggtagacgatctcgaattgacggttcgctccgctaattgtttgaaagcagagagcatctactacattggtgatttgatacaaaggaccgaagtagaactacttaaaactcctaatttaggtaaaaaatcgttaactgagattaaagatgtcttagcgtcacgcggacttgctttaggtatgaggattgaaaactggccaccatcttcaatcacatcgacaataggttag

SEQ ID NO: 255834 - DNA, 2115 bp, Unknown
  Bacterial polypeptide expressing nucleotide sequence isolated from the Sargasso Sea
aatgaataaagaagttttagatatttttaatcaaaataaggcaactcaacaattcgatcatataagaattggaatagctagtcctgagaaaatactatcttggtcatatggtgaaataaagaaacctgaaacaattaactatagaacttttaaaccagagagagatggacttttctgtgcaagaatttttggtcctgtaaaagattacgaatgcttgtgtggtaaatacaaaagaatgaagtttaaaggaattgtatgcgaaaaatgtggtgtagaagttaccttatcaaaggttagaagagaaagaatggggcatattgaattagcttccccagttgcacatatatggttcttaaaatcattacctagtagaattggtttaatattagatatgatgcttaaagatcttgaaaaagtattatattttgaaagttttattgtattagatcctgggctaacaccgctcgataaacttcagttattaactgaggatgaatttatcgatgctcaaaatgaatttggagctgataactttaaagccggtataggcgctgaagcaattagattgcttctcgaagagcttgatttagaagaattgagtgaatcaatcagaaaagaaataaaagaaactaccagtgaattaaaaccaaaaaaattggcaaagagattaaaagtagtcgaagcatttaaagtttcaggaaataaacctgaatggatgattttgaaagtcattccagtaattccacctgagcttagaccgcttgttcctctagacggaggaaggtttgctacctctgatttaaacgatctctatagaagggttattaatagaaataatagattaagaaggttaatggatttaagagcgccagatatcattataagaaacgaaaaaagaatgcttcaagaatctgtggatgcattatttgataatggacgtagaggcagagtaataaccgggtctaacaaaaggccgctaaagtcactttcagatatgttaaagggtaagcagggtagatttagacaaaatttattaggtaaaagagtagattattctggaaggtctgtaattgtagtcgggccggagctaaagttacaccaatgtgggttaccaaaaaaattggcgctagagctttttaagccttttatttattcaaggcttgaatctatgggaatttcatcaacagtcaaacaagctaaaagaatggtcgaaaaacaaacccctgaagtttgggatattttagaagaagtcattagagagcatccagttttacttaatcgtgcgccaactcttcataggctcggaattcaagctttcgaaccagttcttatcgaaggtaaagcaatacagttacacccccttgtttgtgcggcttttaatgctgattttgatggagatcaaatggctgtgcacgtacctttatcattagaagctcagcttgaagcaagagttttgatgatgtctacaaataatattttacatcctgcaaatggagatccaattattgttcccagtcaagatattattttaggcttgtattatttgtctcaaatgaaacaaaatgaaccaggagaaggaaggcattttgatgatataaatgaaattgaatttgccttagataatagaaatataactcttcatacaaagataagttttagatttaatacagaagatggttataagaaattcgatacaacacctggtagagttttaatttcaaaagaattacctagcaatgaaaatatttcatttgaaattgtgaataaacttttaacaaaaaaagaaatttctaggatgatagatgatgtttataggcattgtggtcagaaagaaactgttattttttgtgatcatattatgaaattaggctttaaacatgcatgtaacgcaggaatctcttttggtaaagatgatatgattattcctgaagaaaaagttagcctaattaacgatactaatgagttagttaaagagtttgaacaacaatatattgatggatttataactagaggcgaaaaatataataaagttgttgatgcatgggcgaaatgtactgatagggtcgaggataaaatgatgaatatcatttcttcatctcaaattaatgaggatac

SEQ ID NO: 255835 - DNA, 2683 bp, Unknown
  Bacterial polypeptide expressing nucleotide sequence isolated from the Sargasso Sea
agttcttcctattttaccacctgacttaagaccacttgttcctctagatggcggaaggtttgctacatcagatttaaatgacctttataggagggtgatcaataggaataatagacttcaaagattattggatctcaatgccccagatatcattgtaagaaatgaaaagaggatgttacaaaaatctgttgatgcactcctagacaatggaagaatgggtagagcggttacaggttctaataagagaccgcttaagtctcttgcggatatgattaaagggaagcaaggtcgatttagacaaaatttattaggtaaaagggttgattactctggcaggtctgtgattgttgtagggccaaccttaaaacttcatcagtgcggcattcctaaaaagatggcattagagctattcaagccatttgtattcagtaagcttatttaccaaggtgaggcgtcaacaatcaaatctgccaaaaggctggtagagcttgagggggcagagatttgggatattttagacggcgtcataaggcagcatccaattctgcttaatcgtgcaccaactcttcacagactgggtatacaagcttttgagcctgttttggttgaaggaaaagccattcagttacatcctcttgtatgtaaagcctttaatgcagactttgatggagatcagatggcagttcatgtcccactatcgattgaggcacagctcgaaagtagggcattgatgatgtcatctaataatattctttcacctgcaaacggcgagcccattattgttccatcacaggatgtagttttaggtctctactacatgactagagagaaagtcaaagataaaggtgagagcggtatttttgcaaatattgaagaggtagaaagagcatttcacaatgggtttctcggcctgcacgctaaaattaaattaaagattgcaacgcaaaatgaggaaaagcctacagagattgttgacactacttgtggtagggctttattctcaaaaattgttccagatgacatcccattttcagtaacaaataaaacaatggatagcaaagagatttcaagattaatcaaccgctgctaccgtgaagttggacttaaggcaactgttatatttgcagataaactgatgtatctcggtttcgagtatgcaacgaaatcaggagtatcaattgctctagatgatatggttgttccagaaaataaagaagaaattctgactgatgctgaatcacaagttaaaagcattcagaaccaatttacttcaggtcttctcacacaaggtgagagatacaacaaagttgtcgatatttggtccagaactaatgatcaggttgctaatgcgatgatggataagcttggaaatgagaaagtgattgatagtgagggtaaaaaacaggatcaagaatcattcaattcaatctttatgatggctgattctggcgcaaggggatctgcagctcagattagacaactggctggtatgagaggccttatggcaaaaccagatggttctattattgaaactcctattacagccaatttcagagaaggattaaacatactgcagtactttatttcaactcatggtgccaggaaaggacttgctgatactgcccttaaaacagccaactcaggctacttaactagacgactagtagatgttgctcaagacttagttgtaacagaagaagattgtggaaccaaaaatggtatgacaatttcagctgtaattgaaggaggtgaggtagttcaaaatctaagcgatagagtgcttggaagagttttgattgagcctgttaaagatcttgagaacaagaaaaatattcttaaagcaggaactttgattgatgaatcaaatgttcatcttctcgaagagcatggaacagattcagttgttgttcgatctcctgtcacatgtgaaacaaaatatggaatttgtatcaaatgctatggaagagatctagcaagaggtactcttgtcaacattggtgaagcagttggcattattgctgcacagtcaattggtgaacctggtacgcagttaacaatgagaacattccatattggtggtgctgcatcaagtgcagcagcccaaaactcagttgaggtaaacaatgatggtgtagctactctatctaacttaaagacaataaagaatgccgataagaatttggttgccacaagccgctctggagaaatagttatttctgataagtttggtaaagagaaggaaagatataagatcccttatggtgcaaccatcaagatcaaagatgggaagaaagtgagtgctggcgatgttatttcaacatgggatccacacacccatccaataattaccgaagcatcaggaacaataagatttgaggactttattgatggagtgactgttaccgagcaagttgatgatatgactggcttaactaacattatcatcatggattcaaagaaaactgggactacagcaacagttaagccgagggcctctttggtcaacggtagaggtcaaccaatcatgttctctggaacagagacaccgattgtgtacacattccctcctggcgcgataataaatatacaagacgaatcaaagataagcgctggtgatgtcatagcaaggattcctctcgaatcttctaagactagtgatattactggtggactacctagggtt

SEQ ID NO: 255836 - DNA, 1021 bp, Unknown
  Bacterial polypeptide expressing nucleotide sequence isolated from the Sargasso Sea
atgaaaaaagaattaacagatctgtttaaaaattcagaaatttctgaagcacaaaattttaatagcattaagatatctttagctagtcctgaaaagattaaatcatggacttatggtgaaattaaaaaacctgaaacgataaattacagaactttcagacctgaaaaagatggtcttttttgtgctagaatttttggcccgataaaagattacgaatgtttatgtggaaaatataaacgaatgaaatttagggggattatatgtgaaaaatgtggtgttgaagtaacaaaatcaaacgttcgaagagaacgaatgggtcatataaatttagcaacaccagtagcacatatttggtttttaaagtcattacctagcagaatagctcttgctgtagatatgaaattaaaagaagtagaaagagtattatattttgagaactttattgtaattgaacctggtttaaccggcttacaaaaaaatcagattttaagtgaggaagaattagctaaatatcaggatgaatatggtgaagaggcgtttactgccggtatcggagctgaagctgttcttgaaatgctcaaaaatcttgacttagaattagaaagaaaaaatttagcaacttatattaaagagactaaatcaaaagttaatgaggaaagagcaataaaaagactaaaattaatcgagtcctttattgagactggacaaaaaccagagtggatgattatgactgttgttccagtaattccacctgaattacgaccattagttcctcttgatggaggtagatttgctacgtctgatttaaatgatctttatagaagagttattaatagaaataatcgtttaaaaagattaatggatcttaaagctccagatataattgtaagaaatgaaaaacgtatgctgcaggaatctgtggatgcattatttgataacggtagaagaggcagagtaattacaggaacaggcaaaagaccacttaaatctttagctgagatgctaaaaggtaaacaaggaa

SEQ ID NO: 255837 - DNA, 1708 bp, Unknown
  Bacterial polypeptide expressing nucleotide sequence isolated from the Sargasso Sea
agtactgtattttgatgcatacattgttctggatccgggagattctgatcttgagccattggaattggttgaagaagatcaagctcgagaattggaagaaaatcatcctgatttgattttgggaatgggagccgaggctatccagacactcctcagaagaattgaattagatgaactagaaaatcaattgcaaatagagatgcgtgaagttaattctgaaacgcgtcgcaaacgaatcgcgaaaagactcaatgtaatcggatcccttttaaagtccggcaatgctgtagactcaatgatcatcgacaatctccctgtacttccacctgaattgagacctttggtaccccttgaaggtggaaggtttgctacaagtgatcttaatgatttataccgtcgagttattcacagaaataatcgtcttaagcgccttatcgagcttcgggctccaggaataattgtcaaaaatgaaaaacgtatgcttcaggaatctgtagacgcactttttgataatggacgtcgtggtcgtccaatggttggttcaaacaaaagaccactcaagtctataagtgatatgctcaagggcaagcagggacgtttccgacaaaatctactagggaaacgtgtagattactccggacgaaccgtaatagtcgtcggtcctgagttaaaacttcatcaatgtggtttacccaaaaaaatggcattggagcttttcaaacccttcatttttcataaattgatcgattatcaggaaattcatacaataaaaaatgctaagaaagtgctggaggataatccccccgaagtctgggcgatacttgaagaagttgtcagagaacatcctgttttacttaaccgtgctccaaccctccatcgccttggaatccaggcatttgaaccaattttgatcgaaggtaaagccattcagcttcatcctcttgtatgtactgcattcaatgcagattttgacggagatcaaatggcggttcatgtccctctttcagtagaggcacaactggaatctaaaatacttatgatgtcaacaaacaatgttctctctcccgcaaatggtaaacctgtaatgacacctacccaggatatggtgcttggactttactggattactcgggaacgtgcaggagtaaagggtgaaggcaaaatattctcgaatcctggagaagtacagacggcctttgaccatggtcaagtcgatttacacgcaaaaataaaagtccgcttagaaacaaacaatatgatcccaacagatctgcaaaacgagactgctgatagcagcagaaatttagtagaatcaactgttggacgtgttttgctgtctatggtggttccagacgaagtaccatttgattcagtaaatatacatttgaagaaaaaacatatgacggatcttgtagatgaatcttttcgtaaggccggcagcattaaaacagttaaaatgttggatgatctgaaaaatttgggctatacatatgctactaaagcgggtttttcaattggaatggatgatatggttattccagaggaaaaagaaactcaattaaataaagcacagtcagaagttaacctcatcaatatgcaacaccaggacggattgattacagatggtgagcgatacaaccaggttattgatatttgggcacggacgacagaaaaaattgcagaaaaaatgtctgcgggactttcagat

SEQ ID NO: 255838 - DNA, 923 bp, Unknown
  Bacterial polypeptide expressing nucleotide sequence isolated from the Sargasso Sea
aatgaataaagaagttttagatatttttaatcagaataaagcaactcaacaattcgaccatattagaattggaatagctagccctgaaaaaatactatcttggtcatatggtgaaataaagaaacctgaaacaattaattatagaacttttaaaccagagagagacggacttttctgcgcaagaatttttggccctgtaaaggattatgaatgtttatgcggcaaatacaaaagaatgaagtttaaggggattgtatgtgaaaaatgtggtgtagaagtaactttgtcaaaggttagaagagaaagaatgggccacattgaattagcttctccagttgcacatatatggttcttaaaatcgttacctagtagaattggtttaatattagatatgatgcttaaagatctagaaaaagtattatattttgaaagctttattgtactagacccagggttaactccactagacaaactccagttattaactgaagatgagtttatcgatgctcaaaatgaatttggagctgataactttaaagctggtataggtgctgaagcaattagattgcttcttgaagagcttgatttggaagaattaagtgaatcaatcagaaaagaaataaaagaaaccactagtgagttaaaacctaaaaaattggcaaagagattaaaggttgttgaagcatttaaagtttcaggtaataaacccgaatggatgattttaaaagtcattccggtaattccacctgagcttagaccacttgttcctctagatggtggaagatttgctacatctgatttgaacgatttatatagaagagttattaatagaaacaatagattaagaagattaatggatttgagggcgccagatatcattataagaaatgaaaaaagaatgctccaagagtccgttgacgcat

SEQ ID NO: 255839 - DNA, 1575 bp, Unknown
  Bacterial polypeptide expressing nucleotide sequence isolated from the Sargasso Sea
gcgaaatcaaaaaactctgaaacaataaactacagaacttttatacctgaaaaggatggtttattttgcgcaaggatatttggaccaataaaagattatgaatgtttatgtggaaaatataaaagaatgaaatttagaggaattatatgtgaaaaatgcggtgttgaagtaacaaaatctaatgttcgaagagaaagaatgggacatataaatttagctacccctgtagcacatatttggtttttgaaatctttaccaagcagaatttcattaactatagatatgaaacttaaagaagtagaaagagttttatattttgaaaacttcattgttatagaaccaggattaacagctctaaaaaaatatcaattattaaatgaagaagagcttgtaaaatatcaagatgaatatggagaagaagcattttctgctggtatcggagctgaggcaatacttgaaatattaaaatctattaatttagaagaggaaaaagctttattaattaaaacaattaatgaaacaaaatctaaagttgctgaggaaagatcaataaaaagattaaaattaatagagtcatttatagaaacagggaacaaaccagagtggatgatattgactgtaattccagtaattccacctgagctcagacctttagttcctcttgatgggggtagatttgctacttcagatcttaatgatttatatagaagagttataaatagaaataatcgtttaaaaagattaattgatttaaaagctccagatatcataatccgaaacgaaaaaagaatgcttcaagaatctgtagatgcgctttttgataatggtcgaagaggtagagttattacaggaactggaaaacgacctcttaaatcactagctgaaatgttaaaaggtaaacaaggtagatttagacaaaatttattaggcaaaagagtagattactcaggaagatcagtaatagtagttggtcctgatttaaaacttcatgaatgcggacttccaaaaaagatggctttagaattatttaaaccatttttatatgcaagattaaataagttaggtttagcgtcaactattaagcaagcaaaaaaattagttgaaaaagagagagatgaagtttgggatgcgctagaaattattgttagagaacacccggtaatattaaatagagcacctactcttcacaggttaggagttcaagcttttgaaccaaaattaatagaaggtgatgctatagaattacatccattaacatgtgctgcattcaatgcagattttgatggtgatcaaatggccgtacatattcctttaagtttagaggcacagctagaagcaagagtcctaatgatgtctacaaataatattttgagtccatcaaatggtaaacctattatcgttccaagccaagatatgattcttggaatatattatttatcacaaccgccatatcaaaatgaaagagtcgaaggctattttgttgataatcatgaaatagagcacgctctagaaactggacaaattaaagttcattctagaattgtttcaagatttgtcacaattggagatgatgga

SEQ ID NO: 255840 - DNA, 2131 bp, Unknown
  Bacterial polypeptide expressing nucleotide sequence isolated from the Sargasso Sea
aatggttggattatcagatgttagagaatcgacggctggaggaccagcttttaatgctatcaaaatttcgattgcatcccctgaacaaatacttaactggtctcatggagaagtaaccaagccagagaccattaactataggacgttacgaccagaaaaagacggcctgttttgtgaaagattattcggccctacaaaagactgggagtgtttctgcggaaaatacaaacgcataagatacagaggtgtgatttgcgacaggtgcggagtagaagtaactcgagcaaaagtccgacgagaaagaatggcacacattcaactggcagctcctgtggcccatatatggtttagtaaaacaacaccaagcagactaggtttgttgttagatttgtcacctcggaatctggaaagagtactatattttgctcagcatatagttatatctgtggatgaagaatacaaacaacaactaactgaggaaagtgaagcagaacatgaaagaaatcaaagactgctcactgaaagtttcgaagaacaaataagtgtacttgaagcagctctaggagacactgaagaaggatctgacgaccacaaaacagtcgccggccaaatcgaatcagtgcgtaatcaatatgacgaacagatgggtatctacgatgacacccatcaaaaattgatcgatgattttgctgacttgcagccactaagactgttaactgaatctaaatatagagaattaaaagacagttatggagatgtcttcgaagcgggtatgggagcagaagcgattcaagaaattctaagacatatcgatcttaatgtcctgaaagaagaactagcccttgaaatgaagtcaacttcaggacaaaaacgtaaaaaagctatcaaaagactcagagtagtagaagctttcagaggcagcggtaatagtgttgcggacatgattatgagcgtgttgccagtactacccccagaattgagaccaatggttcaacttgatggaggacgattcgctacaagcgacctaaatgacctttatcgcagagtcataaacagaaacaatagactaaaaagactaatcgaattaggagctccagatattattatcaggaacgaaaaaagaatgctccaggaatctgtcgatgctttaatcgacaacggcagacgaggtaggccaattcaaggaagccacaaccataaactgaagtctctatcagatttattaagagggaaacagggtaggtttagacaaaacctactaggtaaacgagtagactattcaggaagatctgtgatcgttgtaggtccagaactccgaatggaccaatgcgggttaccaaagaaaatggctttagagttattcaagccgtttgttatgcacaaactcgtactactgggagtgtctccaaacattaaaagcgccaaaagaatggttgaacgagcccgaccagaggtatgggacattttggaagatgtgattaaagatagaccggttatgctgaaccgagcacctacattgcaccgattaggcatccaggctttcatgcccatattaattgaagggaatgctatacagttacatcctttagtgtgtacagcattcaacgcagactttgatggcgaccaaatggccgcacacgtaccattatctagattggctgtacaagaagccaaggcttctatgctaagcactaataatatgctgtccccagcatcaggagatccccaagttgctcccacattagatatggtcatgggttgttattacttaactcaaatggaagacgcagcacatggagaaggaactacattctttgactcagacgaggctaggatagctcacgcttctgacatcatagacctgcgtgcaaaaattaaattatcctcctctcccaaattagggttggagacggacgaagaaacgactctaggacgtatcttattcaacgaaatactcccagattcaatacctttcaggaacattgttatggaccgcggagcaatccgggatttgactgctgatctatacctgaatctcaccaatgatgagacttctcaagctttggatgcagtcaaagacattggattcaggtatgcaacagtttcaggcactacaatcgcaaataaatga

SEQ ID NO: 255841 - DNA, 691 bp, Unknown
  Bacterial polypeptide expressing nucleotide sequence isolated from the Sargasso Sea
ctgggtgaaattaaagcttctgatatagctcctgtagctgatgttgaaattctaaatcctgatttagtaatatgtaatttagatgaaaatactaatttccatatggaaatgaatgttaacactggaaaaggatatgttcctgcagatttaaataaaccggaagaaccaccattaggtcttattgcgatagactcattatatagtccagttaaaaaagtttcatactcaataagcactgcaagagaaggtaaagcattagactatgacaaattaactatggaagttgaaactaacggagcaatatcagcagaggatgcagtagcttattcagcaagaatttttcaagatcaattaaaaatgtttgttaattttgatgagcctgtagaagcacctgttaaagaagtttcgacagaacctgagtttaataaaaatttactgagaaaagttgatgaacttgaactatcagtaagatctatgaattgtcttaaaaatgataatataatttatattggtgatttggtgcaaaaatctgaaggagaaatgttaagaactccaaattttggaagaaaatctttaaatgagataaaagaagttttaactggcatgtctctttacctaggtatggaaataccaaattggccgccagataacatagcagaaatgtccaaaaaattagaggaagctatctaat

SEQ ID NO: 255842 - DNA, 880 bp, Unknown
  Bacterial polypeptide expressing nucleotide sequence isolated from the Sargasso Sea
atgaaaaatttacttaatatctttaatcagaaaccttttgcagaagaatttgatcatataagaattggtctttcgtctcctgaaatgattcgatcatggtcttatggcgaggttaaaaagcctgagaccattaattatagaacttttagaccagaaagagacggactgttctgtgcaaaaatatttggacctgttaaagactatgaatgcctttgtggaaaatataaacgattaaaacatagaggcgttgtttgtgagaaatgtggtgtagaagtcactcagagcaaggttagaagagaaagaatggggcatttagaactcgcaagtcctgttgcgcatatatggttcttaaaatcgcttccttctagaattggccttttgcttgacatgaccttgagggaaatagaaagagttctttactttgaagcttatcttgttacagatcctgggatgactgatcttactaaaggtcaaatgctttctgaagagcaatatattgaagcattagagatgtatggcgatgatttttctgccgcgatgggagctgagtctatccatgacattcttaaagatttagatcttcaagacagcctaaatcaaattcaggaagacatggaagcaacagcttcacaaattaaaatcaaacgttatcaaaagaggttaaagctaatagagtcattgatttcttctggaaataggcctgaatggatgattctaaaagttcttcctattttaccaccagacttaaggcctcttgttccacttgatggcggtagatttgctacatcagatctcaatgatctctatagaagggttattaatagaaataatagactccaaaagattactcgatctaaatgctccagaatatcatgttaga

SEQ ID NO: 255843 - DNA, 3097 bp, Unknown
  Bacterial polypeptide expressing nucleotide sequence isolated from the Sargasso Sea
atgagcgcccgagatgcagcaaagataccaaagagaatagactcgattagattcacactgatggatccaaacgagataaggaagatgtcatctgtagaagtaaagacagcagacacctacaaggacgatggccatgcattcaaacaaggtctgatggacccgaagatgggggtgattgacccaggcatcaggtgtgaaacctgcggaaacaagcacgaagagtgtccaagtcacttcggtcacatagccctagagctacctgtgatgcacataggattcaccggtctaatcaagacatgcttgaagacaacctgcaactcttgcagcaaggccttgctgcacgatgctccgcaaacgcatcctactgatccagagaagtccgagcaggactactacagagacagagtgaacgacatcatcctaaagcacggagttggtggcagggaattcaagaaaatcatcaaggatatcgagaatatttgcgctggccctaagcgtgcaatatgcatgcattgcggtgcggagcagggtaagataattctggataagcccacaaccttcaaagaaaagaaggcggataagggagagcacaaactgaatgctcgcgatatccgcgagtggctcgaaaagatacccgatgagcacctaattttccttggaatggagaaagacgttagtaggccagaatggacaatcatgaaggtactaccagttcctccaattactgtcaggccatctatcactctggaaagtggagatagatccgaggatgacctcacacacaagttagtagacgttctgaggattaaccagcgactcagagaaaatcgtgattcaggagccccacaactgatcgttgaagatctctgggaactgctgcagtatcattgcacgacatacttcgataatcagaccagtggcattccgccggctcgacacagatccggaaggccactaaagaccctatctcagaggcttaaggggaaggagggacgcttcaggagtaatctgtctggaaagagagtaaacttctgtgctagaacagttatcagtccggatccgaacctcgggatcaacgaagtgggagtcccagtgaagacggccaaggagctgacagtacctatcagagctacaagtagaaacagggaacaactcagacagatgattctaaggggcccggatgtccatcctggtgtcaactacatcattagaggcgataggttcagggttaggattaccgatagaacgaagtacatctgggcaggatttaggtgtctgaatccagattgccattgtggtagtgaagaggagccgtacatgggttacaggcctgatttgaacgaggtcctgccagctccaaacttccttccaggccttgttttgaaggagcaaatgcggagggatcccatgactgacgagctcctacccgagtggagcgtagatttggataggactctgtcaaacctaagaggagagggggaagatggaaacccactagctgaagacgatccagatgcggcaatacatcatcgctggaagtgggaagtagaaaatccggacgagtaccttcccgatcacctcgaggtgaaatgcccacactgcggaagcccagatatcgaggatgaacacggtaacctctaccctacagaagtagaggatcgattaagcacatacgatagagatggcaacccaaggccaggcgttgttgtcgaaaggcaccttattgacggagatgtaaccattttcaatcggcaaccatcactccataggatgtctatgctggttcacgaaataagagtcatggaaggcaagacattcagattcaaccttgctgactgcacaccctacaatgcagattttgatggggacgagatgaacctacacgtaatccagagtgaggaagccagggccgaggctagaatcctaatgagggtccaggagcacatcatatcgccaagatatgggggcagcgtcattggtgggatacacgatcacatcacgggtgcttaccttttgacgcatggagaggcattccttcctatgccagttgcaatggatgtcctcagctccattggatgggagggcgaaatacctccatcagtagagagaaacggacagaccggactcttaggaaacgacgtcttcagccttcttgtgaagggaggcttcactctgaacttcaagaatcgtgctggagaagaagtcaaggtttctcaaggagatgtctccggttctatcgacaagagaggaattggagcggaggacggacgccttctagacgcggtcgtccagacacatgggactgacaggggggcagacttcatcaataagatgacaaagatgacaatcgccatctgtacagcaatgggattcaccactggaatagatgacgaagacctacctcccgaggctaaggaagagatcgtgagaatcaactctgaggccagtgctagtgttgactccgaactagaaaagttcggaaaggatggaaggaagtacgaggccaggccaggaagaactccacacgagactctcgaggagaacatactgacaatcctggacgccgcaaaggccgaaactggaaacgtcgcgaaggcacaacttggcgatgacaattcagccgttcttatggcgacctctggagcgaggggctcaatggacaatctagcaatgatggcgggatccattggccagccgaaagtaagaggcaagcgacttgagaggggctatcaagacagagtcctttcccacttccctaggaaggttaagggatcaaaggagaagggtttcgtttcctcgtctttcaagcgaggcctcgaaccaaccgaattcttcatgctttcagtttccggtagggaatcactggtcgataccgctgtcagaacgagtaagtcgggttacatgcagagaaggctgatcaacgccatggatgatctcaaggtttctaatgacacgaaggcctcagtaagaaatactgcaaaccgcattatccaattcgagtatggggaggacgggaccgatcctgccagaagcagaaagggaagcccattcgatgtagatcaggtgcttaacgatgcacttgggggtgctaactgat

SEQ ID NO: 255844 - DNA, 3199 bp, Unknown
  Bacterial polypeptide expressing nucleotide sequence isolated from the Sargasso Sea
aaaaagaccattaaaatctttagctgaaatgcttaaaggtaaacaaggaagatttagacaaaatcttttgggtaagagagttgattattctggaagatcagtaattgttgttggtcctgatttaaaattgcatgagtgtggacttccaaaaaaaatggcattagaattatttaaaccttttttatatgctagattaaataaacttggtttagcatcaacaattaagcaggctaaaaaattagttgaaagagaaagaaatgaagtttgggatgctctagaaattattgttagagaacacccagttattcttaacagagctccaacattacatagactaggagtacaagcatttgagccaaaattaatagagggtgatgccatagaacttcacccattaacttgtgctgcatttaatgcagattttgatggtgatcaaatggctgtgcacatacctttgagtttagaagctcaattagaagcaagagttttaatgatgtctactaacaatatactaagtccatcaaatggaaaaccaattatagtaccaagtcaggatatgattttaggaatttattatttatcacaacctccttatcaaacagaaaaagttgaaggttattttgttaataattcagaaatagaacatgctcttgaaaacggacaaatcaaagtacattctagaattgtttcaagattttcaacgattgatgaaaatggtacagaaaaatttgaaaaacatatcagtacagcaggtagatttttattagcaaatttattaccaaaaaatgtaaataataaattttctttagtagataggcttttaccaaaaaaagttgtttcagaaataattgatcatgtgtttagattttgtgggcaaaaatctacagttatattttgtgataaattaaaagatcttggatttaaacatgcttttaaagctggaatttcttttggaaaagatgatttagttattccagaaaacaaacaacagttaattgaagaaacaaaaaaacttattacagattatgaaaatcaatattctgaaggtcttattacaagaggtgaaaaatataataaggtagttgacgcgtggtctaaatgtactgacagagtagcagcggaaatgatgaaaagaatatctgctactgaaataacaaaagacggtcttaaaataaattctgtgtttatgatggctgatagtggtgccagaggttcggctgcacaaatgaagcaattagcaggaatgagaggtttaattgctaaaccgtcaggagaaattattgagtcaccaattacatcaaattttaaagaaggcttaactgcacttgaatattttaattcgacgcacggtgcaagaaaaggactagccgatacagcattaaaaactgctaactctggatatttaactagaagactttgtgatgtagctcaagatttgaccattactaaaaaagactgcgactgtggaaaagcaggaagcattaacctaactgaaataattgagggtggaaatgtcatagttggattatctgaaagggcattaggaagagtggcggctaatgatataaaaaatccagtttctggtgaaaagattattaagaaaggtgaaatgatagatgagtctggctgtgaaaaaatagatgcagcaggagtaaaatctatagatgtatattcagtcataacatgtggatctagagaaggtgtttgtgcaatgagttatggaagagatttatcaagaggtaaaattgttcatgtcggagaagctattggaatgatttcagcccaatcaattggtgagccaggtactcaattaacaatgagaactttccacgttggtggaaccgcatcaataaaacaagagtcacaaatagtaactaagactgatggggtactaaaagttataaacacaaatttattagaagactcaaaaaagaatatggttgttatgggtagaaatactcagttatctattgaggatgaaaatggattgcaaacagccgtatataaagttccttatggttcaaaattatttttacaaaatggcgataaagttaaaaaaaatacaaaaatttgcgaatgggatccttatacaactcctgttatagcggaaaaaaatggtacagctaattatgttgatttaatagacggagtttctttatcagaaacgttagatgatgccacaggtatatcaacaaaaactgttatcgattggaaaaatcaatcaaaaaatactgatttaaaaccaagaataactcttagagatgacaaaggtaatgttataaaaaaagctgatgataacgaagcaagatactacttagtaccagattcaatattatcagttaaagatggacaaaaaatatttgctggcgatgtaatagcaagactccctaaagaaacttcaaagactaaagatattacaggtggtctccctagagttgcagaactttttgaagcaagaaaagctaaagatagcgcaatcattgcagaaaataatggaaaagttatttttggtaaagaggttagaggtaaacaaagagtttcaattgtttctgatgatggtgtttcatcaaattatttaattcctaaaggaaagcatattaattttaatcagggtgaaaaaattagtaaaggtgaatatttgttagatggtcagccactccctcatgatatcttaagaatacttggtatagaagaattaacagaatattttgtaaatcaagttcaagaagtttatagactccaaggagttatcataaacgataagcatattgaaactattttaagacaaatgctaaaaaaaattgaagtgaaagaatctggagactcaaatcttttaccaggtgaaataattgatagaataaaatttgatgatatgaatacaaatttaaaaaatgaaggaaaaaagcctgctaaaggggagagagtattaatgggaataacaaaagcttcattacaaactgaatcatttatatctgcagcttctttccaagaaactactagagttttaactgatgctgcaattaaaggtaaaatcgacaagttatctggtttaaaagaaaatgttattgttggaaggttagttccagcaggaactggatcagtgaaaaatctttggaacaaaaaagcattagaagatgacaaaaaatttgtttcggaacaagaaaaattagaaactccagaaagccagccaaatcaataa

SEQ ID NO: 255845 - DNA, 1030 bp, Unknown
  Bacterial polypeptide expressing nucleotide sequence isolated from the Sargasso Sea
atggaagtcgaaaatgttaatataaaaaattggaagtcattaattaagccatcaaaacttgatgtgcaaataagtgatgacttaactcatgcaaaaatagttgctgaaccattagaaaaaggctatggcctaactttgggaaattcacttagaagaattttactttcttcaataagaggagcagcagttacatcgatacaaatagatggtgttctgcatgaatttacatcaattaaaggtgttagagaagatgtaacagatattgttttaaacgttaaatctttggcgttaaaatgtaattcagagggtacaaaaaaattaattttagatgctaaagggccaggtgaaatcaaagcttctgatattgcacctgttgctgatgttgaaatattaaatccagaattagtaatttgtaatctagacgaaaagacttcttttcatatggaaatgaatgttagtactggaaaaggttatgtgccagctgatcttaacaagccagaggagccaccgttaggattaattgctatcgactctctttacagtccagtaaaaaaggtttcattttctgtaagcaccgctagagaaggaaaagccctggattacgacaaactaattatggaagttgaaactaacggatctatatcagctgaagatgctgttgcttattcagcaagaatttttcaagatcaactaaaaatgtttatcaactttgatgaaccagttgaagctccagtgaaagaagtttcaacagaacctgagttcaataaaaatttgttaagaaaagtagatgagctagaactgtctgttagatctatgaattgtttaaaaaatgataatattatctacattggagatttggttcaaaaatccgagggtgaaatgctaaggactcctaattttggaagaaaatccttaaatgaaattaaagaagttctaactggcatgtcattatatttaggtatggaaatacctaactggccaccagacaatattgcagaaatgtctaaaaaattagaggaagccatctaat

SEQ ID NO: 255846 - DNA, 1021 bp, Unknown
  Bacterial polypeptide expressing nucleotide sequence isolated from the Sargasso Sea
ctgacagattgttatggtcgattaagtttcggtcctgttaaccctggacaaggattaacaattggaaatgcactccgccgtattttattaaatgatttacctggaattgcagtgatcggagctgaaattgatggcgttcagagtgaattttcttcactacctggaatccgtgaatcggtaattgagatttttttaaatcttcgagaacttattttaagtccaattgatagttcgacaaaaggagcaaaatcaacgaaaccttttacattcgcaaagttaaaatccaatttaaatattggatctttcccttatgtaattactgcaggcgatttagatattggagattactgtttggttgacccaaatcaaccaattgcaactgtactatctaaggctgcagccgataatttcaaacttacagtttttattggccaaggtcgaagttatcaatcatggaaaaaattaccaggtgttccccaattaatggatcaacgtttttttgaatcatttgaatcaaatcaaacaaaccagcgttcagtaacttttcccattgatgctatttttatgccaattaaacaagtgaattttagtattcaagaacactcaattgatggtgaatatatttactttgaaatttggacaaatgggagtattcatccattcgatgcgatgaaatcagccgcaaaagtttgtatgaagttaatgacaagttgtttaacacgattaactgatgaacgaatttatgcagaggaattaaaactcccagagacaccaaattttgttgaggtgaattacaaaaaaattgagtcggatacagatttaaacgaagttttaattgaacaactcgaattatcattacgtgcttataattgtttaaaacgagctaatattttgactttagctgacttatctaaacaatcatttcgtgatttaatgaaactccgtaattttgggcagaaatcagctgatgaagtccgtggagcattaagtacgtatggaattgaattaaaagaagattaat

SEQ ID NO: 255847 - DNA, 670 bp, Unknown
  Bacterial polypeptide expressing nucleotide sequence isolated from the Sargasso Sea
tatgcaaatatcagtaatagatttattagtaccaaccgagatacaagtcgagaatgtttcagatactgtatccaaagtaacgttagagccgcttgagagaggttttggtcatactctaggtaatgccttaagaaggattcttctttcatcaatgcctggtgctgctgtaacagatgttgtaatcgatggtatttctcatgagtattcaacaattgagggggttagagaggacgtaatagatattctattaaatcttaaagatatgccagtgaaattaattgaaggaaatgaagcagaactaaaattatctgtagatggtccatgcgaagtaacatcttcttcatttgaagctcctggaaatgttgagttaacagatgctgatcatcatgttgtttcacttgtagataaaattaaattaaatatgtcagtttttgtaagaactggaagaggttatgagcccgcagatataagagatgatgaaaataatactgtaggaggcttaaaagtagatgcttcatttagtccagtaaaaagagtttcttattctgtagagaatgcaagatttgagaaaagaacagacttagataaattaatacttgagttggagacagatgggactatcgatgcaaaaatggctatagagcattctgcaactataatgcagcaacaa

SEQ ID NO: 255848 - DNA, 3208 bp, Unknown
  Bacterial polypeptide expressing nucleotide sequence isolated from the Sargasso Sea
tatgggaaaaaataatgaaataataacacaaaagaagtttaataccatttctattggactagcgtcacccgaagttattctgggtaactcaagaggagaagttcttaaacctgaaacaataaattatagaactcacaaaccagaaagagatggtttattttgtgaaagaatttttggaccagtaaaggactttgaatgtgcttgtggaaaatataaaagaattcgttataaaggaattgtctgtgataggtgtggtgtagaagtaactgaaaagaaagtaagaagagatagggtaggtcatataagcttagttgtacctgtagcccatatatggtatttcaggtcattaccaaataaaatagggtatctattaggtttagcatcaaaaaaacttgatatgataatatattatgaaagatatgttgttattcaaccaggtgaagcaaagaatagcgaaggtgaaccaattaacaagatggattttctaacagaggaggagtatttgtctattatggagacgcttccagctgataatcaatttttagatgatagtgatgaaaagaaattcattgcaaaaatgggtgcagaatgtttaattgaacttctatcaagaattgatttagaagaattatcatatgaactaagacataaagcaaataacgaaacttcaaagcaaagaaaaacagaagcacttaaaaggcttcaagttgttgaatctttcagagaagctaatcagagaaaggaaaaccttcctgagtggatgattgttaaagttatccctgttattccacctgagttaagaccacttgtacctcttgatggtggaagatttgcaacttcagatcttaatgatctatatagaagggttattattagaaataatagattgaaaaggttagtggaaattaaagctcctgaggtaatacttagaaatgaaaaaagaatgcttcaagaatcagttgattcattgtttgataatacaagaaaatcttccgcagttaaaacagaatcaaataggccattaaaatcattatctgattcattgaaaggaaagcaagggagatttagacaaaacttattagggaaaagagtagattactctgctaggtcagtaattgttgtaggtcctgaattaaagttgtatgaatgtgggctacctaaagatatggcagcagaactatataagccttttataattagaaaacttattgaaaggggaattgtaaagacagtaaagtctgcaaaaaaaattattgatagaagagagcctattgtgtgggatatacttgaaaatgttcttaaaggtcatccagttcttcttaatagagctccaactcttcatagacttggaatacaggcatttcaacctaaattaatagaaggaaaagctattcaacttcacccactaacttgtactgcatttaatgctgattttgatggagaccaaatggctgttcatcttcctttaggtcctgaagcaatccttgaggcacaattattaatgttagggtctcataatatcctcaaccctgctaatggttctccaattactgtcccatctcaagatatggttcttgggctttactatatgactaagtcaagaaagtctgatgataagaaaaaattggttggtgagggacttacattttattcatcagaagaagttaagatggcctacaatgaggagaaagttgaattaaatgctattataaaatgtaagattccaagttatgacaatgaattagataagactacttataaaattattgaaactactcctggtagagtcttctttaatgaagttgttccagaaaaagcaggctattttaatgaagtactaacaaaaaagaatttaagagaaataataggtaaaatacttctatccacaagcgtaccagaaacttcagagtttctagatgaaattaaagatttaggatattcctttgcttttaaaggaggactttcatttagtttaggagatataattattcctgagaaaaagcaaacccttattgacaatgctaatactcaggttgatggaattatgaataactataacatggggttgattactaataatgaaaggtataatcaggtgatagatgtatggacatcagcaaatgcaactttgacagagttggctatgaaacaaataagtgaagaccaacaagggtttaattctgtttatatgatgcttgactctggagctcgaggttcaaaagagcagattagacaattaactggtatgagaggattaatggctaagccaaaaaaatctaatattggaggaggtgaaataattgaaaatccaattttatcaaacttcaaagaaggcctttctattcttgaatattttatttcaactcatggtgctagaaaaggtttagcagatacagcacttaaaactgcagatgccggttatcttacaagaagacttgtagatgtttcccaagatgtaattgttaatgaatttgattgtgggacattaagaggtatagaagtttcagcattaaagaaaaacgaggaaattgttgaaaccctaggtgaaagaattcttggaagagtctccttaaatcaaattatagatccattaactaatgaagttatacttgaagccggaatgcagatagatgaggagatagtcaaaaaaattgaatcaacatcaattgattcagtagaggttaggtctccattaacatgtgaaactaaaaaaggaatttgtgttaattgttatggaagaaacctttccacagggaagttagttcaaataggtgaggctgttggagttgttgctgctcaatcaattggtgagccaggaacacagttaactttaagaactttccatgttggtggagtagcggggaatatctcagaagagaattctctaatatcaaaatttgacgggattgcagagattgatgatttaaaaactgtcaaggtaaaagatggtgatggtaacaataataatattgttatatcaaggacaagtgaaattagaattgtagacaaaactactaaaaatgttttaactactgccaatattccatatggatcttatataagcataagaaatggccaaaacctaaaaaagggagatttaatatgtaattgggatccatttaatggggtaatagtttcagaattttctggaaaaatagtttatgaaaatattgaaataggaaagaccttccaagttgaaattgatgaa

SEQ ID NO: 255849 - DNA, 2044 bp, Unknown
  Bacterial polypeptide expressing nucleotide sequence isolated from the Sargasso Sea
ttatgaatgtctatgtggaaagtacaaaagaatgaagtttagaggaatcatatgtgagaaatgtggtgtcgaagtcactaagtctaatgtgagaagagaaagaatgggtcatattaatttagctacaccagttgctcacatttggtttctaaaatcattacctagtagaatagcgttagctgttgatatgaagctaaaagaggttgaacgagttttatatttcgaaaattttattgtgattgaaccaggattaactggtttaaagaaaaatcaactactaaatgaagaagaacttgctaaatatcaagatgaatttggtgaagaagcattttcggcaggtattggagctgaagcagttttagaaatgctaaaatctttagatttagaattagagagaaaaaatttagtaagctatattaaagaaacaaaatcaaaagttaacgaagaaagagcaatcaaaagattaaaattaatcgagtcatttattgaaactggtcaaaaaccagaatggatgattatgactgttgtgccggtaattcctcctgaattaagacctttagttccactagatggtggaagatttgctacatcagatcttaacgacctatatagaagagttataaatagaaataatcgcctgaaaagattaatggatcttaaggctccagatatcattgtaagaaatgaaaagcgtatgcttcaagagtcagttgatgcgttatttgataatggaagacgcggaagagtgattactggaactggaaagagaccgttaaaatctttggctgaaatgttaaaaggaaaacagggaagatttagacaaaatttattaggtaaaagagttgattattctggtcgatctgtaatcgttgttggtccagatctaaaattacatgaatgtggattgccaaaaaaaatggcgctagagttatttaaaccttttttatatgcaagacttaacaaattaggattagcttcaacaattaaacaagctaaaaaacttgttgagaaagagaccaatgctgtttgggatgctttagaattaattgtaagagaacatcctgtgttgttaaacagggcgcctacacttcatagactcggagttcaagcgtttgaacctaaattaattgaaggtgatgcaattgaactacatccgctcacttgtgcagcatttaatgctgactttgatggtgatcaaatggcggttcatgttcctttaagtttagaagcacagttggaagcaagaattttaatgttatcaacaaataatatcttatctccatccaacggtaagccaattattgtaccaagtcaggatatgatcttggggatttactatttatcccaagaaccacttacagacaaaccagcaggatattttgtagacgctgatcaaattgagtttgctttatcatctggtgaaataaaagttcatagcacaattatttctaggtttgaaacagtcgataataatggtaacaaaaaatttgaaaaatacacctcaacagcaggaagatttttattagctaatttgttacctaaaaattttaatattaaattttctttaattgatagactacttccaaagaaaactgtctcagaaattattgatattgtctttagattttgtggacaaaaaacgactgtaatattttgtgataaacttaaagatttaggatttaaacatgcttttaaagcaggaatttctttcggaaaagatgatttagttattccagagagtaaaaacaaacttattgatgatacaaaaaaactcatagccgactacgaaactcaatattccgagggacttataacaagaggagaaaaatacaataaagttgtagatgcatggtcaaaatgtactgatcaggtagcttcagaaatgatgaaaggtatttcagcaacagagaagacatccgatggcctcaagataaactcagtatttatgatggctgatagcggtgctagaggctctgcggcacagatgaaacaattagcaggaatgagaggtttgattgctaaaccatcaggagaaattatgaaa

SEQ ID NO: 255850 - DNA, 1261 bp, Unknown
  Bacterial polypeptide expressing nucleotide sequence isolated from the Sargasso Sea
aaataaaatcatgggtctttttggagagataaaaaaaccagaaacaataaactataggacgtttagaccagaaaaagatggtcttttctgtgcgagaatttttggaccagtaaaggactacgaatgcttgtgcggtaaatataaaagaatgaagtttagaggaattatttgtgagaaatgtggagtagaaattactaagtctaatgtaagacgtgaaagaatgggacatatagatttagcttgtccggttgcacacatttggtttttaaaatctttaccaagtcgaatagctttggctattgatatgaagcttaaagatgtggaaaaagttctatattttgagaattttattgttgtagaaccaggtttaacttcacttaaaaagggacaattattaactgaagaagcacttattaaagctcaggaagaatttggagaagatgcttttactgctggaataggagcagagtcagtaagggatattttaataagtttagacttagaaaaagagcagaaaaaattacgtgattcattaaaagagattaaatcaaaagttacagaggaaagaacaattaaaagattaaaattaatagaatcttttattaattctggaaataaacctgaatggatgattttaacaactattcctgttattcctccagagcttagacctttagttcctcttgatggaggtagatttgctacctcagatcttaacgatctttacaggagagtaattaacagaaataatagactgaagaggcttttagatctaaaagccccagacattatcataaggaatgaaaaaagaatgctccaagagtccgtcgatgctctttttgacaacggaagaagaggaagagttattactggaactggaaaaagacctctgaaatccctagctgaaatgttgaaaggtaaacaaggaagatttagacaaaatttattaggaaaaagagtagattattctggaagatccgtaatcgttgtaggacctgaactaaaactacatgagtgtggtttaccaaaaaaaatggctttagaattattcaaaccttttttatatgcaagattagataaattaggtttagcaactacaattaaacaagccaagagacttgtagaaaaagaaaaaagtgaagtttgggatgctctagagtacataattagagagcatccagtaattttaaacagagcaccaactatacatagattaggagtccaagcattcgaagctaaattaatagagggaaatgcaatc

SEQ ID NO: 255851 - DNA, 1249 bp, Unknown
  Bacterial polypeptide expressing nucleotide sequence isolated from the Sargasso Sea
ttcatagaaacaggaaataaacctgaatggatgattttaacaacaattccagttataccgccagagttacgacctttggtccctcttgacggtggccggtttgctacatctgatcttaatgatttatatagaagagtaattaatagaaataatagattaaaaagactgatagatcttaaagctcctgatattattataagaaatgagaaaagaatgctgcaagagtcagttgatgctctttttgataatggccgaagaggaagagttattacaggaactggcaaaagacctctcaaatctcttgcagaaatgttaaaaggtaaacaaggtagatttagacaaaatttattaggtaaaagggtcgactattctggtagatctgtaatcgtagttggtcccgatttaaaactacacgaatgtggattaccaaaaaaaatggcattagagttatttaaaccatttttatacgcaagactaaataaactcggtttagcatcgacaattaaacaagcaaagaaactcgttgaaaaagaaagagatgaagtctgggatgctttagaaattatagtaagagagcatccggtattattaaatagagctccaacactgcataggttaggagttcaagcatttgaaccaaaattaattgaaggtgatgcaattcaacttcacccattaacatgtgctgcttttaatgctgattttgatggagatcaaatggctgtacatgttccattgagtttggaagcacaattggaagcaagagtgttgatgatgtcaaccaataacatattaagcccttcaaatggaaagccaattatagttccaagtcaggatatgattttaggaatttattatctttcacaacctccacaccaaagtgaaaagatagagggatatttcgtaaatacagatgaaatattacaagcacttgaaaatggaagtataaaaattcattcaagaataatttcacgatttgaaactgttgacgaaaaaggaagcaaaaaattagaaactcatactagtactgctgggagatttttgttagcaaatataataccgaaaaatataaataataaattttctttagttgatagattattaccaaaaagagttgtttcagaagtaatagatcatatatttagattttctgggcaaaaaaatacagttattttttgtgataaacttaaagatctaggatttaaatatgcatttaaagctggaatttcattggaaaagacgatttggt

SEQ ID NO: 255852 - DNA, 3409 bp, Unknown
  Bacterial polypeptide expressing nucleotide sequence isolated from the Sargasso Sea
tatggaaaaagtatttgatgaattaagcattagtcttgcaacaacagaccaaattagaagctggtcttttggtgaagttaaaaaaccagaaacaataaattatagaactctgaagcctgaaaaagagggcctctttgatgaaagaatatttggaccaacaaaagactgggaatgctcatgtggaagatataaaagaattagatatagaggaataatttgtgaaagatgtggtgttgaagtaacaagaagagaagtaagaagagaaagaatgggacacattgaactagcagctcctgtcactcatatttggtattttaagggtgtaccaagtcggctcggatactttttagatatgtcacccaaagagcttgaaaaagttatttattttgctgcatacttagttgtttctatagatgataaaaaaagaacaaaagatttgaaagagctagaagaggctgttgttgcagaaaaagaaatagttgaagaagattttgaagattgggagaaaaaaagaattaaacaaatgaaagttgaacttaaagctatggaagatggcaaagttccagaagcagagattaaggaaagaaataaagagattgaaaaagagataaaacagaaaaaacttaaatcagatgctgaaataaaagtaattgaagaagccttccaaacattaaaaaccttgaagcctaaaactttaattgaaaatgacacgttatggcgtgaaatgattgataaatatgatgaatactttactgggggaatgggagcagaagcagtcagagagcttgtaggattagttgatttaaaatcagaaatggaaaaacttaaatctgatttagattctaaatctgctcaaagaaggcaaagggcaattcaaagaatgaaggtaattaaacctttttcagacggaaagaatccacctgaagctatgatattagaagtaattccagtaatacctccagaattaagaccgatggtacaacttgacggtggtaggtttgcaacctctgatttaaatgacttatatagaagattaataaatagaaataacagattaaagaagttactcgagctcggtgctccagagataatcataagtaatgaaaaaagaatgcttcaagaatcagtagatgctttatttgataatggtagaagaggacgagctgttgcaggagctggaggacgaggcttaaaatcactttctgacatgcttaagggcaaacaaggaagatttaggcagaacctacttggaaagagagttgattactcagcaaggtctgtaattgttgttggtcctcatttagatttacaacaatgtggtcttccgaaaatgatggccctagaactatttaaacctttcgttatgaaaaggcttgttgaacttggtttgtctcagaatataaaatctgcaaaaagaatggtagagagatcaagagcccaagtctgggatgttttagctgaagtcatagaagaacatccagtattattaaatcgagctccaaccctacatagattaggaattcaagcctttgaaccaattcttgttgaagggaaagctatccaagttcatccgctagtttgtgaagcgtttaatgcagattttgatggagatcaaatggcagttcatgtcccactttctgctgaagcacaggcagaagcaaaagtattaatgttatctactaataatgtcttatcaccagcaagtgggaatccaatagtttctccaagtcaagatatggtgattggcttatattatataactgaatgtcatgaggacttaaataaagcaactagttcttatgtagacgtaaatgaagctcttttagcttacgaagccggccatataaaactccatactcctataaaagtaagagttggaaatttagcaggagatcctgaaattcacgagaatataaagaatagattttcagaattaataggtgatagtcctgtaaatggcgatgagttaattaacactactctaggaatcacaatattcaactctataatgcccgaggattttccatatatacagtcaactgttagaaagcccgaaatgaaaaaaattatttcagaagttatcgaaagatacaataaagctgaattaagaaagtttttagacttgatgaaagaaattggatttaaatatggctcaaaagccggcttaagtgttgctatgacagatgttaaaaccccaccaacaaaaaatgaaattttagaaaagtatgaaaaagaagctgagaaagttcaaaaacaatacaaggatgacgtaattacagaagctgaacgaaagcaaaaaattattgaaatatggaatgaagcaactgatcaagttcaatatgcaatgagtgctgagcttgagtctgagcagtttaacccagtagacatgatggttaaatcaggagctagagggaacatgatgcaagtaagacagcttgctgggatgaggggtctagtagcaaatcctaaaggagatattattgaaagaccaattaaaagcaactttagagaaggaatgtcagtattagaatattttatttctacccatggagcaagaaagggcctagcagacacagcactaaggactgctgattcaggttatttaactcgtagactggtagatgtagcagcaggaattgtcattaaggaagtaggggataaaaatattgactggaaaggaactacaaaaaaaattaaagatgagaatggcaacgtcagtaaatatttacattcctcaatttttggtagagttctaagcgaagacataaagaagaataaaaagattctagagtatggagaaaagaaaaaattaaataaaggaacttttatagatgccgaagcgttggatgctatagctaaatcaggagtagactctattaacgtactttcaccatttaactcgcttgatcccgaatctatggagccattatgctacggatttagtttagcgactggtgttcctgttgaagaaggagaggccgttggcataatttctgcacaatctataggtgagccaggcactcaattaactatgagaacattccatacaggaggagtagttggtcttgatattacttctggcctaccaagaatcgttgaactttttgaagcaagaactccgaagggtaaagcagtgctttcattaattaatggaaaaattaaatccatagatactactgaagaaggaaatagaattgtaactattcaaaatgaaaaagagacaattgaagagctagtccttagaaggcaaactttattagtaaaccaaggtgataaagttgaagcaggtcagtctctaactactggaccaaaagaccctaaagaagttttacagataaatggtgtaagaacgtgccaggaatatcttgtagatgaagtacaaaaaacttatcgtgatcaaggagtgaag

SEQ ID NO: 255853 - DNA, 881 bp, Unknown
  Bacterial polypeptide expressing nucleotide sequence isolated from the Sargasso Sea
aggcgtgttcttgatcggtccccttgagcgaggccaggccaccacacttggcaactccctgcgtcgcgtgctgatggggggacttgaaggcagcgctgtgaccgccatccgcatcgcgggtgtcaaccatgagtacgccacgatcccaggcgttcgtgaggacgttctggacatcctgctgaactgcaaacagctgtccgtcaacagccgttcctccgaaatggagattggacggctcgtgattgccgggcccgccgaggtgaaggcgaaggatcttcagttctcctcccaggtacaggtagtcgacggagatcgtccgatcgccaccgtggccgatggccacagcattgaactggaggttcatgtcgagcgcggtattggctaccgcccggttgatcgcaacaacgaggacctcagtgcgattgatctcctgcagatcgatgcagtgttcatgccagtgcagcgggtgaacttcaccatcgatgaaaccgccgtcgctgaaggcggatcggcacgcgaacggcttcggatggaaatcgtcaccgatggatccatcaccccggatgatgccctggcgcaatcagcgaatcagctgattgaactcttccagcccctcgccaccgtgacactggtggaagagccaggtatcgagccagagccctccaccgaagctcagattcctcttgaggaactgaacctctcggtgcgcgcctacaactgcctgaagcgtgctcaggtgaactccgtatccgatctgatgggcttcagctacgaagatctgctggagatcaagaacttcggctctaaatcagcggacgaagtgattgaggcccttgagcgcatcggcatctcgattcctcagagccggaccaccgcctgat

SEQ ID NO: 255854 - DNA, 3045 bp, Unknown
  Bacterial polypeptide expressing nucleotide sequence isolated from the Sargasso Sea
tgcctgaagatccaaaaaattacagtgctgtccgtatcaagctggctactgccgaagatgtcatttcatggtcttatggagaggtacgctcttcggaaaccatcaactacaggacattcaaacctgaaagagatggtttattctgtggaaaaattttcggtccagttcacgattacgaatgtatttgcggcaaatacaaacggatgaaacaccgtgggatcacctgtgaaaaatgcggagtggaagtaatcgagtcgaaggtacgccgggaacgaatgggaaatatcaagcttgcttctccggtttcccatgtctggtttcttaaaggagttccaagccgtattgcgacgatccttgaaatgaccttaagggacctcgaacgagtactttattttgatgcctacattgttgtggacccggggagttcggaacttgaaaaaaacagtttggttgaggaagaagattatcgggaaatgctggataaatttcctgacctcgttcttggaatgggagcagaaacggtcaaagaacttttgatggatatcgacctgccgagtctgaatgagcaccttcgaaaagaaatgcgggaagtaacttccgaaacccgaaggaagcgtatccataaacgcctcaatttggtcagtgctctggttgattctggcaatacggcaagttccatgatcatcgaaaatttacctgtactgcccccggaattgaggccgttggttccgctcgaaggaggcaggtttgcgaccagtgacctgaatgatctttatcgccgtgttattcaccgaaacaaccgactcaagcgattgatcgaattacgtgctccgggaatcattgttaaaaatgagaagaggatgctccaggaatcggtggatgctctttttgataatggacgaagaggaaggcctatggtcggctctaacaagcgtcctcttaaatccctgagtgatatgctgaaaggcaagcagggacgtttccgccaaaatctgcttggtaaacgagtcgattattcaggaaggacggtgatcgttgtcggtccggatctcaaactgcaccaatgtggacttcccaaaaaaatggctctggaattatttaagcccttcattttccatagattgatcgattaccaggaagttcatacgatcaaaaatgctaagcgcaaattggaggaaaatgatccccgggtttgggctatccttgaagaagtggtcaaggaacatccaattatgctcaaccgtgcaccgaccttacaccgcctcggtatccaagcttttgaaccggtactaatcgagggtaaagcaattcagttgcatcctctggtctgtactgcgtttaacgcggactttgacggggatcagatggcggttcatgtgcctctctctgtggaagcccagcttgaggccaagattttgatgctctcaaccaacaacgtcttatctcctgccaatgggaagcccttgatgagcccgacccaggatatggttctggggttgtactggattacccgagagcgggaagggatgaagggagaaggaaaaattttttccaataagtctgatgtttcctctgcctatgaacatggacaagtcgacctccatgccaagatcaaagtcaggattggacgtgatgttgcagaaactacggttggtcgaaccttgctttcacttgtgataccggaagaggtccctttcaaatcaatcaatcgtcatctgaaaaagaaacagatgatcgaattgatcgatgcgtcatacagaaatgctggaagtgtaaagaccgtgacaatgttggatgaactgaagcggatcggttaccagtatgccacggaagcaggattttcgatcagtatggatgatatggtgattcctgaagaaaaatcggctctgctcctgcaggctcaaaataaagtcaatgaaatcaatacacagcatcaggacgggctgatcacagacggtgaacgctacaaccaggtgattgatatttgggcaaggaccactgaacggatcgcagagaaaatgtccgatggcctgaccaatgaaattgaagacgagagtggtaatcggaaagttaattcgatcttcatgatggccgactccggagcccgtggaagtaagcaacagatgaagcagttggcaggcatgcggggattgatggcaaaaccatccggagaaatcattgaaactccaattcatgcaaattttcgtgaaggactgaatgttctggaatatttcatttccacccatggagcgcgaaaaggacttgcggacacggctctgaaaactgcgaactcaggttatcttacccgaaggctggtggacgtcgcccaggatgcagttgtcttggaacatgattgcggaacattggacggaattgaaatgaccgcgctgattgaatccggagaaatcattgaacaacttggagacagggtccttggaagggttttgctcgaagatttgatggatccggatgatgacaacaacgtcctggttgaagcgggtgaggaaatcacagaatcagtcaaggagatcattgataattcaaggattgaaaagatcagaatccgttcggtctttacctgttccactgaacgcggtgtttgtcaactctgctacggaagggacttggctcgaggaaaactggtctcacttggtgaaacagtcggagtgattgcagcacagagtattggggaaccaggtactcagttgacgatgagaacgttccacattggtggaacagcaagccgactcgctgaacagaacacttgggaagcaaaattctccggtaaactacgttttgatgacttgaaagaggttcaggatgctcgaggaaactgggttgttctcggccggcgtggagaagcgatcattgtcgacgataatggaagggatctcgaaagaagaccctctacctatcgggacagctattcgtcatgcttctggggcagaagtgaaacagggagaattgattgcggaatgggaccctttctcgattccaattttaacggacgtttcgggttacgttcagtatcgggatatttttgaa

SEQ ID NO: 255855 - DNA, 1030 bp, Unknown
  Bacterial polypeptide expressing nucleotide sequence isolated from the Sargasso Sea
atggaaatcgaaaatgttaatgtaaaaaattggaagtcattaatcaagccatctaagttagatgttcaaataagtgatgacttaacacatgcaaaaattgtagcagagcctttagaaaaaggctatggtttaactttaggaaattctttaagaagaattttattatcatcaataagaggtgctgctgttacatctattcaaattgatggagttttacatgaattcacctcaataaaaggtgttagagaagatgttactgatattgtattaaatgttaaatctttagcattaaaaagtaattcagagggtactaaaaaattaattttagacgcaaaaggacctggtgaaattaaagcttcagacatagctccggttgcagatgttgaaattttaaatcctgatttagtgatttgtaatttagatgaaaatactacttttcatatggagatgaatgttaatacaggtaaaggatatgttcctgcagagttaaataagcctgaagaaccaccattaggtcttattgctattgactcactttatagcccagttaaaaaagtttcatattcagtaagtactgcgagagaaggtaaagcattggactatgataagttaattatggaagttgaaaccaatggatcaatttctgctgaagacgctgtagcttattcagctagaattttccaagatcaacttaaaatgtttataaactttgatgaaccagtagaagctccagtaaaagaggtttctacagaacctgaatttaacaaaaacttactaagaaaagtagatgagttagagttatcagttagatccatgaattgcttaaaaaatgataatattatttatataggtgacctagttcaaaaatctgaaggtgaaatgttgagaacacctaattttggaagaaaatcattaaatgaaattaaagaggttttaacaggtatgtctctatatttaggaatggaaattcctaactggccaccagacaacattgcagaaatgtctaaaaaattggaggaagcaatttaat

SEQ ID NO: 255856 - DNA, 976 bp, Unknown
  Bacterial polypeptide expressing nucleotide sequence isolated from the Sargasso Sea
atgatcaaagacttcttaactcccaaagaaattttggtagaagaagttgattcaaacaattcaaaaatagtattagaacctcttgaaagaggctttggacataccttgggaaatgctcttagaaggataattttatcttcaatccccggtgcggcggtttcagaagcaaaaattaatggggttctccacgagtttggctctattgatggagttaaagaggatgtcattaatatccttttaaatttaaaaggtctttctgtgagactttcagatcaagaagaagtcgaaatatcagtgaataagtcaggatcaggagatatcaaaggtagtgattttgaacttcctgctggagttgagattgtaaatcctgatcacgtagttgctactctcgctgacaaaggctccctcgagatgacggcaaaagttaccaagggaaggggttatgttcctgtagatatcatagctttggccgagagcgaagatactgaggttggctcactaaagattgatgcttcatacagtccaattaaaaaagtttcttattcagttgaaaatgcaagggtagaaaatagaactgacctagacaagcttattcttgaggttgaaaccaatggaacaatcgatcctgaagagattgtgaggttagcagcgactattttacaaagacaattaatggcttttgctgaattagggtttgaaactgatgaaccagaggaagatgaaactcctcctgttgatccaattatgttgaggcctgtagatgaactcgaattaacagtgagatcagccaattgtttaaaagtagagaagatccattacattggagacttagtaacccgaaaggaatctgatcttttaagaactcctaatctaggtagaaagtcacttaatgaaatcaaagaagttctagcagctagaggattatctttaggtttagaactcgagaattggcccccgtcaaatgttgaaggttaat

SEQ ID NO: 255857 - DNA, 1660 bp, Unknown
  Bacterial polypeptide expressing nucleotide sequence isolated from the Sargasso Sea
gattacgaatgcatatgtggcaagtacaaaaggatgaagcacaggggagtagtgtgcgaaaaatgtggagtagaagtcacattagctaaagttagaagagagagaatggggcatattgaactagctgcgcccgttgcccacatttggtttctaaaatctctgccttcgagaattgctcttcttttagatatgacgttaagagaattagaaagaattctatatttcgaatcttttgtagttactgatccaggaatgactgatcttgaaagttgtcagattttagacgaagaagagtattacgaggctcttgaaaattatggtgaagaattcagagcaggaatgggagcagaagcagtcaagacactgctaatggagatggatttagaagaagaaattgctttgattgaacaacaaatgacagaaaccaagtctgaagcaaaaataaaaaaactttctaaaaggatgaaaatcataaaatctttcagtaattcttccaataagcctgaatggatgatcctcgatgtgttgcctgtattacctccagatttaagacctttggttcctcttgaaggaggaagatttgctacttcagatcttaacgatctatatagaagagtgataaatagaaacaatagacttaaaagattaatggaactcaatgctcctgaaattattgtcagaaatgaaaaaagaatgctccaagaatcagttgacgctcttttagataatggaagaagaggaagagctataactggttcgaacaaaagacctctcaaatctttagctgacatgataaaaggtaagcaaggaagatttagacaaaacctcttaggaaaaagggttgattattctggccgttcagtgattgtggtcggacctaccttaaaattgcatcaatgtggtctacctaaaaaaatggctcttgaacttttcaaaccatttgtatttgggaagcttcaaaatcttgagctagcaactactatcaaaggtgcaaagagaatggttgagagagaagagcccgttgtttgggatattttagccgacgttataaaggaacatcctattcttttaaatagagctccaacactccatagattgggaatccaagcttttgaaccattacttattgaaggtaaagccatccaattacatcctctagtttgtaaagcttacaacgcagattttgatggcgatcaaatggctgttcacgttccgctaaccttggaatctcaacttgaatgccgtgccttgcttatggctagtaacaatattctttcaccttcaaatggtaggccaatcatagatccatcccaagatgttgtgttaggaatttactacatgacaagagaaaaaattaatgcaaaaggcgagggatctatatttgcagacattaaagaggtgtccagagcttttgaatcagatgcagttgaacttcaagcaaaagttaaagtaagaattaaaaataatgatggtcaaagtgaaattaaagatactactgttggaagagcattactttatcaaatctctccagacggattaaattttgaacaattcaataagactctaaccagcaaaggtatttccgatctaataaatacttgttatagagattgtggtttgaaagatactgtaatatttgcagatcaacttatgtatcaag

SEQ ID NO: 255858 - DNA, 1270 bp, Unknown
  Bacterial polypeptide expressing nucleotide sequence isolated from the Sargasso Sea
atgtcaaaaaataaagaattaattactcaaaaaaaatttaatactatttcaattggacttgcatctccagaggttatacttgggaactctagaggtgaagttcttaaacctgaaactattaattatagaactcataaaccagagagggatggattgttttgtgaaagaatttttggccctgtaaaagactatgagtgtgcttgtggtaaatataaaagaattaggtataaaggcatagtatgtgatagatgtggagttgaggtaactgaaaaaaaggtaagaagagacagagttggacacataaacctagttgttccagttgctcatatttggtattttaagtctcttccaaataagattggatatcttttgggtctaccatcaaaaaaacttgacatgattatctactatgaaagatatgtagttattcaacctggtgaagctaagagtgaagaaggagaagtattaaataaaatggactttttgactgaggaagaatatttgtctattatggaatcacttcctgctgataatcaatttcttgaagacagtgatgagagaaaatttattgctaaaatgggagctgaatgtctgattgaacttttgtcacgcattgacttagagtctctttcatatgaattaaggcataaagccaataatgaaacctctaaacaaagaaaaacagaagctttaaaaaggcttcaggtagtagagtcctttagagagggtaatgagagaaaggagaatttgccagagtggatggttgttaaagtaatcccagttataccacctgagttaagacctctagttccattggatggtggtagatttgctacttctgatctcaatgatttgtatagaagagtaataattagaaataataggctaaaaaggttagttgaaattaaagcgcctgaggtaatattaagaaatgaaaaaaggatgcttcaagaatctgttgattcattgtttgacaatacaagaaaagcttctgcagttaaaacagaatctaatagacctcttaaatctttatcagactcattaaagggtaagcaaggtagatttagacaaaacttacttggtaaaagggttgattactctgcaagatcagtaatagttgttggaccagagctaaaattgtatgaatgtggactaccaaaagatatggctgcagaactatataaaccatttattattagaaaacttattgaacgaggcattgtaaaaactgttaagtcagcaaaaaaaattattgataggagagagccag

SEQ ID NO: 255859 - DNA, 1169 bp, Unknown
  Bacterial polypeptide expressing nucleotide sequence isolated from the Sargasso Sea
aagaagaggcagagtgattacaggcaccaacaagagacctttgaagtctcttgcagatatgattaaagggaagggcggaagatttagacaaaacttattagggaaaagagtagattattcaggtagatctgtaattgttgctggaccaaatctaaagctacatcaatgtggcttgcctaaaaaaatggctctggaattgtttaaaccatttgtctatggaaaacttgaaaatagagaactggctacaacaatcaagggtgcaaaaaaacttgttgagagagagactccggaagtttgggaagttctcgaggaagttattagagaacatcctgtattacttaatagggcacctacacttcatagacttggacttcaagcatttgaaccaaagcttatagagggcaaagcaattcaacttcatcctttagtttgtgttgcatttaatgcagattttgacggagatcaaatggctgttcatgttccattaacgattgaggcacaacttgaagcaagagctttaatgatgtctacaaataacattctttctccagcagatggatctccaattattaacccaactcaggatgtagttttgggtctatattatatgacaagagataacgctaatgcctcaggtgaaggaagagtatttagtaatcctgacgaagttttaagagcttatgaaacagaaactttagaaatacattcacctataaaggtaagaatcactcacgaagatggtgagacaactattgaagaaacaacagttggaagaactttgatttggagaataacaccacatgaagttggctttcacaacattaataatgtattaaataagaaatcagtttcaaagttagttgatacttcatacagaaaagctggcttaaagaaaacagtaatctttgctgatcaacttatgtaccttggtttcgacttttcaactcgatcaggttcatcaattggtgtaaatgattttgttataccagaggaaaaggccaatattattgattcatctgaaaaagaagttaaagctattgaaaaacaatttgattcaggattagttacaaggggagagaggtataacaaagtcattgatatatggtctagagcaaatgagcaggtagcaaaagcgatgatggaaaaaattagttctgaaactgtaacaa

SEQ ID NO: 255860 - DNA, 3703 bp, Unknown
  Bacterial polypeptide expressing nucleotide sequence isolated from the Sargasso Sea
aatagaaagagttctttactttgaagcttatcttgttacagatcctgggatgactgatcttactaaaggtcagatgctttctgaagagcaatatattgaagcattagagatgtatggcgatgatttttctgctgcgatgggagctgagtcaatccatgacattcttaaagatttagatcttcaagacagcctaaatcaaatacaggaagacatggaagcaacagcttcacaaattaaaatcaaacgttatcaaaaaagattaaagctaatagagtcgttgatttcttctggaaataggcctgaatggatgattctaaaagttcttcctattttaccaccagacttaaggcctctggttccacttgatggcggtagatttgctacatcagatctcaatgatctctatagaagggttattaatagaaataatagactccaaagattactggatctaaatgctccagatatcattgttagaaatgaaaaaaggatgttgcaaaaatctgttgattcacttcttgataatggaagaatgggcagagcagtgactgggtcaaataagcgaccactaaagtcacttgcagacatgatcaaaggaaagcagggtagattcagacagaatttgttaggaaaaagagtcgattactctggtagatctgtgattgtagttggaccaactttgaagcttcatcaatgtggtataccaaaaaaaatggcattggagctattcaaaccatttgtctttagtaaattgatttatcaaggtgaggcatccacaattaaatctgcaaaaagactagtagaacttgagggggctgagatttgggatattttagacggtgttataagacaacaccctgtgcttctgaatcgcgctccaacccttcataggctcggaatacaagcttttgagcctgttttggttgaaggtaaagcgattcaattacatccgctcgtttgcaaggcgttcaatgctgactttgatggtgaccagatggctgttcatgttccactatcgattgaggcgcaacttgaaagtagggcattgatgatgtcatccaacaatattctttcgcctgcgaatggcgagcctattattgttccatctcaggatgtagttttaggcctctattacatgacaagagaaaaagttaaagatactggtgaggggggtatttttgcaaacatagaagaagttgagagagcatttcataatggctttcttggtctgcatgcaaagattaaactaaaaatttcaacccaaaatgaagaaaagcccacagaaattgtagaaactacgacaggtagggctctattctctaagatcgtaccagatgaaattccatttgttgtaataaataaaacaatggatagcaaggagatctccagactgatcaatcgttgttatcgagaggttggccttaaagccacagttatatttgcagacaaactaatgtatctcggctttgagtatgcaactaaatcaggagtttcaattgctctagatgatatggttgttccagaaaataaggaagaaatattatctgatgctgagtcacaagtgaaaagtatccagaaccaattcacatcaggccttcttacacaaggtgagagatacaataaggtcgttgatatttggtcgagaacaaatgatcaagtcgctaatgcgatgatggataagcttggaaaagagcaagttactgatagtaaaggcaaaaagcaggatcaagaatcatttaactcaatattcatgatggctgattcgggtgctagaggttctgcagctcaaataagacaattggctgggatgagaggcctgatggcaaaacctgatggctcaatcattgaaacaccaattacagctaatttcagagaagggcttaatatccttcaatacttcatttcaactcatggtgctcgaaagggtcttgctgatacagcattgaaaacagcaaactcaggttatttaacaagacgcttggttgatgttgcacaagatttggttgtaacagaagaagattgtggcactaaaaacggcatgacaatttcagcagtaattgaaggcggagaggtcgttcaaaatctgagcgatagggtacttggtagagttttagttgagcctgttaaagaccttgaaaataagaaaaatgtacttaaagcagggacattaattgatgaatcaaatgttcatcttcttgaggaaaatggaactgattcagttgtagttcgttctccagttacatgcgaaacaaaatatggaatctgtatcaaatgctatggcagagatctagcaagaggtacgcttgtcaatattggagaagcagttggaattattgctgctcaatcaattggtgagcctggaacacagctgacaatgagaacattccacattggtggtgccgcatcaagtgctgcagcccaaaactcagttgaagtcaataatgatggtgttgctagtctatttaatttgaagacgattaagaatgccgataagaatttagttgcaacaagccgatctggtgaaatcatcatttctgataaatttggcaaagagaaagagagatataagattccttatggagcaacaatcaatatcaaagatgggcaaaaagtgactgcaggtgatgttatttcaacttgggatcctcacactcaccctatcattactgaggcatcaggaacgataaaatttgaggactttattgatggagtaactgttactgagcaagttgatgagatgactggcttgagtaatatcattattatggactcaaagaaaactggctcaacaacaactgtaaaacccaaagcttctttgttcaatggcagaggtcagccgattatgttttctggaactgataccccaattgtttatacattccctcctggcgcgatagtaaatatccaagatggatcaaagataaatgccggagatgtaatagcaagaattcctctcgaatcttctaaaactagtgacatcacaggtggattacctcgtgttgcagacctttttgaagcaagaaagcctaaggatgctgctattttggctaaacattctggtattacaagtttcggtaaagaaacaaaaggtaaagtcagactagtcattacagatgaggatggcgaatctcatgaagaactcattcctaaaactagaacattgaatatctttgaaggggaaaccattcaaaaaggagaaataatctctgatggcgagttgagccttcatgacattttagaagtcaagggtatcgaaacgttggccgagtatctcgtcaaagaagtacaggatgtatatcgacttcaaggggtgccaatcaatgataaacacattgaaatcattgttaaacagatgatgaggaccgttgagatcattgaatcaggcgatacaaaatttctacctaaagaacaagcaaacaggattgatgtcatagaaaccaatgaaagaatgattaaagaagatcttcagcctgcaacattcaggcctttgatcatgggtattacaaaagcatcattggctaccacatcatttatttctgctgcttctttccaagaaacaaccagagtattgactgaggctgcagttaaaggatccgtagataaactaagagggcttaaagagaatgttgtcgttgggagattggtacctgcaggcacaggatttaagactgaattagatgctgcttctttagctgaagaagaa

SEQ ID NO: 255861 - DNA, 3100 bp, Unknown
  Bacterial polypeptide expressing nucleotide sequence isolated from the Sargasso Sea
atgaaaaaagaattaacagatttatttaaaggtagcgaaatttctgaagcacagaattttaatagtataaaaatttctttagctagtcctgagaaaattaaatcttggacatttggtgaaattaaaaaaccagaaactataaattatagaacatttagaccagagaaagatggtctattctgtgcaagaatttttggaccaattaaagattatgaatgtttatgcggaaagtataaacgaatgaaatttagaggtattatttgtgaaaagtgcggtgttgaggtaacaaaatctaatgtaagaagagagagaatgggccacattaatcttgcaactcctgtggcacacatatggtttttaaaatcattaccaagtagaattgcactcgctgtagatatgaagttgaaagaaattgagagagttctttattttgaaaactttatagttattgaacctgggttaactggtttgcaaaaaaaccaacttttaaatgaggaagaattagcaaaatatcaagatgaatttggagaagaaagctttactgcaggtattggagcagaagctgttcttgagatgttaaaaaatcttgacttagaattagaaagaaaaaatcttgttagctttattaaagagactaaatctaaagttaatgaagaaagagcaattaagagattaaaattaatagagtcatttatcgaaactggtcaaaaaccagagtggatgattatgactgtggttccagttattccaccagaattaagacctttggttccgctagatggtggtagatttgctacttcagatcttaacgacctatatagaagagttattaacagaaataataggttaaaaagattaatggatcttaaagctccagacatcattgttagaaacgaaaaaagaatgcttcaagagtctgttgatgctcttttcgacaatggaagaagaggtcgggttatcactggaacaggtaaaagaccacttaaatctcttgcagaaatgcttaaaggtaagcagggtagatttagacaaaacttattaggaaaaagagttgattactctgggagatcggtaattgttgtcggtccagacttaaaattacatgagtgtggattaccaaaaaaaatggctttggagttatttaaaccatttttatatgcaagattaaacaaattaggtttagcatccacaattaaacaagctaaaaaattagtagagaaagaaactaatgctgtatgggatgcattagaattaatcgtaagagagcaccctgttttattaaatagagcaccaacacttcatagacttggtgttcaagcttttgaaccaaaattaattgaaggtgatgcaattgagctacaccctttaacttgtgcagcttttaatgctgattttgatggtgaccaaatggctgttcatgtacctttaagtttagaagctcagttggaagcaagaatattaatgctatcaacaaacaacattctatctccttcaaatggtaaacctataatcgttccaagtcaggatatgattttaggaatatattatctttcacaggaaccagtatcggataaaccatctggatactttactaattctgatcaaatagagtttgcattatcttcaggtgaaattaacgttcatagcactattatttcaagatatgaaactgttgatgaacaaggaaataagaagattgaaaaatacacatcaactgcaggaagatttttattagctaatctattacctaaaaatagtaatattaaattttctttaattgatagattgttaccaaaaaaagttgtttctgagataattgatgtggtgtttaggttctgtggacagaaaacaactgtaattttctgcgataaacttaaagatttaggatttaagcatgcatttaaagctggaatttcatttggaaaagatgatttaattattcctgaaaataaaactcaattaattgatgatactaaaaaattaattgctgattatgaaactcaatatgctgaaggtttgattacaagaggtgagaagtacaacaaggttgttgatgcatggtctaaatgtacagataaagttgcgggtgaaatgatgaaaagaatttctgcaactgaaaaaacagaggaaggcttaaaaataaactcagtatttatgatggctgatagtggtgcaagaggttcagcggcacaaatgaaacaattagctggtatgaggggattaattgcaaaaccttcaggtgaaatcattgaaagtccaattatctctaactttaaagaaggtttaacagctttagagtattttaattctacacacggagcaagaaaaggattggcagatactgcgcttaaaacagcaagttctggatatttaacaagaagattatgtgacgttgcacaagatttaacagtaacaaaaattaaatgtgaagaaccaggctttattgaattatcagagatcttagaaggtggtaatgtagttgttagtttggcagaaagagcattaggtagagttacagctgctgaggtgaaaaatcctttaagtggtgaggtaataattaaaaagtcagaaatgattgacgaggcaggttgtgataaaattgatgccgcaggtgttaaatctataaaagtttattcagtaatgacttgtagttctaaagaaggtgtttgtgctacttgttacggtagagacttatctagaggtaaaatggtacatgtgggtgaagcaattggtatgatttcagctcaatcaattggtgaaccaggtacgcagttaacgatgagaacattccacgttgggggaacagcttcagttaaacaagataaccaaattatcagcaaaagtgatggtacattaaaaattattaactcaaacattttggaagattctaaaaagaatttaattgttatgggaagaaatactcaactttctatagaggatgataaaggagttcaaattgcagtttataaagttgcttatggatcaagattattttttaataatggagataaagttaaagcaaatacaaaaatttgtgagtgggatccatatacaactccagtcattgctgaaaagagtggtattgctagttatgttgatt

SEQ ID NO: 255862 - DNA, 2789 bp, Unknown
  Bacterial polypeptide expressing nucleotide sequence isolated from the Sargasso Sea
agacttagatatagatgacgaaattagaataattagagaagaaattcctcaaactaattctgaaactaaattaaagaaattatcaaaaagattaaagttgcttgaagcattcaaggattcaggaaataaacctgaatggatggtaatgaatgttttaccagttttacctccagatttgaggcctttggttcctcttgaaggtggaagatttgctacatcagatttaaatgatttatatagaagagttataaatagaaacaatagattaaaaagattactggagcttaatgcgcctgagattattgtaaggaacgaaaaaagaatgcttcaagaatctgtcgatgctcttttagataatggaagaagaggaagagtaataacaggaactaataaaagacccctcaaatctttagctgatatgattaaaggtaaaggtggcagattcagacagaatcttcttggtaagagagtagactattcaggaagatctgtaattgttgcaggaccaaatctgaggcttcatcaatgtggactacctaaaaaaatggctttggaattattcaaaccttttgtatatggaaagcttgagaatagagagctagcaactactattaaagctgctaagaagttagttgaaagagaaacacctgaagtatgggaagtgttagaagaagttataagagaacacccagtcttattaaatagagctccaactcttcatagacttggactacaagcatttgaacctaagttgattgaaggaaaggcaattcaacttcatcctttagtatgtgttgcatttaatgcagattttgatggagatcaaatggctgtccatgttccattaactattgaagcccaattagaagcaagagctttaatgatgtctactaataatattctttctccagcagatggatctccaatcattaatccaactcaagatgttgttctgggcctttattatatgactagagataatgcaaatgcgtcaggtggtggaagatcttatagtaatcctgatgaggttctaagagcttatgaaacagaaaatttagaaattcattcaccagtaaaagttagaataactgatgaaaatggtgaaacatcaatcgaagattcgactgttggtagaattctaatttggagaattacaccagcagaggttgggtttgaaaatattaatattgttttaaataaaaagtctgtttcaaaattaatagatatttcttataggaaggctggtcttaaaaagacagttatatttgctgatcaattaatgtatcttggttttgatttttcaacaagatcaggatcttcaatcggtgtaaatgattttgttattccagaagagaaagcaaaaataattgatatttctgaaaaagaagttaaagcaattgaaaaacaatttgattcaggtcttgtaacaagaggtgaaagatacaacaaagtaattgatatatggtcaagagcaaatgagcaagttgcaaaagcaatgatggaaaagattagttctgagaatgtaaaaacacctgatggtgaaaatgttgatcaatcttcatttaattccgtatatatttatgcagactctggtgctagaggatctcctgcccaaattagacaactttcaggaatgagaggccttatgtcaaaacctgatggctcaattattgaaacacctatcacagctaactttagagaaggcctttcagttcttcaatactttatctctactcatggagcaagaaaaggactagctgatacagctcttaaaacagctaattctggatatttaacaagaagactatgtgatgtttctatggattcagtaattaatattgatgattgtggtactaaagaatccattgttgttacatcaataatagacggaggcgaaatcatacaaacattaactgacagaatattaggtagggttattgccgaaccgatatttgactccgaaggtaaagaattatttccagtaaatacaatgttagatgaagatgctttagaagtgattgaggaattaaacttgtctagtcttaaagtaagatctccaatgacatgtgatgctccaattggagtttgtgcaaaatgttatggaagagatctagcacgaggacatcttgtacacagaggcgaagcagttggagtagttgctgctcaatctattggagaaccaggaactcagcttactatgagaacattccatattggaggcgcagcatcaagctcctccgaagataatgctatttacaacaaaaactctggaacagtttcattttctgatgatatgaagactgttacaaataaagacaagttagaagttgttgtatctagaaatgcaatgtgttcaatatcagattcgaatggaaaaataattgaacaatataaagttccatatggagcaactcttgaagttgctagctctaccagcttagaagatgaagtaagaattgcttcttgggatccatatactagaccaattatttctgaaacgtcaggaaaaattaaatttagtgatatagaggatggcgtaactgttagagagcaattagacgaattgactggattatcaagtgtagaaatcattgaagttgcagatagaacatcagctggaagagacatgactccaacaatagaaatagtggattcaaaaggaaagcctgttttaattggtgaatttaatcaacctgcagtttatccgttaccagctggaggcttagttaatctagtgaatggccaaaaaattactgctggtgaagtaattgcaagaatgcctttagtgc

SEQ ID NO: 255863 - DNA, 1635 bp, Unknown
  Bacterial polypeptide expressing nucleotide sequence isolated from the Sargasso Sea
aaaaataaaatcttggacatatggtgaaataaaaaaacctgaaactataaattatagaacatttagaccagaaaaagatggtttgttttgcgcgagaatatttggaccaattaaagattacgaatgtttgtgtggaaaatataaaagaatgaaatttagagggatcatatgtgaaaaatgtggtgtcgaagttactaaatcaaatgttcgaagagaaagaatgggtcatattaatttagcaactccagtagcacatatttggtttttaaaatcattaccaagcagaatttctttagcaatagatatgaaacttaaagaagttgaaagagtactttatttcgaaagctttattgttgtagaacctggtcttacagctcttaaaaagaatcaactattaacagaagatgaattatctaaatatcaagaagaatacggagaagaatcattttctgcaggaataggtgcagaagcaatcttagaaatattaaagtctatagatttaaaaaatgaaagagaaatacttttaaaaaatatcaatgagactaaatcaaaagttgctgaagaacgttcaataaaaagattaaaactaattgattcttttattgaaactggaaacaaaccagaatggatgattttaacaactattcctgtgataccacctgaactaaggccgttagttccacttgatggaggaagatttgctacatctgatttaaatgacctttatagacgagtaattaatagaaataatagacttaaaagacttatggatctaaaagctccagatataatcattagaaatgaaaagagaatgctacaagaatcagtagacgctctttttgataacggtagaagaggaagagtaattactggaactggtaaaagaccattaaaatctttagcagaaatgcttaaaggaaaacaaggtcgatttagacaaaatttactaggtaaaagagttgattattcaggcagatcagtaattgttgttggtcctgatttaaaacttcatgaatgtggtttgccaaaaaaaatggccttggaattatttaaaccatttttatatgcaagattaaataaattaggattagcttcaacaatcaaacaagctaaaaaattagttgataaggaaacaaacgctgtatgggatgcactagaattaattgtaagagaacatccagtaatattaaatagagcaccaactttacatagacttggtgttcaagcatttgaacctaaacttatagaaggtgatgcaattgaattgcatcctttaacatgtgctgcatttaatgcagattttgatggtgatcaaatggcagttcacataccattaagtttagaagcacaattagaagctagagttttaatgatgtcaacaaacaatattttaagtccatcaaatggaaaaccaattattgttcctagtcaagatatgattttaggaatttattatttatctcaaccaccataccaaactgaaaaaatagaaggttattttgtgaataattcagaaattgaacaaggtttagagtcaggaagtataaatgtacactctagaattatatcaagattccaaacagctgataaaaacggtaaattaataactgaaaaacacacaagtacagcaggaag

SEQ ID NO: 255864 - DNA, 1621 bp, Unknown
  Bacterial polypeptide expressing nucleotide sequence isolated from the Sargasso Sea
ccagatatcattgtaagaaacgaaaagaggatgttacaaaaatctgttgatgcactcctagacaatggaagaatgggtagagcggttacaggttctaataagagaccgcttaagtctcttgcagatatgatcaaagggaagcaaggtcgatttagacagaatttgttaggtaaaagagttgattactcaggtagatctgtgattgttgtaggaccaaccttgaagcttcatcagtgtggtattcccaagaagatggcattagagctatttaagccatttgtattcagtaagcttatttatcaaggtgaggcgtcaacaataaaatctgccaaaaggctggtagagctagagggggcagagatttgggatattttagacggcgttataaggcagcatccaatcctgcttaatcgtgcaccaactcttcacagacttggtatacaagcttttgagcctgttttggttgaaggaaaagccattcagttacatcctcttgtatgtaaagcttttaatgcagactttgatggagatcagatggcagttcatgtcccactatcgattgaggcacagctagagagtagggcattgatgatgtcatctaataatattctttcgcctgcaaacggcgagccaattattgttccatcacaggatgtagttttaggcctttattacatgactagagagaaaatcaaagataaaggtgagggtggtatttatgcaaatattgaagaggtagaaagagcatttcacaatgggtttctaggcctgcacgctaaaattaaattaaagattgcaacgcaaaatgaggaaaagcctacagagattgttgatacgacttctggtagggccttattctcaaaaattgttccagacgagatcccattttcagttacaaataaaacaatggatagcaaagagatttccagactaatcaaccgttgctatcgtgaagttggactgaaggcaactgttatatttgcagataaactgatgtatctcggtttcgagtatgcaacgaaatcaggggtatcaattgctctagatgatatggttgttccagaaaataaagaagaaattctgactgatgctgaatcacaagttaaaagcattcagaatcaatttacttcaggtcttcttacacaaggcgagagatataataaagttgtagatatttggtccagaacgaatgatcaggttgctaatgcgatgatggataagcttggaaaagagaaagtgactgatagtgagggtaaaaaacaggatcaagaatcattcaattcaatctttatgatggctgattctggtgcaaggggatctgcagctcagattagacaactggctggcatgagaggccttatggcaaaaccagatggttctattattgaaactcctattacagccaatttcagagaaggattaaacatactgcagtactttatttcaactcatggtgctaggaaaggacttgctgatactgctcttaaaacagccaactcaggatacttaacaagacgactagtagatgttgctcaagatttagttgtaacagaagaagattgtggaaccaaaaatggtatgacaatttctgctgtaattgagggaggtgagatagtcaaaa

SEQ ID NO: 255865 - DNA, 335 bp, Unknown
  Bacterial polypeptide expressing nucleotide sequence isolated from the Sargasso Sea
catgaccaacagcaacctccgcaccgagaaccacttcgactacgtcaagatcaccctcgcctcaccggaacgggtgatggagtggggccaacgcaccctgcccaacggtcaggtggttggtgaggtcaccaaaccggagaccatcaactaccgcaccctgaagcccgaaatggacgggctgttctgcgaaaagatcttcggtccctccaaggactgggaatgccactgcggcaaatacaagcgtgttcgtcaccgcggcatcgtctgtgaacgctgtggtgtggaggtcaccgaaagccgggtgcgccgtcaccggatgggtttcatcaagctgg

SEQ ID NO: 255866 - DNA, 937 bp, Unknown
  Bacterial polypeptide expressing nucleotide sequence isolated from the Sargasso Sea
gttgcaataccagattgacagaatcgaccatcaaatagcagatgatcgctcccaaacaggaacttttttaattggccctctggagaggggacaagctacaactttgggtaattcccttagaagagtccttatgggaggacttgaagggagtgcagttactgcagtaagaatagcaggaattaatcatgaatatgccactattcctggagttagagaagacgttttagatattcttcttaattgcaagcaactatcaataaatagttctaatccagagctcgaaatcggcaggttagtagcgagtggtccaatgcaggtaaaggcaaatgacattcaattctcctctcaagttgaaattgttgatggcgaaaaaccgatcgcgactattcaggagggtcattccttagagttggaaatccatgttgaaagaggtgttggatatagacccgtagaccgtaagagcgaagagacaactgctattgatttacttcaaatagatgctgtatttatgccagtgaagagagttaattttacgattgatgaaactgctgtagcagaaggcgggattggaagagaaagattaaaaatggaagtcgtaacagatggttcaacaagtcctgacgatgctattgctgaagctgcaaatcagttaatagaactttttcaaccccttgctactgtcacaatggttgaggaaattcctgaagaacctgaaccatctcctgaagctcaaattcctctagaggaactaaacttgtccgttagagcatataattgtttgaaaagggcgcaagttaactcagtttcagatttaatgggcttcagttatgaagatcttcttgagattaagaactttggctctaaatctgcagatgaggttattgaggctcttgagcgcatcggcatttctattccacaaagcagaacatctgtttaa

SEQ ID NO: 255867 - DNA, 1504 bp, Unknown
  Bacterial polypeptide expressing nucleotide sequence isolated from the Sargasso Sea
aatgaatgttttaccaattttacctccagatctaagaccattagttccattagatggtggaagatttgcaacatctgatttaaatgatttatacagaagagtaattaatagaaacaatagattaaaaagacttcttgaactaggggctccagaaataattgttaaaaatgaaaaaagaatgctacaagaatccgttgatgctttgcttgataatgggagaagaggtagagctattcttggaacaaataaaagaccattaaaatctctcgcagatatgattaaaggcaaacaaggaagatttcgtcagaatctattaggtaagagagttgattattctggacgttcagtaattgtttctgggccaactttaaaattacatcaatgtgggttgccaaaaaaaatggcacttgagctcttcaaacctttcatattaaacaagcttgagcaaaagggtataacagtaactataaaagcttcaaaacaactagttgaagaagaagcgccagaggtctgggattgtttagatgaagtaataagagaacatcctgtgttattaaacagagctccaaccttacatagacttggcattcaggcatttgagcctattcttattgagggcaaggcaattcaattacatcctcttgtatgtgtcgcatttaatgcagactttgatggagatcaaatggctgtgcatgttcctttgtccttagaagctcaactggaggcaagggcattaatgatgtcaacaaacaacatactctcacctgctagtggagagccaataatacaaccaaaccaagatgtagttttaggggtttattacttaactaaacaggataaagatgtagaaggaaagacaagaacatttattgatgtccatgaagttaaaagagcgtatttagaaaaacaagtaagtctacattcaaaagtaaatgtacggataaaaaaagctgagggttcaaaaattgtctcaactacagttggaagatgcttattctttgaaatcatgccgcaggaattagattttgaagaagtaaataaaacctttaagaaaaaagatattcttaaacttatttacaaagtgtacagagattttggcctaaaagaatctgtattatttgctgataatttaatgtacctaggatttgaatattcaactacttctggagcttcaattggtgtaaatgactttgaaatacctgatgacaaaaatgaaatcatatctagagcagaagcagaagttaaaaatattgagcaacagtttgaatcaggacttctaacaaaaggagagaaatacaacaaaattattgatatctggtcaaggacaaatgaaaaagttgcatcttcaatgatgaaagctcttggcgataaagtagaggttgataaaaatggtaatgaggaagtaattccatcatttaatagtgtatttatgtatgcagattccggagcaagaggttccgcggcacaaatacgacagttagctggaatgagaggtcttatgtcc

SEQ ID NO: 255868 - DNA, 577 bp, Unknown
  Bacterial polypeptide expressing nucleotide sequence isolated from the Sargasso Sea
catgttattggcaacactagtcgaaccaaaaaaacttgttatgactttaaaagtttgtacgggtgtgggatatgaacctgcggagaataaccagagtaaaggtgttgactcacttcatcttgatgcaatttattctccagtcaaaagagtaaattataaagttgagaacaccagagtagaaaatagaacagatttagataaattaattttagagcttgaaactgacggaactatcgatgcgaagcaagcaattaaattcgcggcaacaattctacaacatcagctagcagtttttgtcgacgaggaacttgtttcaagaaaggaaaaaagaaaggataaatatgattttgatccacttttattgaggtctattgaagagcttgaattaacagtgagatcaacaaattgtttaaaagcagaaagtatttttttaataggagatttaatacaaaggtctgaaatggatttactgaaaacaccaaacctaggaaaaaaatcattaaatgaaatcaaagacgaacttggatcaagaggtttatctctcggaactgtgctgaaaaactggccaccaatgtaa

SEQ ID NO: 255869 - DNA, 1420 bp, Unknown
  Bacterial polypeptide expressing nucleotide sequence isolated from the Sargasso Sea
attgagagacttattaaaatctttaaaaactagtcaagctgattttacatcaatctcagcaggtttagcttctcctcaggtcataaaatcttggtcatttggagaggttaaaaaacctgaaaccatcaactacagaacatttaaacctgaaagagatggtttattttgtgcgaaaatttttggcccagtaaaggactacgaatgcatatgcggtaagtacaaaaggatgaagcatagaggagtagtttgtgaaaagtgtggagttgaagttacattagcaaaagttagaagagaaagaatgggacatattgatcttgcagcaccagttgcacatatatggttcctaaaatctttaccttcaagaataggattgttacttaatgttacattaagagaaattgaaagggttctttattttgaaagttatatagttactgatccaggcatgacacctcttgaaaaaggagacattcttacagaagaagaatgggttgaaacatatgagcaatatggagatgattttgattcaggcatgggcgctgaagctgttcaaaagctacttcaagagattgatatcgatgatgaaataagaattattagagaggagattccacaaaccaactcagaaacgaaattaaaaaaattatctaaacgattaaagttattagaagcatttaaagattctggtaacaaaccagaatggatgataatggatgtattaccagttcttcctcctgatcttagacctctagttcctcttgagggtggaaggtttgcaacttcagacctaaatgacttatatagaagagttattaatagaaataataggttaaaaagactacttgaattaaacgctccagaaataattgttagaaatgaaaaaaggatgcttcaagaatctgttgatgcacttttagataatggaagaagaggaagagtaattacaggaacaaataaaagaccattaaaatcccttgcagatatgatcaaaggaaagggaggaagatttagacaaaatcttctaggtaaaagagtagattattctggtagatctgtaattgtagctgggccaaatctaaaacttcatcaatgtgggttaccgaaaaaaatggctttagagctttttaaaccatttgtttatggaaagcttgaaaatcgagaacttgcaacaacaataaaggctgcaaaaaaactagttgagagagaaactccagaagtatgggaggttttggaagaagttataagagagcatcctgttctcttaaatagagcaccaacacttcatagattaggacttcaagcatttgaaccaaagctaatcgaaggtaaagccatccaattacaccctcttgtttgtgtttgcttttatgcagactttgatggagatcaaatggcagtccatgtaccgttaactcttgaa

SEQ ID NO: 255870 - DNA, 967 bp, Unknown
  Bacterial polypeptide expressing nucleotide sequence isolated from the Sargasso Sea
atgcaaacatcagtaatagatctattagtaccaaccgaaattcaggttgatgatgtctcaccaacattgtcaaaggtaacacttgagccattggaaagaggttttggacatacacttggaaatgctctaagaagaatattactttcctcaatgcctggtgctgctgtgacagatgtcgcaatcgatggaatatctcatgaatatagcaccattgaaggagtaagagaggatgtaatagatattctattaaatattaaagacatgccaataaatctaattgaaggagactcggctgaagtaacattggatgtaaaaggtccttgtgatgtattagcttcatcctttgatgttcctggaaatgtagagcttgttaatcaagattttcatatcgcaactattgttgataaggttaatctcaaaatgactttaactgttagaaatggaagaggttatgagccagctgacttgagagaagatgaagatagggtagttggagcacttaaagtagacgcatcatatagtcctgttagaagagtttcttacacagttgataacgcaagatctggaaaaagaactgacttagataaattagttttagagcttgaaactgacggcacattagatccaaagatggcaatagaacactctgcaacaattctgcaacagcagcttggtgcgtttgttgatctagatgcaatagctgaacaagaggctaaaaaagatcaaaatgactttgatccaatcttattaagatcgattgaagagcttgagctaacagtaagatctactaattgtttaaaagcagagagtatttttcttataggcgacctaattcatagatctgagtttgatttattaaaaactccaaatctaggtaagaaatccttaaatgaaattaaagatgtattagcttctaaagatttatcgcttggtatgaatgttgaaaactggcctccagtaggatgaa

SEQ ID NO: 255871 - DNA, 1396 bp, Unknown
  Bacterial polypeptide expressing nucleotide sequence isolated from the Sargasso Sea
atgactaacagcaacttaagaacagaaaatcattttgattacgtcaagatatctattgcttcacctcaaagaataatggattgggggcagaggacattgcctaatgggcaagtagtaggagaagttactaaaccagagacaataaactatagaaccttaaaaccagaaatggatggacttttttgtgaaaaaatatttggcccatccaaagactgggaatgtcactgcggtaaatataaaagagttagacatcgtggaattgtctgtgaaaggtgtggtgtagaagtaactgaaagtagagtgagaaggcatagaatgggatatataaaactggctgccccagtttcccacgtttggtatttaaagggtatacctagttatgtcgcaatactgctagatattcctctaagagatgtagaacagatagtttactttaattgctatgttgtcttggatgttggggatcagaaagatcttaaatataaacaactccttactgaggatgaatggttagaaatagaagatgaagtttatgcagaagactctactattgaaaatgaaccagttgttgggataggtgcagaagctcttaagcaattacttgaggatctagatttaaatcaaattgctgaagaacttagagaagaaataacaaacagtaaaggtcagaaaagagcaaaactcataaaaaggataagggtaattgataatttcctggcaacaaacgcaaagccagaatggatggtactagatgcaatccctgttattcctcctgatcttagaccaatggtccaacttgatggaggtaggtttgccacatccgacttaaacgatctttatagaagagtcataaataggaataataggttagctaggcttcaagaaatcttagctcctgagatcattgtcagaaatgaaaaaagaatgttgcaagaagctgttgatgcacttattgataatggaagaagaggtagaacagttgttggggcaaataatagagctctaaaatctctcagcgatataatagagggtaagcaggggagatttagacagaatttacttggcaaacgtgttgattattctggaaggtctgtcatagttgttggtccaaagttaaagatgcatcaatgcggactccctaaagaaatggctattgagctttttcaaccttttgtgatacatagattaatccgtcaaaatattgtaaataatattaaagccgcaaaaaaattaatacaaaaaggagatgatgaagtcatgcaagtactccaagaagttattgaaggtcacccaatacttttaaatagagctccaactcttcataggttaggaattcaagcatttgaacctaaattagttggaggtagagcgatccaactacatccacttgtatgtc

SEQ ID NO: 255872 - DNA, 1210 bp, Unknown
  Bacterial polypeptide expressing nucleotide sequence isolated from the Sargasso Sea
tttgattacgtcaaaatttcaatagcctctccacaaagaatattggattggggtcagaggacattgcccaatggacaagtagttggtgaagttacgaaacctgaaactatcaattacaggacacttaagccagaaatggatggattgttttgcgaaaagatttttgggccatctaaagattgggaatgtcattgtggaaagtataaaagagtaagacatcgcggcattgtttgtgagagatgtggggttgaagtaactgaaagtagagtcagaaggcataggatgggctatataaaacttgccgcgccagtttcccatgtttggtatttgaaaggaatccctagttatgtcgcaatacttttggatattcctctaagggatgtagaacaaatagtttattttaattgttatgtcgttttagatccaggtgatcataaagaacttaaatataagcaattactcactgaggatgagtggctggaaattgaagatgaaatttatgctgaagattcaactatagaaaatgaaccttttgttggaattggagctgaggcactaaagcaattacttgaggaccttgatttaaaccaggttgctgaagagcttagagaagaaattacaaatagcaaagggcaaaagagggcaaagcttattaaaaggataagggttattgataatttcattgcaactaatgcacaaccagaatggatggttttagatgcaatcccagttatacctcccgatcttagacctatggtgcagcttgatgggggaagatttgcgacttcagatttaaatgacttatatagaagagttataaatagaaataatagactagctaggcttcaagaaattttagctcctgaaattatagtaagaaatgaaaaaagaatgctacaggaagcagttgatgctcttatagataatggaagaagagggaggactgttgttggagcgaataatagagctcttaagtctctaagtgacataattgaaggaaaacaaggaagatttagacagaatcttcttggaaagcgtgttgactattcaggaagatctgtaatagtggtgggtcctaaattaaaaatgcatcagtgtggtcttccaaaagaaatggcactagagctctttcagccttttgtaatccatagattgatacgacaaaatattgtgaataatattaaagctgcaaaaaaattaatacaaaaag

SEQ ID NO: 255873 - DNA, 1249 bp, Unknown
  Bacterial polypeptide expressing nucleotide sequence isolated from the Sargasso Sea
aatgaaaaaagaattaacagatttatttaaagggagcgaaatttctgaagctcaaaactttaatagcattaaaatttcacttgctagcccagagaaaatcaaatcttggacgtttggtgaaattaaaaagcctgagacgattaattatagaacatttagacctgagaaggatgggttattctgtgctagaatttttggacctataaaagattatgagtgtttatgcggtaagtataaacgaatgaaatttagaggtattatatgtgagaagtgtggagttgaagttactaaatccaatgtaagaagagagagaatgggccacattaatcttgctacccccgtagcacatatttggttcttaaagtctcttccaagcagaattgctttagcagtagatatgaaattaaaagaaattgaaagagttctttattttgaaaatttcatagtaatcgaaccaggattgactggtttacaaaaaaatcaactactaaatgaagaagaactagcaaaatatcaagacgaatttggagaagagagttttacagcaggaataggagcagaagctgttcttgaaatgttgaaaaatttagatttagaattagaaagaaaaaatcttgttagctttattaaagaaactaaatcaaaagttaatgaagaaagagcaattaaaagattaaaattaatagagtcatttatcgaaacaggtcaaaaacctgagtggatgattatgactgttgtaccagttataccaccagaattaagaccattagtgcctctagacggtggaagatttgccacttcagatcttaacgatttatacagaagagtaattaacagaaataacagattaaaaagattaatggatcttaaagccccagacatcattgtaagaaatgaaaaaagaatgcttcaagaatctgtagatgctctttttgataacggtagaagaggcagggtaataacaggaacaggtaagcgaccacttaaatctcttgctgaaatgttaaaaggtaaacaaggaagatttagacaaaatttgttaggtaaaagagttgactattcaggaagatccgtaatagttgtgggtcctgatttgaaactccatgagtgtggtttacctaaaaaaatggctcttgagttatttaaaccgtttttatacgcaagattaaataaattaggcctagcttcaaccattaaacaagctaaaaaattagtcgaaaaagaaacaaatgcagtttgggatgcttta

SEQ ID NO: 255874 - DNA, 1820 bp, Unknown
  Bacterial polypeptide expressing nucleotide sequence isolated from the Sargasso Sea
tagtacattagatggaggcagattcgctacatctgatttaaatgatttatatagaagagtaataaatagaaataatagattaaaaagacttattgatttaaaagctccagacataattgtaagaaatgagaaaagaatgttgcaggagtctgtagatgcactgtttgataatggtagaagaggaagagttataacaggaactaataagagaccccttaaatcacttgcggaaatgctaaaaggaaagcaaggaaggtttagacaaaatttattaggaaaaagagtagattattcagggagatcagtaatagttgttggtccagatttaaaattacatgaatgtggattaccaaaaaaaatggctttagagttatttaaaccatttttatatgctagattaaataaattaggattagcatctactataaaacaagcaaaaaaattagttgaaaaggaaagaaccgaagtttgggacgcactagaacttatagtgagagaacacccagtaatattaaatagagcaccaacacttcacagactaggtgttcaggctttcgaaccaaaactaatagaaggtaatgcaatagagcttcatcccttaacatgtgctgcatttaatgctgattttgatggagatcaaatggcagtacacgttccattaagtttagaggcacaattagaggctagagtattgatgatgtctacaaacaacatcttaagtccttctaatggtaaaccaataattgtaccaagtcaggatatgatattagggatatattatttatctcaaccgccagttcaaactgagagggttgaaggatattttataaacacatctgaaatagaacatgcattagaaactgggcagattaaagtgcattcaagaattgtctccagatttgaaactattgatgaaaaaggaaatgctaaatttgaaaaacatataagcacagctggaagatttttattatcaagcataattccaaaaaatgtaaacaataaattttctttgattgatagattgcttccaaaaaaaatagtttctgaagttattgatcatgtattcaggttttcaggacaaaaaagtactgtaatattttgtgataaattaaaagatattggatttaaacatgcgtttaaagctggaatttcatttggaaaagacgatcttttaataccagataataaagaacaattaattgatgaaactaaaaaacttatcgctgactatgaaagccagtatgctgaaggacttataacaagaggtgaaaagtataataaagttattgatgcttggtctaaatgtactgatagagttgcatctgaaatgatgaaaagaatttcagcaactgaagttacagatgagggattaaaaattaattcagtatttatgatggccgatagtggtgccagaggatcagcagcacagatgaaacaattagcaggaatgagaggtttaattgctaaaccatcaggtgaaattattgaaactccgattacatctaactttaaagaaggtctgacagcattagaatactttaattcaactcatggtgctcgaaaaggtttggctgatacagcattaaaaactgctagctcaggttatttaacaagaagactttgtgatgttgctcaggatttgacaataacaaagccaaaatgtgatatgaactgtggttctataaaactcacagaagtacttgaaggtggaaatataatggttagtctttctgaaagagcattaggaagggttgccgcaaaggaaataaaaaatccattaactggtgatattttaatcaaaaaagaccaaatgattgatg

SEQ ID NO: 255875 - DNA, 982 bp, Unknown
  Bacterial polypeptide expressing nucleotide sequence isolated from the Sargasso Sea
atgcatgaatcagttaatgaatttttaaagccacgaaacgtcaaagttgtatcatctaatgagtggcaggcaaaggtagtaattgagccttttgaacgtggatatggacatacgctcggcaatgcaatgaggcgcatactattatcttcaatgccaggaacggcaatagttgaagcagaaatagacggcgttcttcatgagtacaccagtattgaaggtgttcaagaagatgtcgtcgagatattgctaaatctgaaaaaagttgctgtctgtcttcatggtagaaactcagcagagctctccatatcaaaggaaggacctggtgtaataacaggcgcagatatcatacttgatcatgatgttgaaataatgaacccagatattgttattgcaaatctttcaagttctggaagtatttcgatgaaactccttgttgaaaaggggcgaggataccgtccagccattagaggtccggtttttgaagaggaagcaggaccaattggaaggcttcagcttgatgcatcattcagtccaattcacagagtttcgtatgatgttgaggcaactcgagttgaacagagaaccgatctcgataagctaatttttgatattgaaacaaatggcacaatagatcctgaggaagctattagacatgctgggagtatcctcaaggaccagctatccgtgtttgtagatcttgagactgaagaagaagctgtcgaggatgaagaggatcaaattgatccagctctccttcgtcctgttgatgagcttgaactgactgttcgctctgctaactgcctaaaagctgaagaagtaatgtacatcggtgatcttgttcaaaaaactgaagttgagttattgagaacacctaatcttggaaaaaaatcactaactgaaattaaggagatattggagagtaatggcctatcacttggcatgaagcttgaaaattggcctccttcaaacttagcccagtaaa

SEQ ID NO: 255876 - DNA, 508 bp, Unknown
  Bacterial polypeptide expressing nucleotide sequence isolated from the Sargasso Sea
aatggaagtagaaaacgttaatgttaaaaattggaaatctttgattaaaccatctaaattagatgttcaaattagtgatgacttaacacatgctaagattatagctgagcctttagaaaaaggttacggattaactttaggaaactctttaagaagaattttgctttcttcaatcagaggagctgcagttacctcaattcaaatagatggcgttctacatgaatttacatcaattaaaggtgtaagagaggatgtaacagatatagtattaaatgttaaatcactagcattaaaatgtaattctgaaggtacaaaaaaactggtattagatgcaaaaggcccaggtgaaataaaagcttcagacattgctccagtgactgatgtagaaatattaaatccagagttagtaatttgtaatttagatgaaaatactacttttcacatggaaatgaatgtaaacactggaaaaggttatgttccagccgacctaaacaagccagaggagcca

SEQ ID NO: 255877 - DNA, 904 bp, Unknown
  Bacterial polypeptide expressing nucleotide sequence isolated from the Sargasso Sea
gctgaaatcactcagcgacatcatcgagggcaaacagggtcgcttccgtcagaaccttctgggcaaacgggtcgattactccggtcgttccgtgatcgtggtgggtccgaagctgaagatgcatcagtgcggcctgccgaaggagatggcgattgagctgttccagcccttcgtgatccatcgcctgatccgacagaacatcgtcaacaacatcaaggcggccaagaagctgattcagcgggctgacgacgaggtaatgcaggtgctgcaggaggtgatcgacggtcacccgatcatgttgaaccgagccccgacgctgcaccgtctcggcatccaggccttcgaaccgaagcttgtggatggtcgcgccattcagctccacccgctggtctgccccgccttcaacgctgacttcgacggtgaccagatggccgtgcacgtgcccctggcgatcgaagcccagaccgaggcccgcatgttgatgctggccagcaacaacatcctgtcgccggccaccggtgagccgatcgtgaccccttcccaggacatggtgctcggttcctactacctcacggctctgcagccaggggctgaacagcctgaattcggtgatcgcagccgcacctactcaagcctcgaggatgtgatccatgccttcgaagacacccgcgtcggtctgcatgactggatctgggtgcgtttcaacggcgaagtcgaagacaacgatgagctggacgagcccataaagagcgaaaccctcagcgatggcacccgcattgagcagtggacctaccgccgcgatcgttttgacgaagacggtgccctgatcagccgttacatcctcaccacgaccggccgggtggtgatgaatcacacgatcatcggcgcggtggccgccgcctga

SEQ ID NO: 255878 - DNA, 388 bp, Unknown
  Bacterial polypeptide expressing nucleotide sequence isolated from the Sargasso Sea
atggatacaacagaagttaatattaaaaattggaaatcattgattaagcctgcaaaattagatgttcaattaagtgatgataaatcatatgcaaaaattgtagcagaaccattagaaaaaggatatggactaactttaggaaattcattaagaagaattttattatcctcaattagaggtgctgccgttacagcaattcagatcgatggtgttctacatgagtttacatcaataaaaggaataagagaagatgttactgatattgtattaaacgttaaatcactagctttgaaaagttcctcagaaacttcaaaaaaattaattttagatgttaaaggtccaggagaaataaaagcctcagatattactccggttactgatatagaaa

SEQ ID NO: 255879 - DNA, 666 bp, Unknown
  Bacterial polypeptide expressing nucleotide sequence isolated from the Sargasso Sea
cagatctcgaaataggaaggttagtagctagtggtccaatggaggttaaggcgaatgacattcaattctcctctcaagttgaaattgttgatggtgaaaaaccaattgcgacaatccaagagggccacaacttagagttagaaatccatgttgaaagaggtattggatataggccggtcgatcgtaagagtgaagagacaactgctattgatttgcttcaaatagatgctgtatttatgccggtgaaaagagtaaattttacaattgatgaaactgctgtagcagaaggcggagcaggaagagaaagattaaaaatggaagttgtaacagatggctcaacaagtcctgatgatgctattgctgaagctgcaaatcagttaatagaactctttcaacccctagctactgtaacaatggttgaggaaattcctgaggaacctgaaccatctccggaagctcaaattcctctcgaggaactaaacttgtccgttagagcatataattgtttgaaacgggcacaagttaactcagtttcggatttaatgggcttcagctatgaagatcttcttgaaattaagaactttggctctaaatctgcagatgaggttattgaagctctcgaacgtataggcatttctatcccacaaagcagaacatctgtttaac

SEQ ID NO: 255880 - DNA, 520 bp, Unknown
  Bacterial polypeptide expressing nucleotide sequence isolated from the Sargasso Sea
atggaaaccgaaaacataaatgttaagaattggaaatcattaattaaaccggctaaactagatgttaaaataagtgatgatcttactcatgcaaagattgtagctgaacctttggaaaaaggatatggtttaacacttggtaactcattaagaagaattttattatcatccattagaggtgcagcagtaacttctatacaaattgatggagtattacatgaattcacatctattaaaggtgtaagagaagatgtaacagatatagttttgaacgtaaaatctctggcattaaaaagttcctcagaaacaactaaaaaattaattcttgatgcaaaaggaccaggtgagattaaagcctctgatattactcctgtcgcagatgtagaaattttaaatcctgatcttgttatttgtaatcttgacgaaaatacaaattttcatatggaaatgaatgtaaacgctggaaaaggatatgttccagcagatctaaataaacctgaagagccacctttgggattaa

SEQ ID NO: 255881 - DNA, 1983 bp, Unknown
  Bacterial polypeptide expressing nucleotide sequence isolated from the Sargasso Sea
aggcaaaatttacttggtaaaagagttgattattttgggcgttctgttattgttgtaggtccagaattaaagatgagtgaatgtggtttgcccaagaacatggcgcttgaactatttaagcctcatatgatttacgaattaatggcgagaggttatactgaaacaccaagaagtgcaaaattaatgattgaaaagcaagagcaggttgtttacaaggtgcttgaatatgtagtgcaagatcaccctgtattgcttaatagagctcctactcttcatcgtttagggatacaggcgtttcagccaatacttgtagatggaaaagctatcaagcttcatcctcttgtttgtgcagcatttaatgctgattttgatggtgaccagatggcggttcatgttcccctaagcgttcaatctcaaatggaagcacgtgttcttatgctctctagtcataatgtgcttcacccggctaatggaaaaccgatttctgtcccctctcaagacatggttcttggttgttattacctaactcgtcctatgaaagatgctttgggagagggtaagtcattttcttcaattgatgaagttttattggcttatgaaaataaatccgtaagcatgcatgctattgtaaatgttcgtcataatggcgtatggcataaagatactactgtaggtagaataattttcaattcaatattacctcaagagttaggatttattgattcaacgattggaaagggtgatttagctaaaattattaatcaatcatatttagttgctggcaatcacaagactgttgaattcttagataatcttaaagaccttggttttgtttcagctactaaaggcggttgttcaatttcaattggggatgtaatgattcctgatcaaaaagataatattattgctgatgcacagactaaggttgatgctattagcgataagtatagacgccatattttaactgaaggtgaaagatataataaagttattgatatatggacacatgctacaaatcaagtggcggcaaccatgatggaaggtttaaaaaatgatggacaaggatttaatccagtatatatgatggcagattcgggtgcacgcggtagtcaggatcaaattaagcagttagctggcatgagaggtttaatggctaaaccaaaaaaatctatgacaggtagtaagggagaaattatagaatctcctattatatctaatttcaaggaaggattatctgtcttagagtattttatatctacacatggagctagaaagggtttagcggatactgctttaaaaacagcagatgcaggttatcttaccagaagattagttgatgttgctcaagatgttgtcatttatgaaaatgattgcaacacaattaatggtctacttatttcagaccttaaggaaggtgaggagattatcgaaccattagcagatagaatattgggtagaacaattttagatgatttcattcttgatggtaaaaaattgattaaaaatggccaaattattggcgataaagaggcggaagttattgcggattcaaacgtagaaagtcttcggattagatctgtattaacttgtgactcacctaggggtgtttgtgctaaatgttacggatggaatctttcaactcatgatatagttgatcttggtacagctgttggaattcaggctgctcaaagcataggtgagcctggaacgcaattaacattaaggacatttcacattggtggtactgctactcgcataatagaacaatctgagatgaaaaccaatagagctggtgtagtagaattttcagaagatattgaaattgcagaaacaaaagatgaaagtggtttagtggttaatcgttgcatggtgcgaaatgggagattatttattaaggataaggataaaatcttagtccaatataatattccttatgggtcgaatatcttggttaaaagtggtcaaaaaattaaatctggaact

SEQ ID NO: 255882 - DNA, 1007 bp, Unknown
  Bacterial polypeptide expressing nucleotide sequence isolated from the Sargasso Sea
aaaaaattgggaatcactaattaaacctggaaaacttgatattcaattaagcgatgataaatcttatgcaaaaattatagcagaaccgttagaaaaaggttatggattaactttaggaaactctttaagaagaattttgctttcttctataagaggaacagcagttacagccattcaaatagatggagttcttcatgaattttcatcaatcaaaggtgtaagagaagatgttacagatattgttttaaacgttaaatctctagctttaaaaagcaatatagaaggatcaaagaaacttattttagatgcaaaaggaccaggagaaataaaagcttcagacattacgcaagttgcagatatagaaatactaaacccagacctagttatttgtaatttagatgaaaaaacaaatttccatatggaaatgactgttggcaatggaaaaggatatgtttcagctgatatgaataaacctgaagaacctcctttaggattaataccaatagactcactttttagtcctgtaaaaaaagtttcttattctattagcacggcaagagaaggaaaagcacttgattatgataaattgactatggaggttgaaacaaacagatctatatcagcagaggatgcggtagcttactcagcaagaatttttcaagatcaacttggtatgtttgtaaattttgatgaaccgcaagatgtaattgtaagagaaaaaccttcagaacctgagtttaataaaaatttacttagaaaagttgatgaattagaactttctgtaaggtctatgaattgtttaaaaaatgacaatataatctatatcggcgatttagttcaaaaatcagaaggtgaaatgcttagaacacctaactttggaagaaaatcattaaatgaaattaaagaagtattaaatacaatgtctttatatttgggaatggaaattcctaattggcccccagacaatattgcagaactatcaaaaaaactcgaagaagctatataat

SEQ ID NO: 255883 - DNA, 1959 bp, Unknown
  Bacterial polypeptide expressing nucleotide sequence isolated from the Sargasso Sea
aatgaaaaaagaattaacagacttatttaaaaacactgagatcacagaatctcaaaactttaatagcatcaagatctctttagcaagtcctgaaaaaattaaatcatggacttttggtgaaattaaaaaaccagaaacaataaattatagaacttttagaccagaaaaagatggattgttctgtgcaagaatatttggtccaattaaggattacgagtgtttatgtggaaaatataaaagaatgaaatttagaggcattatttgtgaaaaatgtggtgtcgaagtgactaaatcaaatgtaagaagagaaagaatgggccatattaatttagcaactcctgtggcacatatttggtttttaaaatctttaccaagcagaattgcgcttgctgtagatatgaaactaaaggagattgagagagttctttattttgaaaactttattgtaattgagccaggattaacgggtttaaaaaaaaatcagcttctcaatgaagaggaattagctaaatatcaagacgaatttggagaagatcaatttaccacaggtattggagctgaggcggtgcttgaaatgcttaagaatttagatttagagttagagagaaaaaatcttgttagttttatcaaagaaacaaaatcaaaagttaatgaagaaagagctataaaaagattaaaacttttagaatctttcatagaaaccggtcaaaaaccagaatggatgattttaacagttgtaccagttattccacctgaattaagacctttagttcctcttgatggaggtagatttgctacatctgatttaaatgacctttatagaagggtaattaacagaaataatagattgaaaagattaatggatcttaaggctccagatataatagtacgaaacgaaaaacgtatgcttcaagagtctgttgatgcattatttgataacggtagaagaggtagagtaattactggtacaggtaaaagaccattaaaatctttagcagaaatgttaaaaggaaaacaaggaagatttagacaaaatttattaggtaaaagagttgattattctggaagatcagtaatcgtagttggtcctgatttaaaacttcatgaatgtggattgcctaaaaaaatggctttagaattatttaaaccatttttatatgcaagattaaacaaacttggattagcctcaacaattaaacaagctaaaaaattagtggaaaaagagacaaatgtagtttgggattcacttgaattaatagtaagagaacatccagttatattaaatagagcaccaacacttcatagacttggtgttcaagcttttgaaccaaaattaattgaaggtgatgctattgaactacatccattaacttgcgcagcttttaatgctgactttgatggagatcaaatggcagttcatgtaccgttaagcttagaagctcaacttgaagcaagaattctaatgttatctacaaacaatattctttcaccatcaaatggtaaaccaattatagtacctagtcaggatatgattttaggaatttattatctttctcaggatctattatctgacaagccagtagggtattttacaaattcagatcagatagagtttgcattatcttctggtcaaataaatgttcacagcacaattatatctaggtttgaaactgtagatgacaaaggaaataaaaaatatgaaaaatacacttcaactgctggaagatttttattagcaaatttgttaccaaaaaataaaaacatcaaattctcattagttgatagattgctacctaaaaaagtcgtttcagaaattattgatattgtgtttagattttgtggtcaaaaaactacagttatattctgtgataaaattaaggatttaggatttaagcatgcatttaaagctggaatttcatttggtaaagatgatctagtaattcctgaaataaaactcat

SEQ ID NO: 255884 - DNA, 967 bp, Unknown
  Bacterial polypeptide expressing nucleotide sequence isolated from the Sargasso Sea
tatgcaaacatcagtaatagatctattagtaccaaccgagattcaggttgatgatgtctcaccaacattatcaaaggtaacacttgagccattggaaagaggttttggacatacacttggaaatgctctaagaagaatattactttcctcaatgcctggtgctgctgtgacagacgtcgcaattgatggaatatctcatgaatatagcactatcgaaggagtaagagaggatgtaatagatattcttttaaatattaaagacatgcctataaatctaattgagggagactcagctgaagtaacactagatgtaaaaggtccttgtgacgtattagcttcatcctttgatgttcctggaaatgtagagcttgttaatcaagattttcatatcgcaactattgttgataaggttaatctcaaaatgactctaactgttagaaatggaagaggctatgagccagctgacttgagagaagacgaagatagggtagttggagctcttaaagtagacgcatcatatagccctgttagaagagtttcttacacagttgataacgcaagatctggaaaaagaaccgacttagataaattagtattagagcttgaaactgatggaacattagatccaaagatggcaatagaacactctgctacaattctgcaacagcagcttggtgcgtttgttgatctagatgcaatagcagaacaagaggctaaaaaagatcaaaatgactttgatccaatcttattaagatcgattgaagagcttgagctaacagtaagatctactaattgtctcaaggcagagagtatttttcttattggcgacctaattcatagatctgagtttgatttattaaaaactccaaatcttggtaagaaatctttaaatgaaattaaagatgttttagcttctaaagatttatcgcttggtatgaatgttgagaactggcctccagtaggataa

SEQ ID NO: 255885 - DNA, 3529 bp, Unknown
  Bacterial polypeptide expressing nucleotide sequence isolated from the Sargasso Sea
tgttattccccctgaattaagaccgcttgttccacttgatggtggcaggtttgctacatctgatttaaatgatttgtacagaagagtaatcataagaaataacagattaaaaagacttgttgaaattaaagcaccggaagttattttaagaaatgaaaaaaggatgcttcaagaatcagttgattcattatttgataacacaagaaaatcatcagctgttaaaactgaagctaatagacccttgaaatctctttcagattcacttaaaggcaagcaaggtaggttcagacaaaatctgcttggtaaacgtgtagattattctgctaggtcagtaattgttggtggccccactcttaaactttacgagtgtggtttgcctaaagatatggcagctgagctattcaaaccttttatagtaaagaagttaatagaaagaggaattgtaaaaactgtaaagtctgcaaaaaaaattattgataaaagagaaccacttgtttgggatattcttgaaaatgttttgaaaggtcacccagttctgttaaacagagcacctactcttcacagacttggtattcaagcttttcaacccatacttattgaaggtaaagcaatacaggtacatcctttagtttgtactgcatttaatgcggattttgacggagatcaaatggctgtccatttacctttaggacctgaggctattctagaatctcaattattgatgttagcatctcacaatattttaaatcctgctaatggttcacctatcactgttccatctcaagatatggttcttggactgtattacatgactaaagaaaaaaagtctacaaaagatgaagtagtaaaaggagaaggcttaactttttattctttcgaagaggtaaaaattgctcacaatgaaggaaaagctgatttgaatgctatgattaaggtaagggcgaatgatttaaatgagaatgatgagttagaaagtaaaataatcgagaccactgtaggtagagttttatttaatgaagttgttcctgaaagtgcaggatatattaaccaagttcttacaaaaaaatcattaagggatataattggaagaatcttaaagatgactagtgttcctgaaacggctgattttcttgataaaataaaggaaatgggattcacttttgcatttaaaggaggattgtcgttcagtctaggtgatattattatcccagatgaaaagcataaaatgatagattcagcaaatcaagaagttgattcaattatgtctaattataatatgggattaattaccaataatgaaagatataatcaggttattgatgtttggacatcatctaatgcatccttaaccgagcttgcaatgaaaaggataagtgaggatcaacaaggctttaattctgtatatatgatgcttgattcaggtgcaagaggttcgaaggaacaaattagacagctaacaggaatgagaggtttaatggcaaaacctaaaaaagctagcgcaggaggtggagaaatcattgaaaatccaattctttcaaactttaaagaaggtctatcaattttggaatattttatttctactcacggagcaagaaaaggtcttgctgatacagctttaaaaacagccgatgctggttatttaacaagaagacttgtagatgtagcccaagatgtaattattaatgaagaagattgcggcaccttgagaggaataacagttgaagctttgaagaaaaatgaagaggttgttgaaacactaggtgaaagaattttaggaagagtatcattacacgatgtttataaccctctaaacaacgaaattattattaatgcaggagaagaaataaatgaagagcttgttgaaatggttgaaaaattaccaatagagaagatcgacgttcgatctccgttaacatgtgaagcaaaaagaggattatgtgttaagtgttatggtagaaacctagctacaggtaagatggtacaaattggtgaagctgtaggagtagttgcagcgcaatcaattggagaaccaggtactcagctgactctaagaacattccatgttggtggtattgctggtaatatttcggaggagaatgaacttagcgcaaagttcgatggtattgctgaaattgaagatttaaaaattgttaaatctaaggatagtgatggtaaagccattgatttagttatttcaaggacttgtgaaataaaaattctcgatgaaaaatcaggcattgtattgagctctaatatcataccttatggttcttcaattttcattaaaaatggcaaaaaaattaaaaaagatgatgttgtatgtaagtgggatccttacaatggtgttattatttctgaatttggtggtgttgttcaatatgaaaatattgaacaaggaataacataccaagtcgaaattgatgagcagacaggattcaaagaaaaagttatttctgaaagtagaaataaaaaaatgattcctactttgcttattaatgataaaaaaggcaagaatctcagaacttataatttacctgtgggagctcaccttatggtagatgatggtgagaaagtagatactggtaaaatccttgttaagattccaagaaaatctgctaaatcaggtgatatcactggtggtctgccaagagttactgaattgtttgaagctagaaatccatcaaatccagctgttgtaagtgagatcgatggtgttatcagttttggcaaaattaaaagaggtaacagagagataattgttgaatcaaaaactggagagataaagaaatatttagttaaattatcaaatcaaatactcgtacaagaaaatgattttgtgaaagctggtatgcctctttcagatggttcaattacacctaatgatattcttaatattaaaggtccatcagctgttcaacagtatttagttaatgaagttcaagaagtttatagattacaaggagtaaaaataaatgataaacattttgaggttctaattagacaaatgatgcagaaagttcaaattcaagattctggagatacaattttcttagaaaatcagatagttcacaagaatgagtttataagtgaaaatgataatctatttggaaagaaagtagttgagtctgaaggaaattctgaaaatcttaaagttgggcaaattattactgctagagaacttagagatgaaaattctctgcttaaaagagaagataaagaattagtagttgctagagatgctgttaatgctacgggattcccaattttacaaggtatcaccagagcatcattacaaacaaaatcctttatttcagctgcctcattccaggaaacaacaaaagtgttgaatgaagctgcggttaacggtagggttgatcatcttgaaggactaaaggagaatgttattgttggacataaaattccagccggtactggaaatcgagaatatgatgatataatagttggttacgttgacgaatatgaagaattgctggagagtaaaagaattagatttaatgaagaaggataa

SEQ ID NO: 255886 - DNA, 481 bp, Unknown
  Bacterial polypeptide expressing nucleotide sequence isolated from the Sargasso Sea
aatggaaaatatcactataattgataaaaattggaaatcactaattaaaccgtctaagcttgcaattacaagtaatgatgacaaatctattgccaaagtaattgcagaaccactcgaaaaaggttttgggcaaactattggcaatgctttaagaagaattcttttgtcatccatacaaggagccgctgtgactgcaatccaaatagatggtgtcctgcatgaattttcttctatcaaaggagtaagagaggatgtaacagatattgttttaaatgttaaaaacttagctgttaaactaaattcatctggatcaaaaaaattaattttagatgcaaccggccctaaggaagtaaaagctaaggatataactcctgttaatggagtagaaattttaaatatggaccaaacaatatgtaatttggacgaaaaaacgaaatttcacatggaacttgttgttatagcggaagaggttacgtattag

SEQ ID NO: 255887 - DNA, 958 bp, Unknown
  Bacterial polypeptide expressing nucleotide sequence isolated from the Sargasso Sea
ttggtcgacatatcaactatatcgtcgacacatgcgaagattagtatcgagccattagagaggggttttgggcatacattaggtaacgctctcaggagagtcctactctcctctttacctggaagtgctgtaactgaggttactatagagaatatccttcatgaatacagtactattgaaggtgtacaagaggatgtactagaaatacttttaaacataaaaaaattagcattagtactaccaagtaaggatacgcttgatatcactctaagaaaaaaaggtcttggaccagttttagcatctgatatatctgataacccagatctagaaattaagaatcctaatttttgcctagcaaatatcactaacgacaaaactgaacttgttataaatatgactgtaacaaaagggagaggatatcaacaagcccaaaaaagaaaatttaatgaattagatgacttgggcataggtaagatgcagctagatgcctcttttagtcctgtggtgctggtaacttataatgtggagacagcgagagtaaaacaaagaactgacctagataagcttgttatagatttaaaaacaaatgcgactattgaacctgaagatgctattagaaaagctggccagctccttagaaatcaacttgacgtatttacatacctagaggtccatgaagaaactgaagaggaatcagatacaccacagattgatccagttttattaagaccagttgatgacttggaacttactgtaaggtcggctaattgtcttaaagctgaaaacatatactatattggtgatttagttcagagaagtgaaaatgaactccttaaaacaccaaatctaggaaaaaaatcacttactgagattaaagatgtactagctactcacagtttacaactaggccaaaaacttgaagactggcctcctaagaacatagataaaagaatatgag

SEQ ID NO: 255888 - DNA, 235 bp, Unknown
  Bacterial polypeptide expressing nucleotide sequence isolated from the Sargasso Sea
cttttaagacctgtagatgatcttgagttgacagttaggtctgcaaactgtcttaaagcagaaaatattcactacataggtgatttagtgcaaagaagtgaaaatgaattattgaaaacacccaaccttggaaaaaaatctttgacagagataaaagatgtcttatcaacacacagtttatcgttagggcaaataatcgaagattggccaccaaagagtattgaaaaaagataat

SEQ ID NO: 255889 - DNA, 976 bp, Unknown
  Bacterial polypeptide expressing nucleotide sequence isolated from the Sargasso Sea
aatggatacaaccgaggttaatattaaaaattggaaatcgctaattaaaccaccaaaactagatatcaacttaagcgatgataaatcttatgcaaagataatagcagaaccgcttgaaaaaggttatggtttaacattaggaaattcattaagaagaatactattatcatcaataagaggtaccgcagtgactgcaatccaaattgatggagttttacatgagtttacatcaattaaaggtgttagagaagatgtgactgatattgtattaaatgttaaatcactagctttaaaaagtaattcagaaactactaataaattaatcttagatgcgaaaggtcctggtgaaattaaagcttcaaatattacaacatcagcagatattgaaattttaaatccagatttagtaatttgtaatttagatgaaaacacaaattttcatatggaaatgactgtaagtaatggaaagggatatgtttctgctgatatgaataagcctgaggaacctcctttaggtcttataccaatagactcactttttagtcctgttaaaaaagtttcatattcaataagcacagcaagggaaggaaaagctttagattatgacaaactaactatggaagtagagacaaatgggtcaatatcagccgaggatgcagttgcatattctgcaagaatatttcaagatcaacttggaatgtttgttaattttgatgaaccacaagaagtcattgtaagagaacaatcaacagagcctgaatttaataaaaacttattaagaaaggtagacgaattggaattatcagttagatcaatgaattgtttaaaaaatgataatataatttatattggtgatttagttcagaaatctgaaggtgaaatgttaagaacacctaattttggtagaaagtctttaaatgagattaaagaggtattaactggtatgtcactttatttaggaatggagataccaaat

SEQ ID NO: 255890 - DNA, 736 bp, Unknown
  Bacterial polypeptide expressing nucleotide sequence isolated from the Sargasso Sea
atggataatcttgaagtaaatgtaaaaaattggaaatcacttattaaaccagcaaaactagacgtaaaattaagtgacgacaaaacaatcgcaaaaattacggctgaacctttggaaaagggttatgggcttacgttgggaaattctcttagaagagttttattatcatctataagaggtgctgctgttacatcaatacaaattgatggagtattacatgaatttacttcaataaaaggtgttagagaggatgttacagatatagttttaaatgtaaaatcactagctcttaaaagttcatcggaaggaacaaaaaaattaattttagatgccaaaggaccaggcgagattaaagcatctgatattacgcctgtgacagatatagaaattcttaacccaaatttagttatttgcaatcttgatgaaaatacaaactttcatatggagatgaatgttggtactggtaaaggatatgtatccgctgacctaaacaaaccagaggaaccaccattaggactaataccaattgactcattatttagtccggtcaaaaaagtatcttattcagtaagcaccgcaagagaaggtaaagcacttgattacgataagttgacaatggaagtagaaacaaacgggtcaatttcagccgaagatgccgtggcttatgctgctagaatattccaagatcaattaggcatgtttgtaaattttgatgaaccaaaagaagtcgtaatga

SEQ ID NO: 255891 - DNA, 960 bp, Unknown
  Bacterial polypeptide expressing nucleotide sequence isolated from the Sargasso Sea
aatgaaaaaagatttaaaagatttattaaaagaaacagatatcactgaatctcagaattttaatagtataaaaataactttagcaagcccagaaaaaataaaatcatggacttatggtgagataaaaaaaccagagactattaattatagaacttttagacctgaaaaagatggactattttgtgcaagaatttttggacctataaaagattatgagtgtctatgcggaaaatataagagaatgaaatttagagggatcatttgtgagaaatgtggagtcgaagttactaagtcaaatgttagaagagaaaggatgggtcatataaatttagcaacaccagtagcacacatatggttcttgaaatcactacctagcagaatttcattagctattgatatgaagctaaaagaagttgaaagagtattatactttgagagttttattgttattgaaccaggtttaacaagccttaaaaaaaatcaacttttaaacgaggatgaattaaataaatatcaagaagaatttggtgaagaatcattctcagcaggtataggtgcagaagccatattagaaatattaaaatctatagatttaaataaggaaaaagaaattcttctaaaaaacatcaatgaaacaaaatccaaagtagctgaagaaagatcaattaaaagattgaaactcatcgactcttttatagagacaggcaataaaccagaatggatgattttaacaactataccagttattccacctgaacttagacctctggtaccactagatggtggtcgatttgcaacttcagatcttaatgatctttatagaagagttataaacagaaataatagattaaaaagattaatggatttgaaggcaccggatataattataaggaacgaaaaaagaatgcttcaagagtctgtaaatgcattatttgataatggacggagaggaagggttat

SEQ ID NO: 255892 - DNA, 733 bp, Unknown
  Bacterial polypeptide expressing nucleotide sequence isolated from the Sargasso Sea
aatggagcaagcagaagtaaattcaaaaaattggaaatcattaattaaaccagcaaagctagatgttcaattaagtgaagataaagcatttgctaaaatcactgctgaaccacttgaaaaaggatatgggttaactcttggtaattcattaagaagaatacttttatcctctattagaggaaccgctgtaacttctattcagatagatggtgtattgcatgaatttacatcaattaagggtgtaagagaagatgttacagacatcgtattaaatgtgaaatctttagctcttaaaagttcatcagatgattcaaaaaaattaatacttgatgctaaaggtccaggagaaattaaagcatctgatataacaccagttgcagatgttgaaatattaaatcctgatttagttatttgtaacttagacgagaatacaaaatttcatatggaaatgtcagtaggtactggaaaaggatacgtttcagcagatatgaataaaccagaggaaccacctttaggtttaattccaatagattcattatttagtccagttaaaaaagtgtcttattcagtcagtactgctagagaaggaaaagcattagattatgataaattaacaatggaagttgagacaaatggttcaatatctgcggaagatgctgtagcatattcagcaagaatattccaagatcagttaggaatgtttgttaactttgatgagccgcaagaagttatt

SEQ ID NO: 255893 - DNA, 1540 bp, Unknown
  Bacterial polypeptide expressing nucleotide sequence isolated from the Sargasso Sea
caaacttcaccaatgtggtctcccaaaactcatggcactcgaactcttcaagccgtttgttatgaaacgccttgatgacctcaatcttgcgcccaacatcaaatccgccaagagaatggtggaacgtcgacgctcagaagtttgggatgttctcgaagaagttattaaggagcaccctgttcttttgaaccgcgccccgacacttcaccgtctcggtatccaagcgtttgagcccattctcgttgaaggtaaggccatccagattcaccccctagtctgcgccgctttcaacgctgactttgatggtgaccaaatggcggttcaccttccgttgtcctcggaagctcaagctgaagcgcgagtcttgatgctctcggcgaacaacatactttcgcctgcagatggtcgacccatgactgtgccaagtcaggacatgattatcggcggttactacctaacagaaatgcggggtaacccagaagatgccgaccttccggtatacaagcacttccatgagatagagcgggcagttgcgcttaaccaagtacaacttcaccagcccatcatctggcgccacacgaagctcactggtgaagatggcgagttcatacccacaactcctggccgcgttctatttaacgaggcgttgccagaggacttccccttcgtcaatacggctgtaaaaaaaggcgatatgggcgatgttgtgggtgacctgtcagacggctggccaactaatgaagtagcggcagctctcgacagaattaaagacctttcctacgaatacgcaacaaagtcaggtcttactatttcgattgatgatgtccgtacccctcctgataaggccgaaattctcgagcgttatgaaggagaggcggagcgcgttgagaatcaattccgacggggcattatcactgacggagaacgccgtcagaaagaggtcgaaatttggacttcagctacagaagaggttcgagcgtctctcgagcgcgagcttaaatcggtcatgttcaaccccatcgacatgatggtgggatctggtgcgcgcggcaacatgatgcaagttcgccagattgccgcaatcagaggtttggttgctaacccccgcggtgacatcattccccgaccgatcaaatcctcgtatcgcgaaggtctagcgatgcttgaatacttcatttcaacacctggtgctcgcaagggtcttgtagatacggcgcttagaacagcggactcgggatacctaacgcgacgattagttgatgtggcgcaagaactaatcgttaacgaggaggacccgtttgaaaggtctggacctgttctcggtctctggcttgaagatattggtccagatactcccgaaaagcggacgtacctagagactcggttgttcagtcgctgtttggcccaagatgttgaacttactgaaggtgtaatggaagctggcaccctaattggtgacgaagaaatggccatcctcagagatgatcccaaagtcacgcgtgttcaagttctctccccactgacagacaactccgaattt

SEQ ID NO: 255894 - DNA, 1175 bp, Unknown
  Bacterial polypeptide expressing nucleotide sequence isolated from the Sargasso Sea
gatgattttaacgtctgtccctgttatcccgccagaattaaggccactcgttccgcttgacggaggaagatttgcatcaagtgatttaaatgatctttatagaagagtgatcaatagaaataacagattatccagattaattgaattaagagccccagatataataattagaaatgaaaaaagaatgcttcaagaatcagttgatgcattatttgacaatggaagaagaggaagagtaattactggaacaaataaaagacctctcaaatctctggcagaaatgcttaaaggtaaacagggtcgatttagacagaatttattagggaaaagagttgattactctggtaggtctgtaattgtcgttggtcctgaattaaaactacatcaatgtggtttgccaaaaaaaatggctattgaactatttaaaccatttatatatgcaaggttagagtctttaggtttagctacaacattaaaacaagccaagaaaatggttgaaaaagaacgtccagaagtatgggatgtattagaccgtgtaatcagggaacacccagtaatactaaacagagcaccaaccttgcataggcttggcgtacaggcttttgaaccagttttaattgaaggtaaagcaatccagcttcatcctttagtatgtactgcgttcaacgctgactttgatggtgatcagatggcagtacatgtacctttaagtttagaagcccagcttgaggcgagagttcttatgatgtcaacaaacaacatacttaatcctgcaaacggaaaaccagtcattgttccaagtcaggatatcgttttaggtatttattatctatcacaagaaaaagaaaatgagccaggacaaggatctgtatttaaagacatttatgaaatacagcaagctcttgaaaataatgcaactacagtccatgcaaaagttcatgctagaattaatttcattgatccagaaggtaacaaaaagttaaaaaggattgagacaacaccaggtagaatgttgctttggaaccttgtcccgcagcataaagatcttgatcctaaactagtaaataggcttttaggtaaaaaagaaatatcaggtctcattgatactgtttatagatattgtgggcaaaaagatacagtgatattcgctgatcaattaatggctttgggctttt

SEQ ID NO: 255895 - DNA, 1072 bp, Unknown
  Bacterial polypeptide expressing nucleotide sequence isolated from the Sargasso Sea
cagagggatcatttgtgaaaaatgtggtgtcgaggttacattatctaaagttagaagagatagaatgggacatattgaattagcagcacctgtatctcacatatggttcatgaaatctttaccaagtagaattgcgaccctcttagatatgacaattaaaaatttagaaaaagttctatactttgaacaattcattgttgttgaacctggcttaactgatttaaaaaaaggggaaataatatctgaagagcaatttattgattatcaagatgagtatggtgaagactcgtttagtgctgcaataggggcagaggctattgaacaaatgctattaaatattgatcttgaaactgattataatcaattaaaaattgatcttactgaaactaaatctgaattaaaaaaaactaaaattacaaaaaggttaaaactaattgagtcatttattatatctaaaaataagcctgaatggatgatcttgagagttctaccagtaatacctcctgaattaagaccactagttcctcttgatggaggtagatttgctacaagtgacttaaatgacttatatagaagagtaattaacagaaataatagattgaaaagactgattgacttaagagcaccagatataattattagaaatgaaaaaaggatgctgcaagagtctgtggatgcattatttgataatggaaggagaggaagagttattacctcaactaataaaagacctctaaaatctttatccgatatgttgaagggtaaacaaggtaggtttagacaaaatcttctaggaaaacgcgttgattattcaggtaggtcagttattgttgtgggtcctaatcttaaacttcatcaatgcggtatccctaaaaaaatggctcttgagctatttaagccatttatatttcataagcttgatatttatggttgggcaaatacaataaaagcagcaaaaaaacttgtagaaaaagaagatcctagagtttgggacatcttagaggaggttattagagaacatcctgtacttttgaatagagctccaacattgcatagattaggcatacaggca

SEQ ID NO: 255896 - DNA, 1370 bp, Unknown
  Bacterial polypeptide expressing nucleotide sequence isolated from the Sargasso Sea
aatggggcatatgagtttagcttctcctactgctcatatatggttcttaaaatcgttgccatcgcgaataggccttttgttagacatgacattgagagatatagaaagagttctatattttgaatcttttattgtaattgatcctggattaacggatttagagacatgccagcttttaagtgatgaagaatattatcaaaagctcgaagaatatggagatgaatttgatgcgcgtatgggtgcagaagcagtaagggagctcttgttaaatttggatctggactctgaaattgcaaagcttagagaggaaattcctgccacaaattcggaaacaaaaatcaagaagttttctaagcgactaaagctcatggaagcttttaggaagtcaggtaataaaccagaatggatgattcttgaagtgcttccagttcttccgccagatttgaggccgcttgttccattggatgggggtcggtttgctacatcggatcttaacgatctttatcgaagagtgataaatagaaacaacagactaaaacgattattggatttagttgctcctgacataattgtaagaaatgaaaagcgcatgctccaggaatcggttgacgcccttttggataatggtagaagaggtcgagcgatcaccggatctaataagagacctctaaaatctctggctgatatgatcaaagggaaacaggggcgtttccggcagaacttacttggcaagcgcgtagactattctggcagatcggtgattgttgttggacctactctcaagctgcaccaatgtgggttgccgaaaaagatggcgctcgagttgtttaagccgtttattttcggtcgactggaagatcagcagctggcaactacaattaaagctgcaaaaaaaatggttgagcgagaaacaaccgaagtatgggacattttggcggacgtgattcgcgagcaccctatcttgctaaatagagcgccgactttacacaggttagggattcaagctttcgagcccgtgttaattgaagggaaagcgatacaattacacccactcgtctgcacggcttacaacgctgattttgatggtgaccagatggctgtgcatgtcccaattacactagaagcccagcttgaaagtagaacactaatgatgtctacaaataacgtattatcgccggctagcggagaaccaataatcgttccgtcacaagatgtcgttttgggcatatattacatgacacgggaaaaggttaatgcaaggggtgaggggcttgtttttgctgatgtagaggaggtgcaacgcgcttaccatagcaagaatgtggagcttcaagcgcgagtgaaagtccgaattaaggattctgaattag

SEQ ID NO: 255897 - DNA, 1171 bp, Unknown
  Bacterial polypeptide expressing nucleotide sequence isolated from the Sargasso Sea
gatggattattttgtgaaaagatttttgggccatctaaagattgggaatgccatttgtggaaagtacaaaagggtaagacatcgaggcatcgtttgtgagagatgtggggttgaagtaactgaaagtagagtcagaagacataggatgggctacataaaactcgctgcgccagtttcccatgtatggtacttgaaagggatccctagttacgttgcaatacttttggatataccgctaagggatgtagaacaaattgtttattttaattgttatgtcgttttagatccaggtgatcataaagaacttaaatataagcaattacttactgaggatgagtggctagaaattgaagatgaaatttatgctgaagattcaactatagaaaatgaaccttttgttggaattggtgctgaggcactgaagcaattacttgaggaccttgatttaaatcaggttgccgaggagcttagagaagaaattactaatagcaaagggcaaaagagggcaaagcttataaaaaggataagagttattgataatttcattgcaactaatgcaaaaccagaatggatggttttagatgcaataccagttattcctcctgatcttagacctatggttcagcttgatggaggaagatttgcaacttcagatttaaatgacttatatagaagagttataaatagaaataatagactagctaggcttcaagaaattttagctcccgaaattattgtaagaaatgaaaaaagaatgcttcaggaggcagttgatgcacttatagataatggaagaagagggaggaccgttgttggagcaaataatagagctcttaagtcccttagtgacataattgaaggaaaacagggaagatttagacagaatcttcttggaaagcgtgttgactattctggaagatctgtaatagttgtgggtccaaaactcaaaatgcatcagtgtggtctcccaaaagaaatggcaatagagctctttcagccttttgttatccatagattgatacgacaaaatattgtgaataatattaaagctgcaaaaaaattaattcaaaaagctgatgatgaagttatgcaggtacttcaggaagttatcgaaggtcatccaattctcttaaatagagcccctaccctgcatcgtttaggaattcaagct

SEQ ID NO: 255898 - DNA, 1030 bp, Unknown
  Bacterial polypeptide expressing nucleotide sequence isolated from the Sargasso Sea
attgatagagaataactggattaccttggttaaaccaaacaaagttgattataaaatcagcgataataaaaaatttggaacagtagttattgaacctttggaaaaaggctttggtactactttaggaaatgctttaaggagagtacttttgtcatcattacagggcactgcaatatcctcaattaaaattaatggtgtgcttcatgaattttctacaatagagggcgttagagaggacgtaactgatattattatgaatcttaaaaacgttactttcaattctaaaagtaatcactcccaaaagttaagtttaaatgtgaaaggacctaaagaagttctttcttcagacttcgaagaaaatcctgaagttgaaatagtagataaagatgccgtgataatgaatgttgattctaacagagaggtaaatttagaaatattcctagatataaacaaaggttacatatcagctgaaaaaaataaagataatgaaaataaaagtgtaggtcaaattatgctagatgctacctacagtcctgtaaaaagagtttcatttaatgttgaaaattctcgtattggtcaagacactgagtttgataaacttattttagatattgaaacaaacggaacagtatccccagatgatgccgctgcattagctgcaagaattcttcaagatcaactcaaaccattcattaactttgaagaaccaactgaagatgaaagaaaaaaactacaatcttcaaacgaaccgcaatttaataaaaatttacttaagaaagttgacgaacttgagctatctgttagatcagcgaactgtctaaaaaatgataatattttttatattggtgatttagttcagaaaacagaaggtgaaatgcttagaacaccaaattttggtagaaagtcccttgatgaaattaaggaagttctgtcttcaatgagcctttctatgggaatggacctaccaggctggccacctgaaaatatagaagaattatcaaagaaatacgaagatccatttaaggtataa

SEQ ID NO: 255899 - DNA, 2896 bp, Unknown
  Bacterial polypeptide expressing nucleotide sequence isolated from the Sargasso Sea
ccggttttattaaacagagccccaacattacatagacttgggatccaagctttcgaaccagtccttattgagggtaaggctatacaattacatccattagtttgtgcagctttcaatgcggattttgatggcgatcaaatggccgtgcatgttccattatctttagaggctcaacttgaagctcgagttttaatgatgtcaacaaataatattctacatcctgctaatggagaccccattatagtgcctagtcaggatataatcttgggtttgtattatttatctcaaatgaaacaaaatgaacctggtgaaggaaggcattttgacaatattaatgaaattgaatttgctcttgataatggaagcattactttgcatacgaaaataagttttagatttactactgatgaaggttatgagaaacatgaaacaacaccaggtagagtattaatttcaaaagaattacctaataatgaaaatatttcatttgaaattgttaataagcttttaacaaaaaaagaaatatcaagaatgatagacgatgtttataggcattgcgggcaaaaggaaaccgttattttctgcgatcacataatgaaattaggctttaaacatgcatgtaatgcaggtatttcatttggtaaagatgatatgattattcctgaagaaaaggaaaaccttatccaagatacaaatgaattagttaaagaatttgaacagcaatacattgatggttttataactagaggtgaaaaatacaataaagttgttgatgcgtgggcaaaatgtactgataaagtcgaagataaaatgatggataaaatatcctcttctcagattgatgaagattcagagagagaagaaccaattaattcaatctatatgatggctcattctggagccagaggttcagcagcacagatgaaacaattatctggtatgcgtggacttatggctaaaccctcaggagaaattatcgaaactccgattatttcgaactttaaagaaggtttgaatgttcttgaatattttaactctacccatggtgctagaaaagggttagcagatacagctttaaaaactgcgaattctggttaccttactagaagacttgttgatgttgcgcaggactgtattgtggttgaagaagattgtaaaacctcagaaggtctcattctaaaaccagtcatagaatctggagaagaaatggtatctctatcagatagagttctaggtagagttccttgcgaagatgttgttgatccagcaaccaatgaagtaatagtaaaaaaaggtgaaattattgaagaaaagcatctacctttgattgataatgcaaatcttttagagattaagattagatcagtcttaacatgtcaaactaaaaatggtgtttgtgctaaatgttatggacgtgatttagctagaggtacaccagtaaatattggtgaagctgttggagttattgccgcacaatcaattggcgaaccaggaacgcaattaactatgagaacatttcatattggcggtacagcacaagttatggatcaatcatatgtcgaagcatctgttgatggtaagataaaaattgatgatcttaatatgttggaagactctgaaaaacgaaaaatcattattggaagaacaacaaatgtttcagttgttgatgagtttggaaatgaaagatcaaaacacaaacttacttacggaagtgaattacttgttgaagatggtcaggatattaaaaagggcgatagattagctcaatgggatccttatacaataccaataataactgaatcctctggggtaattgaatttgaggatttggcagagggtataagtttaagtgaagtttctgatgaatcaacaggaataaagcaaaaagtagttgttgattggaaaaactcatctaaatcagcttctttaaaaccatctatattagttaaagacgaaaagggtgaaatcatttcaaatgattctggtagagaggcaagatatttaatgtctgtagatgccatcatttccgcaaatgatggagaaaaagttaatgccggtgatgttattgcaagaattccaactgagggtgctaaaacaagagatattaccggaggccttcctagagttgcagaattatttgaagcaagaaaaccaaaggatcatgccgtaatagctgaagttactggaaaagttgaatttgcaagggattataagaataaaagaagaattgttattcatcctagcaatgaaggagaaacagaggcaagttacttaatacctaaggggaaacatatttcggttcaagatggtgatacaatagagaagggtgattatttaattgatggtaatcctgctcctcatgatattctttctatacttggtcttgaagcccttgctaattatttagttgatgaagttcagaatgtatatcgtctccaaggtgtaacgattaatgataaacatattgaggttattacaaggcaaatgctccaaaaagttgaggtcatggaatctggtgatagcgcatacctagaaggtgaacagcttgataaaatggaaattgaagagataaatcaaaaacttattgaagaaaagaaagatcctgtaaaatttaaaccattacttcttggtatcactaaagcatctttgcacacaagatctttcatttctgctgcatctttccaagaaacaacaagagttcttacagatgccgccgtaaatagaaaatccgatcatttaattggtctaaaagaaaatgtcattgttggaaggttaattcctgcaggcactggaagttcgattagaaggcttgaaaatgaagctggaacaagagatcaagagttaatagaccaaaaacaagatggttctgaattaattgaagaagaggcttcttaaa

SEQ ID NO: 255900 - DNA, 3152 bp, Unknown
  Bacterial polypeptide expressing nucleotide sequence isolated from the Sargasso Sea
aatggaaaaaatttttgatgaattaagcattagtcttgctacttctgatcaaatgaggagttggtcttttggtgaagttaaaaaaccagaaacaattaattacagaactctcaaacctgaaaaagagggcttatttgacgaaagaatttttggtccaacaaaagattgggaatgctcttgtggaaggtataaaagaatcagatatagagggatagtctgtgaaaggtgtggagtagaagtaacaagacgtgaagttcgaagggaaagaatggggcatatcgaacttgctgctccagttacacatatttggtatttcaaaggagtaccaagcaggcttgggtatttccttgacatgtctccaaaagaattagaaaaagtcatatactttgctgcgtatttggttgtttcaattgatgacaagaaaaggactaaagatttatctgaaattgaggaagctgttgaagcagaagtagaaattgttgaagaagagtttactgagtgggaagtcaaaagacttaaacaaatgaaagttgaattaaaagcaatggaaaatgcaaaagttcctgaagctgaaattcaattaaggacaaaagaaattgaaaaagagatcaagcaaaagaaatctaaatctgatgcagagataaaagtaattcaagaagctttttctacattaaaaactctaaaacctaaaactcttatagagaatgacacattatggcgtgaaatgattgacaagtatgatgaatattttactggtggaatgggagcggaggcagtcagagaattagtacaactagttgacctaaaatctgaaatgcaaaagcttaaaggagatttagattcaaaatctgctcaaagacgacaaagagcaatacaaagaatgaaagtgataaaaccatttgctgatggaaaaaatccacctgaagctatgattctcgaagttattccagttatccctcctgaattaagaccgatggttcagcttgacggtggaagatttgctacttcagatttaaatgatttatatagaagacttataaatcgtaataatagattgaaaaagcttattgaactcggtgcaccagacataattattagtaatgagaaaagaatgctccaagagtctgttgatgcattatttgataatggtcgaagaggacgagcagtagctggagcaggcggtagaggacttaaatcactatctgatatgttgaaaggtaaacagggaagatttcgtcagaacttacttggaaaacgtgttgactactctgccagatcagtaatcgttgtaggtccacacttagatcttcagcaatgtggattaccaaagatgatggctctagaattattcaaaccatttgttatgaaaaggcttgttgagctaggtttagctcaaaatattaaatctgcaaaacgaatggttgaaagatcaagagctcaggtctgggatgttttagctgaagtaatagaagaacaccctgtcttattaaatagagctccgactttacacagattaggcattcaagctttcgagccaatattagttgaaggtaaagccattcaagttcatcctcttgtttgtgaagcttttaatgcagactttgatggtgaccaaatggcagttcacgtgcctttgtcagctgaagctcaggctgaagcaagggtactaatgctcgcaacaaataatgttttatctccggcaagcggaaacccaatagtctctcctagtcaggacatggtaataggtctttactacataacagaatgtcatgatgatttagaaacagcggagcatgctttcgttgatgctaacgaagcacaactggcttatgaagcaggacacataactttacaaacacctataaagataagagtaggcgatcttgcaggatcagaagaaatttataataaaattaaaaatagattttcagagttattaactcctgaatatacatctggagacgtacttacaaatacaacccttggaagactacatttcaatgcaatattaccttcagacttcccatatatagaagcttctgtaagaaagccacaaatgaaaaaaataatttcagaagtaattgaaacatataataaagctgaacttcgtgaattcttagattctatgaaaagagtaggatttaattttggtgccaaagccggcttatctgttgcgatgacagacgtaaaaactcctccaagtaaaactcaaattcttgaaaaatatgaaaacgaagctgaaaaagtcgagaaactatataaagacgacataattactgaaacagagagaaaacaaaaaattattgaaatttggaatgaagctacagaccaagtgcaatatgccatgagcgcagaattagaatctgaaagatttaacccagttgatatgatggtcaaatctggagcaagaggcaacatgatgcaagtaagacagcttgctggtatgcgtggacttgttgctaatcctaaaggtgacatcattgaaagaccgattaaaagtaactttagagaaggcatgtcagttcttgaatattttatttcaactcacggtgcaagaaaaggtcttgctgacacagcattaagaactgcagactctggatatttaacaagaagattagtagatgttgcagctggaattgttgttaaagacagcggcgatgaaaatattgactggaagggaactaataaaaaaacagttgataaaaatggcaagccttctaaatatctacattcaactttatttggaagagtgcttagtgaggacataaagaaagacaaaaaaactatcgaatttgctgatggaaggaaattatcaaagggaacttacattgatgctgaggctttagatgtcatatctaagtcgggagttgaatcagtaaacgtcttaacaccttttaactctttagatcctgagtcaatggatgcgctgtgttatggttttagtcttgcaacaggaaagccagtagaagatggtgaagctgttggtatcatatctgcacagtcaattggtgaaccaggaacgcaacttacaatgagaacatttcatactggtggggttgtaggtctagatatcacatcaggacttcctagaattgttgagctgtttgaagcaagaactccaaaaggtaaatcagtactttctttgatagatg

SEQ ID NO: 255901 - DNA, 2667 bp, Unknown
  Bacterial polypeptide expressing nucleotide sequence isolated from the Sargasso Sea
agatttagacaaaacctttttaggtaaaagagttgattattctggtagatctgtaattgttgttggccctaaattaaaaatgcatgagtgtggtttaccaaaagatatggcatctgaactttttaaaccttttataattagaaaactaattgaaagaggtattgtaaagacagtaaagtctgcaaaaaaattagttgattctaaagactcagtaatatgggatattctcgaaaatgttcttaaaggacatcccgttctattgaatagagctcctacattacatcgactaggtattcaagcatttcaaccaaaattaatcgaaggtaaagctattgagttacatcctctatcttgtaccgcgtttaatgctgattttgatggtgaccaaatggctgttcatgttccattaggccatgaggcaattgttgaagcatcaattctaatgttaggttcaaataatattattaatcctgctaatggagctccaataactgtaccttctcaagatatggttttaggtctttattatgttactaaaggtagaaaaaatactaaagaataccctttaaagggagagggacttagattttcttctatttctgaagttaaaattgctcttaatcaagaaaagttatcgattaattcgtttataaatttaagagttaatttaaggtctgatgatggaaaatttgtgactaaaaatatcgaaactgttgctggaagagttttatttaatgagtttattccagaagaagttggatatgttgatgaacttcttaccaaaaaaaaattacaacaaattatttcaaaagtttataaaatatgtggtgtttcacgaacctctgagtttttagataatattaaagaattaggttttagaatggcttatgaaggtggtttatcaatggggttaggtgatatacaaattccaaaagaaaaatctactttagtagatggagcaaaaaaagaagttgctgaagtttggaataattattatatgggattaattactgataatgagagatataatcaggtaatcgatatttggactagagcaaacacaaaattaacttctggattgatgaatgagttagaagataattctcaagggtttaatcctatttatatgatgatgcattcaggtgcaagaggatctagagaacaaattaggcaattaggaggtatgagaggtttaatggcaaaaccacaaaaaaaccttgcaggatctgtaggtgaaattattgaaaacccaattttatctaattttaaagaaggattagacgtaatagaatattttatttcaactcatggagctagaaaaggcctggctgatacagcattgaagactgctgacgcagggtatttaacaaggagattagttgatgttgctcaagatgttattattaatgaagaagattgtggtactttaagaggtgtctatatttcttctcttaaagataatgaagatattgttgagcctttgtctgaaaggatattaggaagagtatcagttcatgatgtttatgatccattatccaaaaaacttttagttggatctggtgaagaaattacagaatcaattgctagagatattgaaaatacaaatattgatggtattgaaatcagatcggtgttaacttgtgaaacgggaagaggtgtatgtgctaaatgttatggtagaaatctatctactggaaacttggtaaataaaggtgaagctgttggtgtaattgctgctcaatctataggtgaaccagggacccaattaacattaagaacatttcatgttggtggtacggcttcaaatattgctgttaatgcaaatatcaaagcaaaatttgatggtatcattgaactagagaacgtaagaacaatcaaaacaaaggataatgataataatcaagtaaatatagtaatggcaaggactggtgaaattaaaattttagataaaaagaaaaatattctaatgtcaaataatgttccttatggctctcatcttagtattaaggatggtcaaaaagttaaaaaaggagattttctttgcaaatgggatccatataatgcagtaattatttctgaatttgatggtaaaattgaatttgaatcaattgatgaaggtataacttataaacaagagtttgatgaacaaacgggacataaggaaaaaattattattgaatgtaaggataaaacaaaaaaccctactgtaaaagttattgggaaggaaggggaaaaatcttataatgttccagttggagctcacttatctattaatgataaggacaaagtaaaagctggtcaaattttagttaaaattcctagaatgattggtcaatctagagatataacaggtggattaccaagagttacagaattatttgaagctagaaatccttctaatccggcaaccgtaagtgaaattgatggtgtggtttcttatggtggcattaaaagagggaatagagagatatttattgaagcaaaagatggtactaaaaagaaatatctagtttcattgtcaaaacatattttagttcaagataatgattttgtcaaggctggtactcctctttccgatggtgcaataacaccagcagatatattatcaattaaaggtccaacagaagttcaagattatttagttaatgaaattcaggaggtttatag

SEQ ID NO: 255902 - DNA, 2249 bp, Unknown
  Bacterial polypeptide expressing nucleotide sequence isolated from the Sargasso Sea
aatgaaaaaagaattaacagatttatttaagggtagtgaaatttcagaagcacaaaattttaatagtattaaaatttcattagcaagtccggaaaaaattaaatcttggacatttggagaaattaagaaacccgaaacaattaattatagaacgtttagacctgaaaaagatggtttattttgtgcaagaatttttggaccaataaaggattatgagtgtttatgcggcaaatataaacgaatgaaatttagaggaattatttgtgagaagtgcggtgttgaagttactaaatcaaatgtaagaagagagagaatgggccacattaatcttgctacaccagtagcgcatatttggttcttaaagtctcttcctagcagaattgctttggctgtagatatgaagttaaaggaaattgagagagttctttattttgaaaactttattgtgatagaaccgggtttaactggtttacaaaaaaatcaacttttaaacgaagaagaattagcaaaatatcaagacgaatttggtgaagagagctttacatcaggaattggagcagaagccgttcttgagatgttaaagaatttggatttagaattagaaagaaaaaatcttgttagttttattaaagaaacaaagtcaaaagttaacgaagaaagagcaatcaaaagactaaagttaatcgagtcatttattgaaactggtcaaaagccagagtggatgatcatgactgtagttccagttatcccccctgaattaagacctttagttcctttagatggtggaagatttgcaacttcagatcttaacgatttatacagaagagtaatcaacagaaataatagattaaaaagattaatggatcttaaagctccggacataattgttagaaatgaaaaaagaatgcttcaagagtctgtggatgctttatttgataatggaagaagaggtagagtaattacaggaacaggtaagcgtccacttaaatcacttgctgaaatgttaaaaggtaagcaaggaagatttagacaaaatttattaggtaaaagagtagattattcaggcagatctgtaatagttgttggtccagatttgaagttacacgagtgtggtttgccaaaaaaaatggctttagaattatttaaaccatttttatatgcaagattaaataaattaggattagcctctacaatcaaacaagctaaaaaattagttgaaaaagaaaccaatgcagtatgggatgctttagagctaatcgttagagaacaccctgtgcttttaaatagagcaccaactcttcataggcttggagttcaagcatttgaaccaaaattaattgagggagatgctattgaactacatcctttaacttgtgcagcatttaatgctgattttgatggcgatcaaatggcagttcatgttccattaagtttagaagcacaattagaagcaagaatcttaatgttgtctacaaataatattctttccccttctaatggtaaaccaattattgttccaagtcaggacatgattttaggaatttattatctctcacaagatccaatatccgataaaccagctggatattttataaattcagatcaaattgaatttgctttagcttctggtcaaataaatgtacatagcacaataatttcaagatatgagactatagatgaacaagggaataagaaaatagaaaaatacacctctacagctggaagatttttattagcaaatttattacctaagaatagtaatattaagttctctttagtagatagattattacctaaaaaggtggtttcagaaataatagatgttgtttttagattttgtggtcaaaaaacaactgtaattttctgtgataaacttaaagatttaggattcaaacatgcgtttaaagcaggaatttcctttggaaaagatgatcttgtaattccagcaaacaaaactcaattaattgatgatactaagaaattaattgctgattatgaaacacaatacgcagagggtttaattacaagaggtgaaaaatacaacaaagttgtagatgcttggtctaaatgtacagacaaagttgctggcgaaatgatgaagggaatttcagcaacagaaaaaactgatgaaggcttaaaaataaattctgtatttatgatggccgacagtggagctagaggatcagctgctcaaatgaaacaattagctggtatgagaggtttgattgctaagccttcaggtgaaatta

SEQ ID NO: 255903 - DNA, 1652 bp, Unknown
  Bacterial polypeptide expressing nucleotide sequence isolated from the Sargasso Sea
tttgaaagaattacttaacttattgcaatcaaaccaagacgatttttcatctatttctgctggcttggcatctccacaaatggttagatcatggtcatttggcgaagtaaaaaaacctgagactattaactatagaacctttaaacctgaaagagatggtctcttctgcgcaaagatttttggaccaatcaaagactatgagtgtgtatgcggtaaatataagagaatgaagcacagaggagtagtgtgtgaaaaatgtggcgtagaagtcactctagcaaaggtaagaagagatagaatgggtcatattgagctagcagctcctgttgctcatatatggttcttaaaatcattaccttcaagaataggtcttctccttgatgtaactttgagagaaattgagagagttctatattttgagagttttatagtaactgatccaggaatgactgatttagaaaccggagacattcttactgaagaagaatacattgaagcttatgaccaatatggagatgagtttaaagctggaatgggtgcagaagcagttaaattattactcgaagagctcgatatagaagaagagataagaattcttagagaagaaattcctcaaacaaactctgaaacaaaactaaaaaagatctcaaaaagattaaagctacttgaggcatttaaggcttctggtaacaagccagagtggatgataatggatgttcttccagtattacctccagacctaagaccgctcgtgcctcttgaaggaggaaggtttgctacttctgatcttaatgatctatatagaagagtaataaacagaaacaacagattaaaaagattattggagctaaatgcacctgacatcattgtaagaaatgaaaaaagaatgcttcaagaatcagttgatgctcttcttgataatggaagaagaggaagagtcataactggaactaataaaagacctctaaagtctcttgctgatatgatcaaaggtaagggtggaaggtttagacaaaatcttcttggtaagcgagttgattactctggaagatctgtaattgtgtctgggccaaatctaaagcttcaccaatgtggattaccaaaaaaaatggcattagagctattcaaaccatttgtctacggaaggttggagcataaagagcttgcaacaacaattaaagctgctaagaggcttgttgaaagagagaccccagaggtttgggaagctctagaagaggttatcagggagcatccagttctattaaatagggctccaacattgcatcgtcttggtattcaggcatttgaacctctattaattgagggtaaggctatacaacttcatccattggtatgtgttgcttataatgcagactttgatggcgatcagatggctgtccatgttccattaacagttgaagctcaacttgaagctagagcgttaatgatgtcgactaacaatattctttctcccgctgatggagctccgattattaatccaactcaggatgttgttcttggtctttattacatgacaagagagaaagtaaattcccatggagaaggaagagtattttcaaaccctgacgaggttcaaagagcttttgagtctgaacaaatagatcttcatgcaaaaataaaagtaagaatag

SEQ ID NO: 255904 - DNA, 613 bp, Unknown
  Bacterial polypeptide expressing nucleotide sequence isolated from the Sargasso Sea
tgaaaatgttgagttaacagatgctgatcatcatgttgtttcacttgtagataaaattaaattaaatatgtcagtttttgtaagaactggaagaggttatgagcctgcagatattagagatgatgaaaataatactgtaggaggcttaaaagtagatgcttcatttagtccagttaaaagagtttcttattctgtagagaatgcaagatttgagaaaagaacagacttagacaaattaatacttgagttagaaactgatgggactatcgatgcaaaaatggctatagagcattctgcaactataatgcagcaacaacttgcagcctttgttgatttagaagcaattgcagaacaagaagctaaaaaagagcaaaatgactttgacccactactccttaggtctatagaagaacttgagctaactgtaaggtcaactaattgtctaaaagcagaaagtattttcttaattggtgatttaattcaaagatctgaatttgatcttctaaaaacaccaaatcttggtaaaaagtctcttaatgagattaaagatgtcctagcttcaaaaggactttctttaggtatggtgttagataactggccaccgatgggttaa

SEQ ID NO: 255905 - DNA, 1024 bp, Unknown
  Bacterial polypeptide expressing nucleotide sequence isolated from the Sargasso Sea
catgagtataataaataattggcaaacattgattaagccatctaaattgaaattaacgaacgatgaaaactcgcagtataaagctaccttagtagcagaacctctggaaagaggttttggattaactttaggcaatgctttaagaagggttcttttatcttcgttgcaaggcaccgcagttacggctattaaaatagacaatgtccttcatgaattttcttctatagatggtgttcgtgaagatgttactgacattgttttgaatattaaatctttatctttaaatatgcattcagagggagtaagaaagatgaatttgaatgtaacaggtccaggtgaaattacagcgggtatgattaatactccttcagagatagatattataaaccctgaattagtaatatgtaacctagatgataatacagaattcaatatggaattaactgtagctaaaggaaaaggttacgttgctgctgagcacaataaacctgaagactctgccataggattaatacctattgattcaatctttagtccagtaaaacaagtctcatacagtattgaaaatacaagagaaggaaaagttttagattatgacaaattaattcttaccattgaaaccaatggttcagtcacacccgatgattccatcgcatttgcagctagaattattcaagatcagctacagtcttttattaattttgaagagcctgaagaaatacaagaggagcctgatactttagagcctcagtttaataaaaacttattaagaaaggttgaggaactggaactttctgtgaggtcaatgaattgtcttcgcaacgataatataatctacataggtgatcttgttcaaaaaagtgaaatcgagatgttgagaacaccaaattttggtagaaagtcacttaacgaaatcaaagaagttttaggaacaatgtctctttaccttggtatggaagtaccaaattggccacccgaaaatattgaggaacttgcaagaaagattgaggatccatataactaa

SEQ ID NO: 255906 - DNA, 2167 bp, Unknown
  Bacterial polypeptide expressing nucleotide sequence isolated from the Sargasso Sea
aaaaattaaatcttggacatacggtgagattaaaaaacctgaaacaataaattatagaacatttagaccagagaaagatggtttgttctgtgcaagaatttttggtccaataaaagattatgagtgtttgtgtggaaaatacaaacgaatgaaatttagaggaattatatgtgaaaaatgtggtgttgaagttacaaaatcaaatgtaagaagagaaagaatgggtcacataaaccttgcaacccctgttgctcacatatggtttttaaagtcacttcctagcagaatatctttggcaattgatatgaaacttaaagaggtcgaacgagttctttattttgaaaattttatagttattgaacctggattaactggattaaagaaaaatcaattacttggtgaagaagaattaattaaatatcaagatgaatatggtgaagaatcttttactgcaggaattggtgcagaggcaatacttgaaattttaaaatcaatcaatctagaagaagaaaaaaatagtcttattaaaacaataaaagagacgaaatcaaaagtatcagaggaaagatcaataaaaagattaaagctgattgagtcatttatagaaactggaaataagccagaatggatgattttaacaacaattcctgttattcctccagaattacgacctttagttccattagatggcggcagatttgcaacttcagatttgaacgacttatatagaagagttattaatcgaaataacagactaaagagattaatggatcttaaagctccagatattattgttagaaacgaaaaaagaatgcttcaagaatctgttgatgcattatttgataatggaagaagaggtagagttattactggaacaggcaaaagaccattaaagtctttagctgaaatgttaaaaggtaaacaagggagatttagacaaaatttattaggtaaaagagtagattactcaggaagatcagtaatagtcgttggaccagatctaaagctacatgaatgcggtcttccaaaaaaaatggctcttgaattatttaagccatttttatatgcaaggttaaataagttaggcttagcctcaacaattaaacaagcaaaaaaattagttgaaagagagagaaatgaagtttgggatgcattagagttaatagttagagaacacccagtcattttaaatagagctccaacacttcatagattgggagtacaagcttttgaaccaaaacttattgaaggaaatgccatagaacttcatccattaacttgtgctgcatttaatgctgactttgatggtgatcaaatggcagtacatgttccacttagtttagaggcacaattagaggcacgtgtattaatgatgtccacaaataatattttaagtccatctaatggtaaaccgataattgttcctagtcaggatatgattttaggaatttattatttatctcagccaccatatcaaaaagacagagtagagggttattttgttaacacctcagaaatagagcatgcgcttgaaattggtcaaatcaaagtccactcaagaatagtttcaagatttgaaactgttgatgagaaaggaaatactaaatttgaaaaacacattagcacagcaggaagatttttattatcaaatttaataccaaaaaatgttaaaaataaattttcattagtagatagacttttaccaaaaaaagttgtttcagaagttattgatcatgtattcaggttctcaggacaaaaaagtacagtaatattctgtgacaagctaaaagatttaggttttaaacacgcatttaaagctggaatttcatttggtaaagatgatctagttataccagataataaacaacaattaattgaggagacaaaaaaattaatttcagattatgaaaaccaatatgctgaaggattgattactagaggtgaaaaatataacaaagtaattgatgcatggtcaaaatgtacagatagagttgcagctgagatgatgaagaggatttctgcaacagaggttacagaggatggtcttaaaatcaattcagtattcatgatggctgatagtggtgcaagaggatctgctgcgcaaatgaagcaactagctgaaatgcgaggtttgattgcgaaaccatcaggtgaaattattgagtcg

SEQ ID NO: 255907 - DNA, 3460 bp, Unknown
  Bacterial polypeptide expressing nucleotide sequence isolated from the Sargasso Sea
ctcaggtaacaaacctgaatggatggtaatgaatgtcttgcctgtgttaccaccagacttaagacctttagtgcctcttgagggtgggaggtttgctacttctgatctcaacgatttatatagaagagttataaacaggaataacagattaaaaagattattagagcttaatgcacctgaaataatagttagaaatgaaaaaaggatgctccaagaatctgttgatgctctattagataatggtagaagaggaagggttattacaggcacgaataaaagaccacttaaatcattagctgacatgattaagggaaaaggaggtagatttagacaaaatcttttaggtaaacgtgttgattattcaggaagatctgtaattgttgccggtccgaaccttaaattacatcaatgtggactcccaaaaaaaatggctttagagctttttaagccttttgtttatggaaaacttgagaacagggagcttgcaacaacaattaaagctgcaaaaaaattagttgaaagagaaacccctgaggtttgggaagttttagaggaagtaatcagggagcatcctgtattgcttaacagagctccaactcttcatcggcttggacttcaagcatttgaaccaaaattgattgaaggtaaagcaatacaacttcatccattggtttgcgttgcattcaatgctgattttgatggagatcaaatggcagttcatgtcccgctaacacttgaagcgcaattagaggcaagagcgttaatgatgtcaacaaataatatattatccccagcagatggtgctccaattataaacccaactcaagatgttgttttaggtctatattatatgaccagagataatgctaattcctcaggtggtggcagagtctttagtaatgctgatgaggtattgagagcatatgaaacagaaaatttagaaatacattctcctattaaagttagaatcgaacatgcagatggtgaaaccacattagaagattcaacagttggaaggactttaatatggagaataactccagttgaggttggatttgaaaatattaatgatgttttaaataagaagtctgtatccaagttaattgatatttcttatagaaaagctggattaaagaaaacagttatttttgccgatcagttgatgtacttaggctttgatttttcaacaagatctggatcttcaattggggtaaatgattttgtcataccagaagagaaagcaaaaattattgattcttcagaaagagaagttaaggctatagaaaaacaatttgattctggtcttgttacaagaggtgaaagatataacaaagtaattgatatctggtcaagagcaaatgaacaagttgctaaagctatgatggaaaaaataagtactgagagtgcaaaaacacctgaaggtgagaatatagagcaatcttcatttaattctgtttatatttatgctgattctggggctagaggatcaccagcacaaataagacagctttctggaatgagaggattaatgtcaaaacctgatggttctattattgaaactccaataactgcaaactttagggaagggctttcagtattacaatatttcatttcaactcacggcgccagaaaaggcttagctgatacagctcttaaaacggctaattctggttatttgactagaaggttatgtgatgtatcaatggactcagtcataaatattgatgattgtggtaccgaggattcaatagtagttacttctatcattgatgggggtgaaattattcaagctttaacagacagaatcctgggaagagtaattgctgaaccaatatttgatgcagaaggaaaagaactatttcctgtaaatacaatgctagatgaagatgccttggatgttattgacgaacttaatttatccagtcttaaaattagatctccaatgacatgtaatgctcctgtcggagtatgttctatgtgttacggaagagatttggcaagaggccatcttgttcacagaggagaggcagttggtgttgtagctgcgcaatctattggtgagccaggtactcagttgacaatgagaacatttcatatcggtggtgctgcctcaagctcatctgaagacaatgccatctttaataagagtgcaggggctgtaagtttttctgaagatataaaaactgtaaccaataaagataaattagaagttgttgtatcaagaaatgctatgtgctctatatcagatattaatggaaagattgttgaacaatataaagttccttatggagccgtactagaagtagctaatgcttctgatttagaagatggagttaagatagcttcatgggatccatatactagacctataatttctgagacctctggaaaaattaaattttctgatatagaagatggagttactgtaagagaacaattagatccactaactggattatcaagcatcgaaataattgaagttgctgatagaacatcagctggaagagacatgaccccaacaattgagattgttgactctaaaggtaaaccagttttagtaggtgaattcaaacagcctgctgtttatcctttacctgcaggaggacttgttaatttagtaaacggacaaaaaattactgctggtgaggttatagcaagaatgccattggttgcgtctaagacaaaggatatcactggtggtctacccagagtggctgatttatttgaagcaagaaagccaaaagatgccgctgtattagctgaagagtccggtgttatttctttcggcaaggagactaaaggtaaagtcagattagtcattacacctgagggagcttccaagaaatctgataatagagaaatgctcatacctaaacatagaacattaaatgtttttgaaggtgagagagttaacaaaggagacattatttctgaaggtcctttaagtccgcatgatattttgagattaaagggtattcctgagttaacgaattttattgttaatgaaattcaggatgtttacagacttcaaggtgtttctataaatgataaacatattgaaacgatattaaggcagatgctaagaaaggctctaattcttgatggtggtgacacaagatttattcaaggtgaccaagttagttatgctgagcttgtagatgaaaataataaagctgaagctgaaggcaaaactccagcagagtatgaaagagttttactaggtattacaaaagcatcattagcaacagattcatttatatcagctgcatcattccaagaaacaacaagagttctaacagaagctgcagtgactggaaaaaaagaccatcttagagggcttaaagaaaacgttgttgttggaagattaattcctgcaggaacagggatggaattccatgatcggttaagaagtaaaaaatgggtgaatttgatgaacaaattttatctgatgacgatatag

SEQ ID NO: 255908 - DNA, 629 bp, Unknown
  Bacterial polypeptide expressing nucleotide sequence isolated from the Sargasso Sea
aatggaagttgaaaatgttaatgtaaaaaattggaagtcattaattaaaccatctaaattagatgttcaaattagtgacgacttaacccatgcaaaaattgtagctgagcctttggaaaaaggttatggattaactttgggaaattctctaagaaggattttattatcatctataagaggagctgctgtaacgtcaattcaaattgatggagtcttacatgaattcacttcaataaaaggtgttagagaagatgttacagatatcgttttaaacgtaaaatctttagcattaaaaagtaattctgagggtacaaaaaaattaattttagatgctaaaggacctggtgaaataaaagcatctgatatagctccagttactgacgttgaaattttaaatcctgatttagttatttgtaatcttgacgaaaatactacttttcatatggaaatgaatgttaatacaggtaagggttatgttccagcagaactgaataaacctgaagaaccacctttaggtttaattgctattgactcactttatagtccagttaaaaaagtatcatattcagttagtacagctagagaaggaaaagctttagattacgataagctaactatggaggtgaaac

SEQ ID NO: 255909 - DNA, 744 bp, Unknown
  Bacterial polypeptide expressing nucleotide sequence isolated from the Sargasso Sea
tatgtcatcgactaaagagttattaaaaccacgtaaatgtcaagtggaggaaatcaatagtacctcagcaaaaattattattgaaccattagaaagaggctttggccatactcttggtaatgcattgcgtcgagttttattgtcatcaatgccgggctgtgcagttactgaacttgagattatagagccagaagtattacacgaatacacgacgatggaaggcgttcaagaagatgtaacggatataattctcaatcttaaaggtcttgcaataattatgcattctaaggatgaggcaacattaactttgaaaaaaagcggcccgggagaagtatgcgcaagagatattactgttgatcatgatgttgagattgctaaccctgatcatccgatagctaatttaacgaaggcgggtcaattaagcatggttatgaaggtagctcatggtagaggctataagcccgtcattgctggagggaaagacagtgtcgaacagactattggaaaaataaaattagatgcttcatttagtccggtaacacgtgtttcgtatgatgttggtaattcacgagttgaacaaagaactgatttagataagttaattttggaattagaaacagatgggacgattgatcctaatgaagctataaaagaagcggcaacaatacttcgttcacaattagtcattttcgttgatcttgaagcagaagaagctattgaagcaaataaaagcagcgaacctga

SEQ ID NO: 255910 - DNA, 406 bp, Unknown
  Bacterial polypeptide expressing nucleotide sequence isolated from the Sargasso Sea
atgcaaacatcagtaatagatctattagtaccaaccgaaattcaggttgatgatgtctcaccaacattatcaaaggtaacacttgagccattggagagaggttttggacacacacttggaaatgctctaagaagaatattactttcctcaatgcctggtgctgctgtgacagacgtcgcaattgatggaatatctcatgaatatagcactatcgaaggagtaagagaggatgtaatagatattcttttaaatattaaagacatgcctataaatctaattgagggagactcagctgaagtaacactagatgtaaaaggtccttgtgacgtattagcttcatcctttgatgttcctggaaatgtagagcttgttaaatcaagattttcatatcgcaactattgttgat

SEQ ID NO: 255911 - DNA, 992 bp, Unknown
  Bacterial polypeptide expressing nucleotide sequence isolated from the Sargasso Sea
aatgtggattaccaaaaaaaatggcgttagagttatcaaaccatttgtctacggaaggttggagcataaagagcttgcaacaacaatcaaagctgctaagaggcttgttgaaagagagaccccagaggtttgggaagctctagaagaagttatcagagagcatccagttctattaaacagggctccaacattgcatcgtcttggtattcaggcatttgaacctctattaattgagggtaaggctatacaacttcatccattggtatgtgttgcttataatgcagactttgatggcgatcagatggctgtccatgttccattaacaattgaagctcaacttgaagctagagcgttaatgatgtcgactaataatattctttctcctgctgatggagctccgattattaatccaactcaggatgttgttcttggcctttattacatgacaagagaaaaagtaaattctcatggagaaggaagagtattttcaaaccctgacgaagttcaaagagcttttgagtctgaacaaatagatcttcatgcaaaaataaaagtaagaatagaaaatgctgagaaaggtgtttttatagaagatactaccgttggaagaactcttatctggagaatcacaccaattgaagttggattcgacaatgtaaacaaaacactagacaaaaaagcagtttcgtcgcttattgatctttcttacagaaaagctggtttgaagaagactgtaatttttgccgatcaattaatgtaccttggctttgacttttcaactagatcaggctcatcgattggtgtcgatgattttgttattcctgaagagaaatatgaaattgtagataaggcagaggatgaggttaaggaaatcgagaaccaattctcatccgggctggtcactagaggtgaaagatataacaaggtagttgatatatggtctagagcaaatgaaagagttgctaaggcaatgatgaaaaaatcagcaaaga

SEQ ID NO: 255912 - DNA, 1735 bp, Unknown
  Bacterial polypeptide expressing nucleotide sequence isolated from the Sargasso Sea
tttggccctataaaagattttgaatgtctttgtggaaaatataaaagaagaaagcatagaggtgtaatctgtgaaaaatgtggcgttgaagtaacggccactaaagttagaagagaaaggatgggccatattgaattagcctctcctgttgcacatatttggtttctaaaatcacttccttcaagaataggcttattccttgatatgactctaagagaaattgaaagagtcctttattatgaaagttttgtagttgttgaagccggtattaccgatcttactaaaggacaacttttaacagaggatgaatattatgaagcactagacgaatatgatgatgacttcactgcattgatgggagcagaagctatacagatattattaaatgaagttgatctagaaaaagaacttcaaataattaaagaagaattaaatactagtggttctgagacaaaaattaagaaacttcaaaaaagattaaaactaatagaagcttttaaagaaagtggacagaaaccagagtggatgattatgaatgttcttccagtcttgcctcctgatttaaggccattggtaccattagatggaggaagattcgcaacatctgatttaaatgatttatatagaagagttataaatagaaacaatagacttaagagactacttctcttaggcgccccagagattatcgttagaaatgaaaagagaatgctccaagaatcggtagatgctcttttagataacggcagaagaggaagagctatattaggcacaaacaaaagaccattaaaatctcttgcagatatgatcaagggtaagcaaggaagatttagacaaaacttactcgggaaaagagtagattattcaggtagatcggtagttgtttctggcccaacattaaaattacatcaatgtgggttgccaaagaaaatggcactcgaattatttaagccatttatttttaataaattagagcagaaaggaataacaataacaattaaagctgcgaaacaattagttgaagaagagactcctgaagtatgggattgtttagatgaagttatcagagagcacccagttttactaaatagagctccaacacttcataggcttggtattcaagcgtttgaaccagtattaattgaaggtaaagctattcaattgcaccctctagtttgtaccgcatttaatgctgattttgatggagaccaaatggctgttcatgtacctctatcacttgaagcacaacttgaagcacgtgctttaatgatgtctacaaataatattttatcccctgctagtggagaaccgattattcaaccaaaccaagatgttgttctaggtatttattatttaactaaagaagattttggtcttccaggagaaggaagatcttttgtagacgtgcatgaggtaaaaagagctttcctagagaagcaaattaatctacacactaaaattaaagttagagttacagaaggtgacaataagaaagtttatgatactactgttggtagatgtctgttatatgaaatcatgcctacagggttagaattttcaaaaataaacaaaacactaaaaaagaaagatgttcttaatctgatatctcacgtatataaagatttcggtctaaaagaatctgttctttttgctgaccaattaatgtatctaggttttgaatattcaactacatctggtgcttctattggagtaaatgattttgagattccctgat

SEQ ID NO: 255913 - DNA, 928 bp, Unknown
  Bacterial polypeptide expressing nucleotide sequence isolated from the Sargasso Sea
attgaaatctttaaaaacaagccaagcagattttacatcaatttcagcaggcttagcttctcctcaagttattaaatcttggtcttttggtgaagtaaaaaaacctgaaacaattaattacagaacatttaaaccagagagagatggtttattttgtgcaaaaatttttggtccagtaaaagactacgaatgtatatgcggcaaatacaaaaggatgaagcatagaggagtagtttgtgaaaagtgtggagttgaagttactttagcaaaagttagaagagaaagaatgggtcacattgatcttgcagcaccagtggctcatatatggtttttaaaatctttgccatcaagaattggacttttgctaaatgtcactctgagagaaatagaaagagttctatattttgaaagctatattgttacagatccaggtatgacgcctcttgaaaaaggagatattcttactgaggaagaaagaattgaaacttatgagcaatatggagatgattttgagtcagggatgggtgccgaagctgttcaaaaattacttcaagaaattgatatagacgatgagattagaattatcagagaagaaattccacaaactaattctgaaacaaaattaaaaaaattatccaaaagattaaagcttttagaagcatttaaagactctggtaataaaccagagtggatgataatgaatgtcttacctgttcttccgcccgatctgaggcctttagtccctctagagggtggaaggtttgctacttcagacctaaatgatttatataggagagttataaatagaaataacagattaaaaagacttcttgaattaaatgcaccagaaataatcgttagaaatgaaaaaagaatgcttcaagaatcagttgatgcgcttttagataacggaagaagaggaagagtt

SEQ ID NO: 255914 - DNA, 1222 bp, Unknown
  Bacterial polypeptide expressing nucleotide sequence isolated from the Sargasso Sea
agatgcactatttgataatggcagacgaggcagggtaattacaggaacaggcaaaagaccattaaagtctttagcagaaatgcttaaaggtaaacaaggtagatttagacaaaacttgcttggtaaaagggttgattactcaggtagatctgtaatcgttgtaggtccagatttaaaacttcatgaatgtggtttgcctaaaaaaatggctttagaattatttaaaccatttttatatgcaagattaaacaaacttggattagcttcaacaataaaacaagctaaaagattagtagaaaaagaaacaaatgcagtatgggatgcattagaattaattgttagagaacatccggttatcttaaacagagcaccaactcttcatagattgggtgtacaagcatttgaacctaaacttatagaaggtgatgcaatagaacttcatccattaacctgtgctgcatttaatgctgattttgacggggaccaaatggctgtccatgttccactaagtttagaagctcaattagaagctagaatattaatgttatcaactaataacattttatcaccatctaatggtaaaccaattattgttccaagtcaggatatgatacttggaatatattatctttcacaagaaccattaagcgataagccagtggggtatttcaccgatatagatgctattcagtttgcactatccaccgaacaattaaaagtacatagtacaattatatcgagaattgaaactgtggatgaaaatggtaacaaaaaatttgaaaaatacacttcgacagcaggtagatttttattagcaaacttactacctaaaaattacaacattaagttctctcttgttgatagattgctaccaaagaaagtagtttcagagataatagatattgtatttagattttgtggccaaaaatcaacggtcatattttgcgataaactaaaagatttaggatttaaacatgcttttaaagcaggtatttcatttgggaaggatgatttagtaatcccacaaaacaaaactcaattaattgaagatacaaaaggattaatagcaaattatgaaactcaatattctgagggattgattacaagaggagaaaaatacaacaaggttgttgatgcatggtcaaaatgtacagacaaagttgctggcgaaatgatgaaaggaatatcagctactgaaaaaacccctgacggtcttaaataa

SEQ ID NO: 255915 - DNA, 1044 bp, Unknown
  Bacterial polypeptide expressing nucleotide sequence isolated from the Sargasso Sea
tggaaaatataaaagaatgaaattcaggggaataatttgtgaaaaatgtggtgtagaaattacaaaatcaaatgtcagaagagaacgaatgggacatataaatttagccaccccagttgctcacatttggtttttaaaatctttaccaagcagaatttctttagcaattgatatgaaattaaaagaggtggaaagagttttatactttgagaattttattgtcatagagcctggtttaaccggtctgaaaaagaaccaattgctaaatgaggaagaattagcaaaatatcaagatgaatatggagaagaggccttcacagctggtattggagcagaggctattcttgaaattttaaaatctttagatcttgaagtagaaaaagctactctggtcaaagcaattaacgaaactaagtcaaaagttgctgaagaaagatcgataaaaagattaaagttaattgagtcattcatggagacaggccaaaaaccagagtggatgatattaactgttatcccagtaataccaccagaactcagacctttagttccacttgatggaggaagatttgctacgtctgacttaaatgatctttatagaagagttataaatagaaacaatcgtttaaaaagattaatggatcttaaggcaccagacataataataagaaatgaaaaaagaatgttacaggagtcagttgatgctttatttgataatggaagaagaggcagagttataacgggaacaggaaaaagaccactaaaatctttagcagaaatgctcaaaggtaaacaaggaagatttagacaaaatttgttaggaaagagagttgattattcaggaagatcagtaattgttgttgggccagatcttaaacttcacgaatgtggtttaccaaaaaaaatggctttagaattatttaaaccctttctttacgctagattgaataaattgggcctagcatcaactatcaaacaagcaaaaaaattagttgagaaagaaactaatgctgtatgggatgcgctagaactaatcgtaagagaaca

SEQ ID NO: 255916 - DNA, 411 bp, Unknown
  Bacterial polypeptide expressing nucleotide sequence isolated from the Sargasso Sea
tatgcaaacatcagtaatagatctattagtaccaaccgaaattcaggttgatgatgtctcaccaacattatcaaaggtaacacttgagccattggaaagaggttttggacatacactcggaaatgctctaagaagaatattactttcctcaatgcctggtgctgctgtgacagacgtcgcaattgatggaatatctcatgaatatagcactatcgaaggagtaagagaggatgtaatagatattcttttaaatattaaagacatgcctataaatctaattgaaggagactcagctgaagtaacacttgatgtaaaaggtccttgtgacgtattagcttcatcctttgatgtacctggaaatctagagcttgttaatcaagattttcatatcgcaactattgttgataaggt

SEQ ID NO: 255917 - DNA, 3150 bp, Unknown
  Bacterial polypeptide expressing nucleotide sequence isolated from the Sargasso Sea
gatgtataaagcaaaaaatagtatttcaataaagctggcttctccagaaaagattcttgaaggttcttttggtgaagtattaaaaccagaaacaattaattacagatcatataaacccgaaaaagatggtttattttgtgaaaaaatctttggtccagtaaaggactttgaatgtcactgtggaaagtataaaggtattaggtatagaggtattatttgcgataggtgtggagttgaagttaccactaagaaagttagaagaaatcgtatgggccatattactttagcagttcctgtcgttcatatttggtttttaaagtccattccaagtaagcttagttatattcttggtaaaagcgctaaacagttagagagtgtaatttattatgaaaactatttagtcattaatcctggaaagagtggatataaaagattcgagttaattgatgaagaggcttatttagagctggagcaagagtttggctatgaagctgtttcacaagaagaaagagaagaagagtcatatttttatgcagcaatgggcggagaagcaattaaagatgcccttgcagaaatggatttattagaacttaaacaagagcttgaactaatcagttcaacaactaagtcaaagcagaaaagagaagatgctttaaaaagattaaaagtagttaaagattttgctcaagatagaaataataaacctgaatggatgattgtttcaatcttaccagtcatgccacctgagctaagacctttagttccacttgagggtggaaggtttgcagccagtgatttaaacgatttatatcgaagaattattattagaaataacagattaaagcagctaatggacatacaagctccagaagttattcttagaaatgaaaaaagaatgttacaagagtctgttgatgcactttttgataacacaaagcgtaaaacagcaattagaagtggatctaaaagacctttaaaatctatttcagatatgcttagaggaaagcaaggtagatttagacagaatcttctaggaaagagagttgattattcaggaagatcagtaattgttgtcggtcctgaacttagaatgacagagtgtggtattcctaaaaatatggcattagaattatttaaacctcacttaataagagaattaattaggagagatttagctgctactccaagaagtgccaaactaatgattgaaaataaagaatcatttgtttatgaaattttggaaaatgttgtaaaagatcacccagtattattaaatcgtgctcctacgcttcataggttaggtattattgcctttcagccagtccttattgatggtaaagctattcgtgttcatcctcttgtttgttcggcgtttaatgctgactttgatggtgaccaaatggctgttcatgttccactttcaataccttctcagttagaagctagagtgttgatgatggctagtcaaaatgttttacacccagctagtggaaaaccaatcacattaccatcacaagatatgattttaggttgttactatttaaccagagataaaaaaggtcaagttggtgaaggaatgtcttttggttcaatagatgaagtaaaaatagctcatgataacggtagagttgcaatgcatgcagtaattaatgtaagacacaaaggtgaatggcataaaaatacaactgctggtagagcaatatttaattcaattattccagacgaactgggctattatgatgaaattatttcaaagaaaaaacttagttttatcattggcgaatcatttgtgaaagcaggaaatcaacgtactgttcagttgttagatgatcttaaagatattggttttaaaacagcaacaatgagtggtgtatcaatttctataagcgatgtaattattcctgatgcaaagcatgaaataattgacagagctgaaaaggaagttgataaaattcaacaacgttttgatagacatgttttaacagaaggtgaaagatacaataaagttatagatgtttggactaaagctactagtgatgtggctgatgttatgatggatggattaagaaccgatgatcaaggttttaatgcactttatatttcttcagactctggagcaagaggaagtggtgaccaaattaagcagttagcaggtatgagaggattaatggctaagccaagaaaatcaatgattggtggaggggaaattattgaaagccctattcaatcaaactttaaagaaggtctttctgtgatggagtactttatttctactcacggtgctagaaagggcttagctgatacagctttaaaaactgctgatgctggatacttgactagaagattagttgatgttgctcaagatgtaactatttacgaagatgattgtaaaactattaatggtatcacagtttcagacctaaaagaaggtgaagaaattgttgaatctcttggtgaacgtattttaggaagaacctcttctgaaaaaattgttattgatggagaagttattgtaaagcctggagatattttcgatgaaaagttagctgatctaatagttgaaaataattttaatagcgtaaaaataagatctattctgacttgcgaatcaagaaggggtgtttgtgccaagtgttatggttgggatttgacaagaagaaagcttgttactaaaggtacagctgtaggtattatagctgctcaaagtattggtgagcctggaacacagttaacattaagaacattccacattggtggtaccgctactcgtattgcggaagaatctgacaaaaaatctagatttaatggaacagctaaatttagtagtgattatgaaccagctgaaactttagatgaagatggatttaatgttgttagatgtttatctaggagttcaaaactctcaattgttgatactaaaaataatgttttagacgaattaaatgttccttatggcgctaatgttaatgtaaaagaaggtgctaaggtaaagaaaggtatgacactattttcttgggatccttacactgacttaattcttgctaggcaatcaggtgttataaaaatgaaagactttatagagggagatacttatcaagaagaagctgtagacggaggtaaaaaacagaaagttgttactgagtcaaagga

SEQ ID NO: 255918 - DNA, 573 bp, Unknown
  Bacterial polypeptide expressing nucleotide sequence isolated from the Sargasso Sea
tatgcaaacatcagtaatagacttattagtaccaactgaaatacaggttgatgacgtatcaccaaccttatcgaaaattacacttgagcccttagagcgaggttttggacatactctaggtaacgcattaagaagaatattactttcttctatgcctggtgctgcagtaacagatgtatcaattgacggaatctctcatgaatacagcactattgaaggaataagagaagatgtaatcaatatattacttaatattaaggatatgcctattaacttaatagagggcgacactgcagaggttacacttaatgtgacaggaccatgtgatgtgcttgcctcatcttttgatgttcctggaaatgttgagctagtaaatcaagattttcatatagctacaatagtagacaaagttaatcttaaaatgacattaactgttaatacaggaagaggttatgagcctgccgatttaagagaagatgaagacagagttgtaggtgctcttaaagtagatgcttctttcagtccagttaggagggtctcttatactgttgataacgcagaggtccggaaaaa

SEQ ID NO: 255919 - DNA, 982 bp, Unknown
  Bacterial polypeptide expressing nucleotide sequence isolated from the Sargasso Sea
tatgacagataattatgacatcataaaagactttttaactccaacggagatagtcgtagaagaatctggtccaaacagatctaaaatagttcttgaacctttagagcaaggttttggtcatactttaggaaacgctttgagaagaataatattgtcttcaatgccaggaacagctatttctgaagttaagatagacggagtgcttcacgagtacagcactattgaaggcgtacaagaggacgtcattgatattcttctaaacttgaaagatttatctataagactcacagaggttgaagatgctgagttaaccataaataaatcaggaaccggagttgtaaaagcaggagacattgagttacctaatggtgtagaggtaataaatccggatcaccatatagcaacattaaatgaagaaggttcattgagtatgactatgcgcgttactagaggaagaggttttgttccggtcaaagccttggctgaagaagaaggacaggaagccggacttttgaggcttgatgcaacttactcgcccattaatagagtcacttatcaggtggataatgcaagagtagagcaaagaactaatttagatagattaactgttgatatagatactgacggaactttagatgcggaagaaatattaagaatttctgcaaccatactacaacatcaattatcagctttcgctgagttgggacgactggaggaagtgattgaagagaaagaagaggcaaaaatcgatccaattatgttaaggccggttgatgaattggagttaactgttagatcagcaaattgtcttaaagctgaaaatattcactacataggtgacttagtaactagaatggaatccgatctgcttaggacccctaatttgggtaaaaaatctttaaatgaaattaaagaggttttgctttctagaggtttatctttagggttaatcttagataattggccacctgaaactaattag

SEQ ID NO: 255920 - DNA, 1492 bp, Unknown
  Bacterial polypeptide expressing nucleotide sequence isolated from the Sargasso Sea
atgaaaaacttacttaatatttttaatcagaaaccttttgcggaagagtttgatcacataaggattggtctttcttcaccagaaatgattcgatcatggtcctatggcgaggtaaaaaaacctgaaacgataaactacagaacttttaggccagaaagagatggactattctgtgcaaaaatatttggacctgtaaaagactacgaatgcctctgtggaaaatataagcgactaaaacatagaggtgtagtttgtgagaaatgtggagtagaggtaacccaaagcaaggttagaagagaaagaatgggtcatttagagctcgcaagcccagttgcacatatttggtttttgaaatcgcttccatcaagaattggtctattacttgatatgactctgagggagattgaaagagttctttactttgaagcttaccttgttacagatccaggaatgacagatcttactcaaggccaaatgctgtcagaagaacaatatatagaagcattagagatgtttggtgatgatttttctgcctcaatgggtgctgaagcaattcacgatattctcaaagatttagatcttaatgagaacctcaatcaaattcaagaagatatggaagcaactgcctctcagatcaaaattaagcgatatcaaaaaagactaaagcttatagagtcgctaatttcctctggaaatagacctgaatggatgattttaaaagttcttcctattttaccacccgacttgagaccactagttcctcttgatggaggaagatttgctacatcagatttaaatgatctatacagaagagtaatcaataggaataacagacttcagagattattggatctgaatgcaccagatatcattgtaagaaacgaaaagaggatgctacaaaaatctgttgatgcacttctagataatggaagaatggggagagcggttacaggctctaacaagagaccacttaagtctcttgcagatatgatcaaaggaaagcaaggtcgattcagacagaatttgttgggtaaaagggtcgattactctggtaggtctgtaattgttgtagggccaaccttaaagcttcatcagtgtggtattccaaagaagatggcattagagctattcaagccatttgtattcagcaagctcatttatcagggcgaggcgtcaacaatcaagtctgccaaaagacttgtagagcttgagggtgcagagatttgggatattttagatggcgttataaggcaacatccaatcctgctcaatcgtgcaccaacactacataggcttgggatacaagcttttgagcctgtattggttgaaggaaaggctattcagttacatcctcttgtatgtaaagcattcaatgctgattttgatggagatcagatggcagttcatgttccactatcgattgaggcacagctcgaaagcagggcactgatgatgtcatcaaataaatatactttcacctgcaaacggtgag

SEQ ID NO: 255921 - DNA, 886 bp, Unknown
  Bacterial polypeptide expressing nucleotide sequence isolated from the Sargasso Sea
attaagaagaatattactttcatcaattcaaggtgcaccctttacagctatacaaattgatggagttttgcatgaattttcatcaataaaaggagttagggaagatgtaacagacattgttcttaacgtaaaaaatctagctataaaattatcctcagagggacccaaaaaaataattctcgatgctgtaggacccaaggaagttaaagcaaaagatatatctttagtttcagatgttgaaattataaatccggatcaaacaatttgtaacttagacgaaaaaactaagtttcatatggagctgattgtaagtacagggagaggttatgttttagcccaaaaaaataaatctgaagaaacgccactaggaatgatcgcaatcgattctctatttagtcctgttaaaagagtttcttataaaatagacacgaccagagaaggagcggcattagattacgataagcttgttatggaagtagaaacaaatggaactgttccagccgaggactcagtagcctttgctgcaagaatttttcaagatcaactctcaatgtttgtaaattttgaggatcctaaagaagtgcctaaacaaaaaactcctatagagcctgaatttaataaaaatcttcttaagaaagtcgaggaacttgaactttctgtaaggtcaatgaattgtctaaaaaatgataatattatttatatcggtgatcttgttcaaaaaaccgagcctgaaatgcttagaactccaaacttcggaagaaagtctttgaatgaaattaaagaagtattaagttcgatgtctttatatcttggcatggaaatacctaactggccccctgacaatattgcagagttatcaaaaaaattagaagaaagcacatattaa

SEQ ID NO: 255922 - DNA, 956 bp, Unknown
  Bacterial polypeptide expressing nucleotide sequence isolated from the Sargasso Sea
tatgaaaaaagaactaactgacctttttaaaaattcagaaattgctgaggctcaaaattttaatagcatcaaaatttcattagcaagtcctgaaaaaataaaatcatggacttatggagaaataaaaaaacctgaaacaattaattacagaacttttagaccagaaaaagatggtcttttttgtgcaagaatatttggtcctatcaaagattacgaatgtctttgtggtaaatacaaaagaatgaaatttagaggtatcatttgtgaaaaatgtggtgttgaagtaactaaatcaaatgttcgtagagaaagaatgggacatattaatttagctacaccagttgctcacatatggttcttgaaatctttaccaagtagaatttctttagcaatagatatgaaattaaaagaagttgaaagagtattatattttgaaaacttcatagtaatagaacctggtttaaccggattaaaaaaaaatcaattattaaatgaagatgaattaatcaaatatcaagatgaacacggagaggaagcttttactgctggtataggagcagaagctattttagaaattctaaagtcaataaatttagaagaagaaagacaatctttaataaaagctataaatgaaacaaaatctaaagtttctgaagaaagatctatcaaaagattaaaattaatagagtcatttatagatacaggaaataaacctgagtggatgatattaacaactataccagttattccacctgaattgagaccattagttccattagatggaggtagatttgccacttcagatcttaatgatttatatcgaagagttataaataggaataatagattaaaacgattaatggatttaaaggctccagacattatagttagaaatgaaaaaagaatgtgcaagagtcagtcgatgctctatttgataacggtcgaagaggtagagt

SEQ ID NO: 255923 - DNA, 1256 bp, Unknown
  Bacterial polypeptide expressing nucleotide sequence isolated from the Sargasso Sea
tgaagcagttagagaaattcttttaaatcttgatcttttaaaagagcaaaaaaaattaagagactcattaaaggaaattaaatctaaagttactgaagaaagaacaataaaaagattaaaactaattgaatcttttatttcctcgggaaataaacctgagtggatgatattaacgactgttcccgtaataccaccggaacttagaccattagtacctttggatggtggtagatttgctacatcagatttaaatgatttatacagaagggttattaatagaaataatagattgaaaaggcttttagatttaaaagctccagacattatagttagaaatgagaaacgaatgcttcaagagtcagtcgatgcactctttgacaatgggagaagaggtagggttataactggaacgggtaaaagaccattaaaatctcttgctgaaatgcttaaaggaaaacaaggtagatttagacaaaatcttctagggaagagagttgattattctggaagatctgtaattgttgttggtccagaactcaagctacatcaatgtggactgccaaaaaaaatggctttagaattgtttaagccatttttatatgcaagattggataaattaggattagcaacaacaatcaaacaagcaaaaagattagtcgaaaaagaaaaaagtgaagtttgggatgccttagagcatattatcagagaacatcctgtaatattaaatagagctccaacattacatagattaggtgtccaagcatttgaagcaaaacttattgaaggaaatgcaattgaattacacccattagtttgtgcagcttttaatgcagattttgatggtgatcaaatggctgttcatattccattaagtttagaggcacaattggagtctagagtattaatgatgtctacaaataatattttaagtccatcgaatggaaaaccaataattgtacctagccaagatattgttttaggtatttattatctttcccagtcttctaaagaaaaagatgctaaacctaagggtattttttctaatataaatgaaattgaacaagctcttgaaaataaagatataagtttacatactaaaattatttctacttttgactcaattgatgaaaatggtaaaaaagcttctgttaagtacacaagtacagccggtagatttttattagcgaatttacttccaaaaaataaaaatattaaatttactttggtcgataggctcttgactaaaaaaaatgttt

SEQ ID NO: 255924 - DNA, 325 bp, Unknown
  Bacterial polypeptide expressing nucleotide sequence isolated from the Sargasso Sea
aatgcaaacacccaactcaaatatagataaaaactggaaatcattaattaaaccaaataaacttgaaataataagtagtgacgataaatcaacagcaaaagtaattgcccaaccgcttgaaaaaggatttggccaaactattggtaattctttaagaagaatattattatcatcaattcaaggtgcagcagtaacagccattcagatagacggtgttttacatgaattttcttcaataaaaggtgttagagaagatgtaactgatatagttttaaatgtaaaaaacttagctatcaagtcaagtgttaatgctgttaaaaaaata

SEQ ID NO: 255925 - DNA, 1030 bp, Unknown
  Bacterial polypeptide expressing nucleotide sequence isolated from the Sargasso Sea
atggaaacttcaagcgtaaatattaaaaattggaagtcacttattaaacctggaaaattagatattcaactaagcgatgataaatcttttgccaaaatcatagctgaaccattagaaaaaggttatggtttaactttaggaaactcattaagaagaatacttttatcatctataagaggaactgcagtcacagcaatacaaatagacggagtgcttcatgaattttcttcgattaaaggcgttagagaagatgtaactgatatagttttaaatataaaatcactagctttaaaaagtaatatagaaagttctaaaaaacttattttagacgcaaagggacctggtgaaataaaagcagcagacataacatctgttgcagatatagaaatattaaacccagaattagtgatttgtaatttagacgaaaaaactcattttcatatggaaatgactgttggtaatggcaaaggatatgttcctgcagacatgaacaagcctgaagaaccacctcttgggctaattccaatagactcattgtttagtccagtaaaaaaagtttcttactcaatcagtactgcgagagaagggaaagctttagattatgataaacttacgatggaagtggaaactaatggctcaatatctgctgaggatgcggtagcttattctgcaagaatttttcaagatcaattaggaatgtttgttaactttgatgagcctcaggaggtagcaattagagaaaaaccttcagagcctgaattcaataaaaatttattaagaaaggttgatgaactagaactttcggtaagatcaatgaactgcttaaaaaatgataatattatatatattggtgatcttgttcaaaaatcagaaggtgaaatgttaagaacacctaattttggtagaaaatcactaaatgaaattaaagaggtattaaatacgatgtctctttatttaggaatggaaattccaaactggccaccagacaatattgcagaattgtcaaaaaaacttgaagagtcgatataat

SEQ ID NO: 255926 - DNA, 318 bp, Unknown
  Bacterial polypeptide expressing nucleotide sequence isolated from the Sargasso Sea
aatggaaagtactgaagtaaatccaaaaaattggaaaacattaatcaaaccagcaaagcttgatgtacaattaagtgatgataaatctcacgctaagattacagctgaacctttagaaaaaggttatggattgacacttggtaattctttgagaaggattttactttcttcaattagaggaactgctgtaaccgcaattcaaatagatggtgttttacatgaatttacatctattaaaggtgtaagagaagatgtaaacgatatagttttgaatgttaaatcacttgccttaaaaagtagttctgatgcacaaaaaaa

SEQ ID NO: 255927 - DNA, 1872 bp, Unknown
  Bacterial polypeptide expressing nucleotide sequence isolated from the Sargasso Sea
aattatatcagggcctcaattaaaattgagtgaatgtggtcttccaaaaaaaatggcattagaacttttcaaaccttttgtgatgaattcattagtagtaaaaggctatgcacacaacattaaatctgcgaaaagattagctgaaaaatctcagcctgaaatttgggacattctggaagaagtaattaaagatcatccagtgcttctaaacagagcacctactttacacaggctaggcattcaagcttttcaacctgtgctagttgaagggtctgccattcaacttcatcctttggtatgtactgctttcaatgcagattttgatggagaccaaatggctgttcatgttcctctttctagagaatctgtacttgaggcaaaaaaaatcatgctatcaactaataacatgctagctccaagatcaggagaaccaatcgtagctcctaacctagatatggttctaggaatttattatcttacaggagttgaggatgaagctaaagataaaaaaatgagctttaattctaaagaatctgccatatttgcttatgaaacagaaacattaggtcttagagagctaattactgttaagttagatggtgagttcattgaaacaactattggaagaatactttggaatgatattattcctgaggaattaggatttagaaatatgcaatttactaaatcttcaatagaagacttggtgtctgaatgctatgggtcatttggaaaagatataacaacagtggtacttgatgatataaaagatatcggatttaagtttgctactcaatctggcacaactattgctatcaaagatattgttacacctccacaaaaacaatctttgctttcatcagcagaccaaaagattagaaagcttgatgaacaatacatggaaggaatgataaccgaagttgaaagatatcaaagctcaataagtgtgtgggaagatgtttctaaaaaaatggaaactgctgtttcagactctttgccaaattatgcaggtatttattcaatggctgactctggagccaaaggaaacttagctcagattaaacaaatggctggaatgagaggcttgatgtcagatcctaaaggaagaattattgaattacctattagatcgtcattcgcagaaggcctaagtgttatggaatatttcatatcaactcacggtgcaagaaaaggtttggctgatacagcgcttagaactgcagactccggttacctaactagaaggttagcggatgtagctcaagatcttattataaataaagaagaagatgaaggtgcagtaggaataaaaatagtaaaagatactgatggtatgggaagtaccttagctgacagaatagttagtagattcccatctatgccagtaacacatcctgacacaggagaagtgatgtgtgacacagatactataatcagtcctaaaatagcaaaggaaattgaagaagcagggattgaagaggtatggtgttattcaccgctttcatcaaatgctaaaaaaggaatttctcaaaagagctatggagcttcattggctacaggtaaaactgcaatgatgggagaagctgtagggattattgctgctcaatccatcggagaacctggaacacagctaactatgagaacgtttcacacaggtggtattgctggatctgatattacttctggtcttccaagagtaattgaactttttgaagcaagaatacctaaaggagtttctattctttctgaaatttcaggaatagtaaaacttggaaatgttggtgaattaagaattgttagaatttcgaatactgaaaaaaattctattaccacagaaattccagaaactcacagagcaattgtaaaatcagg

SEQ ID NO: 255928 - DNA, 982 bp, Unknown
  Bacterial polypeptide expressing nucleotide sequence isolated from the Sargasso Sea
atgacagataattacgatattattaaagattttttaacaccaacagaaatagttgttgaagaatctggtcctaccaggtctaaaatagttcttgagcctcttgaacaaggttttggtcatactttaggaaatgcacttagaaggattatcttatcttctatgccaggaacagcagtttctgaagttaagatagatggtgttttacatgaatatagtactatcgagggtgttcaagaagatgtcattgatattttgctaaatttaaaagacttatctgtaagactaacagaggtagaagatgccgagttaacagttagtaagtctggaagtggaactgtcactgcggccgacattgagttgcctactggagtagaaattatcaatccggatcatcatattgcaactttaaatgatgaaggttcaataaacatgaccatgagagttactagaggaagaggttttgtaccagttagacctttagatgaagatgaaggtcaagagacaggacttctaagactggatgcaacttactctcctatcaaacgtgttacttatcaagttgataatgctagggttgaacaaaggacaaatttagacagacttacagtagatatagatactgacggaactttagaggctgaagagattttaagaatttctgctaccatccttcaacatcaattatctgctttcgctgaattaggaaggctcgaagaagtaattgaagagaaagaagaagctaaaattgatccaataatgcttcgacctgttgatgagcttgaacttactgtaagatcagctaattgcttaaaagcagaaaatattcactatatcggagatttagtaaccagaatggaatctgatctattgagaacaccaaatctgggtaaaaaatctttaaatgaaataaaagaagtacttttgtctagaggtctttccttaggtttaatactagataactggccacctgaaaataattaag

SEQ ID NO: 255929 - DNA, 1364 bp, Unknown
  Bacterial polypeptide expressing nucleotide sequence isolated from the Sargasso Sea
catgcaagatatcatcaaaaatataaataaaacttcaagaaggaactttgatcttatttcttgtggtcttgcttcacctcagatgatcagatcatggtcatggggagaagtcaaaaaaccagaaactattaattacagaaccttcaaacctgaaagagacggcttattttgttcaagaatttttggtcctattaaagattttgaatgtctttgtggaaaatataaaagaagaaaacatagaggagtaatttgtgagaaatgtggtgtcgaagtaacagccactaaagttagaagagaaaggatggggcatattgaattagcctctcctgttgcacatatttggtttctaaaatcactcccttcaagaataggcttattccttgacatgactctaagggaaatcgaaagagttctttattatgaaagttttgtagttgttgaagctggcattactgatcttactaaagggcaacttttaacagaggatgaatattatgaagcactagacgaatatgatgatgattttactgcgctgatgggagcagaagctatacagatattattaaatgaagttgatttagaaaaagaacttcaaataattaaagaagaattaaatactagtggttctgagacaaaaattaagaaacttcaaaaaagattaaaactaatagaagcttttaaagaaagcggacaaaaaccagagtggatgattatgaatgttcttccagtcttgcctcctgatttaagaccattagtgccattagatggaggaaggttcgcaacatctgatttaaatgatttatatagaagagttataaatagaaacaataggcttaagagattacttctcttaggtgctccagagattattgttagaaatgaaaagagaatgcttcaagagtcagtagatgctcttttagataatggtagaagaggaagagctatattaggcacaaacaaaagaccattaaaatctcttgcagatatgattaagggtaagcaaggaagatttaggcaaaacttactcggtaaaagagtagattattcaggtagatcggtagttgtttctggcccaacattaaaactacatcaatgtggattgccaaagaaaatggcactcgaattatttaagccatttatttttaataagttagagcagaaaggaataacaataacaattaaagctgcaaaacaattagttgaagaagagactcctgaagtatgggattgtttagatgaagttatcagagagcacccagttttactaaatagagctccaacgcttcataggcttggtattcaagcatttgaaccagtattgattgaaggtaaggctattcaattacaccctctagtttgtaccg

SEQ ID NO: 255930 - DNA, 1606 bp, Unknown
  Bacterial polypeptide expressing nucleotide sequence isolated from the Sargasso Sea
atgaatatttttagccaaaacctaggtgttcaaaactttaatagcctgaaaatttcaatagctagtccagatgatataagatcatggtcttttggagagataaaaaaaccagaaactattaattacagaacttttaaaccagaaaaagatgggttgttttgttcaagaatttttggacctgtaaaagattatgaatgtctatgtggaaaatataaaagaatgaagtttagaggaatcatttgtgaaaaatgtggagttgaagtgacattgtcaaaagtaagacgtgacagaatgggacacatcgagctagctgctccagtttctcacatttggtttatgaaatctctgccaagtagaattgccacattgctcgatatgacaattaaaaatttagagaaagtactttattttgaacaatttattgttgttgagccaggcttaacagatttaaaaaaaggcgatataatttctgaggatcaatatattgattatcaagacgaatatggcgaagattcatttagcgcagcaattggcgctgaagcaattgaacaaatgcttctcaatattgatcttgatgctgattttaatcaaacaaaaaacgatcttctagaaacaaaatcagaacttaaaaaaacaaagctaacgaaaagattgaaattattagaagcttttatactttcaaaaaacaaacctgaatggatgattttacgagtacttccagtaattccaccagaactaagaccattagtgcctctggatggtggaagatttgctactagtgatttaaatgatctttatagaagggttataaatagaaataatagattaaaaagattaattgatcttagagctcccgatattattataagaaatgaaaaaagaatgcttcaggaatctgtagacgctttatttgataacggaagaagaggaagagtaataacttctactaataaacgcccactaaaatctctgtctgatatgcttaaaggtaaacagggtagattcagacagaatcttttaggcaaaagagttgattactcaggaaggtcagtaattgtagttggtccaaatctaaaattacatcaatgcggtctcccaaaaaaaatggcattagagttatttaagccttttatttttaataagttagatatttatggatgggccaatactatcaaagctgccaaaaaattagttgaaaaagaagatccaagagtatgggatatacttgaggaggtaattagagaacacccagttctattgaatagagctcctactttacatagattaggtattcaagcttttgagccagttttaatagaaggaaaatcaatacaattgcacccactagtatgtactgcttttaatgcagattttgatggtgatcaaatggctgttcacgttccattaagtctcgaagctcaattagaggctcgagtcctaatgatgagtactaacaatatactttctccatccagtggaaaacctataattgtaccatctcaggatattgttttaggaatttactatttatcggttatgcgaaataatcaaaagggagaaggtagaaattttcttgatacaaacgaaatattaaaagcagttgatt

SEQ ID NO: 255931 - DNA, 4120 bp, Unknown
  Bacterial polypeptide expressing nucleotide sequence isolated from the Sargasso Sea
atgcaagacattatcaaaaatataaataaaagctcaagaagaaactttgaccttatctcttgtggactagcttcaccccaaatgattagatcctggtcctggggggaagttaaaaaaccagaaactatcaattacagaaccttcaaacccgaaagagatggcttattttgtgcaagaatttttggcccaataaaagatttcgaatgtctttgtggaaaatataaaagaagaaaacatagaggagtaatctgtgaaaaatgtggtgttgaagtaacggctactaaagtcagaagagaaaggatgggccatattgaattagcctctcctgttgcacatatatggttcctaaaatccctaccttcaagaataggtttattccttgacatgaccttgagagaaatcgaaagagttctttattatgaaagttttgtagttgttgaagctggaattactgatctcactaaaggacaactcctaacagaggatgaatattatgaagcgctagatgagtatgatgatgatttcaaagcattaatgggtgcagaagctatacagatattattgaatgaagttgacctagaaaaagagcttcaagtgatcaaagaagaattaaatactagtggctctgaaacaaaaattaagaaactccaaaaaagattaaagctaatagaagccttcaaggaaagcggacaaaagccagagtggatgatcatgaatgttcttccagtcttacctccagatttaaggcctctcgtaccattagatggtggaagattcgcaacatctgatctgaacgatctttatcgaagagtcattaatagaaacaatagattaaaaaggcttttacttttgggcgcacctgaaattattgtaagaaatgagaaaagaatgctccaagaatcagtagatgctcttctagataatggcagaagaggaagagctatattaggcactaataagagaccattaaaatctcttgcagacatgatcaaaggtaagcaaggaagatttagacaaaacttacttggaaaaagagtagattattcaggtagatcggtagttgtttcgggcccaacattgaaactgcatcaatgtggacttcctaagaaaatggcgcttgaattatttaaaccatttatcttcaataagttagagcaaaaaggaatcacaataacaattaaagctgcaaaacaattagttgaagaagaaactcctgaagtatgggattgtttggatgaagttattagagaacatccagtgttattaaatagagctccaactcttcataggttaggtatacaagcatttgaaccagtattaatcgaaggaaaggctattcagttacatcctctggtttgtactgcatttaatgccgactttgatggagatcaaatggctgttcatgtacctctgtctcttgaagcacagcttgaagcacgtgctttaatgatgtctacaaataatattttatctcctgctagtggagaaccaattattcaaccaaaccaagatgttgtcttaggaatatattatttgactaaagaagattttggtctaccaggagagggacgatcttttgttgacgtgcatgaggtaaaaagagccttcatagaaaaacaaataaatcttcatactaaaattaaagttagagttgcagaaggcgataataagaaaattcatgacactacggttggcagatgtcttctatatgaaatcatgcctaaaggtctagaattttcaaaagtgaacaaaaccctgaaaaagaaagatgttcttaatttaatatctcatgtttataaggattttggtcttaaagattctgttctttttgctgatcaattgatgtatttaggatttgaatattcaacaatatctggagcttctattggggtaaatgattttgaaataccagatgataaagaatccatcattaccaatgctgagaatgaagttcaaaatatagaacaacaatttgaatcaggacttctgactaaaggagaaaaatacaacaaaatcattgatatctggtctagaaccaatgagaaagtagctagttcaatgatggatgctttaggcgatcaaatcgatactgacaaagatggtaatgaaactgtaaccccttcatttaatagcgtatttatgtatgcagattcaggagctagaggatctccagcgcaaataaggcagttagctggaatgagaggcctaatgtcaaagccagatggaagtattattgaaagtgctattacatctaattttagagaaggtttatctatgcttgagtactttacttctactcatggtgcaagaaagggtctcgctgatacagctctaaaaactgcaaattcaggttacttaacaagacgtttggttgatgtatctcaggatgttgtaatcactacagaagattgtggtactgaagaaggcataacagttgaagcaatcatcgatggcgcatcagtaatacaaacaatatcagaaagaattttaggtagagtgctgcaagaagatattaagaaaggaaataaagtgctttttaaaaaagggcacctatttgatgaagagtctgcaatggagctccaaaattctggcattaagaaagtaaagataagatcacctataacttgcgaagcaagtcatggtttatgctcaaaatgttatggtcgtgatttagcaagaggacatttggtccatataggtgaagcagttggtgttgttgcagctcaatcaattggtgagcctggaacacagcttactatgagaacattccatattggtggtgctgcatctggttctgcggaagatgattcaataacaacactaagaggtggagtcatagtcttcggctcttctctaaaaactgttgagaagaagaatggcgaatttattgttgtatcaagaaatgcaaacttaacaattcaggatgaggatgaaaatttacttgagaaatattctgtaccttatggcgctgaaattctctatagtgataaatcaaaagtggagcccggcacattaatttctaaatgggatccactaacacttccaattatttctgaagcagaaggaacaatatctttcaatgatttaacagaagatataactatgaaagttgaagttgatgatttaacaggatcgacaacaaaagaagttatagatgtcaatgaaagacctgttaaaggtaaaacaatgactccaatgcttacggttctcgacgctaagaaaaaggttgtcggatcgtattctatgccttctaaatcaattttgatgaagaataatggcaacaaagttacaaaaggggaattcttagcaagagttcctgtagagggtacaaaaacaaaagatataacaggtggtctacctagagttgcagatttatttgaagcaagaaaacctaaagatggtgcaatttatgcagagacttcaggaacactttcatatggcaaagaaacaaaaggcagaaaaagattagttataacgcctaagaaaggtgatccagttgaaatgatgatccagaaatatagagctgtttcttttctagaaggtgaccatgtagaaagaggagatattctatgtcatgggcctgtagatacacatagtcttttagctttacatggagtcgaagaattagctaaacatctaattgcagaggtgcaagatgtttataggcttcaaggtgtagtaattaatgataagcatattgaaacaatatgcagacaaatgatgaagaaagttactattactgattctggagatagtaattacattgaaggtgatatagctgatctcggtcaagtaagagcagcaaacaagaatcttgaatcttcaggtaagaagccagctgttttcgataggatgcttttagggataaccaaagcggcattatcaacagattcatttatttctgctgcttctttccaagagacaacaagagtcttgactgaagctgcggttacaagcagaaaagatatcttgaaaggtttaaaagaaaatgttgttgtaggtaggttaatacctgctggtacaggttttgcagctaatcagagagcaagtgtttcctctgaagaaatacaagatatagaagaagcactgaaaaaagaactactggaaagctttcagtaag

SEQ ID NO: 255932 - DNA, 1033 bp, Unknown
  Bacterial polypeptide expressing nucleotide sequence isolated from the Sargasso Sea
atggaaaacattaatattatagataaaaattggaaatcattaattaaaccttcaaaacttgcagttacaagtaatgatgataaatctatagcaacagtaattgcagaaccccttgaaaaaggttttggtcaaacaattggaaatgcacttagaagaatattgctttcatcaatacaaggtgccgcagttacggcaattcaaattgatggtgtacttcatgagttttcttcaattaaaggtgtaagagaagatgttactgatattgttttaaatgtaaaaaatttagctgttaaacttaacgcttcaggttcaaaaaaattagtattggatgcaacaggacctaaagaagttaaggcaaaagatattacatcagtcaatggtgttgaaattttaaatcttgatcaaacaatatgtaatttagatgaaaatacaaaatttcatatggaatttattgttaatagtggaaggggatatgtattagcccaaaaaaataaaacagacgatacaccattaggactaattgcaattgactcgctttttagtcccgttaaaaaagtttcttacacaatcgacagtacaagagaaggtgacgctttagattatgataaacttacaatgcaagtagaaacaaatgggacaataccagcagaagatgcagttgcatttgctgcaagaatatttcaggatcaactatcaatgtttgttaattttgaagatccaaaagaaattccaactcaaataaaatcaactgaaccagaatttaataaaaacttactcaaaagagttgaggaattggaattgtcagttagatcaatgaattgtttaaagaacgataatataatttatattggggatcttgtacaaaaatcagaatcagaaatgttaagaacaccaaactttggaagaaaatcactcaatgaaattaaggaagttttgagttcaatgtcattatatttaggcatggaaataccaaactggccgccagataatattgttgaattgtcaaaaaaactagaagaaagtacatattaaa

SEQ ID NO: 255933 - DNA, 924 bp, Unknown
  Bacterial polypeptide expressing nucleotide sequence isolated from the Sargasso Sea
agcccttggaaaaaggttatggattaactttaggaaactctttaagaagaattttattatcttcaataagaggtgctgctgtaacatctattcaaattgatggagttctacatgaatttacttcaataaaaggtgttagagaagatgttactgatatagttttaaacgtaaaatctttagcattaaaaagtaattcagaaggtacaaaaaaattaattttagatgcaaaagggcctggagaaataaaagcctcagatatagctccggttgcagatgttgaaattttaaatcctgatttagtaatttgtaatttagatgaaaatactacttttcatatggagatgaatgtcaatacaggtaaaggatatgttcctgcagagcttaataaacctgaagagccgccattaggtcttatagctattgactcgctttatagcccagttaaaaaagtttcatattcagtaagtactgctagagaaggtaaagcattagattatgataagttaattatggaagttgaaactaatggatcaatttctgctgaagatgctgtagcttattcagccagaattttccaagatcagcttaaaatgtttgtaaattttgacgagccagttgaagctcctgtaaaagaagtttctactgaacctgaatttaacaaaaacttactaagaaaagtagatgagttagagttatcagttagatcaatgaattgcttaaaaaatgataatattatttatattggtgatttagttcaaaaatctgaaggagaaatgttgagaacacctaattttggaagaaaatcattaaatgaaattaaagaagttttaacaggtatgtctttatatttaggaatggaaattcctaactggccaccagacaatattgcagaaatgtcgaagaaattggaggaagcaatttaat

SEQ ID NO: 255934 - DNA, 1504 bp, Unknown
  Bacterial polypeptide expressing nucleotide sequence isolated from the Sargasso Sea
atggaaaaaatttttgacgaattaagcataagtcttgctacatctgatcaaatgagaagttggtcttttggagaagtaaaaaaacctgaaacaataaattacagaactttaaaacctgaaaaagaaggcctttttgatgagagaatttttggtccaactaaggactgggaatgttcttgtggaagatataaaaggattcgatatagaggtattgtctgcgaaagatgcggtgttgaagttacaagacgtgaagttcgaagagaaagaatgggtcatatagagttagctgcaccagtaactcatatttggtacttcaaaggtgttccaagcagattaggttactttcttgacatgtcaccaaaagaattagaaaaagtaatttactttgcagcatatcttgttgtatcggtcgatgacaaaaagagaacaaaagatttatctgagattgaagaagctgttgaagcagaagtagaaattgtagaagaagagtttactgaatgggaagttaaaagacttaagcaaatgaaagttgagattaaggctatggaaaacgcaaaagttccagaggctgagatccagttaagaactaaagagattgaaaaagagatcaaacaaaagcaagcaaaatccgatgctgaaataaaagttatccaagaagcattttctaccttgaaaactttaaagccaaaaaccttaattgaaaatgatactctttggcgtgaaatgattgataaatatgatgagtattttacaggtggaatgggagctgaagcagttagagagcttgtccaattagtagatcttaaagctgaaatggaaaaacttaaaagtgatctagattcaaaatcagcacaacgtagacaaagagctatacaaagaatgaaagttataaaaccttttgctgacggaaaaaacccacctgaagcaatgattttagaagtgataccagttatacctccagagttgcgtccaatggttcaactagatggtggtagatttgctacttccgatctcaacgatttatatagaagattaattaatcgtaacaacagattaaaaaaattaattgaactgggtgccccagacataatcattagcaacgaaaaaagaatgctgcaagaatctgttgatgctctttttgataatggaagaagaggtagagcagtggcaggggcaggtggacgaggtctgaagtcactctctgatatgttgaaaggaaagcaaggaagatttagacaaaaccttcttggaaagagagttgattactctgcaaggtcagttattgtagttggtccgcatttagatttacaacaatgtggattgcctaaaatgatggcacttgagttattcaagccatttgttatgaaaaggctagttgaacttggtcttgcacaaaatattaaatctgcaaaaagaatggttgaaagatctcgtgctcaagtatgggatgtccttgcagaagtaattgaagagcacccggtattactaaacagagctcctactt

SEQ ID NO: 255935 - DNA, 637 bp, Unknown
  Bacterial polypeptide expressing nucleotide sequence isolated from the Sargasso Sea
cttgcatcttcatttgaggttcctggaactgtcgaattagttaatccagattttcatattgcgaccatagtagataaagttaatttaaagatgactcttactgttaaaacaggaagagggtatgagccagcagatttaagagacgatgaagatagagttattggagctttaaaagtagatgcttcattcagtccggtaagaagagtttcttatactgttgatagtgcaaggtttgaaaaaagaactgacttagataaattagtaattgagttagaaaccgacggaactcttgatccaaaactagctatagagcattctgctactattcttcagcaacagctaagtgcttttgttgatttagatgctattgctgaacaagaagctaaaaaggatcaaaatgacttcgatcctatattattaagatctattgaagagcttgagttaacagtaagatcaacaaactgtcttaaagctgagagtattttcttaattggagatttaatccatagatctgagtttgacttattaaagaccccgaaccttggtaaaaaatctttaaatgaaattaaagatgtattggcatctaaagatctttctttgggtatgaatgtagaaaactggccaccagtaggataaa

SEQ ID NO: 255936 - DNA, 4252 bp, Unknown
  Bacterial polypeptide expressing nucleotide sequence isolated from the Sargasso Sea
tatgagtaaagaattagcagatctttttaaaaattctgagatttcagaggcgcaaaattttaatagcataaagatctctttagcaagtcctgaaaaaattaaatcgtggacatacggggagattaagaagcctgaaacaattaactatcgaacttttagacctgaaaaagatggtttgttctgtgcaagaatatttggacctattaaagattacgaatgcttatgtggaaaatataagcgaatgaagtttagaggtataatttgtgaaaaatgtggagttgaagttacgaaatcaaatgttcgaagagaaagaatgggtcatataaatttagcaacaccagttgcccatatttggtttttaaaatctttaccaagtagaatagctttagctgtggatatgaagttgaaagaaattgaacgtgtattgtattttgaaaattttattgtaattgaacctggtttaacaggattaaaaagaaatcaacttttaaatgaagaagaattagcaagatatcaagatgaatttggagaagaagcatttacagctggaattggagctgaggcagtgcttgaaatgttaaaaaatttagacttagaattagaaagaaaaaatttgattaattacataaaagaaacaaaatcgaaagttaatgaagaaagagctatcaaaaggttaaaactaatagagtcatttatcgaaacaggtcaaaaacctgaatggatgataatgactgttgttccagtaattccacctgaattaagaccattagttcctttggatggaggaagatttgctacttctgatttaaatgatctttatagaagagtaataaacagaaacaacagattgaaaaggttattggagcttaatgcgcctgacatcattgttagaaatgaaaaaagaatgcttcaagaatcagttgatgcgcttctagataatggaagaagaggaagagtaataacaggaaccaataaaagacctctcaagtctcttgctgacatgattaagggtaagggtggaagatttagacaaaatcttcttggaaagcgtgttgattattcaggaagatcagtaattgtatctggaccaaatcttaaacttcatcaatgtggacttccaaaaaaaatggcattggagctattcaagccatttgtctatggaaggttggaacataaagagctagcaacaacaatcaaagctgcaaaaagactcgttgaaagagagacaccagaggtttgggaggctcttgaagaggttatcagagagcatccagttcttttaaatagagctccaacattgcatcgtcttggtatacaggcatttgaacccctattaattgagggtaaggctatacaacttcatccattggtatgtgttgcatataatgctgattttgatggtgaccaaatggctgttcatgttccattaacagttgaagcccaacttgaagcaagagcattaatgatgtccaccaataatattctttctcctgctgatggagccccaattattaatccaactcaggatgtagttcttggcctttattatatgacaagagagaaagtcaattctcatggtgaaggaagagtattctcaaatcctgacgaagtccaaagagcttttgaatctgagcaaatagatcttcatgcaaaaataaaagtaagaattgagaatgccgaaaaaggagtatttattgaagatactaccgttggaagaacccttatttggagaatcacaccaattgaggtcggattcgacaatgtaaacaaaaccttagataagaaagcagtttcgtcgcttattgatctttcctacagaaaagctggtttgaaaaagactgtaatttttgccgatcaattaatgtatcttggttttgacttctcaactagatcaggctcatcgattggtgtcgacgattttgttatacctgatgagaaatatgaaattgtagacaaggcagaggatgaggttaaagaaattgaaaaccaattctcgtctggacttgttacaagaggcgaaagatataacaaagtggttgatatatggtctagagcaaatgaaagagttgctaaagcaatgatggaaaaaatcagtaaagacagtgttgaggattctgagggtaatgaagttgaacaagcttcttttaattcagtatatatatacgctgattcaggagccagagggtcgcccgctcaaattaggcagctatcaggtatgagaggactaatgtcaaaaccagatggctcaattatagaaactcctattactgcaaacttcagagaaggtctttctgttcttcagtactttatctcaactcacggagctagaaagggtctggcagatactgcattaaaaactgcaaactcaggttatttaacaagaagactatgtgatgtttcaatggactcagttattacagaagatgattgcggcacagaagactcaattgaaatgtgtgcaatcattgatggtggtgaaattattcaagacctcactgacagaattcttggaagagttattgctgaacctatttttgacaatgaagggaatgagctttttccaagagatactttaattgatgaagatgcattacttaagatcgagccgttaaatctttctacgctgagagtaagatctccaatgacctgtgagtcaagttttggtgtatgtgctaaatgttatggaagagacttggcgagaggacatcttgttcatagaggtgaagctgttggtgttgttgccgcgcaatcaattggagagccaggtactcagctaactatgagaactttccatatcggaggagctgcttcaagctcatctgaagatgattcaataattagcagaaacgatggctctgtaattttttcagatgatatcaaaagcgttaagaataaagataaactagaagttgttatttcaagaaactcaactttatctatttctgataatcaaggaaagattgttgagcagtataagataccttatggttcaactttattagtcgctaataaagctaaagtagagcttggacaaaaaattgctacatgggatccatatactcgaccaataatctcagaagcttcaggtaaggttaaatttgctgacatagaagaaggtgtatcagttagagcttcaactgatgaattaactggattaagtagtatcgaagtcattgatggctctgagagaccttcagctggtaaggacttagttccgtcagtcagcctgacagatggtagaggtaagcaattaacacatcctgaaaataaccaaccatttacatatgctttgcctgcttcagcattactaaatcttgaagatggtcaaaaaataactgctggtgaagttattgcaaggataccacttgaaggatctaaaactaaagatatcacaggtggactaccaagagttgctgacttatttgaagctagaacaccaaaagatgcggctgttctcgcagaagagtcaggaatggtttcttttggtaaagaaactaaaggaaaagttagacttgttattactccagatggggcctctaaaaagtctcaaaatgtagagatgctaatacctaaacatagaacgctctcagtgtttgaaggtgagagagtagaaaagggtgacattgtcagtgatggtccttacagtccacatgatattttaagacttaaaggcataccttctcttacaaatttcatcgtaaatgaaattcaacaagtctatagacttcaaggagtttctataaatgataagcacattgaaactatcctcagacaaatgctcagaaaagcattaattgttgatggcggtgatacaaaattcattcaaggtgatcaagtagaatatgctgatttagttgaagccaataaaatgacagaatctaatgatcaaaatccagcaacatatgaaagagttttattgggaatcacaaaagcttcccttgcaacaaattcattcatatctgcagcatctttccaagagacaacaagagttcttacagaagcagctgttactggaaagaaagatggcctaagaggtctaaaagaaaatgttgttgttggaagacttatccctgctgggacaggtatggatttccatgacaagctaaaaactaaaacacctgattctgatgaatacactctctcctcagaagatcttgaagctgctcttagacaagagattcaagatactaatactaaggctgaagagcaatctgaaccagaatctgaaaaaccagttgacgacaacgaatga

SEQ ID NO: 255937 - DNA, 1033 bp, Unknown
  Bacterial polypeptide expressing nucleotide sequence isolated from the Sargasso Sea
atgtctgaaaatgaaatcttagatgagaccgttgaagtagaagaagttgagaaagaagaaattgtcttagatcttcttaatccaatggtcattaagttggagtcacaaaatgagctccactcaagagtatccatagaaccttttgaaagaggattcggatatacattgggtaatgcaataagaagagtactactctcgagtttaccgggttatgcgattacagaagctcaaattgatggtgttttacatgagtatacgaccatcgaaggcgttcaagaggacgtcgttgagattttattaaacctcaaaggtgttgccattaatattcatgatagggattctgctgattttgtaatcagtaagaaaggaccatgcacagtaaccgctggggacatccaagttgatggtgacactgaaatagtgaatcctgatcatcatatagcgaccataagctccaagaaagaactcaagatgcagatcaagattgaaaaggggacaggatatcgtccagttcctacgcaaagcaaagatgctgatgtaacaattgggcttctaaagcttgacgcatcatttagtccaataaaaacagttacatattcagttgaagctgcgagagtagagaatagaacggatttggataagcttattgttgatctagaaacagatggaacgatagatccagaaagagcgataaaatatgcaggcgcaatccttcaaaatcaactaagtatatttacaaatttgacgagagttcaagagcaaacgaaagaggaagaggaagttcttattgatccaatcatgcttagacctgtagatgagcttgaattaactgtaaggtctgcaaattgtctgaaagcagaaaatgccaactatatcggtgatctagttcagaaaaccgaagttgaattactccgtactccaaatttgggcaagaaatctcttaatgagatcaaggaagttcttgccagtcatggactatcacttggaatggagttagacaattggccgccaaaagaggcagttgtagactaat

SEQ ID NO: 255938 - DNA, 811 bp, Unknown
  Bacterial polypeptide expressing nucleotide sequence isolated from the Sargasso Sea
aatggatgcaactgaggtaaatataaaaaattggaaatcactaattaaaccacctaagcttgatattaatttgagcgatgacaaatcttatgcaaagataatagccgaaccccttgaaaaaggttatggtttaacattaggaaattcattaagaagaatactactatcatctataagaggtaccgcagtaacagcgattcaaattgatggagtattacacgaatttacgtctattaaaggtgttagagaagatgtaactgatattgtattaaatgtaaaatcacttgctttaaaaagtaactcagaaactactaataagcttatcttagatgcaaaaggacctggtgaaatcaaagcttcaaatattacaacttctgcagatattgaaatattaaacccggatttagttatttgtaatttagatgaaaatacaaattttcacatggaaatgacagtgagtaatggaaagggttatgtttctgcagatatgaacaagcctgaggaaccaccgttaggtctaatagcaatagattcactttttagcccagtaaaaaaagtctcgtattcaataagtactgcaagggaaggtaaagccttagattatgacaaacttacaatggaagtagaaacaaacggatcaatttctgcggaagatgcagtggcttattcagctagaatattccaagatcaacttggaatgtttgttaattttgatgaaccacaagaagttattgtaagagagcaaccaacagaacctgaatttaataaaaatttattaagaaaagtagatgagctggaattatcagttaga

SEQ ID NO: 255939 - DNA, 1460 bp, Unknown
  Bacterial polypeptide expressing nucleotide sequence isolated from the Sargasso Sea
tatgagtattgaatatgttcaactccaactagcttctccaactgaaattaaacgttggtcacaacgaatgttaccaactggtgaattagttggagaaattagtaaagctgacacgattaactatcgaacatttaaacctgaacgtggtggattattttgtgagcgtatttttggttcaacagtaaaccgtgaatgttcgtgtggaaaaacaaaacgtcgaaaattaattgctccattaaattataatcgccttaaattacaacctactaattctcaagcaacaaatgtgcaagatgtaattgaggtttgtccggcatgtggtgtggagccaactaattcaaaagttcgtcgttatcgtatgggatgtatttcgttaaagaaaccagttgcccatatgtggtatttcagaaataatccaaatgtgttagctagtattttgaatatgcgaagtcaagaaattgacgaaactgttcatttccagacttatactgcatctaagcctggtacacaaaactattgtttgcacggaggtgttcaatggtttgtaaaccattgggaaccaatgcatccctattttgcaggagaattagatcctttaacagatactgctgcgccttggaatggtagtaaagcagttatgccatcacaaattaaaacaattgaaaattgtggtgctgaggctttacaagagcttttaacacgtattgatttagcctttttacaacgtatgctcgctcgtaaattaaaaaatgcaattgagcgaaaaaaattagcttcaaaatcattacgaaagcaacacaaacgacgtaaaaaagcaaaattacttgggcgttctgatcaaaaaaattatggtattactgttaaagtcaaaacctatgctcgacgtttggaatttgttcgttcattagctcgtaaaggtctacgcccagaatggatggtgctatctgtttttccagtattacctcctgatttacgaccaatgatccaaatgtcaagtggccgatttgcaacttcagatttaaatgatttatatcgtcgtttaatttaccgtaaaattcgattcgaaaaatttttaagcttatttgacgaagaatttttaccagatttattaattcgacatgatttatgcttattacaagaagctgcagattcgattattgataatggtcgattagaaaaaccagcccaacgaccaaaccgtaaaccttttaaatctctaacttcaattattgaaggtaaacacgggcgtttccgtcaaaatttattagggaagcgtgtcgactattctgggcgttcagtaattgtagttggaccaaaattacgattacaccaatgcggtttaccacgggaaatggctttagaattattccaaccatttgttattcgtgctttattagaagagtctggtgttaaaaatattcgtgcagcaaaaaatcttttacagcgccgaccacaaatgg

SEQ ID NO: 255940 - DNA, 991 bp, Unknown
  Bacterial polypeptide expressing nucleotide sequence isolated from the Sargasso Sea
aatgaatacaacagatgtaaatattaaaaattggaaatcactaattaaaccaccaaaacttgatgttaatctaagtgatgataaatcatatgctaaaatcgttgctgaacctctagaaaaaggctatggattaactttaggaaattctttaagaagaatacttctttcatcaatcagaggaacggctgtaacagcaattcaaatagatggtgtgctacatgaattcacctctattaaaggtgttagagaagacgtaaccgatattgttttaaatgttaaatcacttgcactaaaaagtaattcagaaacaactaataaactgatattagacgcccaaggaccaggagaaataaaagcttctaatatcaaaacttctgccgatattgaaattttaaatccagatttggtaatttgtaatttagatgagaatacaaatttccatatggaaatgacagtaagtaatgggaagggatatgtgtcagcagatatgaacaaaccagaagagccacctttaggacttatagccatagattcattatttagccctgtaaaaaaggtttcttattcaataagcactgcgagagaaggtaaagctttagattacgacaagttaactatggaagttgaaacaaatggatccatatcagcagaggatgcattagcttattctgcaagaatattccaagatcagcttggtatgtttgttaattttgatgaaccacaagaggtaatagtaagagaacaacccacagaaccagaatttaataaaaatttattaagaaaagtagatgaacttgaattatcagtcagatctatgaattgtttaaaaaatgataatataatttatattggtgatttagttcagaaatcagaaggagaaatgttaagaacgccaaattttggaagaaagtcattaaatgaaataaaagaggttttaactggaatgtctttatatctcggaatggaaataccaaattggcctccaagataa

SEQ ID NO: 255941 - DNA, 1026 bp, Unknown
  Bacterial polypeptide expressing nucleotide sequence isolated from the Sargasso Sea
tatgtctgaaaatgaaaatgaaatcttagaagagatcattgaagaggaagaagtggaaaaagaagaaattgtcttagaccttctgaatccaatggtcattaagttggagtctcagaatgagctccattcaagagtatcaatagagccttttgaaagaggttttggctatacactaggtaatgcgatcagaagagtgctgctatctagcctcccaggttatgcaattacggaagctcagatagatggtgtattgcatgagtatactacgattgaaggcgttcaagaggatgtcgttgagatcttattaaacctcaaaggtgttgccatcaatattcatgatagagattcagccgattttgtgattagcaaaaaaggaccatgtaaagtgactgctggagatattcaggtcgatggagatacagagattgtaaatcctgatcatcatattgcaacgattagctcaaagaaagaattaaaaatgcaaattaagattgagaaagggacaggatatcgcccagtccctacacaaagcaaagatgctgatgtaacaattggtttgttaaagctagatgcatcatttagtccaattaaaacagttacatattcagtcgaagctgcgagagtagaaaatagaactgatttggacaaacttattgttgatttagaaacagatggaacaatagatccagaaagggcaattaaatatgcgggcgctatccttcaaaaccagctcagtatatttacaaatttgacaagagtacaagaacagaagaaagaagaagaggaagttcttatagatccaattatgctcagacctgtggatgagcttgagttgactgtaaggtctgcaaattgtctgaaagcagaaaatgctaactatatcggtgatcttgttcaaaaaactgaagttgaattactgcgtactccaaacttaggtaagaaatctcttaatgagattaaggaagtccttgctagtcatggactatctcttggaatggagttagagaactggccgccaaaagaggc

SEQ ID NO: 255942 - DNA, 313 bp, Unknown
  Bacterial polypeptide expressing nucleotide sequence isolated from the Sargasso Sea
atgcaaacatcagtaatagatcttttagtaccaactgaaatacaagtagatgatatatcaccaaacttgtcgaaagtaactcttgagccacttgagagaggttttggccatacgcttggtaatgcattaagaagaattttattgtcatcaatgcctggagcagctgtgacagatgtagtaatagatggaatatctcatgaatatagtacaatcgaaggaattagagaggatgtaatagatattcttttaaacattaaagatatgccagttaacttaatcgaaggcaatacagctgaaatttcacttgatatta

SEQ ID NO: 255943 - DNA, 1675 bp, Unknown
  Bacterial polypeptide expressing nucleotide sequence isolated from the Sargasso Sea
ccagagctaagacccttagtgccactagacggaggtagatttgccacttcagatctaaatgatttatatagaagagtaattaatagaaataatagactgaaaagattaatggatctaaaagctccagatataatcgtcagaaatgaaaagagaatgttgcaagaatctgtcgatgcactctttgataatggtagaagaggaagagtaattacaggaactggaaaacgtccactaaaatctttagctgaaatgcttaaaggtaaacaaggaagatttagacagaatcttttaggaaaaagagtagattattcaggaaggtcagtgatagtagtcggtccagatcttaaacttcatgaatgtggtttgccaaaaaaaatggcccttgaattattcaaaccttttttatatgcgagacttaacaaactcggtttagcgtctacaattaaacaagctaagaaactagttgaaaaagaaactaatgctgtttgggatgctttagaagtaattgtaagggagcatcctgttatactaaatagggcgccaacgcttcataggttaggtgttcaagcctttgaacctaaactgatagagggagatgcaattgaattacatcctctaacttgtgccgcgtttaatgctgattttgacggagaccaaatggcagtacacattccattaagtttagaagctcaattagaggctagagttttaatgatgtctacaaataatattttaagcccatcaaatggtaaaccaattatagttccgagccaagatatgatacttggaatttattatttatctcttccaccttatcaggagaagaaaatcgaaggttattttgtaaataattctgaaattgagcaaggtttagagtctggaaaaataaaaatacactcaaggattatatctagatttgaaactattgatgaaaaaggaagtcaaatctttgaaaaacatactagcactgccggtagatttttgttggcaaatcttttaccaaaaaataaagatataaaattttctttaattgacagagttttacctaaaaaagttgtttcagaaataattgattttgttttcagatacacaggtcaaaaaagtactgtgattttctgtgataaattaaaagacttaggatttaagcatgcttttaaagcaggtatttcttttggaaaagatgatctcattatacctcaaaataaagaacagctaatcgatgaaactaaacaattaataaaagattatgaaaaccaatattctgaaggtttaattacaagaggtgaaaagtacaacaaagtggttgatgcttggtctaaatgtacagacaaagttgcatctgaaatgatgaaaggtatatcagcaactaataaatctgacaaaggattggatattaattcagttttcatgatggcagactctggtgcaagaggttcagctgctcaaatgaaacagttagctggtatgagaggtttaattgcaaaaccatcaggtgaaattattgagtcaccgataacatctaactttaaagagggtcttacagctcttgaatactttaattctactcacggtgctagaaaaggattagccgacactgcattaaaaactgctaattcaggttatctaacaagacgattatgtgatgtcgcacaagatttaaccgtaacaaagaaag

SEQ ID NO: 255944 - DNA, 1738 bp, Unknown
  Bacterial polypeptide expressing nucleotide sequence isolated from the Sargasso Sea
aatagaaggtaaagcaattcaattacatcctcttgtttgtgttgctttcaatgcagattttgatggagatcagatggctgttcatgtacctttgactcttgaagctcaactcgaagcaagggctttaatgatgtccactaataatattttgtctccagcagacgggtcaccaattataaatccaacacaagatgttgtccttggactttattatatgactagagataatgctaatgcatctggtggtggtagggtttacagcaatccagatgaagttcttagagcatatgagactggaaatttagaaattcattctcccgtcaaagtaagaattttacacgaaaatggagaaacatcattagaggatactactgtaggtagagttataatctggagagttacacctttagaagttggctttaataatattaacgatgttttaaataagaaatctgtttcaaaattagttgatatttcatacagaaaagctggcctaaagaaaacagtaatatttgcagaccaattaatgtatttaggttttgatttctccacaagatctgggtcatcaattggagtaaatgattttgtcatacctgaagaaaaagcaaaaattattgaaagctctgagaaagaagtcaaagcaattgaaaagcaatttgattcaggcctagtaacacgtggtgaaagatataacaaagttattgatatatggtctagggcaaatgaacaagttgcaaaagcaatgatggaaaaaatcagtactgagactgctacatctccgaatggcgaaaaagttgatcaatcttcatttaattctgtttatatatatgcagattctggagcaagaggttcgccagcacaaattagacagctttctggtatgagaggcttaatgtcaaaacctgacggctctattatagaaacaccaattactgctaactttagagaaggcttgtctgttcttcaatattttatatcaactcatggagcaaggaagggtttggcagatacagcacttaaaacagctaattcaggatatctaacaagaagattatgtgatgtgtctatggattctgttatcaatattgatgattgcggaacatctgaatctataacagtaacatctataattgatggcggtgaaattattcaagcacttacagatagaattttaggtagagtgattgcagaacctatttttgatgcggaaggaaacgaactctttgctgtaaatactatgcttgatgaagatgctgttaaaaagatagatgaattaaatctttccagtttaaagataaggtcgccgatgacatgtgatgcacctattggtgtatgtgctaattgctatggccgtgatcttgctagaggacatctagtccatagaggtgaagcagtaggagtagtagctgcacaatcaattggagagcctgggacacaattaacaatgagaacatttcatattggaggtgctgcctcaagctcatcagaagataatgcaatctataataagaatgctggtgcagtatcattttctgatgacatgaaaacagtcactaataaagataagttagaagttgtcgtttctagaaatgctatgtgttcaatttcggatgttaacggaaaaataattgagcaatatagagttccttatggtgctgttttagaggttgatagcacagatgatctagaagatggagttaaagttgcttcttgggatccatacacaagaccgataatt

SEQ ID NO: 255945 - DNA, 1030 bp, Unknown
  Bacterial polypeptide expressing nucleotide sequence isolated from the Sargasso Sea
aatggaaacagctaatgtaaatttaaaaaattggaaatcattaattaaacctggaaagttggatataaatttaaatgacgataaatcatacgctaaaattgtagctgaacctcttgaaaaaggttatggtttaactttaggtaactcactaagaaggattttattgtcttcaattagaggtactgctgtaacagcaattcaaattgatggagtacttcacgagtttacttctattaaaggtgtgagagaagatgtaactgatattgttcttaatgttaaatctttagcattaaagagcacttctgaaggttcaaaaaaattagttctagatgcaaaaggcccaggtgtaattaaagcatctgatataacaaaaattaatgaaatagaaattttaaatccagacttagtaatctgcaatttagatgaaaacacaaattttcatatggagatgacaataggcagtggaaaaggttatgtgcccgctgaacttaacaaaccagatgaaccacctttaggtcttatacctattgactctctttttagtccagttaagaaagtatcttattctgtgagcactgctcgtgaaggtaaagctttagattatgataaactaacaattgaaatagaaactaatggttctatctccgcagaagatgcgttagcttattcagctagaatttttcaagatcaattaggaatgtttgttaattttgatgaacctcaagaagttactattactgaaaaaccaagtgagccagaatttaacaaaaacttattaagaaaagttgatgaattagagctttccgtaaggtcaatgaactgtcttaaaaatgataatattatttatattggtgatttagttcaaaagtcagaaggtgaaatgttaagaacaccaaattttggaagaaaatctcttaatgaaataaaagaagttctaaatggtatgtcattatatctaggtatggaaatacctaattggcctccagacaatatagcagaattatctaaaaagttggaggaaagtatttaa

SEQ ID NO: 255946 - DNA, 1475 bp, Unknown
  Bacterial polypeptide expressing nucleotide sequence isolated from the Sargasso Sea
attggttgaagaagatcaatctcgggaattggaagaaaatcatcctgatttgatgttgggaatgggagccgaggctatccagacactccttaggagaattgaactagatgaactagaaaatcagttgcaaatagagatgcgtgaagttaattcggaaacgcgtcgcaaacgtatcgcaaaaagactcaatgtaatcggatcccttttaaagtccggcaatgctgtagattcaatgatcatcgacaatctacctgtgcttccgcctgaattgagacctttagtccctcttgaaggtggaaggtttgctacaagtgatcttaatgatctataccgtcgagttattcacagaaacaatcgtcttaagcgccttatcgagcttcgggcgccaggaataattgtcaaaaatgaaaaacgcatgcttcaggaatctgtagacgcactttttgataatggacgccgcggtcgaccaatggttggttcaaacaaaagaccactcaagtctataagtgacatgcttaagggcaaacagggacgtttccgacaaaatctactggggaaacgtgtagattactctggacggactgtaatagtagtcggtcctgagttaaaacttcatcaatgtggtttacccaaaaaaatggcattggagcttttcaagcccttcatttttcataaattgatcgattatcaggaaattcatacaataaaaaatgctaagaaagtgctggaggataatcctcccgaagtctgggcgatacttgaagaagttgtaagagaacatcctgttttacttaaccgtgctccaactctccatcgccttggaatccaggcatttgaaccaattttgatcgaaggtaaagccattcagcttcatcctcttgtatgtactgcgttcaatgcagattttgacggagatcaaatggcggttcatgtccctctttcagtggaggcacagcttgaatcaaaaatactgatgatgtcaacaaataatgtgctctctcccgcaaatggcaaacctgtaatgacacctacccaggatatggtgctaggactttactggattactcgggaacgtgcaggagtaatgggtgaaggtaaaatattctcgaatcctggagaagtgcagacggcgtttgaccatggtcaagtcgatttacacgcaaaaataaaagtccgcttagaaacaaacaatatgccccctacagatctgcaaaacgagactgctgatagcagtagaaatttagtagaatcaactgttggacgtgttttgctttctatggtggttccaaaggaagtaccatttgattcagtaaatatacatttaaagaaaaaacatatggcagatcttgtagatgaatcttttcgcaaggccggcagcattaaaacagttaaaatgttggatgatctaaaaaacatgggctatacatatgctactaaagcgggtttttcaattggaatggatgatatggttattc

SEQ ID NO: 255947 - DNA, 1006 bp, Unknown
  Bacterial polypeptide expressing nucleotide sequence isolated from the Sargasso Sea
catgtcaacaacaatgaaagaacttttaaaacctagtaaatgcacagtaaacgaaaaggataataatacttcagaaattattatcgaaccattagaaagaggttttgggcatactcttggtaatgcattgcgtcgagttttattatcatccatgcctggttgtgcagttacagaacttgagattttagagcccgaagttttacatgaatatacaactatggaaggtgttcaggaagatgttacagatattattctcaatctaaaaggtttagctatcattatgcactcaaaggatgaggcaacacttactttgaaaaaaagcggacctggggaggtatgcgctagagatataactgttgaccatgatgttgagattgcgaatcctgagcacgtaattgcaaatttgactaaggcaggtcaattaagcatggtaatgaaagttgttcgtagtcgaggttacaaacctgttattgctggaggaaaagacgatgagcagactataggaaaaataaagttagatgcttcgtatagtccagttacgcgcgtttcttatgatgttggtaacgctcgtgttgaacaacgcacagatttggataaactgattttacagttggagacagatggaacaatagatccaaatgatgctattcgtgaagctgcaacaatattgagaaatcagttagttatatttgttgatcttgaagcagaagaagcaatagaggcaagcaagagtagcgagcccgaaattgatccaattttactaaggccggtagatgatcttgaattgactgttcgttcagcaaattgtctgaaagcagagagtatttattacattggtgatttaatccaacgtaccgaagttgagttattgaaaacaccaaatttaggaaaaaagtcgttaacagaaataaaagatatattagcatcgcgcggattatcattaggtatgcatttggataattggccaccaagtgggttcaataatcaggaagcattatcagtataa

SEQ ID NO: 255948 - DNA, 847 bp, Unknown
  Bacterial polypeptide expressing nucleotide sequence isolated from the Sargasso Sea
tatgaaaaacttacttaatatttttaatcaaaaaccttttgcagaagagtttgatcacataagaatcggtctttcttcaccagaaatgattcgttcttggtcttatggtgaagtgaaaaaacctgaaactataaactacagaacctttagaccagaaagagatggactattttgtgcaaaaatatttggacctgtaaaagattacgaatgcctttgcggaaaatataaacgattaaaacatagaggcgtggtctgcgagaaatgtggcgtagaggtaacccaaagcaaggttagaagagaaagaatggggcatttagaactcgccagtccagtcgcacacatttggtttttgaaatcgcttccatccagaattgggctattgcttgatatgacattgagggagattgaaagagttctttattttgaagcttatctcgtaacagatccaggaatgacagatctcacccaagggcaaatgctatcagaagaacaatatatagaagcattagagatgtacggagatgatttttctgctgcaatgggtgctgaagcaattcatgatattctcaaagatttagatcttcaagaaaacctcaatcagatacaagaagatatggaggcaaccgcttcccaaattaaaatcaagcgatatcaaaagaggctcaaacttatagagtcactaatttcttctggaaatagacccgaatggatgattctaaaagttcttcctattttaccacctgacttaagaccacttgttcctctagatggcggaaggtttgctacatcagatttaaatgacctttataggagggtgatcaataggaataatagacttcaaagatta

SEQ ID NO: 255949 - DNA, 646 bp, Unknown
  Bacterial polypeptide expressing nucleotide sequence isolated from the Sargasso Sea
gttgcaataccagattgacagaatcgaccatcaaatagcagatgatcgctcccaaataggaacttttttaattggccctctagaaaggggacaagctacaactttgggtaattcgctgaggagagtccttatgggaggacttgaaggaagtgcagttactgcagtgagaatagcaggaatcaaccacgaatatgcaactattcctggagttagagaagacgttttagatattcttctcaattgtaagcaattatcaattaatagttctaatccagatcttgaaattggtaggctagtggcgagcggaccaatggaggttaaggcaaatgatattcaattttcatcacaagttgaaattgttgatggtgagaaaccgattgcaactattcaggatggtcataacttagaattagaaattcatgttgaaagaggtgtgggatatagacccgttgatcgtaagaatgaagagacaagtgctattgatttactccagatagatgctgtatttatgccggtgaagagagttaattttacgattgatgaaactgttgtagcagagggtggagcaggcagagaaagattaacaatggaagtagtaacagatggctcaactagtcctgatgatgctattgctgaagccgcgaaa

SEQ ID NO: 255950 - DNA, 823 bp, Unknown
  Bacterial polypeptide expressing nucleotide sequence isolated from the Sargasso Sea
atgtctgaaaatgaaaatgaaaatatagatgagattattgaaaaggaagaagttgagaaagaagaaattgtgttagatcttctaaacccaatggtcattaagttggagtctcaaaatgagctccattcaagagtatccatagagccttttgaaagaggcttcggttatacactgggtaatgcaattaggagagtactgctctctagcttaccaggttacgctattacagaagctcaaattgatggtgttttacatgagtacacaaccattgaaggagttcaagaggatgtcgttgagatcttgttaaacctcaaaggtgttgctattaatattcatgacagagactttgctgattttgttatcagcaagaagggcccatgcactgtaactgctggagatattcaagtcgacggcgacacagagattgtgaatcctgatcatcatatagccaccatcagctcaaagaaagaactgaagatgcagataaagattgaaaagggtacaggttatcgtccagttcctactcaaagcaaagatgctgatgtaacaattggacttttaaagctcgatgcatcatttagcccaataaaaacagttacatattcggtagaagctgcaagagttgagaatagaacagatttggataagcttattgttgatttagagactgatggaactatagatccagaaagagcgataaagtatgctggtgcaattcttcaaaatcaactcagtatatttacaaatttgacgagagttcaagagcagaagaaagaggaagaggaagttctcatagatccgatcatgcttaggcctgtagatg

SEQ ID NO: 255951 - DNA, 1160 bp, Unknown
  Bacterial polypeptide expressing nucleotide sequence isolated from the Sargasso Sea
aatgaataaagaagttttagatatatttaatcagaataaagctactcaacaattcgatcatattagaataggaattgctagccctgaaaaaatattatcttggtcgtatggtgagataaaaaaacctgaaactataaattatagaacatttaagccagaaagagacggtcttttttgtgcaagaatttttggtcctgtcaaggattacgaatgtttgtgtggcaaatataaaagaatgaaatttaagggtattgtttgtgaaaaatgtggtgtggaagttactttatctaaagtaagaagagaaagaatggggcatattgaattagcttcacctgtcgcacatatctggttcttaaaatcattgccaagcagaattggtttgatattagatatgatgctaaaagatcttgaaaaagtattatattttgaaagttttattgttttagatccaggcttaacaccccttgataagcttcagttattgactgaagacgagtttatcgatgcacaaaatgaatatggagctgataatttcaaagcgggcattggcgctgaagccattagacttcttcttgaagagttagatcttgaagaattaagtgagtccattagaaaggaaataaaagaaactactagtgaattaaagccaaaaaaattagcaaaaagattaaaggttgttgaagcatttaaagtttctggtaataagcctgaatggatgattctaaaagtaattccggttattcctcctgaacttagaccacttgttccgcttgatgggggcagatttgctacatcagacttaaatgatctttatagaagggttattaataggaataataggctaagaagattaatggatttaagagctcctgatattataatcagaaatgaaaaaagaatgcttcaggaatctgttgatgcattatttgacaatggaagaaggggaagagtaataactggttctaataaaagaccacttaagtccctctcagatatgttaaaaggtaagcagggtaggtttagacaaaatttacttggtaaaagagttgattattctggaagatcagtaatagttgttggacctgaattaaagctccatcaatgtggtttaccaaaaaaattggctttagagctatttaaaccttttatttactcaagac

SEQ ID NO: 255952 - DNA, 3265 bp, Unknown
  Bacterial polypeptide expressing nucleotide sequence isolated from the Sargasso Sea
tcttatggagaaattataaaaccggaaacgataaattatagatcttacaaaccagaaaaagatggattattttgtgagaagattttcggcccagtaaaagattatgaatgtcattgtggaaaatataaaggtattagatatcgaggaattatatgcgatagatgcggtgtagaagttacaagaaaaaaagtccgtagagatagaatggggcacattactttagctgttcctgttgtgcatatttggtatctaagatctatcccttcaaaattaagctatcttgctggtatctcaactaaggatttagaaaaaattgtttattatgaacaatttttagttattgagccgggaaaaagtgatgctgctcaattttcgattatagatgaagatgaatatatggaatatgaaagaagctatggatttgatgctgtctctgaagaagaccgtgacaatgaagattatttttatgcagcaatgggcggtgaagctctcagagaaatgctttcaagaatgaatttggttgaattaagaagagacatggaagatgtattaaaaaattcaaaatccaaacagaagagagaggaagctttaaagagacttaaagtagtaaaatcttttcttgtagatatttcaaccgtaaaaaaaataaataagcccgagtggatggttatatctattcttcctgtcattccacccgagcttagaccgttagttcctctcgatggtggtcgttttgctgctagcgatttaaatgatttatatagaagaattattataagaaataatcgcctaaaacaattgatggaaataaaagcacctgatgtgattttacgtaatgaaaaaagaatgcttcaagaatcagttgatgctctttttgataatagtaggcgcaaaacagcaataagaagcggtactcgcagaccattaaaatctatttctgacatgattagaggtaaaacaggaaggtttcgccaaaaccttcttgggaaaagggttgattattcagggagatctgtcattgttgttggtcctgagttaaatctccatgagtgtggcttgccaaaaaatatgggtttagagctttttaagccacatatgattagcgagttaatgagcagagggtatgcccaaacgccgagaagcgctaaattaatgattgaagataaagatccaatcgtctataaggttttagaatatgttgtaaaagatcacccagttctcttaaatcgtgcacctactcttcataggctaggtattcagtcttttcagcctgttttggttgatggtaaagctattagaatccatccattagtatgttccgcttttaatgcagattttgatggtgaccagatggcggttcatgttccgctttcactagctgcgcaaatggaggctcgtgtcttaatgctttcgagtcacaatattttgcatccagcaaatggcaaacctcttgcgctgccatctcaggatatggttttggggacatattatctgagcttgaaaaaagaaggttgcaagggcgaaggtaagacttttggctcattcaatgaagttttacttgcctatgaaggtaaagcagttgaagtgaacacaataatcaatgttcgacacaatggaaattggtataaaaatactactgttggaagagtagttattaattcgattattccttctgaaattgattatgttgatgatataattgataaaaagcgtttaagtaagcttgtaaatgaaatatatttattatctggaaataaaaaaactgttacgtttctcgataatttaaaaactttaggttttaatgctgctacccaagcagggctttctattgccgtcagcgatatccaaatccctgaattaaaagattcaattatagatgaagcccaaaatgaaattgatcttatcaaagataaatatcaaagacatatacttaccgagggagaaagatataacaaagttatagatgtttggacgcatgctacaaataatgtcgcatccacaatgatggaaggtatgaaaactagcgaccaaggctttaatccagtatttatgatggctgattctggcgctagagggtcgcaggatcagattaaacagctagctggtatgcgcggccttatggcaaaaccacaaaaatccatgacaggaagtaaaggtgagattattgaatctccaattacttcaaacttcaaagaaggcttatcggttcaggagtattttatatctactcatggcgcaagaaaaggcttagctgatactgctctaaaaactgctgatgcaggttatctgacgcgtagacttgtagatgttgcgcaggatgtagttatttcagaggtagattgtggaacaattaatggaatagttgcagatgatcttaaagaaggtgaggacataattgagccgctttctgaaagaattttaggtagaacactccttgatgattttattgagaatggaaaagttttaattaaagcaggaactatgattagagatgatgaagctaagttagtttctgatagcaatgtcgaatcattaagaattagatctgttttaacatgcgaatcacttagaggcgtttgtgcaaaatgctatggatggaatccatcaaatcataagctagtagaccttggaacttcagtaggtatacaagcggcacaaagcattggggagccaggaacccagcttactcttcgcactttccacattggaggaacggccactcgaatcatagaacagtccgaaatgcaaacaaagcgcgctggaatagttaaattttcagacaatttggaaattgctgaggccaaagactcatcaggtattagtgttgttagatgcatggtcagacatgccaaattaacaatcgccgctaaagatggtaaaacatttgattacaacgtgccttatggcgcaaatctaaatgtagctgacggtgaaaaagttaatgctgaaaccatattgttccaatgggatccctacactgatgttatcttagcaaggcaaacaggaattgtggagcttaaagattttattgaaaatgaaacctatcaagttgaagctgttgaaggtggtaagaagcaaatggtaattgttgagtctaaagatagaaatctaagtccgcatattgagattatagattctaaaggctctatacttgctggaggaaccattctaccggtaactgcgaatttaacagttaggcaaggagataaagtaaaaagagggcaaactcttgtaaaaataccaagagcaatggaaaaacacgtga

SEQ ID NO: 255953 - DNA, 708 bp, Unknown
  Bacterial polypeptide expressing nucleotide sequence isolated from the Sargasso Sea
gttgcaataccagattgacagaatcgaacatcaaatagcagatgatcgctcccaaacaggaacttttttaattggtcccctagaaaggggacaagccacaactttaggcaattcgctcagaagagtcctaatgggaggacttgaagggagtgcagtaactgcagtcagaatagcaggaattaatcacgaatatgcgacaatccctggagttagagaagatgttctagacattcttcttaattgtaagcaactatcaatcaatagttctaatccggagttagaaatcggcaggctagttgctagtggcccaatggaggtcaaggctaatgacattcaattctcctctcaagttgaaattgttgatggtgaaaaacccatcgcaactattcaggggggccataacttagagttagaaattcatgtagaaagaggcattggatatagaccagtcgatcgcaagaacgaagagacaaccgctattgatttacttcaaatagatgcagtatttatgccagtgaagagagttaatttttcgattgatgaaactgctgtagcagagggtggttcaggtagagaaagattgaaaatggaagtagttactgacggctcaatgtctccggatgatgctattgcggaagctgcgaaccagttaatagaactatttcaacctctcgctactgttacaatggtagaggaaatacctgaaga

SEQ ID NO: 255954 - DNA, 1792 bp, Unknown
  Bacterial polypeptide expressing nucleotide sequence isolated from the Sargasso Sea
tcagtaattgttgttggaccggagcttaagcttcatcagtgtggtattccaaaaaaaatggctattgaattatttaaaccttttatttactcaaagctagaaaagtataacttagcagccacaattaaagctgcaaaaaaaatggttgaaagagaaaggccagaggtatgggatatactagcagaagtaattagagagcatccagttctacttaatagagccccgactcttcacagattgggtattcaagcatttgaaccaatcttgattgaaggtaaagctattcagcttcatcctctagtttgcacagcatttaatgcagactttgatggagaccaaatggctgttcatgttccattgtctttagaatctcagctagaggcaagagtgttaatgatgtcaactaataacattctctccccggcaaatggcaaacccataattgttccctctcaagatatgattttaggcctatattatcttagccttgtaagccataagggtaccggagataaaatgcttttttcaagtattgaggagttaactattgcattggatcaaggtgtagtatcacttcactctaggattaaatctagataccaaacattagatgaaaattttcaaccaaaaatattaaccgttgatacaacaccaggaagaatgatattgagtgagattcttcccaaacacccaaaggttagttttgatttgataaatagaattttaactaaaaaggaaattagtaatgccattgacgttgtttacagacactgtgggcagaaaaaaacagttatatttgccgataaacttatggaaattggatttagagaggcatgtaaagctggaatttcttttggcaaggacgatcttatgattcctagtaataaaagtgatttattagctgaaacagaaaaaaaggttaaactttatgaaaaacaatattcggagggccttattacaagaggtgaaaaatacaataaagtagtagatgcttgggcaaaatgttcggatcaagttgctgaggagatgacaaaaattatggttccacgaacaactgataatgttgaacaatttaacagtgtcttcatgatggcagactcaggtgctagaggttccgctgcgcaattaaaacaattatctggaatgagaggtttgatggctaaaccatccggagaaattattgaaacacctattgtctcaaattttaaagaggggctgactgttctggagtattttaactccagtcatggagcaaggaaaggtcttgctgatacagctttaaaaactgctaactctggttatttaaccagaaggttggtagatgtggctcaagattctatcattacaatagacgattgttttactaataaatttattacactagaagaattagtagaggatggagaggtaattgaaagcttgtccgagaaatgtctagggagaactttagctgaagatataacagacaaagaaactaataatgtaattgcaaaaacaggtgatatcgtatctgaagagcacctttctttaattgattcttcaggtttgactagcgtaaaagtcagatcggttttgacttgtgaagctgaatttggtgtttgtggaaaatgttatggaagagatttagctagaggtactcctgttaatgttggtgaagcagtcggagttattgctgctcaatcaataggtgagccaggaacacagttgactatgagaacttttcacatagggggtgctgcccaaaaaggaactgaagtttctagtatagaatctaaatacgacggtacggtaa

SEQ ID NO: 255955 - DNA, 1828 bp, Unknown
  Bacterial polypeptide expressing nucleotide sequence isolated from the Sargasso Sea
gatgacaaacagcaacttaagaactgaaaatcattttgattatgtcaaaatttcgatagcttctccacaacgaataatggattggggacagaggacattacctaatgggcaagtagttggtgaagttacgaaacctgaaactattaattacaggacacttaaaccagaaatggatggattgttttgtgaaaagatttttgggccctctaaagattgggaatgtcattgtggtaagtacaaaagagttagacatagaggtattgtttgtgagagatgtggtgttgaagtaactgaaagtagagtaagaagacataggatggggtacataaaacttgctgcaccagtttcccatgtttggtatttgaaaggcattcctagttacgttgcgattcttttggatattccactaagagatgtagaacaaatagtttattttaattgttatgttgttttagacccgggtgatcataaagaactcaaatataagcaattactcactgaagatgaatggttagaaattgaagatgaaatctatgctgaagattcaactattgaaaatgagccttttgttgggattggtgcagaggcccttaagcagttacttgaagaccttgatctaagtcagattgccgaggagctgagagaagaaattacacacagtaagggacagaaaagggcaaaacttattaaaaggataagagttattgataatttcattgcaactaatgcaaaaccagaatggatggttctagatgcaattccagtgatacctccagatcttagacctatggtccagcttgatgggggaagattcgcaacttctgatttaaacgatctttacagaagagttataaatagaaataatagattagctaggctacaagaaattttagctcctgaaattatcgtaagaaatgaaaaaagaatgcttcaagaggccgttgatgctcttatagataatggtaggaggggaaggactgttgttggagcaaacaatagacctcttaagtctcttagtgacatcattgaaggaaaacaaggaagatttagacagaatcttctcggtaagcgtgttgattattcaggaagatctgtaatagttgtgggtcccaaattaaaaatgcatcagtgtggactcccaaaggaaatggcgattgaactcttccaaccttttgtaattcatagattaatacgccaaaatattgtgaataatattaaagctgcaaaaaaattaatacaaaaagctgatgatgaagttatgcaggtgcttcaggaagttattgaaggtcacccaattcttttaaatagagcacctacactgcatcggttaggaattcaagctttcgaaccaaaattagttggaggtagagcaatacaacttcatcctttagtttgtcctgcatttaatgctgactttgatggagatcaaatggccgttcatgttcctttagctttagaggcacaaactgaagcacgcatgctcatgttggctagtaataatattctttctcctgctactggggaaccaattgttactccctcacaagatatggttttgggatcttattatctgacggctttgcagcccaattatcaaaaaccggcttttgggaataataaaaaaacttatgcttcactagaagatgtcatttctgcttttgaagataaaagactcagcttacatgaatgggtatgggttagatttaatggagaagttgaagatgaagacgaaatgagtaatccacaaaaaacagaagagcttgacgatggctcacgaatagaactgtggaatttaagaagagacagatttgactctcagaataattaa

SEQ ID NO: 255956 - DNA, 1069 bp, Unknown
  Bacterial polypeptide expressing nucleotide sequence isolated from the Sargasso Sea
atgtataaagcaaaaaatagtatttcaataaaactggcttcccctgaaaaaattcttgaaggttcttttggagaagtattaaaaccagagacaattaattatagatcatataaacctgaaaaagatggtttattttgtgaaaaaatctttggtccggtaaaggattttgaatgccactgtggaaagtataaaggcattagatatagaggtattatttgtgacaggtgcggagttgaagttacaactaaaaaagttagaagaaatcgtatgggtcatattactttagcagttccagttgttcatatttggtttttaaagtctataccaagtaagctcagttacattctcggtaaaagtgcaaaacagcttgaaagcgtaatttattatgaaaactatttagttattaatcctggaaagagtggatataaaagatttgaattaatagatgaagaggcttttttagaattagaacaagagtttggttatgaggctgtttctcaagaagaaaaagaggaggagtcatacttctatgctgcaatgggcggagaagcaattaaagacgctcttgcagaaatggatttattagaactaaaacaagaacttgaattaatcagttcaacaactaagtcaaaacaaaaaagagaagatgctttaaaaagattaaaagtagttaaagactttgctcaagatagaaacaataagccagaatggatgattgtttcaattttacctgtaatgccaccggagttaagacctttagttccgcttgaaggtggaagatttgctgctagtgatttaaatgatctatatcgaagaattattataagaaataacagattaaagcagttaatggacattcaggctcctgaagttatacttagaaatgaaaaaagaatgttgcaagagtctgttgatgcgctttttgataataccaaacgtaaaacagcaattagaagtggatctaaaagacctttaaaatctatttctgatatgcttagaggtaagcagggaagatttagacagaatcttctaggaaagagagttgattattctggaagatcagttattg

SEQ ID NO: 255957 - DNA, 1480 bp, Unknown
  Bacterial polypeptide expressing nucleotide sequence isolated from the Sargasso Sea
aatgaaaaaagaattaacagatctatttaagggcagcgaaatttcagaagctcaaaattttaatagcattaaaatttcacttgctagcccagagaaaattaaatcttggacatttggtgaaattaaaaagcctgaaacaattaattatagaacgtttagacctgaaaaagatggtttgttctgtgcaaggatttttggaccaataaaagattatgagtgtttatgcggtaagtataaacgaatgaaatttagaggaattatatgtgagaaatgtggtgttgaggttacaaaatcaaatgtaagaagagaaagaatgggccacattaatcttgctacaccggtagcacatatttggttcttgaagtctcttccaagcagaattgctttagcagtagacatgaaattaaaagaaatagagagagttctttattttgaaaactttatagtaatagaacctggtttaactggtttacaaaaaaatcaactcttaaatgaggaagaattagcaaaatatcaggatgagtttggtgaagaaagttttacagcgggtataggagcagaagctgttcttgagatgctgaaaaatttagatttagaattagaaagaaaaaatcttgttagctttattaaagaaactaaatcaaaagttaacgaagaaagagcaattaaaagattaaaattaatagagtcatttattgaaacaggtcaaaaacctgaatggatgattatgactgttgtaccagttatacctccagaattaagaccattagttcctcttgacggtggaagatttgctacttcagatcttaacgatttatacagaagagtaattaacagaaataatagattaaaaagattaatggatcttaaagctccagatatcattgtaagaaatgaaaaaagaatgcttcaggagtctgtagatgcactatttgataacggtagaagaggcagggtaataacagggactggcaagcgaccacttaaatctcttgctgaaatgttaaaaggaaaacaaggaagatttagacaaaatttattaggtaaacgagttgattattctggaagatcggtaatcgttgtcggtccagatttaaaattacatgagtgtggtttaccgaaaaaaatggctcttgagttatttaaaccatttttatatgcaagattaaataaattaggcttagcttcaacaattaaacaagctaaaaaattagttgaaaaagaaacaaatgcagtttgggacgctttagaattaatagtaagagagcatccggtacttttaaatagagcgccaacacttcataggctaggagttcaagcgtttgagccaaaattaattgaaggagatgcaatcgaattacatcctttaacttgtgctgcatttaacgctgacttcgatggtgaccaaatggcagtgcacgtgccgttaagtttagaagcacaattagaagcaagaattttaatgttatctacaaaataa

SEQ ID NO: 255958 - DNA, 1618 bp, Unknown
  Bacterial polypeptide expressing nucleotide sequence isolated from the Sargasso Sea
cgatctcaacgatttatatagaagattaattaatcgtaacaacagattaaaaaaattaattgaactgggtgccccagacataatcattagtaacgaaaaaagaatgctgcaagaatctgttgatgctctttttgataacggaagaagaggtagagcagtggcaggggcaggtggacgaggtctgaagtcactctctgatatgttgaaaggaaagcaaggaagatttagacaaaaccttcttggaaagagagttgattactctgcaaggtcagttattgtagtcggtccgcatttagatttacaacaatgtggattgcctaaaatgatggcacttgagttattcaagccatttgttatgaaaaggctagttgaacttggtcttgcacaaaatattaaatctgcaaaaagaatggttgaaagatctcgtgctcaagtatgggatgtccttgcagaagtaattgaagagcacccggtattactaaacagagctcctactttacataggcttggaattcaagcatttgagccaatccttgtagaaggtaaagctattcaagtccatccgttggtttgcgaagcatttaatgctgattttgatggtgaccaaatggcagttcatgttcctttatcagctgaagctcaagcagaagccagagttttgatgctagctacaaataacgttttatcaccagcttcgggtaatcctatagtatctccaagccaagatatggtaataggtctttattatattacagagtgtcatgacgagctagatactgctgagtatgcatttgctgacttaaacgaagcgcagctagcttatgaagcaggtcatatttctttacaaacaccaatcaaagtaagggttggaaatttagctggatctgaagacatatataataagataaaaaatagattttctgaactacttactccagaatatgtttctggtgacacattaactaacacaacattaggaagaatgcatttcaactctatattgcctgatgactttccatatattgaggcatcagtaagaaaaccagaaatgaaaaaaatcatttcagaggttattgaaacatacaacaaagctgaattgagacagtttttagattcaatgaaaaaagttggttttaattttggtgcaaaagctgggttgtccgttgcgatgacagatgttaaaacaccaccaacaaagaatcaaattcttgaaaagtatgaaaatgaagccgaaaaagtagaaaagctttatcttgatgacattattactgagactgagagaaaacaaaaaattatcgaaatatggaatgaagctacagaccaagttcagtatgcgatgagtgcagaattagaatctgaaagattcaatcctgttgatatgatggttaaatctggagctcgaggtaatatgatgcaagtaagacagcttgcaggcatgagaggtcttgttgctaatccaaaaggtgacatcattgaaaggccaataaaaagtaattttagggaagggatgtctgttcttgagtatttcatttcaacacacggtgctagaaaaggacttgcagatacagcgttaagaactgcagactctggttatttaacaagaagactagttgagttg

SEQ ID NO: 255959 - DNA, 1423 bp, Unknown
  Bacterial polypeptide expressing nucleotide sequence isolated from the Sargasso Sea
ggtgatgaatttactgcaggaatgggagctgaagctgtacaaattctcctacaggaattagatatagaagatgaaattagaattattagagaagaaatacctcaaaccaattctgaaactaaacttaaaaaactttctaaaagattaaaattattagaggcatttaataattctggtaataaacctgaatggatggttatgaatgttttaccggtcttacctccagatttaagacctttagtccctcttgaaggtggcagattcgcaacttcagatttaaatgatctttatagaagagtaattaatagaaataatagattaaaaagattattagagctgaatgcaccagaaataattgtaagaaatgaaaagagaatgttacaagaatctgtagatgctcttctagataatggaagaagaggccgagtaatcactggtaccaataaaagacctttaaaatcattagcagatatgattaaaggtaaaggaggaagatttaggcaaaatctacttggtaaaagagttgattattctggaagatcagttattgtggctggccctaatcttagattgcatcaatgtgggcttcctaaaaaaatggccctagaattatttaaaccctttgtatatggaaaactagaacaaagagaattagctacaactatcaaaggagcaaagaaattggttgagagagaaactcctgaggtatgggaagttcttgaagaggtaataagggagcatcctgttttattaaatagagcaccaactcttcataggcttggattacaagcatttgaaccaaagctaattgaaggaaaagcaattcaattgcatccattagtttgtgttgcatttaatgctgattttgatggcgaccaaatggcagttcatgtccctcttactttagaagctcagctagaagcaagagcattgatgatgtctacaaataatatactttcaccagctgatggagctccaattattaacccaactcaagatgttgtattaggcttatattatatgacaagagataatgctaatgccttgggagcaggaagagtttttagcaattccgatgaagtcttaagagcatatgaaacagaaaatcttgagatccattcgcctataaaagtgagaattgatcatggtaatgataaaaaaacacttgaagaaacaacagtaggtagaatattaatatggagaattactccaaaagaagttggctttgaaaatataaataatgtattaaataagaaattagtttctaagcttgttgatatttcatatagaaaagcaggattaaagaagacagtaatttttgctgatcaacttatgtatttaggttttgacttctcaaccagatcgggatcttctattggagtgaatgattttgttattccaaaagaaaaagctgaaataattg

SEQ ID NO: 255960 - DNA, 242 bp, Unknown
  Bacterial polypeptide expressing nucleotide sequence isolated from the Sargasso Sea
tatgcaaatatcagtaatagatttattagtaccaaccgagatacaagtcgaaaatgtttcagatactgtatcgaaggtaacgctggagccgctcgagagaggttttggtcatacactaggtaatgccctaagaagaattcttctttcatcaatgcctggtgctgctgtaacagatgttgtgatcgatggtatttctcatgagtattcaacaattgagggagttagagaggatgtaatagata

SEQ ID NO: 255961 - DNA, 1024 bp, Unknown
  Bacterial polypeptide expressing nucleotide sequence isolated from the Sargasso Sea
atgagtattattaataattggcaggcattaataaaaccttcaaaactaaagctaatcagcgatgaagacactcagtataaagcaactttaattgcggaaccacttgaaaggggttttggattaacacttggaaatgctcttagaagagtgctgttgtcgtcactacaaggtactgctgttacagctattaaaatagataatgttcttcatgaattttcatctattgatggagtaagagaagacgttacagatatagtgttaaatattaagtccctatctttaaatatgcattctgaaggtgtaagaaaaatgaatctcaatgtaactggtccaggtgagattactgcgggtatgataaatacaccatctgaaattgatattataaatccagagttagttatctgtaatcttgatgacaatactgaatttaatatggagcttaccgtagcaaaaggtaaaggttatgttgctgctgaacataacaagccagaagattctgcaataggtctgattccgatagactccatatttagcccagttaaacaagtttcatacagtatagaaaatactagagaaggaaaagttttagattatgacaagttaacaatgtcaattgaaacaaatggatcagtatctcctgaggatgcaattgcttttgcagcacgaataattcaagaccaattgcaatcatttattaattttgaagaacctgaagagattcaggaagaacctgatgcattggaacctcaatttaataaaaatcttttaagaaaagttgaagagcttgagctttcagtgagatcaatgaattgcctgagaaatgataatattatttacattggagaccttgttcaaaaaagtgaaattgaaatgttgcgtacacccaattttggtcgtaagtctctaaatgaaataaaagaagtactaggcactatgtcactatatttaggcatggaagtgcctaactggccacctgaaaatatcgaggaaatggcaagaaagattgaagatccatataactaaa

SEQ ID NO: 255962 - DNA, 988 bp, Unknown
  Bacterial polypeptide expressing nucleotide sequence isolated from the Sargasso Sea
atgaaaaagaatgattttttaaaaccaaaattggtcgacatatcaactatatcgtcgacacatgcgaagattagtatcgagccattagagagaggttttgggcatacattaggtaatgccctcaggagagtcctactttcctctttacctggaagtgctgtaactgaggttacaatagagaatattcttcacgaatacagtactattgaaggcgtacaagaggatgtactagaaatacttttaaacataaaaaaattagcattagtactaccaagtaaggatacgcttgatatcactctaagaaaaaaaggtgttggaccagttttagcatctgatatatctgataatccagatctagaaattaagaatcctaacttttgcctagcaaatatcactaacgacaaaactgaacttgttataaatatgactgtaacaaaagggagaggatatcaacaagcccaaaaaagaaaatttaatgaattagatgacttgggcataggtaagatgcagctagatgcctcttttagtcctgtggtgctggtaacttacaatgtggagacagcgagagtaaaacaaagaactgacctagataagcttgttatagatttaaaaacaaatgcaactattgaacctgaagatgctattagaaaagctggccaactccttagaaatcaacttgacgtatttacatacttagaagtccatgaagaaactgaagaggaatcagatacaccacagattgatccagttttattaagaccagttgatgacttggaacttactgtaaggtcggctaattgtcttaaagctgaaaacatatactatattggtgatttagttcagagaagtgaaaatgaactccttaaaacaccaaatctaggaaaaaaatcacttactgagattaaagatgtacttgctactcacagtttacaactaggccaaaaacttgaagactggcctcctaagaacatagataaaagaatatgag

SEQ ID NO: 255963 - DNA, 967 bp, Unknown
  Bacterial polypeptide expressing nucleotide sequence isolated from the Sargasso Sea
tatgcaaatatcagtaatagatttattagtaccaaccgagatacaagtcgaaaatgtttcagatactgtatcgaaggtaacgctagagccgcttgagagaggttttggtcatacgctaggtaatgccttaagaagaattcttctttcatcaatgcctggtgctgctgtaacagatgttgtgatcgatggtatttctcatgagtattcaacaattgagggagttagagaggacgtaatagatatcctattaaatctcaaagatatgccagtgaaactaattgaaggaaatgaagcagaacttaaactatctgttgatggaccatgcgaagtaacatcttcttcatttgaggctcctggaaatgttgagttaacagatgccgatcatcatgttgtttcacttgtagataaaattaaattaaatatgtcagtttttgtaagaactggaagaggctatgagcctgcagatattagagatgatgaaaataatactgtaggaggtttaaaagttgatgcctcatttagtccagtaaaaagagtttcgtattctgtagagaatgcaagatttgagaaaagaacagacttagataaattaatacttgagttagagactgatgggactatcgatgcaaaaatggctatagagcattctgcaactataatgcagcaacaacttgcagcctttgttgacttagaagcaattgcagaacaagaagctaaaaaagagcaaaatgactttgatccactactcctaaggtctatagaagaacttgagttaactgtaagatcaactaattgtttaaaagcagaaagtattttcttaattggtgatttaattcaaagatctgaatttgatcttctaaaaacacctaaccttggtaaaaagtctcttaatgagattaaagatgtcctagcttcaaaaggactttctttaggtatggtgttagataactggccaccgatgggttaa

SEQ ID NO: 255964 - DNA, 283 bp, Unknown
  Bacterial polypeptide expressing nucleotide sequence isolated from the Sargasso Sea
ggtagactgggaagaagttattgaagaaaaagaagaagttaacattgatccagtcatgctaagaccagttgatgaattggagttaactgtaagatctgcaaactgcttaaaagcagaaaatatacattacattggagacttagtgacaagaatggaatcagacttattaaggactcctaatttaggaaagaaatctttaaatgaaattaaagatgttcttgcatcaagagggttatctctaggtttagtccttgagcattggccaccagaaaacgtaagttaa

SEQ ID NO: 255965 - DNA, 2101 bp, Unknown
  Bacterial polypeptide expressing nucleotide sequence isolated from the Sargasso Sea
actaaccaatcttaaaaaaaaccaacttcttggagaagaagaattaataaaatatcaggatgaatatggtgaagaagcttttacagcaggcattggagctgaggcgattttagaaattttaaaatctattaacttagaagatgagagaaacttactaataaaaaatattaatgaaactaaatcaaaagtctctgaagaaaggtcaataaaaagattaaaattgatagagtcattcattgaaactggaaataaacctgaatggatgattttaactaccgttcctgtaatacctccagaattaagaccattggtaccattagatggtggacgatttgcaacatctgaccttaatgatctgtatagaagagttataaatagaaataatagacttaaaagattaatagatcttaaggctccagatataattgtaagaaatgaaaaaagaatgcttcaagaatcagtagatgcattatttgataatggacgtagaggaagagtgataactggcacaggtaaaagacctcttaaatcactagctgaaatgttaaaaggaaagcaaggaaggtttagacaaaatttattaggtaaaagagttgattactcaggaagatcagtaatagttgttgggccagacttaaaacttcatgaatgtggtttaccaaaaaaaatggccttggaattgtttaagccatttttatatgcaagattaaataaattaggtttagcatcaacaattaaacaagcaaaaaaactagtagaaaaagaaagaaatgaagtttgggatgctcttgaattaattgtaagagaacatcctgtaattttaaatagagctccaacattacatagactgggtgttcaagcatttgagccaaaacttatagaaggcaatgcaatagagttgcatccattaacatgtgctgcttttaatgctgatttcgatggtgaccagatggctgttcatgtaccactaagcttggaagcacaattagaagctagagttttaatgatgtcgacaaataacattttaagtccttcaaatggaaagcctataattgttccgagtcaagatatgatattaggaatttattatttatcccaaccaccttatcaatctgaaaaagttgaaggttattttgtaaatacttctgaaatagagcatgctttagaaattggacagataaaagtacattctagaatagtttctagatttgaaacaatcgatgaaaatggaaatattaaatatgaaaaacatataagtacagttggaagatttctacttgcaaaccttttaccaaaaaatattaataacaaattttctttagttgacagattattgcctaaaaaaattgtatcggaagttatagatcatgtttttagattttcaggtcaaaaaagcactgtcatattttgtgataaacttaaagacctaggctttaagcatgcgtttaaagctggaatttcatttggtaaggatgatttagtaataccagataacaaacaacagctaatagatgaaactaaaaaactaatttcagattatgaaaatcaatatgcagaaggattaattactagaggtgaaaaatataataaagtaattgatgcatggtcaaaatgcacagatcgtgttgcatctgaaatgatgaaaagaatctctgcaacagaaatcactgatgacggactaaaaataaattctgtttttatgatggctgatagtggtgccagaggttcagcggctcaaatgaaacaattagcaggaatgagagggttaattgcaaaaccatctggtgagattatcgagtctccaattacatcaaactttaaagaaggattaacagctctagaatactttaattcaacacacggagctagaaaaggtttggctgatacagcattaaaaactgcaagttctggatatttaacaagaagattatgtgatgttgctcaagatttaacaattaccaaacctaaatgtgatatgaaaaactgtggttcaattaaacttagtgaagttcttgaaggtggtaacataatggtaagtttatcagaaagagcactgggaagagtcgcagcaaaggatgtaaaaaacccactccacaggtga

SEQ ID NO: 255966 - DNA, 1039 bp, Unknown
  Bacterial polypeptide expressing nucleotide sequence isolated from the Sargasso Sea
tatgtctgaaaatgaaaatgaaatcttagaagagatcgttgaagaggaagaagttgaaaaagaagaaattgtcttagatcttctaaatccaatggtcattaagttggagtctcagaatgagctccattcaagggtatccatagagccttttgaaagaggttttggttatacattgggtaatgcgatcagaagagtactgctgtctagtctgccaggttatgcaattacggaagctcagatagatggtgttttgcatgaatatactacgattgaaggcgtccaagaggatgtcgttgagatcttattaaacctaaaaggtgttgctatcaatattcatgatagagattcagccgattttgtgatcagcaaaaaaggtccatgtactgtgactgctggggatattcaagttgatggagatacagagattgtaaatcctgatcatcatattgcaacgattagctcaaagaaagaattaaaaatgcagattaagattgaaaaaggaacaggctatcgcccagtccctactcaaagcaaagatgctgatgtaacaattggtttgctgaagctagatgcatcatttagtccaattaaaacagtcacatattcagtcgaagctgcgagagtagagaacagaacagatttggacaagcttattgttgatttagaaacagatggaacaatagatccagaaagggcaattaagtatgcgggcgcaatcctccaaaaccagctcagtattttcacaaatttgacaagagtacaagagcagaagaaagaggaagaagaggttcttatagatccaattatgctcagacctgtggacgagcttgaattgactgtgaggtctgcaaattgtctgaaagcagaaaatgctaactatatcggtgatcttgttcaaaaaactgaagttgaattactgcgtactccaaacttaggtaagaaatctcttaatgagatcaaggaagtccttgctagtcatggactaactcttggaatggagttagagaactggccaccaaaagaggctgttgtagactaa

SEQ ID NO: 255967 - DNA, 697 bp, Unknown
  Bacterial polypeptide expressing nucleotide sequence isolated from the Sargasso Sea
catgaataaatatgactttctaaaaccaaaacttgtggatattgaaatgctcaatgcatctcatgctaaaataacaatagaacctctcgaaagaggttttggccatacacttggcaatgctcttagaagggttttattatcatctcttcccgggagtgctgttactgaagtcacaattgagaatatattgcatgaatatagtacgattgagggtgttcaagaagatgtacttgagatattactgaatatcaaaaaattagctttagtattacatgaaaaagagagcgtagaaattacactgagaaaaaaagggtctggcccagtgttagcatcagatatttctgataatcctgatctagaaattaaaaatcctgatttttgtattgcaaatattacaaatgaaaaaactgagctcgtcattaacatgatcgtatcaactggaagaggttatcaaccagcacaaaaaagaaaatttaatgaacaggaagatcttggtattgggaaaatgcagttagatgcatcttttagtccagttttacaggtaacgtataatgtggacactgcaagagttaaacaaagaacagatctagataaacttattatagatttgaagacaaatgcaacaattgagccagaggatgctattagaaaagcaggtcaggttttaagagatcaattagaagtctttacttatctt

SEQ ID NO: 255968 - DNA, 838 bp, Unknown
  Bacterial polypeptide expressing nucleotide sequence isolated from the Sargasso Sea
tggtgtgcttcatgaattttctacgatagagggtgtaagagaagatgtaactgatattattatgaatctcaaaaatgttacttttaattccagaagtaatcatactcaaaagttaagtctaaatattaaaggtccaaaagaggttatctccgcagattttgaagaaaacccagaagtagaaattattgataaagatgctgtcattatgaatgttgactctaatagagaagtaaacatagaaatattcttagatgttaacaaaggctatatatcttcggaaaaaaataaagataatgagaacaaaagtgtaggacaaattatgcttgatgctacttatagtcctgtaaaaagggtatcatttaacgttgaaaactctcgtatcggacaagacactgagtttgacaagcttatccttgatattgaaacgaatggtactgtatccccagatgatgctgctgccttagctgcaagaattcttcaagatcaacttaagccctttatcaattttgaagagcctacagaagatgaaagaaaaaaattacaatcatctaacgaaccacagtttaataagaatttacttaagaaagttgatgaacttgaactatcagttagatcggctaactgcctaaaaaatgacaatattttttatattggtgatttagttcaaaaaactgagggagaaatgttaagaacacctaattttggtagaaaatcacttgatgaaattaaagaagttttgtcatcaatgagtcttagtatgggaatggatttacctggctggccacctgaaaatatagaagagttatcaaaaaagtatgaggatccttttaaagtataa

SEQ ID NO: 255969 - DNA, 1107 bp, Unknown
  Bacterial polypeptide expressing nucleotide sequence isolated from the Sargasso Sea
tatggaaaaaaatctatcaagaaattttaataatcaaaatattcaaccagaaaataattttgatagcatcaaaataaccttagctagtccagaaaaaatcaagtcatggtcttatggagaaataaaaaaacctgaaactataaactatagaacattcagacctgaaaaagatggacttttctgttcaagaatatttggtccagtgaaagattatgaatgtctttgtggtaaatacaaaagaatgaaatttagaggcattatctgtgaaaaatgtggagttgaagttacgaaatcaaatgtgagaagagagagaatgggacatatagatttagcttgtccagttgcccatatttggtttttaaagtcccttcctagcagaatagctttagcaatcgatatgaaactcaaagaagttgaaaaagttttatattttgagagttttattatagttgagccaggtttaacaactctgaaaaaaggacaattaatttctgaagaagcattattaaaagcccaagaagaatttggtgaagacgctttttccgcaggtataggagcagaagcagttcgagagattttagtaaatttagatttaaaaaaagaacaaaaaaaacttagagaatctttagctgaaatcaaatctaaagtaacagaggagcgaacaataaaaaggttgaagctgattgagtcatttatatcatcaggtaataaaccagagtggatgattttaacttcggtaccagtaattccaccagaattacgccctttagtgcctcttgatgggggaagatttgcaacttctgacttaaatgatctatacagaagagtaataaataggaataatagactaaaaagattattagacttaaaagctccagacataatagtaagaaatgaaaaaagaatgcttcaagagtcagtggatgcattatttgataatggaagaagaggaagagttattacaggaacaggaaaaagaccgctcaaatccttagctgaaatgcttaaaggtaaacaaggaagattcagacaaaatttattaggtaaaagagtagattattcaggaagatcagtaattgttgttggaccagaacttaaactcatcaa

SEQ ID NO: 255970 - DNA, 1303 bp, Unknown
  Bacterial polypeptide expressing nucleotide sequence isolated from the Sargasso Sea
aatcgtctaaaaagattaatggatcttaaagctccagatattattgttagaaatgaaaaaagaatgcttcaagagtccgtcgatgctctttttgataatggaagacgaggaagagttattacaggtactggaaaacgcccacttaaatcattagccgaaatgttaaaaggtaaacaaggtagatttagacaaaatttattaggtaaaagagtcgattattcagggagatcagtaattgttgttggacctgatctaaaacttcatgagtgtggattaccaaaaaaaatggctttagaattatttaaaccttttttatatgccagattgaataaattgggcttagcttcgacaataaaacaagcaaaaaaacttgttgaaaaagaaactaatgcagtatgggatgctttagaattaatcgtaagagaacatccagtcttattaaatagagcacccacacttcacagattaggcgttcaggcttttgaaccaaaattaatagaaggtgacgcaatagaattacatccactaacctgtgcagcatttaatgcagattttgatggagatcaaatggcggttcatgttccattgagtttagaagctcaacttgaagctagaattttaatgctatcaacaaataatattttatcaccatcaaatggaaaaccaataattgtccctagtcaggacatgatattaggtatttattatttatctcaagaaccattaacggacaagcctaaaggatattttttagatgctgatcagatagaatttgctttatcttcagatcaaataaaagttcacagcactattatatctagatttgaaacattagatgaaaaaggtaataaaaaatatgaaaaatatacttcaactgcaggaagatttttgttagcaaatttattaccaaaaaataataacataaaattttcattaattgatcgattgttaccaaaaaagacagtttcagaaattattgacattgtttttagattttgtggtcaaaaaactactgttatattttgtgataagttaaaggacttaggtttcaaacatgcatttaaagctggtatctcttttggtaaagatgatcttataattcctcaaagtaaaactcaattaattgaggatacaaaaaaattaatttcagattatgagactcaatattctgagggcttaattactagaggtgaaaaatataataaagtagtagacgcttggtctaaatgtacagataaagttgcaggtgaaatgatgaagggaatttcagctacagaaaaaacttctgatggattaaaaataa

SEQ ID NO: 255971 - DNA, 1186 bp, Unknown
  Bacterial polypeptide expressing nucleotide sequence isolated from the Sargasso Sea
tttgacttacatacaaacaaacaacatagatacttcaaagtcttacagttcgattacaataggtttggcatctccagagtcgatactcgctcgatcatatggggaaattttaaagcctgaaacaataaactataggtcatacaagccagaaaaagatgggttgttttgcgagaagatatttggccctgttaaagactatgaatgtcactgtggaaaatataaaggaattagatatagaggtattatttgtgataggtgtggtgtcgaagtaacaaggaaaaaagttcgcagggaaagaatggggcatataactctcgcggttccaatagtgcacatatggtacctaaggtcaataccaagtaagttgagttatttagctggtcgtagtacaaaagagcttgagagagttatttactatgagatgtatatggttttagagccagcagatagtggattaaaggcttttgaccttattgaggaagacgaatatttggattatgaagaaaaatatggttatgcagctgtgagcgaggaaaaaagagataatgatgattatttttatggggctatgggtggcgaggcgataaaagaaatgctctcaagaataaacataatggagctaaaaaaggaacttgaggatattgttaaaacatcaaagtcaaaacaaaaaagagcagatgcattaaaaagacttaaagttgcttattcttttgttccagaccccaccaaaaaaagattaaataagccagagtggatgattgtttccatacttcctgtaattcctcctgagttaagaccgttggttccgttggagggtggtaggtttgctgctagtgaccttaatgatttatatagaagaatcattatcagaaataatagactaaagcaacttatggaaataaaggcgcctgatgtaatactaagaaatgaaaaaagaatgttgcaagaatcagttgatgcgctattcgataatagtcgcagaaagactgcaatcagaagtggttcgcggaggcctcttaagtctctgtctgatatgctgagaggaaaaacaggtaggtttcgccaaaacttgctgggaaaaagagttgattattcagggaggtcagtcatagtagttggtcctcagttaaaactacaagaatgtggtttgcctaagaatatggcgttagaattatttaagccgcat

SEQ ID NO: 255972 - DNA, 1072 bp, Unknown
  Bacterial polypeptide expressing nucleotide sequence isolated from the Sargasso Sea
gttgaaagatttagtagatttattaaaaacacaaggtcatggagttgaatataactctataagagcaggtcttgcctctccccaacaaattaggtcctggtcttatggtgaagttaaaaagccagagactataaattataggactttcaagcctgaaagagatggattattttgcgctaaaatatttggtcctattaaagattatgagtgtatatgtggaaaatataagcgtatgaaacacaggggtgttgtatgtgagaaatgcggtgttgaagtgactctctcaaaagtaagaagagaaagaatgggtcatattgagttagcagctccagtagcacatatttggttcctaaagtctttgccttctaggttggctttagcgcttgatttaaccttgaaagatctagaaagagtcctatattttgaatcatttatcgtgatagaaccaggaatggcagatcttgaagtaggacaacttttaacagatgaagaatattacgaagctcttgaaacttggggagatgaattcgaagcaggaatgggtgcagaatccatacaaacacttctgaaagaattagatttagagacagctataaaagatatccaagatgaaatgcccctaacaaagtcagaggctaaattaaagaaattttctaaaaggttgaaacttctcaaatctttcaaggaatctggaaatagaccggaatggatgattctcgaagttttaccaattcttccacctgacctaaggccactagtccctttagagggcggcagatttgcaacttctgatttaaatgatctctatagaagagtaataaataggaacaatagacttaagaggcttttagaccttaatgctccagatattattactagaaatgaaaaaaggatgctacaagagtcagttgatgctttgttagataatggtagaagaggaagggcagtaacaggctcaaacaaaagacctctcaaatctctggctgacatgataaaaggcaaacaaggcagatttaggcaaaacctccttggaaaaagagttgattactcaggacgttctgtaatagtagta

SEQ ID NO: 255973 - DNA, 1039 bp, Unknown
  Bacterial polypeptide expressing nucleotide sequence isolated from the Sargasso Sea
atgtctgaaaatgaaaatgaaattttagatgagaccgttgaagcagaagaagttgagaaagaagaaattgtcttagatcttcttaacccaatggtcattaagttggagtcacaaaatgagctccattcaagagtatctatagaaccttttgaaagaggattcggatatacattgggtaatgcaataagaagagtgctactctcgagtttaccgggttacgcgattacagaagctcaaattgatggtgttttacatgagtatacgaccattgaaggcgttcaagaggacgtcgttgagatcttgttaaacctcaaaggtgttgccattaatattcatgatagagattctgctgattttgtaatcagcaagaaaggaccatgcacagtaaccgctggggacattcaagttgatggtgacactgagatagtgaatcctgatcatcatatagcgaccataagctcaaagaaagaacttaagatgcagatcaaaattgaaaaggggacaggatatcgtccagttcctacgcaaagcaaagatgctgatgtaacaattgggcttctaaagcttgatgcatcatttagtccaataaaaacagtcacatactcagttgaagctgcgagagtagagaatagaacggatttggataagcttattgttgatctagaaacagatggaaccatagatccagaaagagcgataaagtatgcaggcgcaatccttcaaaatcaactaagtatatttacaaatttgacgagagttcaagagcaaacaaaagaggaagaggaagttcttattgatccaatcatgcttagacctgtagatgagcttgaattaactgtaaggtctgcaaattgtctgaaagcagaaaatgcaaactatataggtgatctagttcagaaaactgaagttgaattactccgtactccaaatttgggtaagaaatcacttaatgagatcaaggaagttcttgccagtcatggactatcacttggaatggagttggacaattggcctccaaaagaggcagttgttgactaat

SEQ ID NO: 255974 - DNA, 1030 bp, Unknown
  Bacterial polypeptide expressing nucleotide sequence isolated from the Sargasso Sea
atgcaaacagaaaatgtaaatgtaaaaaattggaaatcacttctaaaaccagcaaagttagatttgcaattaagtgatgataagtcttacgcaaagattgttgctgaacccttagaaaaaggctacgggttaacactaggtaattcattaagaagaattcttctatcatcaataagaggtgcagcagtaacagctattcaaattgatggtgttcttcacgagtttacatcaataaaaggtgtacgtgaagatgttacagacatagtacttaatgttaaatcattagctttaaaaggaagttttgaaggatcaaaaaaattaattttagatgcaaaaggcccaggtgaaattaaagcatctgatataacttctgtagcagatgtagaaatattgaacccagatttagtaatttgtaatttagacgaaaatactagttttcatatggaaatgactgtgggaaatggaaaagggtatgtcccagcagtaatgaataaacctgaagaaccacctttaggtctaatacctatagactcactttttagccctgtaaaaaaagtatcatattcaattagcaccgccagagaaggaaaagcattagattatgataaactgactatggaagttcaaacaaatggttcaatttctgcggaagatgcagttgcttattcagcaaaaatatttcaagatcaattatccatgttcattaattttgatgaaccacaagaagttacaataagagaaaaaccagccgaaccagaatttaataaaaatttattaagaaaagttgacgaacttgaattatctgtaagatcaatgaattgtttgaaaaatgataatattatttatatcggtgatctagttcaaaaatctgaaggagaaatgttaagaactccaaattttggtagaaaatctttaaacgaaatcaaagaagttttaaatggtatgtctttatatttgggcatggagattccaaattggccccctgacaatatagctgagctatcaaaaaaacttgaagaagctatataat

SEQ ID NO: 255975 - DNA, 1279 bp, Unknown
  Bacterial polypeptide expressing nucleotide sequence isolated from the Sargasso Sea
tatgagtaaagaattatcggaccttttcaaatcttcagaaatatctgaagctcagaatttcaatagtataaagataactttagcaagtcctgagaaaataaagtcttggacatttggtgaaataaaaaaacctgaaacaatcaattacagaacgtttagacctgaaaaagatggcctcttttgcgcaagaatatttggaccaataaaagattatgagtgtctatgtggaaaatataagagaatgaaatttagaggaataatatgtgaaaaatgtggagtagaggtaacaaaatcaaacgtgagaagagaaagaatgggtcatataaatttagcaaccccagttgcccatatttggtttttgaaatctttaccaagcagaatttcattggtaattgatatgaaactaaaagaagtagaaagagttttatattttgaaagttttatagttattgagccaggtttaactggtttaaagaaaaatcaattattaggagaggaagaattaataaaatatcaagatgattatggtgaggaggcatttactgcaggtataggtgctgaagctatactagaaattcttaaatcaataaatctagaagaggaaagagatctcttaattaaaaatattaaagagacaaagtcaaaagttaatgaggaacgatcaatcaaaagattaaaattaattgagtcatttatagaaacaggaaataagccagaatggatgatattaacaacggtaccagttataccacctgaattaagacctcttgtccctttagatggtggtcgatttgctacgtcggatttgaatgatttgtacagaagagtaataaatagaaataatagattaaaaagacttatagatttaaaggctcctgacattattgttagaaatgaaaaaagaatgcttcaagaatcagtagatgctctttttgacaacggaagaagagggagagttataacaggaactggaaaaagacctctaaaatcattagcagaaatgttaaaaggaaaacagggaaggtttagacagaatttgcttggaaaaagagttgattattctggtaggtcagtaattgtcgtagggccagatcttaaattgcacgaatgtggtttgccaaaaaaaatggcattagaattatttaaaccttttttatatgctcgtttaaataagctaggattagcaacaactattaaacaagcaaaaaaattagttgagaaagagagaaatgaagtttgggacgctttagagttgattgtaagagagcacccagtaatt

SEQ ID NO: 255976 - DNA, 653 bp, Unknown
  Bacterial polypeptide expressing nucleotide sequence isolated from the Sargasso Sea
tttgagtattgaaaaaaattggcgagaattacttaaacctaatgtagtaaatatggaggctggctcagatcctctaaagaaatctacattagtagttgagccactggaaagaggatatggaataactctaggcaatgccctaagaagagtgcttttatcttctcttcaaggatcagcagtttatggatttaaaattgatggcgtattgcatgagttttcttcaatttccggagttagagaagatgtcattgatattgcattgaatattaaaaaaataatatttggagctgactttaatggtagtaaaattctcacaattgaaaaaacaggtcccggagttgtagttgctggagatatatctacaaccgatgatattgaggttatgaattctgatttagtcttatgtacccttgatgaaaatatttcttttagaatggaattatatattaggaatggaaatggatatgtttctgctgaagaaaatagaaacgaagatgatccgataggtatgattcctgtggacagtatttatagtccagtaacaaatgtttcatatgaagttgataatgctagagaaggagaatttcttgattatgataggttatcattatcaattgaaactgacggatcagttaaacctgaagatgcgcttg

SEQ ID NO: 255977 - DNA, 4024 bp, Unknown
  Bacterial polypeptide expressing nucleotide sequence isolated from the Sargasso Sea
ataaaaaaacttgaaacaataaattatagaacttttaagcctgaaaaagacggacttttttgtgctagaatttttggacctgttaaagattatgaatgtttatgcggcaaatacaaaagaatgaaattcagaggcattatttgtgaaaagtgtggtgttgaagtaactctttcaaaagttcgaagagatcgaatgggccatatagagcttgctgcccctgtttcccatatttggtttatgaaatctttaccaagtagaatagcaacattgctagatatgacaattaagaatttagaaaaggtactttattttgaacaatttatagttgttgaaccaggactgacagatttaacaaaaggtcaaataatttctgaagatcaatacatagagtatcaagatcaacacggagaagattcatttagtgcatcaataggagcggaggctatagagcagatgcttcaaaatattgaccttcaaagtgattacgatcaattaaaacaagatttgcttgaaacaaaatcagaattaaaaaaagctaaaataactaaaagattaaaattaatagaacattttatatcatctaaaaataaacctgagtggatgattttaagagttttacctgtgatacctccagaattgcgacctttagttcctctggatggaggcagatttgctactagtgatttgaatgatttgtacagaagagtaattaatcgcaataatagacttaaaagattaatcgatttacgtgcacctgatattattattagaaatgaaaaaagaatgcttcaagaatctgttgatgctctatttgataatggacgtagaggtagggtaataacctctactaataaacgacctcttaaatctttatcagatatgctcaaaggaaaacagggcagatttagacaaaatttattgggtaaaagagtagattattctggaagatctgtaattgttgttggccctaatttaaagttgcatcaatgtggtttgccaaaaaaaatggctttagaattgtttaaaccttttatttttcataaactagatatttatggatgggctaatactataaaggctgcaaaaaaattagttgaaaaagaagatccaagagtttgggatatattggaagaagtaattagagagcatccagttttattaaatagagcgcctaccttacatagacttggaatacaggcatttgaaccaatacttatcgaaggaaagtccattcagcttcatccattagtttgcactgcatttaatgctgattttgatggagatcagatggctgttcatgttcctttaagtttagaatctcaattagaagcgagagtacttatgatgagtactaataatattttatctccttcaagtggcaaaccaataattgttccttcgcaggatatagttttgggtatttactatctttcaattcttagaaaaaatcaaataggtgaaggaagaagctttttagatttaaatgaaattatgaaagcgctggaaaacaaagatattactttgcattctcaaataattgctagagtaaaagattttaagggtaatgttagtacaaaagagactactgctggacgtatgatacttggagatattttacctaataatgaaaatataaaatttgatatgttaaataaagttttaacaaaaaaagaagtaagcaatataattgatacagtttatcgtttttgtggacaaaaagaaactgttctttttgcagataaaataatgggtataggttttagatatgccgctatggctggaatatcttttggtaaagatgatttaatcatacctgaagataaaaattctttacttgaaaaaacccagaacaaagttcaagaatatgaaaatcaataccaagatggactaataactcaaggagaaaaatataataaagttgttgatgcatggtccgattgtacaaatcaagttgctgccaaaatgttggaaacgatatcaaatccagaagatgataaacccgttaactctgtttatatgatggctcattctggtgctagaggatcagctgctcaacttaaacaattagcaggcatgagaggtttgatggcaaaaccatcaggagaaattattgaaaatccgattaaatcaaattttaaagaaggcttgtcagtattggaatattttacttctacacatggtgcacgcaaaggcttagctgatacagcattaaaaactgctagctcaggatacctaactagaagacttgttgatgtagctcaagatgctgttattagagaaaacgattgtggcaccactaaaggtgttattgttgaagagatcattgattcaggaaatgttacatctcctttatcagatagaatactaggaagatgcccagtaaatgatatagtggattcaaataaaaatgtaatagtaaaaagtggagaaataatagaagaaacacacatagaagatattaataaattatcccttcgttctctaaaaattaggtcagttttaacttgtgaaactaataacggaatttgtgcaaaatgttatggaagggatttagcaagaggaactgcagttaatattggagaagcggtaggtattatcgctgctcaatctattggtgaacctggaactcagctaaccatgagaacatttcatattggaggagctgcaagtgcatctgtagaacagtcatctgcttcctctccaattgatggcatgattaaatctgataatttcaaatttataactgatgaatctgggaataaaattctattaactagaaatgctaagattaaaatttgtttagatgatgaagaaaaattttctttaagcattccttttgggtcaagaatattttttgaagatggtaaaaatgttaaagccaatcaacttttagcagattgggatccatatactcttcctataattgcagaaaaagatggaataataaaatacgtagatctaaaacaaggtgtatcttttagagatgcagtagatgataccactggtatttctagtaaaattgtaattgattggagtcaaaatcctaaatctaaaaattttaaaccatcaatcaatattgtaaaaacatttgaagatgaaattgatacagagaataaaaatgtaatttcatatccaatgtccatagatactatattaagtgccgaggatggttcagaggttaaggcaggtcaagttgtagctagaatacccaaagaatcatctaagacaaaagatattactggaggcttaccaagagtagctgaactttttgaagcaagaaaaccaaaagatccagctataatgagtgaaattgatggcaaaatttcatttggtaaagattttaaaaataaaagaaggttgattatcaatagtatagatgatgatgaatcatttgaaatcttaattccaagatcaaaatatttaagtgttcaagaaggtgattttgttaaaagaggtgacatattggttgaaggaactccagttcctcatgatatcttaagaattcttggaatagaggaattagctagatatttagttagagaagttcaatcagtttataaacttcaaggtgtatatataaatgacaaacatatagaaactatagcgagacaaatgttacaaaaagcacttatcaaagatccaggagactcaaatcttttggctggagaacaagtccaaaagaaagatcttttagaaactaatttgaaattagaagaagaaggaaaacaacctgcaacctatgataatattttattgggcataactaaagccagtcttcaaactagctctttcatatcttcggcatctttccaggaaacaactaaagttttaactgatgcggctactcaaggtaaaacagatcaattatatggattaaaagaaaatgttattgtaggaagattgattcctgcaggaactggaagtatgacaaaatcttatactgaggttgcaaaggagagagatttagctaagttagctgaaagaagaaaaaaccaggaaaatattgaaaatttagagcaataat

SEQ ID NO: 255978 - DNA, 268 bp, Unknown
  Bacterial polypeptide expressing nucleotide sequence isolated from the Sargasso Sea
aatggaaagtactgaagtaaatccaaaaaattggaaaacattaatcaaaccaacaaaacttgatgtacaattgagcgatgataaatctcacgctaagataacagctgaacctttagagaaaggttatggattgacactcggtaattctttaagaaggattttactttcttcaattagaggaactgctgtaacggcaattcaaatagatggtgttttacatgaatttacgtctatcaaaggcgtaagagaagatgtaactgatatagtt

SEQ ID NO: 255979 - DNA, 1030 bp, Unknown
  Bacterial polypeptide expressing nucleotide sequence isolated from the Sargasso Sea
aatggaaaacgcagaagttaatattaaaaactggaaatctttaattaaaccagcaaaacttgatgttcagcttagtgaagacaaatcttttgctaagattgttgctgaaccattagaaaaaggttatggtttaactttaggcaactcgttaagaaggattttattatcttcaataagaggaacggctgtaacatcaatacaaattgatggtgtattacatgaatttacttccatcaaaggaattcgagaagatgtaactgatatagtattaaatgttaaatctttagctttaaaaagttcatcagaagcttcaaaaaaacttatactagatgcaaagggaccaggagaaataaaggcatctaatattacacctgttgcagatatagaaatattaaatcctgacttagtaatttgtaatctagatgaaaaaacaaattttcatatggaaatgtctgttaatagtggaaaaggttatgttccagcatctatgaataaaccagaagatccacctttaggtttaatagcaatagattcattatttagtcctgtaaaaaaggtatcttactcagtaagcactgccagggaaggtaaagctttagattacgataagttgacaatggaaattgaaacaaatggatcaatatcagcagaagacgcagtagcatattcggctagaatttttcaagatcagttaaatatgtttgttaatttcgaagaaccaaaagaagttgttgtgcgagacaaaccaagtgaacctgattttaataaaaatttacttagaaaagttgatgaattagaattatcagtaagatcaatgaactgtttaaaaaacgacaatattatttacattggtgatttggttcaaaaatcagagggagaaatgctaagaactcctaattttggaagaaaatcattaaacgaaataaaagaagttttaacaggaatgtctttatatttaggaatggaaatacctaactggcccccagataacattgcagaaatgtcaaaaaaacttgaggaaactatataa

SEQ ID NO: 255980 - DNA, 945 bp, Unknown
  Bacterial polypeptide expressing nucleotide sequence isolated from the Sargasso Sea
ttgcaaaagtgacagctgaacctttagaaaaaggttttggtcaaacaattggaaattcacttagaagaatacttttatcttcaattcagggagcggctgttactgctatacaaattgacggtgtacttcatgagttttcttctatcaaaggagtaagagaagatgtaacagatattgttcttaatgttaaaaatttagcgatcaaatccactggaattggagctaaaaaaattattttagacatcaaaggccctaaagaagttaaagcaaaagatataactttagtttcagatgttgaaattttgaatcccgaactaactatttgtaatcttgatgaaaatactaatttccacatggaactatttgttaacaatggtaaaggttatgtttcagcaccaaaaaataaatctgaagatagccctttaggattaatatcaattgattctttatttagccctgtaaaaaaagtttccttttcggtagaaaataccagagcaggaagcgcactagactatgacaaactagtaatgactgttgaaactaacggaacagtagctgcagaagacgctgtggcatattcagcaagaatttttcaagatcaacttgcaatgtttattaattttgaagatcctaaggaagttgttaaagaagttaaatcatctgaaccagaatttaataaaaatttacttaaaagagttgaagagttggagctatcagttagatctatgaactgtttaaaaaatgacaatataatttacataggtgatcttgtgcaaaaaacagagccagaaatgcttagaacaccaaattttggtagaaaatctctcaatgaaattaaagaagttttaaacacaatgtctctttatttaggaatggaaattccaaattggcctccagacaatattgctgaaatgtcaaaaaaactagaggataacaattattaat

SEQ ID NO: 255981 - DNA, 1479 bp, Unknown
  Bacterial polypeptide expressing nucleotide sequence isolated from the Sargasso Sea
agtaattgttgttgggccaactttaaaacttcatcaatgtgggttgccaaaaaaaatggctctagaacttttcaagccttttgtgtttggaagacttcagaatatggagcttgctaccacgattaaaggagctaagagaatggttgaaagagaagaaccagtagtttgggacattttggctgaagttatcagagagcatcctattcttttaaacagagcgcctacacttcaccgtcttggaatccaggcttttgaacctactctcatcgagggaaaagcaattcaactccatccactggtttgtaaagcctacaatgccgattttgatggagatcaaatggcagtgcatgttcccttaactttagaatctcaattagagtgtcgagcattaatgatggcgagtaataatatcctgtcgccttcaaacggaaggcctattattgatccttctcaagatgttgttctaggtatttattacatgacaaagtctaaattaaactctttgggtgaaggatctatctttgccgatgtcgatgaagttaaaagagcttacgactcgaagcaagtagatttacaagcaattatcaaatgccgaatagataattctgatgggaccacagatctagttgaaactacagttggtagaacgatattgtggggagtagttcctaaggaaattcctttcgaaaaagttaataaacctttaaacagtaaagcaatttcagatcttataaatacttcctatagatactctggtttaaaagcaacagtgatcttttcagacaagataaaaaatctcggctacgattactcaacaatttctggctcgtcaatttgtgttgaggattgtgttattcctgacaataaagaaacgattatttctcaagctcaaaatgaggttaaagaaatagaagctcaatattcttctggactggttactcaaggagaaaaatacaataaagttatagatatttggtccagagcaaatgaagctgttgccagctctttaatggaaactatttctaaggataaagttacaaattcagaaggagatgaagtagacgaagactcttttaattcagtcttcatgtatttagattctggagcaagaagttctcccgcccaagttagacaacttgctggcatgaggggtcttatggctaagccagacggctcaataattgaaacacctataacagctaactttagagaaggactcacagtgcttcaatacttcacttctactcatggagctagaaaaggcttggccgatactgcattaaagacagcgaactctggatacctcacaaggcgtcttgtagatgtcgcgcaggatctagttatcagagaatatgattgtggaactaaagagggtttagaattaagaactataatcgatggaggagaggttgttcaatcgctaagtgagagaatattaggaagagttttggctcaggacattaaatcgaaagatggaga

SEQ ID NO: 255982 - DNA, 1740 bp, Unknown
  Bacterial polypeptide expressing nucleotide sequence isolated from the Sargasso Sea
tatgaaaaaagaaattacagatatatttaaaacatcagagatatcagagtctcaaaattttaatagtatcaagattactttagcaagccctgaaaaaattaagtcctggacctacggtgaaataaaaaagcctgagacaattaattatagaacatttagacctgaaaaagatggtctgttctgtgctagaatttttggtcctataaaagattacgagtgtttatgtggaaaatacaaaagaatgaaatttagaggtataatttgtgaaaaatgtggcgttgaaataactaaatcaaatgttcgaagagaaagaatgggccatataaatctagctacacctgttgcccatatatggtttttgaaatccttaccaagtagaatttcactggccatagatatgaaacttaaagaagttgaaagagttttgtactttgagaattttattgtaattgagccgggattaacaaatctaaaaaaaaatcagttattaactgaggaagagttaataaaatatcaagacgagtatggtgaagaggcatttagtgccggtattggggctgaagcaatattagaaattttaaaatcaattaatttaaatgaggaaagagaaatattaattaaaacaataaaagaaacaaaatcaaaagttgctgaggaaagatcaatcaaaagattaaagttaattgaatcatttattgaaacaggcaataaacctgaatggatgatcttaaccgtaattcctgttataccacctgaattaagacctttagttcctcttgatggtggtagatttgctacatctgatttaaatgatttatatagaagagtaataaatagaaataacagattaaaaagattaatggatctaaaggctccagatataatcgttagaaacgaaaagagaatgcttcaagagtcagtagatgcactatttgataatggtagaaggggtagagtaattacaggaacgggaaaaagaccattaaaatcattagcagaaatgcttaaaggtaaacaaggaagatttagacaaaatttacttggaaaaagagttgattactcaggacgttcagtgattgtagtaggtcccgatcttaaactgcatgaatgcggtctaccaaaaaaaatggctctagaactttttaaacctttcttatacgcaagattaaataaattaggcttagcatcaacaattaaacaagctaaaaaattagttgaaaaagaaagagatgaagtttgggacgctttagaattaatagtcagagaacatccggtaattttaaatagagcacctactttacatagattgggagttcaagcttttgagcccaaattaatagaaggtgatgcaattgaacttcaccctttaacatgcgcagcctttaatgcagactttgatggtgatcaaatggctgtacacattcctctaagtttagaagctcaacttgaggcaagagttttaatgatgtccacaaataatatattaagcccatctaatgggaagccaataatagtaccaagtcaagatatgatattaggaatttattatttatcacaaccaccccatcaagataaaagagttgagggatattttgttaacaattcagaaattgaacatgcattagaagttggtcaaataaaagttcattctagaatagtttcacgttttgagacacaagatgaaaagggtaataaaaaaattgaaaaacatattagtactgctggaagatttttattatc

SEQ ID NO: 255983 - DNA, 1383 bp, Unknown
  Bacterial polypeptide expressing nucleotide sequence isolated from the Sargasso Sea
tcgggtaacaaacctgaatggatgattttaacaacagttccagtaattcccccagaattacgtcctttagttcctttagatggtggaaggtttgcaacttctgatttgaatgatttatatagaagagtaattaacagaaacaacagacttaaaagacttctagatttaaaagccccggatataattgttagaaatgaaaaaagaatgctccaagagtcagtagatgcgctatttgataatgggagaagaggtagagttattacgggcactggtaaaagacctttaaaatctttagcagaaatgttgaaaggcaaacaagggcgttttagacaaaacttgttaggaaaaagagtagattattctggaagatcagtaattgttgtcggacccgaactaaaacttcatcaatgcggattgccaaaaaaaatggcattagagttgtttaagccttttttgtatgcaagattagataaattagggttagctacaacaattaaacaagcaaaaagattagtagaaaaagaaaaaagtgaagtttgggatgctcttgagcacataattagagaacatccaattttacttaatagagctccaacactacacagattaggcgtacaagcgttcgaagcaaaactaatcgaaggtaatgcaatagaacttcatccattggtatgtgcagcttttaatgccgattttgacggtgatcaaatggcagtccatatccctctcagtctagaggcacaactagaagcacgcgtattaatgatgtcgacaaataatattttaagtccatctaacggaaaacctattattgtaccaagtcaagatatagttttgggaatatattatctatctcaagacacaaacaaagaaaaagaggataaaaaattcaagggtattttctctgatatagaggaaattgagcaagctatcgaaaataaatcaattagtttgcattccaaaatcatttctacatttacgactttggatgaaacaggaaaagagataaaagaaaaatataaaagtacagctggaagatttttattagcaagtcttttacctaaaaatttcaatattaaattttctttgatagatagaactttgacaaagaaaaatatttcagaggtaattgatacaatctttagattttgcggtcaaaaagagacagtgatattctgtgatagaatcaaaactttaggtttcaaacatgcatttaaggcaggaatttcttttggaaaagatgatctgataataccaaaaacaaaagaaaatttaataaatgaaacaaaaaaacaaatagaagaatatgaaaaacaatattctgatggattgatcacaagaggagaaaagtacaataaagtagttgatatttggtcaaaatgt

SEQ ID NO: 255984 - DNA, 1069 bp, Unknown
  Bacterial polypeptide expressing nucleotide sequence isolated from the Sargasso Sea
acatattactcttgcagcgcctggttgctcatatattggtttttaaaatcacttccttctagaataagtttattacttgatatggctatgaaagacgttgaaaaaatactttattttgaaaattttgtagtaatggaacctggcacaactgatttaaaattaaatcaacttttgtcagagtcagaatatcaagatgctctggatgaattcggttccgagtttcaagcatcaattggcgctgaagctattaaagaaatgcttaaagaaataaatttaattgaagaaagagactcaatgagggaagagcttaaaactactacttcggagataaaaagaaagaagtatgttaaaagattaaagttagtagaagcttttataaattcaggaaaccttccagagtggatgattttagatgtggttcctatcttgccgcctgaattaagacctctggtccctcttgatggaggtagatttgctactagtgatttaaatgatttatatagaagagttattaatagaaataatagattaaagcgattattagatttaaaggcaccagatattattattaggaatgaaaaaagaatgcttcaagagtctgtagatgcactatttgataattctagaaggtcacgccccattacaggttctaataaaagaccattaaagtcattagcagatatgttaaagggtaaacaaggaagatttagacaaaacttattaggaaaaaggtgtgattattcaggaaggtcagttattgtagttggtcctgagttaaagctgcatgaatgtggtatacctaaaaaaatggctttagagttatttaaaccttttatctattcaaaacttgaattatatggacttgcaacttcaataaaagcagcaaaaaaaatggttgaaaaggaacaacctgaagtatgggatattttagagcaggttataagagaacatccagttttattaaatagagctcctacacttcatagacttggtatacaggcatttgaaccagtattaattgaaggtaaggctatacaattacaccctctagtatgtacagcttttaatg

SEQ ID NO: 255985 - DNA, 982 bp, Unknown
  Bacterial polypeptide expressing nucleotide sequence isolated from the Sargasso Sea
atgacagacaattatgacattatcaaagatttcttaacgccaactgaaatagttgtggaagaatcaggtcctacaagatctaaaattgttttagagcctcttgaacaaggttttggacacacgctaggtaacgctcttaggcgcataatcctctcatctatgcctggtacagctgtttctgaggtaaaaattgatggggttctccatgaatacagtactattgaaggagttcaggaggatgtaatagatattctattaaatttgaaagacctatcggtaagacttactgaggttgaagatgctgaactgacagtttctaaatcaggaagtggaaccgttactgctgctgatattgatctccctaatggtgttgaaatcataaatcctgatcatcacatagctacattaaatgatgaaggctcaattaacatgactatgaaagttacaaggggtagaggatttgtgccggttaagcctcttggcgaagatgaaggtcaagaaacaggtttgctcaggttagatgcgacttactctccaatcagaagagtcacttatcaagttgataatgccagagtagagcagagaactaacctagatagacttacggtcgacatcgatactgatggaactcttgaagctgaagaaattctaagaatttcagctactatacttcagcatcaactttctgcttttgcagaacttggaagactggaagaagttattgaagaaaaagaagaagctaaaatagacccaataatgttgaggccagtagatgagctagaacttactgtaagatcggctaattgtctcaaagcagaaaacattcattacataggagatctagtgaccagaatggaatctgatctcttaagaacaccaaatttaggaaagaaatctttaaacgaaattaaagaagtccttttatcaagaggcctttcccttggtttaattcttgataattggccaccagaaaacaattaga

SEQ ID NO: 255986 - DNA, 1231 bp, Unknown
  Bacterial polypeptide expressing nucleotide sequence isolated from the Sargasso Sea
tttgccaaaaaaaatggctttagaattatttaaaccatttttgtatgctagattagacaaactaggtctagcaactactattaaacaagcaaaaagattagtagaaaaagaaaaaagtgaagtttgggattcactcgagcacattattagagagcacccaattttattaaatagagctccaactttacatagattaggagtacaagcttttgaagcaaaacttatagaaggtaacgcgatagagttacatcctttagtttgcgctgcttttaacgcggactttgatggagaccaaatggctgtgcatataccattaagtttagaagctcaattagaagcaagagttttgatgatgtcaactaataatatattaagtccatcaaacggtaagccaattattgtaccaagccaagatatagttttaggaatttattatttgtctcaatctgacgataaagaaaaaaaaccaaaaggaatttttgcaggaatagaggaaatagaacaagctttagaaagtaaatctattagcttacactcaaaaataatatcaacttttaaaacattggatgaaaaaggaaatattaagatagaaaaatatactagtacagcgggaagatttttattagctaatatcctacctactaataataatattaaattttcgttagtaaatagattattaactaaaaaaaatgtttcagaggtaattgatactatttttagattttgtggacaaaaagaaacagttattttttgtgatagaataaaaacactaggttttaaacacgctttcaaagcaggaatttcatttggaaaagacgatttgttaataccaaaaacaaaagagaacttaattaataatacaaaaaaacaaatagaagaatatgaaaaacaatattctgacggtttaattacaagaggtgagaaatataacaaagtagtagatatttggtcaaaatgcactgatacagttgccaacgaaatgatgaaagaaatatcctctgctgaaaaaatttatgatgatgacagaatagaaactaattcagtatatatgatggcagattcaggggccagaggttcacaagctcaaatgaaacaattggctggcatgagaggtttgattgccaaaccgtcaggagaaataatagagacaccaattatttctaactttaaagaaggtttgtcagttttggaatacttcaactcaacacatggagcaagaaaaggttta

SEQ ID NO: 255987 - DNA, 919 bp, Unknown
  Bacterial polypeptide expressing nucleotide sequence isolated from the Sargasso Sea
aaaatataagcgaatgaaattcagaggaataatttgtgagaagtgcggtgttgaagtaactaagtcaaatgtaagaagagagagaatgggccatataaatctagctacccctgttgctcatatttggttcttaaaatctcttccaagcagaattgcactagctgttgatatgaaattaaaagaagttgaaagagttttatattttgaaaattttatagttattgagccaggattaacaggtttacaaaaaaatcaacttttaaatgaggaagaattagcaaaataccaagatgaatttggtgaagaggcatttacagctggaattggtgcggaggcagttttagaaatgctaaaaaatttagatttagaattagaaaagaaaaatcttgttaattatattaaagaaacaaaatcaaaagttaacgaggaaagagcgataaaaagattaaaattaatagagtcttttattgaaacaggtcaaaaacctgaatggatgatcatgactgttattccagttattccacctgagttgagaccacttgtacctttggatggtggtagatttgcaacatcagatttaaatgacctttaccgaagagtaataaatagaaataataggttaaaaagacttatggatcttaaggctccagatataattgtacgaaatgaaaaaagaatgctccaagagtctgttgacgctttatttgataatggaagaagaggaagggtaattacaggtacaggaaaaagaccattaaaatctttagcagaaatgttgaaaggaaaacagggaagattcagacaaaatttattaggaaagagagtagattattctgggcgttctgtaattgtagttgggcctgatttaaaacttcatcaatgtgggtttgccaaaaaaaatggctttagaattatttaa

SEQ ID NO: 255988 - DNA, 1229 bp, Unknown
  Bacterial polypeptide expressing nucleotide sequence isolated from the Sargasso Sea
tttgacatacattcaatcaaaccccgttgacacgtcaaagcaatatagttcaatcactattggtctatcttctcccgagaagatacttcaacgttcttttggtgaggttttaaaaccagagacaattaactacagatcttataagcctgaaaaggatggtctcttttgcgaaaagatatttggtccagtaaaggattatgaatgtcattgtggtaagtataaaggcattaggtatagaggtataatatgtgataggtgtggggttgaagttactcgtaaaaaggttaggcgcgagcgaatggggcacatcacgcttgctgttccaatagttcatatatggtatttgagatctatcccaagtaagttgagttacttagctggcaagagcactaaagagcttgaaagggttatttactatgagatgtttatggtaattgagccaggtgatagtggtcttgaaaagtttgaattaattgaagaagatgaatatcttgatctggaagagcaatttggctacatggcagtttctgatgaagatagagataatgagaactacttctatgcaactatgggtggtgaagcaatgaaggaaatgttgtcaaggttgaatattatcgatctaaaaaatgagctagttgatattgtaaaaacatcaaaatcaaaacaaaaaagaggtgaagccttaaaaaggttgaaggttgttcaatcctttgtcccgaatcctgtaaaaaatagaataaataagccagaatggatggttgtatctattttaccagtaatcccgccagaattacgtcccttagttcctcttgagggtggcagattcgctgcgtctgatttgaatgatttataccgtcgtattataattagaaataaccgtctaaagcagttaatggaaatcaaggctcctgatgtaatacttaggaatgaaaaaagaatgttgcaagaagctgttgacgcactttttgataataacagaagaaaaacagccataagaagcggttctagaaggccgcttaaatctctttctgatatgttaaggggtaagacaggtcggtttcgacaaaatcttcttggaaaaagagttgattattctggaagatctgtaatcgttgtaggtcctcagttgcagcttcatgaatgtggtatgcccaaaaatatggcgcttgaattatttaagccgcatatgattcatgagttgatggcaaggggttatactcaaacgccaa

SEQ ID NO: 255989 - DNA, 3037 bp, Unknown
  Bacterial polypeptide expressing nucleotide sequence isolated from the Sargasso Sea
tacatcaatggtggattaccaaagaaaatggcactcgaattatttaagccatttatttttaataagttagagcagaaaggaataacaataacaatcaaagctgcgaaacaattagttgaagaagagactcctgaagtatgggattgtttagatgaagttataagagagcatccagttttattaaatagagctccaacgcttcataggcttggtattcaagcgtttgaaccagtattaattgaaggtaaagctattcaattgcaccctctagtttgtaccgcatttaatgctgattttgatggagaccaaatggctgttcatgtgcctctatcacttgaagcacaacttgaagcacgtgctttaatgatgtctacaaataatattttatcccctgctagtggagaaccgattattcaaccaaaccaagatgttgttctaggtatttattatttaactaaagaagattttggtcttccaggagaaggaagatcttttgtagacgtgcatgaggtaaaaagagctttcctagagaagcaaattaatctacacactaaaattaaagttagagttacagaaggtgacaataagaaagtttatgatactactgttggtagatgtctgttatatgaaatcatgcctacagggttagaattttcaaaaataaacaaaacactaaaaaagaaagatgttcttaatctgatatctcacgtatataaagatttcggtctaaaagaatctgttctttttgctgaccaattaatgtatctaggttttgaatattcaactacatctggtgcttctattggagtaaatgattttgagattcctgataataaagaggccattatttctaatgcagagaatgaagttcagaatatagaacaacaatttgagtcaggtcttctaactaaaggagaaaaatacaacaaaatcatagatatctggtctagaactaatgaaaaagtagctagttcaatgatggatgctttaggcgatcagatagacactgacaaagatggcaaagaaattatatccccatcatttaatagtgtatttatgtatgcagattcaggagccagaggatctccagcacaaataaggcagttagctggaatgagaggtctgatgtctaagccagatggtagcatcattgaaagtgctattacatctaattttagagaaggtttatctatgcttgagtactttacttctactcacggcgcacgaaaaggtcttgctgatactgcccttaaaactgcaaattcaggctatctaacaagacgtttagttgatgtatctcaagatgttgttatcactacagaagactgtggaactgaagaaggtataacagtcgaagcaattattgatggtgcatcagtaattcaaacaatatctgaaagaattttaggccgagttttacaagaagacattaaaaaaggaagtaaggtgctttttaaaaaaggacatctttttgatgaagaatctgctatggaagttcaaaattctggtgttaagaaagtaaaaattagatctccaataacttgtgaagcaagccatggtttatgtgcaaaatgttatggtcgagatttggcaagaggacatttagttcatataggtgaagcagtaggtgttgttgcagctcaatcaattggagagccaggaacacagcttactatgagaacattccatattggtggagctgcatctggttctgcagaggatgattcaataacaacattaagaggtggaatcgtagttttcggatcttctctaaaaactgttgagaaaaagaatggtgaatttattgtcgtatcaagaaatgcccatttaacaattcaggatgaagatgaaaatttacttgaaaaatattctgtaccttatggtgctgagattctctatagcgataaatcaaaagtagagccaggtacattaatctctaaatgggatccactaacacttccaatcatttctgaagttgaagggacaatatctttcaatgatttaacagaagatataacaatgaaagttgaagttgatgatctaacaggatcaacaacaagagaagtgattgatgttaatgagagacctgttaaaggaaaaacaatgactccaatacttacagtagttgactctaagaaaaaggttgtcggatcttatactttgccatctaaatcaattttaatgaaaaataatggcaacaaagttacaaaaggagaatttttagcaagagtccctgtagaaggtacaaaaacaaaagatataactggtggtcttccaagagttgcagacttgtttgaagcaagaaaacctaaagatggtgcaatttatgcggagacttcaggaacactttcttatggaaaagaaacaaaaggaagaaaaagattggtgataacacctaagaaaggcgatccagttgaaatgatgattcaaaaatatagagctgtttccttcttggaaggagattatgttgaaagaggcgacatactttgtcacggaccagtagatacacatagtcttctagctttacatggagttgaagaattagctaaacacttaattgctgaagttcaggatgtttacagacttcaaggtgttgtaataaatgataaacatattgaaacaatatgtaggcaaatgatgaaaaaagtcaccattacagaatctggagatagtgattatattgaaggcgatatagtggatcttggccaagtaagagcagcaaataaaaatcttgaagcttcaggaaaaaaaccagctatatttgatagaatgcttttaggtataaccaaagccgcattatcaactgattcatttatttctgctgcttctttccaagaaacaacaagagttttgacagaagctgcagttacaagccgaaaagatatattaaaaggcctaaaagaaaatgtcgttgttggtagattaatacctgcaggaacaggttttgcagccaatcaaagggcaagtgtttcatcagaagaaatacaagacatagaagaagcattgaaaaaagaactactggaaagctttcagtaag

SEQ ID NO: 255990 - DNA, 814 bp, Unknown
  Bacterial polypeptide expressing nucleotide sequence isolated from the Sargasso Sea
catgagttcacatcaattaaaggtgtaagagaagatgttaccgacatagtactaaatgtgaaatctttagctttaaaatcatcgtcagaaggaactaagaaacttattttagatgctaaagggccaggagaaataaaagcttctaacatcacgccggttgctgatgtggagattttgaatccagatttagttatttgtaatttagatgaaaatacaagttttcatatggaaatgaatgttaatacaggtaaaggatatgttcctgcagaacttaataaacctgaagaaccaccgttaggattaattgcgatagattctctttatagtccagttaaaaaggtatcttattcagtaagtactgcaagagagggtaaagcacttgattacgataaacttactatggaagttgagacagatggctctatttctgcagaagatgctgtagcttattcagctagaatttttcaagatcaattaaaaatgttcattaactttgatgaacctgtggaggcacctgttaaagaggtttcaacagaaccagaatttaataaaaatttattaagaaaagttgatgaattagaactatctgtacgatcaatgaattgtttaaaaaatgataatataatttatattggtgatcttgttcaaaagtctgaaggtgaaatgcttagaacaccaaattttggaagaaaatcacttaacgaaattaaagaggttttaacaggaatgtcattatatttgggtatggaaataccaaactggccaccagacaacattgctgaaatgtctaaaaaactcgaggaagctatataaa

SEQ ID NO: 255991 - DNA, 3768 bp, Unknown
  Bacterial polypeptide expressing nucleotide sequence isolated from the Sargasso Sea
aatgtccgttacatctacaaaatcaatcgaaggaatcacatttgcagtttggtctcctcaggaaattagaaaatattctgttgttgaaattacacagcctgaaacatatgatgaagatggtatggctgtccaaggaggtttgatggacggtagactaggagttttagaacctggacaaaaatgtcttactgacggtaatactgctgctagaagtcctggacatttcggtcacattgaattagcagagcctgttttacacattgcttttgttgacaatatctacaaattactacaatcaacatgtcgtacttgtggaagaatcaagatgtctcctgaagatatcaaagaattttctaaaattaaagaacgtcaggcatcatacactgtcttatctcaaaaaagaattccagatcaaattcaagaaaaggctaaaaaacaaaaggattgtcctcactgtggaaaatcacaatacgaattaattttcacaaaaccaacaacatttgtagaaaaaacagagattggtgaaaacagattactacctattacaattagagaacgattatcaataattcctgacgaagatcttgcattattgggatatgatcctaagactgcacgtccagaatggtttgttttacaagcattacctgtacctcctgtaactgttagaccttcaattattctagaaactggaattcgttctgaagatgatcttactcacaaattagttgatattattcgtgtaaatcaaagactaaaggaaagtaaagaagccggaactcctccactaattgtacaggacttggttgatcttttacaatatcatgttacaacctattttgataatgaagtaagtggaattccgcaagcccatcaccgttctggacgtccactcaaaacattaactcaaagattaaaaggaaaagaaggacgatttagaggttcattatctggaaaacgtgttgacttttcaagtagaactgttatctctccagatccaaacttggacttgtctgaagttggtgttcctgaaactgtagccaaaaaattaaccattcctgaaattgtaactgattggaatattgaaaaattaaaaaaattggtaatcaatggtccatctactttccctggtgtgaattacattactcgtcctgatggtgtaaaaattagacttgacttcgttgaagaccgttcattaattgctgattccctagaaattggattcttggttgaaagacatctaatggatggtgatattgtattattcaacagacagccatcacttcaccaaatgtctatcatggcacattatgtgagagtattacctggaaaaactttcagattacacccatctgtatgtcctccttacaatgctgactttgatggtgatgaaatgaatcttcatgttccacaaagtgaagaagcacgttctgaagcaattttactaatgagagttcaagatcaattaatttccccaagatttgggggtccaattattggtggtcttcgtgactttatcaccggtgcatacctcatgacaaaagatggaaccactttgtctagtcaagagtttgcaaatcttgcaatgcttggaggatttacaggacaactaccagaacctgaaaacaagaaagaaaatctctatactggaaaacaattattctcaatattccttcctgaagatttcaattatgtaatgacatcaaagtggtctaaaggtactaaaggaaaagaaaaagatgttgtaatcaaaaatggtcaactaatcagtggtgtaattgataaatcatcaattggtgctgaagaaccagaaagtgtactacatagaattgctaaagattatggtaatgaaaaagcaaaaattttcttaaactctgaattaattgttatcaaacaattcatcactcattatggatttagttatggatatggtgacttggaagttcctgaaaaagatcgtgaaggaatcagttctgacataaatcaaacatatgatgaagttttagatttgattagtcaagaaaagaaaggaacactaaaggcaactagaggaatgactactcaagaaactcttgaagcatacattgtaaataatttgggtaaattaagggacagagctgctacagctgcaaatctctcacttgatgatgataatgcgggtaaaattatggcaactactggtgctagaggttcatcattaaacgtaggacaaatggctggtgccttgggtcaacaagcaagaagaggtaaccgtcttaacaaaggttacaataatcgtgttttaactcatttcgaagaacatgaaaacgatcctgacgctcacggatttgtaaaatcaaattatcgtgatggtctatctaccttggaatttttcttccatgctatgggtggtagagaaggtcttgtagatactgctgtaagaacacaacaaagtggatacatgcagagaagactgatcaatgcattagaacacatcaaattagaatatgatggaactgttagagatccacacggtcacatcattcaatttttgtatggtgaagacggaattgatgttgcaaaaagtgatcatggtgaagcattcaacattgatagattaattgaatctgaaagcattgttgattctggaaaagccgcaacaaaagatgtagttgcaccaattatcaaaaaatatactagtacattcaatcctcgtttatccaatgctgttagtacttcattagaaaattcaaaattaagtaaagaaggtgttgagaaagtagcaaagaaaggattatcattatacaatagtgcaaaagcagaacctggtcaggctgtaggaattgtaactgctcaatctattggtgaacctggaactcagatgactttgagaacattccactttgcaggaattgcagaacgaaacgttactttgggtcttccaagattaattgaattggtagatgcacgaaagaaacctgttactccaacaatggatatttacttgtctggtgatgcaaaaacagatcaagcaaagactgttcaagttgctcgaaacatcttacaaactactgttaatgatttaattcttgaagctgatactgattataaaacaaagattactcttaacctaaatgaaagaaaactaactgaccgtggttgtaccgtcgatgatgtaaaagcagcactagaatctaataaaaaattcaaaatggaagataatggaattaattcaattgttctaaacctagttgatgaagaggctgatgcccctgctgttattgtagtaagaaacaaggtactaaaaacaactgtaaagggtgttcctgatattgcacgtgttacaattgtcaaaaagaatgacgaatatgttattcaaacaaccggttctaatctttctaaagtattggaagttgaaggaattgataaaaacaatgttagaacaaataatgtttcagaaattgctgaaacacttggaatagaggctgcaagaaatgctttgattaatgaattaagtaatacactagaagatcaaggtctagaagttgaccaaagatatctgatgttagtatctgatttaatgtgtcatcgtggatacatgcaacaaattggacgtcatggaatcgcaggtactaaagacagtgtattggctcgcgctgcatttgaaattactgtaccaacaattgcaggtgctgcaagaacaggtgaaactgaacaactaagaggaatcacagaaaacgtgatcgtcggaagtcaaattccaattggtagtggaactgttgatttgta

SEQ ID NO: 255992 - DNA, 1112 bp, Unknown
  Bacterial polypeptide expressing nucleotide sequence isolated from the Sargasso Sea
attcttatatgcaagattaaacaagttaggacttgcgtcaacaatcaagcaagcaaaaaaaattgtagagaaagaaagaaatgaagtttgggatgcgttagaagttattgtaagagagcatccaattcttttaaatagagctcccactttacatagattgggagtacaagcatttgaaccaaaacttatcgaaggagatgctattgagttgcacccattagtttgtgcggcatttaatgctgattttgatggcgatcaaatggctgttcatatacctttaagtttagaagcacaattagaggcgagagttttaatgatgtcaacaaataatatattaagtccttctaatggaaaaccaataattgtaccaagtcaagacatgatacttggaatttattatttatcacagccaccttaccaaacatcaaaagttgaaggttattttgttaataattccgaaatagagcatgctctagagactggtcaagttaaagttcattcaagaattatttctagatttgaaactattgatgaaaatggaaatacaaaatatgaaaaatacacaagtacagtaggaagatttcttttagcaaatgttttaccaaaaaataaagatattaaattcagcttaacagacagattactacctaaaaaaatggtttcagaaattattgatattgtttttagatttactgggcaaaaaagtactgtaattttttgtgataaattaaaagatttaggatttaaacatgcttttaaagcgggaatatcatttggtaaagatgatcttattattcccgataataaagaacagttaattaatgaaacaaaaaaattgataaaagattatgaaaatcaatattcagaaggtttaattacgaggggagaaaaatataataaggtagttgatgcgtggtctaaatgtacagatcgcgtagcagctgaaatgatgaaaggtatttcagcaacagaaagcacagaagatggtttgaaaattaattcagtttttatgatggcagatagcggggccagaggatctgccgctcaaatgaaacaattggctggtatgagaggtttgattgcaaaaccatctggtgaaattattgagtctc

SEQ ID NO: 255993 - DNA, 319 bp, Unknown
  Bacterial polypeptide expressing nucleotide sequence isolated from the Sargasso Sea
atgcaaactacatcaagtattatagataaaaattggaaagctttaattaaaccggataaattagaaatcacaagtaatgaagataaaactattgcaaaagttgttgcagaaccactagaaaaaggatttggtcaaactattggtaactctctaagaagaattttactttcatctatacaaggcgcagctgttagcgctattcaaatagacggcgtgcttcatgaattttcatcaatcaaaggggttagagaagatgttacagatattgtattaaatgttaaaaatttagcgataaaatcttcttctacaagtcccaaaa

SEQ ID NO: 255994 - DNA, 703 bp, Unknown
  Bacterial polypeptide expressing nucleotide sequence isolated from the Sargasso Sea
atgcaaacatctggtaatgttatagataaaaattggaaagcgcttattaagcctaataaattagatatcacaagcaacgaagataaaacaatcgcaaaagtagttgctgaaccacttgaaaagggttttggacaaactattggtaattcattgcgaagaattttattatcttctattcaaggagcagcagttacagcaattcaaattgatggtgtattacacgaattttcatctattaaaggtgtcagagaagacgtaactgatattgttctaaatgtaaaaaatttagcaataaaatcatcttcttccgcatcaaaaaaaattattcttgatattaaaggtccaaaagaagtaaaagccaaagatataactttagttccagaagttgaaattttgaacccagagcaaactatttgcaatttggatgaaaaaacacattttcatatggaattaatggtcagtataggaaaaggatatgtacaagcgcctaaaaataagacagatgatagtcctcttggattaatttcaatagactctttgttcagtccagtaaaaaaagtatctttctcagttgaaaatacaagagcaggtagcgctttagattatgataaattgataatgacagttgaaaccaatggaacggtcgacgcagaagacgcaatagcttactctgcaagaatttttcaagatcagctatcaatgt

SEQ ID NO: 255995 - DNA, 2578 bp, Unknown
  Bacterial polypeptide expressing nucleotide sequence isolated from the Sargasso Sea
acctttggttccttagatggtggaagatttgcgacatctgatctaaatgatttgtatagaagagttattaatagaaataacaggttaaaaagactgatagatctaaaagcgccagatattataatcagaaatgaaaaaagaatgcttcaagaatctgttgatgcattatttgataacggcagacgtggtagagttattactggaacaggaaaaagacctttaaaatctttagctgaaatgcttaaaggtaaacaaggaagatttagacagaatttattaggaaaaagagtagattactcaggaagatctgtaattgtagtagggccagatttaaaacttcatgaatgcggattgcctaaaaaaatggcattagagttatttaaaccttttttatacgcaagattgaataagttaggtttagcatcaacaattaaacaggcaaaaaagattgtagagaaagaaaaaaacgaagtatgggatgccttagaacttatagtaagagagcatccagttatattaaatagagcgccaactcttcatagattaggtgttcaggcatttgaaccaaaattaatagagggtaacgcaattgagttacacccacttgtttgtgctgcttttaatgcagactttgatggagaccaaatggctgttcatgttccattaagtttagaggcacaactagaagcaagagttcttatgatgtctacgaataatattttgagtccttcaaatggtaaaccaattattgttcctagtcaggatatgatattaggaatttattacttgtcacaaccaccatatcaaacggaaaaagttgatggttattttgttaatacgtctgaaattgagcatgctttagaaactggccaaataaaagttcattctagaatagtttcaaaatttgaaactgtcgatgaaaatggaaatacaaaatttgaaaaacatataacaacagcgggtagatttttattagcaaatcttttaccaaagaataaggacattaaattctcattaattgacagattattacctaagaaagtagtctctgaaataattgatatggtttttagatttaccggccaaaagagtacagtgattttctgtgataaattaaaagatcttggttttaaacatgcatttaaagcaggtatttcatttggaaaagatgatttaattattcctgaaaataaagagcaattaatagatgaaacaaaaaaactaatttcagattatgaaaatcagtattcagaaggattaattacaagaggagaaaaatataataaagttgttgatgcttggtctaaatgtactgacagagtagcaggtgagatgatgaaaagaatttctgctacagaaaaaacaaatgaaggtttgaaaattaattctatattcatgatggcagatagtggtgcaagaggatctgcggcacaaatgaaacaattggctggtatgagaggactaattgctaaaccatctggagaaattatagaaactcctattacttcaaattttaaagagggtttaacagcattagaatattttaattcaactcatggagctagaaaaggattagctgacacagccttaaaaactgcaaattcaggttatttaacaagaagattatgtgatgtagcccaagacttgactataactaagaaagaatgtgactgtggtaaagcaacgggaattaatttatctgaaattattgagggtggaaatgtaattgtaagtttatctgaaagagcattaggaagaatagcagctaatgatataaaaaatccaatctctggagaaaaaataatcagcaaaggagaaatgattgacgaagcgggatgtgaaaagatagatgcagctggggtaaaatctataatggtatattcagtaattacatgtggatctaagaaaggggtttgtgcaatgagttatggtagagacttgtctagaggtaaaatggttcacgaaggcgaggctatcggtatgatttcagcacaatcaattggtgagcctggaactcagttaactatgagaacattccacgttggaggaacagcacaaataaagcaggaatctcagattattacaaagagtgagggtacattaagaataattaatactaatttgttagaagactctaagaaaaacttagtagttatgggaagaaatactcaattatctttagaagatgataaaggaaaccaaattgctctttacaaaatcccttatggttcaaaactgtttttccaaaatggagacaaaataaaaaagaattcaaaaatttgtgaatgggatccatatacaacacctgtaattgctgagaaaagtggtacagcaggttttgtagacctaattgatggcgtatcaattgcagaaactactgacgatgcaactggtatatcaactaaaacagttgttgattggaaaacacaatcaaaaaatactgatttaaaacctcgtatcacacttagagatgataaaggaaatgttataaaaaaagccgatgataatgaagcaagatattatttagtaccagattcaatattatcagtaaaagatggacaaaaaattttgctggtga

SEQ ID NO: 255996 - DNA, 739 bp, Unknown
  Bacterial polypeptide expressing nucleotide sequence isolated from the Sargasso Sea
atggaaacatcagaggtaaatataaaaaattggaagtcacttattaaaccaccaaaacttgatgtaaatttaagtgatgataaatcttatgccaaaattgtagctgaacctttagaaaaaggctatggtcttacacttggtaattctttaagaagaattcttttatcatcaattagaggaacagcagttactgcaatacagatagatggtgttctgcatgaatttacgtcaattaaaggtgttagagaagatgtaacagatatagttttgaatgttaaatctttagctttaaaaagtaactctgaaacaacaaataaactagtcttggatgcgaaaggcccaggtgaaattaaagcgtcaaatattacaacatcagcagatattgaaatattaaatccagatttagtaatatgtaatttagatgaaaacacgaatttccatatggaaatgacagtaagtaacggtaaaggttatgtctcagcagatatgaataaacctgatgaaccacctttaggacttatttctatagactcattattcagtcctgtaaaaaaagtttcatattcagtaagtacagcaagagaaggtaaggctttagactatgataaactaactatggaagttgaaacaaatggatccatatcagccgaagatgctgtagcttattcagctagaatatttcaagatcagctaggaatgtttgtcaactttgatgaaccacaagaaggtaattgttaga

SEQ ID NO: 255997 - DNA, 1072 bp, Unknown
  Bacterial polypeptide expressing nucleotide sequence isolated from the Sargasso Sea
gatgaagtttaggggaattatttgtgaaaagtgtggtgtagaagttacaaagtcaaatgtaagacgtgaaagaatgggacatattgatttggcatgtccagttgcacatatatggtttttaaagtcattgcctagcagaatatctttagccattgatatgaagttaaaagaggtagaaaaagttctttactttgaaagttttattgtgatcgaaccaggtctaactaaattaaaaaaaggacaattacttaatgaggaagagctaattaaagcccaagatgagtttggagaagatgctttttctgcaggtataggagctgaagcagttcgagaaattctaattaatttagatttacaattagagcaaaaaaaattaagagagtctttaaaagaagttaaatctaaagttaccgaggagagaacgattaaaagacttaaacttatagagtcgttcataaattctggaaacaaacctgagtggatgattttaacaacagtaccagttataccacccgaattaagaccactagtcccgctagacggcggaagatttgcgacttcagatcttaacgatctttatagaagagttataaaccgaaacaatagacttaaaagacttttagatcttaaggcgccggacattatagtaaggaatgaaaaaagaatgttacaagagtcagttgatgctctttttgataacggaagaagaggcagagttataactggaactggcaaaagacctcttaaatctcttgctgaaatgttaaaaggtaaacagggaagatttaggcaaaacttactaggtaaaagagtagattattctggtcgatcagtaattgtagttggtcctgaactcaaattgcatcagtgcgggttaccaaaaaaaatggctttagaactttttaaaccttttttatatgcaagattggataagttaggtttagctaccactattaaacaagcaaaaagattagtggaaaaagaaaaaagtgaagtttgggatgctttagaatatataattagagaacatcctgtgttgcttaatagagcaccaactttacacagattgggg

SEQ ID NO: 255998 - DNA, 772 bp, Unknown
  Bacterial polypeptide expressing nucleotide sequence isolated from the Sargasso Sea
ctgcttaatttgaaagctgtttgtttaaaagttcactctccaggtttaaaaaaaatgtatataagaacaaagggacctggtgaaatcagagcaggaaattttgaaactgattctgaaacagaaataatgaatcctgatcaaattatcatgactcttgatagtaatgcagatattgagcttgaggcaaatatagatactggtaaaggatatctttcagctgaagtagctgaagatgaagaaaaaattattggagaaattaagcttgatgcaatgtttagcccagtaaagagagcttcttataaggtagaaaatagtcgtgtgggacaagtaactgattatgataaattaattttagacatagaaacaaacggagctgtttcacctgatgatgcaatagctttagcagcaagaattttacaagatcaacttcaaccatttattaattttgatgaaccagaagttcaaatggaaacctcttctcatgaaaagttatcttttaatcctaatttacttaaaaaagttgaggagttagaactgtctgttcgttctgctaattgtcttaaaaatgataatataatttatattggtgatttagttcaaaagacagaatctgaaatgttaagaactcccaattttggaagaaaatctctaaatgaaattaaagaagttcttcagcagatggaacttggtttaggtatttcagttcctgattggccgcctgaaaatatagaagaattggcaaaaaaatttgaagatccatttaataaataat

SEQ ID NO: 255999 - DNA, 1321 bp, Unknown
  Bacterial polypeptide expressing nucleotide sequence isolated from the Sargasso Sea
tgcggtaaatataaaaggatgaagtttaagggcatcatatgtgaaaaatgtggagttgaggtaacaaaaaaagatgtaagaagagagcgaatgggccatattcaactagctgcacctgttgcgcatatttggtttctaaagtccttaccaagtagaatagctttaatgatggatatgaaactcaaagatttagagaaggtcctctactttgaaaaattcatggttacagagcctggtctaactccattagagcaaaatcaattgcttgatgaagaggaactagaagcagcaaaagaagaatatggtgaggatggattttctgctggtattggcgctgaagctgtaagaagagtattagagagaattgtactagttgatgaactagaagctcttaagaaaaagttagaagaaaccaaagctattgcactctcagaaaaacttgtaaaacgaataaagatatttgaagcttttatctcttcagggaataggcctgaatggatgatactcacaagcatacctgttattccacctgaattaagaccacttgttccacttgatggtggaagatttgcatcctcagatcttaatgacctatacagaagagtaataaatagaaacaatcgattatcgcgattaatggaattaagagctcctgatattattatcagaaatgaaaagagaatgctccaagagtctgttgacgcactttttgacaatggaagaagaggtagagtgattactggtaccaataaaagacctttaaaatctctagctgaaatgttgaaaggtaaacaaggcaggttcagacagaatcttctaggaaaacgagtagattattctggtagatcagtgattgtggtaggtcctgaattaaaacttcaccaatgtggacttccaaagaaaatggcaattgaattatttaaaccatttatctatgcaagattagaggcacttggtctagctaccactctaaagcaagcaaaaaaaatggttgaaaaagaaagaccagaggtttgggatgttcttgatagagttataagagagcatccagtaattctaaatcgagcacctacactgcaccgtctaggggtacaagcatttgaaccaattcttattgagggaaaagctattcaattacatccattagtatgtaccgcattcaatgcagacttcgatggtgatcaaatggctgtacatgtgcctcttagtttagaagctcaactagaggcaagagttttaatgatgtctacaaataatattcttaaccctgctaatggaaaacctgtgattgttccaagccaggatattgttttgggtatat

SEQ ID NO: 256000 - DNA, 2140 bp, Unknown
  Bacterial polypeptide expressing nucleotide sequence isolated from the Sargasso Sea
atgaaagctctgctcgatctattcaagcaagtccaacagcctgaagtttttgacgcgatcaagatcggtctggcctcgccagacaagatccgttcgtggtcgttcggtgaagtcaagaagccggaaaccatcaactaccggacgttcaagccggaacgcgatggtttgttctgcgcgaagatcttcgggccgatcaaagactacgaatgtctttgcggcaagtacaagcgcctgaagcatcgtggcgtgatctgtgaaaagtgcggcgtcgaagtgacgctcgcgaaggtgcgtcgcgaacggatgggccacattgagctggcctcgccggtcgctcacatctggttcctgaagtcgctgccgtcgcgtctgggcatggtgctcgacatgacgctgcgcgacatcgaacgcgtgctgtacttcgaagcatacgtggtgatcgatccgggcatgacgccgctgaaagcgcggcagatcatgaccgaagaggattactacaacaaggtcgaagagtacggtgacgaattccgtgccgaaatgggcgcggaaggcgttcgcgaactgctgcgcgcaatcaacatcgacgaacaggtcgagatgttgcgcaccgaactcaagaacacgggttcggaagcgaagatcaagaagtacgcgaagcgcctgaaggtgctcgaggctttccagcgttcgggcatcaagcctgactggatggtgctcgaagtgctgccggtgctgccgccggaactgcgtccgctggtgccgctggacggcggccgcttcgcgacgtcggacctgaacgacctgtatcgccgcgtgatcaaccgtaacaaccggttgaagcgtctgctcgaactgaaggcgcctgaaatcatcgtccgcaacgaaaagcggatgctgcaggaagccgtcgattcgctgctcgacaacggtcgtcgcggtaaggcaatgactggcgcgaacaagcgtccgctgaagtcgctcgctgacatgatcaagggtaagggcggtcgtttccgtcagaacctgctcggtaagcgcgttgactactcgggtcgttcggtgatcgtggtgggcccgacgctcaagctgcatcaatgcggtctgccgaagctgatggcgctcgaactgttcaagccgttcatcttcaacaagctcgaagtgatgggtgtcgctaccaccatcaaggctgcgaagaaggaagtcgagaaccagacgccggtggtgtgggacatcctcgaagaggtgatccgcgaacatccggtcatgctgaaccgcgcgccgacgctgcaccgtcttggcattcaggctttcgagccggtgctgatcgaaggtaaggctatccagctgcacccgcttgtttgcgcggcgttcaacgccgacttcgacggtgaccagatggctgtgcacgtgccgctgtcgctcgaagcgcagatggaagcgcgtacgctgatgctggcgtcgaacaacatcctgttcccggccaacggcgatccgtcgatcgtgccgtcgcaggatatcgtgctcggcctgtactacgcgacgcgtgaagcagtgaacgccaagggcgaaggcctgacgttcaccggcgtgtcggaagcgctgcgtgcttacgagaacaaggaagtcgagttggcctcgcgcgtcaacgtgcggatcacggaaatggtccacaacgaagacaagtcggaaggcgcaccggcattcgtgccgaaggtcacgctgtacgcgacgaccgtcggccgcgcaatcctgtcggaaattcttccgccggggctgccgttctcggtgctgaacaagccgctgaagaagaaggaaatctcgcgcctcatcaacaccgcgttccgcaagtgcggtctgcgcgaaacggtgattttcgccgaccagttgatgcaatcgggtttccgtctggcaacgcgcgccggtatttcgatttgcgtggacgacatgctcgtgccgccgcagaaggaaaccatcgtcggcgacgccgcgaagaaggtgaaggaatacgaccgtcagtacatgtcgggtctcgtcacgtcgcaagaacgctacaacaacgtggtcgacatctggtcggcaacgtcggaagcggtcggcaaggcgatgatggaacagctgtcgacggaacccggtggttgat

SEQ ID NO: 256001 - DNA, 1024 bp, Unknown
  Bacterial polypeptide expressing nucleotide sequence isolated from the Sargasso Sea
ttgagtattgaaaaaaattggcgagaattacttaaacctaatgtagtaaatatggaggctggatcagatcctctaaaaaaatccacattagttgttgagcctttggaaagagggtatggaataactctaggtaatgccctaagaagggtacttttatcttcgcttcaaggttctgcagtttacggatttaaaattgatggtgtcttgcatgagttttcttctatttcaggtgttagagaagatgtcattgatattgcgctaaatattaaaaagataatatttggtgctgattttaatggcagtaaaattcttacaattgagaaaacaggaccaggagttgttgttgctggagatataactttatctgatgatattgaggttatgaattctgatttagtcttgtgtactctcgatgaaaatatttcttttagaatggaattatatattaaaaatggaaatggttatgtttctgccgaagaaaacagagacgaggatgacccaataggtatgattcctgtggacagtatttatagtccagtaacaaatgtgtcatatgaagttgataatgccagagaaggcgagtttcttgattatgatagattatctttatcaattgaaactgatggctctgttaaacccgaggatgcacttgccttttctgctagaattttaattgatcaacttaatccttttattaattttgatgaaccagaagaggaagttattgaggaaagtgaagatgaactggaatttaatgcatcacttcttaagaaagttgatgagcttgagctatccgtcagatctgccaattgcttaaaaaatgataatattgtttatattggtgatttaatccttaagtctgagaatgaaatgttaagaactcctaattttggaagaaaatccctcaatgaaatcaaagaagtattaagtgaaatgaatttatctcttggaatggatataccaaattggccgcctgaaaatattgaagaattagccaggaaacatgctgcagataagttttagt

SEQ ID NO: 256002 - DNA, 1030 bp, Unknown
  Bacterial polypeptide expressing nucleotide sequence isolated from the Sargasso Sea
atggaaacagtagacgtaaatattaaaaattggaaatcacttatcaaacctgcaaaacttgatgtaaatttaagtgatgataaatcttatgcaaaaataattgctgaacccttagaaaaaggatatggattaactttaggcaatgctttaaggagagtattgttatcttcaataagaggaaccgcagttacagctattcaaattgatggagttcttcatgaatttacttcaattaaaggagttagagaagatgttactgatatagttttaaatgtaaaatctctagcattaaaaagttcatcagaaggatataaaaaattaattttagatgctaaaggacctggggaaataaaagcttcaaatataactgaagttgctgatgtagaaatattaaatccagatttagtaatttgtaatttagatgaaaaaactaattttcatatggaaatgacagttggaagtggaaaaggttatgtttctgctgacatgaataaaccagaggaaccacctttaggattaattcctatagactctttatttagtccagtaaaaaaagtttcttattcagttagcacagcaagagaaggaaaagctttagattatgacaagttgataatggaaatagaaacaaatggatctatatcagcagaagacgcagtagcatattctgcaagaatttttcaagatcaattaaatatgtttgtgaactttgatgagcctcaagaagtaattgttagagaaaaaccaacagaaccagaatttaataggaatcttttacgtaaagttgatgagctagagctttcagttagatcaatgaattgtttgaaaaatgataacattatttacatcggtgacctagtacaaaaatcagaaggtgagatgttaaggacaccaaattttggtagaaagtctttaaacgagataaaagaagttttgaatggaatgtctttatatttaggtatggaaataccaaattggccacctgacaatatagctgaattgtccaaaaaattagaagagtcgatttaat

SEQ ID NO: 256003 - DNA, 538 bp, Unknown
  Bacterial polypeptide expressing nucleotide sequence isolated from the Sargasso Sea
atgaaaacatcagtaatagacttattagttccaacagaaatacaagttgatgatatttcaccaaccctatcaaaggtaacactagagcccttagagagaggatttggtcatacattaggaaatgctttaagaagaattcttctttcctcgatgcctggagcagcagttacagacgtagcaatagatggtatttcgcatgaatacagcactatagaaggaataagagaagatgtaatagatattctattaaatataaaagatatgccgattaacattatagaaggagattctgcagaggtaagcttggatgtaaaaggaccatgcgatgttttagcatcctcctttgaggcaccaggtaatgttgagcttgttaatcaagattttcatatcgctacaattgtagacaaagtaagccttaagatgactcttactgttaaaaatggaagaggttatgaaccagctgatttaagaaagatgaagatagggttgtcggagcacttaaagttgatgcttcttttagtcctgtcagaagagttca

SEQ ID NO: 256004 - DNA, 1261 bp, Unknown
  Bacterial polypeptide expressing nucleotide sequence isolated from the Sargasso Sea
atgcaagacattatcaaaaatataaataaaagctcaagaagaaatttcgaccttatctcatgtggacttgcttcacctcaaatgattagatcatggtcctggggagaagttaagaaaccagaaactatcaattatagaaccttcaaacctgaaagagacggcttattttgtgcaagaatttttggccctataaaagattttgaatgtctttgtggaaaatataaaagaagaaagcatagaggtgtaatctgtgaaaaatgtggcgttgaagtaacggccactaaagttagaagagaaaggatgggccatattgaattagcctctcctgttgcacatatttggttcttaaaatcacttccttcaagaataggtctattccttgacatgaccttaagagaaattgaaagagttctttattatgaaagttttgtagttgttgaagcaggaattactgatctcaagaaaggacaattacttactgaagaagaatactatgaggcattagacgaatatgatgatgacttcactgcactaatgggggcagaagctatacaaattctattaaatgaagttgatctagaaaaagaacttcaagtaattaaagaagaattaagtactagtggttctgaaacaaagattaaaaaacttcaaaagagattaaaactaatagaagcttttaaggaaagtggacaaaaaccagaatggatgattatgaatgttcttccagtcttacctcctgatctaagaccattggtaccattagatggagggaggtttgcaacatctgatctaaatgatttatatagaagagttataaatagaaacaatagactcaaaaggctacttctcttaggtgctccagaaatcatcgtcagaaacgaaaaaagaatgcttcaagaatcagtggatgcacttttagataatggtagaagaggaagagccatattaggcacaaacaaaagaccattaaaatctcttgcagatatgattaagggtaaacaaggaagatttagacaaaacttactgggtaaaagagtggattattcaggcagatcagtagtcgtttcaggcccaacattaaaacttcaccaatgtgggctaccaaaaaaaatggcacttgaattattcaaaccatttatttttaataaattagagcagaaaggaataacaataactattaaagctgctaaacaattagttgaagaagagagtcctgaagtatgggattgtttagatgaagttataagggagcacccagttt

SEQ ID NO: 256005 - DNA, 1440 bp, Unknown
  Bacterial polypeptide expressing nucleotide sequence isolated from the Sargasso Sea
gattatgagtgtttgtgtggaaaatataaacgtatgaaatttagaggaattatatgtgaaaaatgtggtgttgaagtaactaaatcaaatgttcgtagagaaagaatgggtcatattaatttagcaacgcctgttgctcatatttggtttttaaaatctctaccaagtagaatagcacttgcggtagatatgaagcttaaggaaatcgaaagagttctttattttgaaaactttatagtaattgaacctggtttaacaggcttgcaaaaaaatcaacttcttaatgaagaagaattagcaaaatatcaagatgaatttggagaggaagcttttagtgcaggtataggagctgaggcagttcttgaaatgcttaaaaatttagatttagaactagagagaaaaaatctagttagttttataaatgaaactaaatctaaggtaaatgaagaaagagctattaaaagattaaaacttttagagtcatttatagaaacaggtcagaaaccagaatggatgattttaacagttgttccagttattccaccagaattaagacctttagtacccttagatggaggtagatttgctacatctgatttaaatgatctttatagaagagtaattaacagaaacaatagattgaaaagattaatggatcttaaggctccagatataattgtacgtaatgaaaagcgtatgcttcaagaatctgttgatgctttatttgataatggaagaagaggaagagtaattactggaacaggtaagagaccacttaaatcccttgctgaaatgttaaaaggaaaacaaggaagatttagacaaaatttattaggtaaaagagttgactactcaggaagatctgtaattgtagttggaccagatcttaaactgcatgaatgtggtttgccaaaaaaaatggcactagaattgtttaaaccatttctttatgcaagactaaataaacttggattggcttcgacaattaaacaagctaaaaaattagttgaaaaagaaactaatgcagtttgggatgcacttgaactaattgtaagagaacatccagttatacttaatagagccccaacacttcatagacttggtgttcaggcatttgaaccaaaattaattgaaggcgatgctatagaattacacccattaacttgtgctgcttttaatgctgattttgatggtgaccaaatggctgtccatgttcctttaagtttagaagctcagttagaagctagaatattaatgctttctacaaataatattctttcaccatctaatggtaagccaattattgtaccaagtcaggatatgatcttaggtatttattatctttctcaagaacctattagtgacaaaccagttggatattttacaaacgcagatcaaattgattacgctttatcatcaggtgaaataaaagttcacagt

SEQ ID NO: 256006 - DNA, 1558 bp, Unknown
  Bacterial polypeptide expressing nucleotide sequence isolated from the Sargasso Sea
aatgagaaaagaattatcagatttatttaaaaatactgaaatatcagaatctcagaattttaacagtattaaaataacattagctagtcctgaaaaaattaaatcatggacttatggcgaaataaaaaaacctgaaacaattaattacagaacatttagaccagaaaaagatggtttattttgcgctagaatttttggaccaattaaagattatgaatgtttatgtggaaaatacaaaagaatgaaattcagaggaattatttgtgaaaaatgtggggtagaggtaaccaaatctaatgtaagaagagaaagaatgggacatataaatttagctacaccagtggctcatatatggttccttaaatctttaccaagtcgtatttccttagtggtagatatgaaacttaaagatgttgaaagagtcttatattttgaaaatttcattgttatagaacctggtttaacaggacttaaaaaaaaccaacttcttggagaagaagagttaatcaaatatcaagatgaatatggcgaagaatcatttaccgcaggaataggtgcagaggcagttcttgagatattaaaatcaataaatctagaagaggaaagaagtttattgattaaaaatataaaagaaacaaaatctaaagtttctgaagaaagatcaattaaaagactaaaattaatagagtcatttattgaaactggaaataaacctgagtggatgattttaacaactattccagtaataccacctgaattaagacctctagttcctttagatggaggtcgatttgctacttctgaccttaatgatttgtatagaagagttataaatagaaataatagacttaaaagattaatagaccttaaagcccctgatattattattagaaatgaaaaaagaatgcttcaagaatctgtagatgcactgtttgataatggaagaaggggaagagttataactggaacagggaaaagacctctcaaatcacttgctgaaatgttaaagggtaaacaaggaagatttagacaaaatttgcttggaaaaagagtagattattccggcagatcagtcattgttgttggtcctgatcttaagcttcatgaatgtggtttgcctaaaaaaatggcattagaactatttaaaccatttttgtacgcaagattgaataaattaggtttagcatcaacaatcaagcaagcaaaaaaattagttgaaaaggagagaaatgaagtttgggatgctctagaattaattgttagagaacatccggtcattttaaatagagctccaactttacatagattaggtgttcaagcttttgaacctaaactgattgaaggtaatgctatagaattgcatccattaacttgcgctgcatttaatgccgactttgatggagatcagatggcagttcacgttccacttagtttagaagctcaactagaggcaagagttttaatgatgtctacaaacaacattttaagtccttcaaacgggaaacctataattgtaccgagccaagatatgattttaggaatttattatttatcacaa

SEQ ID NO: 256007 - DNA, 1293 bp, Unknown
  Bacterial polypeptide expressing nucleotide sequence isolated from the Sargasso Sea
actcttcataggcttggaattcaagcatttgaacctctcctggtagaaggcaaggctattcaactgcatccattggtttgtgttgcttttaatgctgactttgatggagaccaaatggctgctcatgttcctctatctatcgaggcccagcttgaagctcgtgctttaatgatgtcaacaaataatatcctatctcctgctaatggtgagccaattataaatcctactcaggacatagttttgggtctttactacatgactcgagataaagtaaatgtaaaaggtgatggaagagtattcagtaatcctgatgaagtattaagggcatatgaatcagaaaccttagatatacatgcaaatattaaagttcggattactaatgctgacaaaggaacattccttgaagagactactgtgggaagagttttagtatggagaattgcacctattgaggttggttttgataatgtaaataaaacattagataagaaatctgtttcaaatttaatagatatttcatacagaaaggcgggcctaaaggatactgtaatatttgctgataagcttatgtatcttggttttgagcattcaacacgttctggatcttctattggtgttgacgattttgttatcccggaagagaagccatctattattgatgctgctgaaaaagaggtgaaatcaatcgaatcacaatatgagtctggtcttgttactcagggtgagcgatataataaagttattgatatatggtctcgtgcaaatgaaaaagttgcaaaagcaatgatggcaaaaattagtactgatcaagttgaagatactgaaggtaaagagattgatcaggcatcatttaattctgtatttatttatgctgattcaggcgccagaggttctcctgctcagattaggcagttgtctggaatgcgtggattaatgtctaagccagatggctctattattgagactccaattactgcaaacttcagagaggggttatctgttctccaatactttatatctactcacggagctcgaaaagggcttgctgatacagctctcaaaactgctaactctggatatttaactagaagactttgtgatgttgcgatggattctgttgttgttgaagacgattgcggcaccgaccaatcaatagttgtttcatctatcgtcgaaggcggagatattattcaacctctaacagaaagaattttaggtagggtaattgcagagccaatctctaatgcagacggagaagaggtatatccaattggtcatcttattgatgaggat

SEQ ID NO: 256008 - DNA, 1228 bp, Unknown
  Bacterial polypeptide expressing nucleotide sequence isolated from the Sargasso Sea
aacaactataccagttataccaccagaactaagacctttggtgcctctagatggtggtcgatttgctacctcagatctaaatgacttgtatagaagagttataaatagaaataatagattaaagaggttaatggatcttaaagctccagatattattgtcagaaatgaaaaaagaatgttgcaagagtcagtcgatgctttatttgataatggaagaagaggaagagtaataacaggaacaggtaaacgacctttaaaatccttagctgaaatgcttaaaggtaaacaaggaagatttagacaaaaccttttaggaaaaagagtcgattattctggaaggtctgtaatagttgtgggaccagacttaaaattacacgagtgtggattaccaaagaaaatggctttagagttattcaagcctttcttatatgctagactaaataaacttggtttggcatccacaattaagcaagcaaaaaaattagtagagaaagaaaaagatgaagtttgggatgctttagaattaatagtaagagagcatcctgtaattttaaatagagctccaacattacacagattaggtgttcaagcatttgaaccaaagttaattgaaggagatgcaatcgaactacaccctctaacatgtgcagcatttaacgcagattttgatggagatcaaatggctgttcatattcctttaagtttagaagcacaacttgaagcaagagttttaatgatgtctaccaacaatatacttagtccatctaacggaaaacctatcattgtaccaagtcaagatatgatactaggaatttattacctttcacaaccaccataccaaaatgaaaaagtagaaggttactttgtaaataatagtgaaatagaacatgctttagaaacaggtgaaataaaagtacattctcgaattgtctcaagatttaaaactatagacgaaaatggaaaagataaattcgaaaaacatattagcactgccggaagatttttacttgcaaatttattacctaaaaacataaataataaattttcattgattgatagattgttgcccaaaaaagttgtttcagaaatcattgatcatgtatttagatttagtggacaaaaagctacagttattttctgtgataaattaaaagatttaggttttaaacatgctttcaaagctggaatatcatttggtaaagatgatttagttatacctgaaaataaa

SEQ ID NO: 256009 - DNA, 943 bp, Unknown
  Bacterial polypeptide expressing nucleotide sequence isolated from the Sargasso Sea
atgaacgttttagcgcctgaagtagctaaagtagacgagttagataaaaacaacttgagagttgttttagagcccttcgaaagaggttttggttataccattggacatagcttaaggaggatcatgctttcttatatgcctggtgcagctattacagaagtaaaaattgatggagtatctcatgaatatgggacaattgaaggtataaaagaagatattttagatgttcttttaaatcttaaagatttagcaattaaattagatggtccagctgaagctgaactaaaacttgatatcaaaacaccaaaaactattacagcatctgatctagaattgcctgcaggagttgaagtaatggatcctgatcatgtaattgcgactttagttgagccaaaaaaacttgttatgacgttaaaagtcgaaactggcacaggctatgttccttcagaaaataataaaaacaaaaacgttgactctttgcatctcgatgcaatattttctcctgtgaaaagagttaattataaagttgagaatacaagagtagaaaatagaactgatttagataaattaattttagatttagaaactgatggaacaattgaccctaagcaagcagttaaatatgctgcaaccataatgcagcatcagttagctgtatttgtagatgaagaattagtttcaagaaaagaaaagagaaaagacaaatatgattttgatccacttcttttaaggtccattgaagaactagagcttactgtaaggtcgacgaattgcttaaaagcagaaaacatctttttaattggagatttaatacaaagaagtgaaatggacttattaaaaactcctaatcttggaaaaaaatcattaaatgaaattaaagatgaattagcgtcaagaggactttctatgggcactgtccttaaaaattggccaccaatgtaaa

SEQ ID NO: 256010 - DNA, 1469 bp, Unknown
  Bacterial polypeptide expressing nucleotide sequence isolated from the Sargasso Sea
aagagatccacgagtatgggatattttggaagaagttataagagagcacccagttctccttaatagagcgcctaccttgcatagattaggaattcaagcttttgaacctgttttaattgaaggtaaatcaatacagttgcacccattagtatgtactgcatttaatgctgattttgatggagatcaaatggcagttcatgttcccttaagtcttgaagctcaattagaagctagagttctaatgatgagtaccaacaatatactttctccatcaagtggaaaaccaattatagttccctctcaagatattgttctaggaatatattatttatcaattatgcgtaataatcaaaaaggtgaaggtagaaagtttttagacactaatgaaatattaaaagcgattgaggtaaaagacataactttacattctaaaatttatgtaagaattaaaaactttgatggatcatactcaaaagttgagactactgctggaaggatgttactagctgactctcttccaaaaaatgaaaaaataaatttcaatctaattaataaagtgctcacaaaaaaagaggttagtaatttaattgacaccgtttatagattttgtggtcaaaaagagactgttctttttgcagacagtattatgcaaataggttttaagtatgccgcaatagctggaatttcatttggaaaagatgatcttattattccagatgaaaagcaaaaattacttgacgagacacaatcgaaagttcaggaatatgaaaatcaatatcaggatggtctcataactcagggagaaaaatacaataaagtagttgacgcctggtcagaatgtacaaacaaggttgctgataagatgctggatgttatttcaaacccagaggatgataaaccaattaattcagtttatatgatggctcactcaggtgcacgaggatctgccgctcaattaaagcagttagctggtatgagaggtttgatggcaaaaccatctggtgaaattattgaaaatccaataaaatcaaatttcaaagagggtttgtctgttttagaatactttacatcaacacatggagcaaggaaaggacttgcggacacagcgcttaaaacagctagtagtggatatttaactagaaggttagttgatgtagcacaagatgcagttattagagaagtagattgtggtactcaaaaaggtgtgattgttgaagaaatagtagagtctggaaatataacctcaccattgtttgagagagttttgggacgcactccaactaatgatattatggactcaaataataatcttttaattaaaggtggcgaaattatcgaagaaaaacatctcgatgaaattaaaaatttgggtcttaggtctatgaaaatcagatccgttcttacatgtgaaaccgaagatggaatttgtgcaaaatgttatggaagagatttagctagaggtacagaag

SEQ ID NO: 256011 - DNA, 493 bp, Unknown
  Bacterial polypeptide expressing nucleotide sequence isolated from the Sargasso Sea
aatgacagataattacgatattattaaagattttttaacaccaactgaaatagtagttgaagaatcaggtcctacaagatcaaagatagtacttgaacctcttgaacaaggtttcggacataccttagggaatgctcttagaagaattatattatcttctatgcccggtacagctgtatcagaggttaaaattgatggtgtacttcacgaatatagcaccatagagggtgtgcaagaagatgtgatcgatatcttattaaacttaaaagacctttcagtgagactaacagaagtggaagatgctgaattaactttatcaaaatctggaagtggagttgtaactgcagccgatatagaactatcaacaggagtagaagttatcaatccagatcatcatattgctactttaaataaagaaggctctataaatatgacaatgaaagtaacacgaggcagaggctttgtacctgttagacctttgacgaagacgaag

SEQ ID NO: 256012 - DNA, 1030 bp, Unknown
  Bacterial polypeptide expressing nucleotide sequence isolated from the Sargasso Sea
aatggaagtcgaaaatgttaatgtaaaaaactggaagtcattaattaagccatctaaattagatgttcaaataagtgatgacttaacacatgcaaaaattgtagcagagcctttagaaaaaggttatggattaactttaggaaactctttaagaagaattctattatcatcaatacgaggagctgctgttacatcaattcaaattgatggagttttacatgaattcacctcaataaaaggtgttagagaagatgttactgacatcgtattaaacgtgaaatctttagcattaaaaagtaattctgagggtacaaaaaaattaattttagatgcaaaagggcctggagaaattaaagcctcagatatagctccagttgcagacgttgaaattctaaatcctgatttagttatttgtaatttagatgaaaacacaacttttcatatggaaatgaatgttaatacaggtaaaggatacgttcctgcagagttaaataaaccggaggagccgccattaggacttatcgctatagattcactttacagtccagttaaaaaagtttcttattcagtaagcaccgctagagaaggtaaagcattagattatgataaattaataatggaagttgaaactaatggatcaatttctgctgaagatgctgtagcttattcagctagaatttttcaagatcagcttaaaatgtttgtaaactttgatgagccagttgaagctcctgtaaaagaagtttctaccgaacctgaatttaacaaaaacttactaagaaaagtggatgagttagagttatcagttagatcaatgaactgcttaaaaaatgataatattatttatatcggtgatctggttcaaaaatctgagggtgaaatgctgagaacacctaattttggaagaaaatcactaaatgaaattaaagaagttttaactggaatgtctttatatttgggtatggaaataccaaattggccacctgacaatattgcagaaatgtctaagaaattagaggaagctatttaa

SEQ ID NO: 256013 - DNA, 1384 bp, Unknown
  Bacterial polypeptide expressing nucleotide sequence isolated from the Sargasso Sea
tcaagatgagtatggtgaagaatcgttcacagcaggtattggagctgaagcaattctagaaattttaaaatcaatagatttggcacaagaaaaagagaccttaattaaatcaattaaagaaacaaaatcgaaagtttcagaagaaagatcaattaaaagattaaaactaatagagtcttttatagagaccggaaataaaccagaatggatgattttaactacgataccagtaatccctcctgagttaagaccattagtaccattagatggaggtaggtttgctacctctgatttaaatgatttatatagaagggttataaatagaaacaatcgtttaaaaagattaatggatctaaaggctccagatataattgtaagaaatgaaaagcgaatgcttcaagaatcagtagatgcattatttgacaatggtagaagaggaagagtaattacaggtacaggtaaaagaccattaaaatctttagcagagatgttaaaaggtaagcaaggacgatttagacaaaatttattgggtaaaagggtcgattactctggaagatctgtaatagtagttggaccagatttaaaattacatgaatgtggtttgccaaaaaaaatggcattagaattgtttaaaccatttttatacgcaagattaaacaaactcggattagcatctacgatcaagcaagctaaaaaacttgttgaaagagaaagaaatgaagtttgggatgctttagaattaattgttagagagcatccagttatattaaatagagcaccaacgctacatagactaggtgttcaggcatttgaaccaaaattaattgaaggaaacgcaattgaattacatccactaacttgtgctgctttcaatgcagactttgatggtgatcaaatggcagtgcacgtgccattaagtttagaggcacaattagaagcaagagttttaatgatgtctacaaataatattttaagcccatcaaatggaaaacctataattgtaccaagtcaggatatgattttaggtatatattatctttctcaaccaccatatcaaagtgatagagttgaaggatattttgtaaacacttcagagattgagcatgctttagaaattggtcaaattaaggttcactcaagaattgtctcaagatttgcaaccgttgacgaaaaaggtaattcaaaatatgaaaaacatatcagcacagctggaagatttcttttagcaaatttaattccaaaaaatataaataataagtttgctttagtagacagattgttgcctaagaaaatagtatctgaggttattgatcatgttttcagattttctggtcagaaaagtacagtaatattttgcgataaattaaaagaccttggtttcaaa

SEQ ID NO: 256014 - DNA, 1024 bp, Unknown
  Bacterial polypeptide expressing nucleotide sequence isolated from the Sargasso Sea
ttgagtattgaaaaaaactggagagagttacttaagcctaatgtagttaatatggaggctggttctgaccctatgaaaaaatctacattagttgtagaaccgctagaaagaggttatggaattactttgggtaatgcgttaagaagggtacttttgtcttctcttcagggttctgctgtttatgggtttaaaatcgatggagtgctgcatgagttttcatcaatctctggtgtaagagaagatgttatagacatagctttaaatattaaaaaaattatattcggagctgactttaatggcagtaaaattcttactatcgaaaagacaggacctggcgtagttgttgcgggtgatattaatctaactgatgatattgaggtgatgaatccagatctagtattatgtacacttgatgaaaacatttcatttagaatggaattatatataaaaaatggaaacggttatgtttctgctgaagaaaatagaaatgaagatgacccaataggaatgataccagttgacagtatttatagtcctgtaacaaatgtttcatatgaagttgataatgcaagagaaggggagtttctagattatgatagattatcattatcaattgagactgacggttctgtaaaaccagaagatgctcttgcgttctcagctagaattttaattgatcagcttaatccattcattaattttgatgaaccagaagaagaaatagaagaagaaagtgaagatgaattagaatttaatgcatcacttcttaaaaaagtcgatgaacttgagttatcagtcaggtcagcaaactgtttaaaaaatgacaatattgtttatataggtgatttaattcttaaatctgaaaatgaaatgttaagaacccctaattttggtagaaaatctcttaatgaaattaaagaggtgttgagcgaaatgaatctttcgcttggaatggatatacctaattggccgcctgaaaatatcgaagaattggccagaaaacatgctgcagataaattttaat

SEQ ID NO: 256015 - DNA, 877 bp, Unknown
  Bacterial polypeptide expressing nucleotide sequence isolated from the Sargasso Sea
aatggatacaactgaggtaaatattaaaaattggaaatcactaattaaaccacctaaactagatattaacttaagtgatgacaaatcttacgcaaagataatagcagaacctcttgaaaaaggttatggtttaacattaggaaattctttaagaagaatactactttcatcaataagaggtacagcagtaacggcaatccaaattgatggagtattacacgaatttacatcaatcaaaggtgttagagaagatgtgactgatattgtattaaatgttaaatcactcgctttaaaaagtaattcagaaaccactaataagcttattttagatgcaaaaggacctggtgaaattaaagcttcaaatattacaacttctgcagatattgaaatattaaacccagatttagttatttgcaatctagatgaaaatacaaattttcacatggaaatgacagtaagcaatggaaagggttatgtttctgcagatatgaacaagcctgaggaaccaccgttagggctgatagcaatagattcactttttagccctgtaaaaaaggtttcatattcaataagtactgctagggaaggtaaagccttagattatgataaacttactatggaagtagagacaaatggatcaatttctgctgaggatgcagttgcatattctgctagaattttccaagatcaacttggaatgtttgttaattttgatgaaccacaagaagttattgtaagagagcaaccaacagaacctgaatttaataaaaatttattaagaaaagtagatgagttggaattatcagttagatcgatgaactgtcttaagaatgataatataatctacattggtgatttagttcaaaaatctgaaggt

SEQ ID NO: 256016 - DNA, 415 bp, Unknown
  Bacterial polypeptide expressing nucleotide sequence isolated from the Sargasso Sea
aatgacagataattacgatattattaaagattttttaacaccaactgaaatagtagttgaagaatctagtcctacaagatcgaagatagtacttgaacctcttgaacaaggttttggacatactttagggaatgctcttagaagaattatattatcttctatgcctggtacggctgtatcagaggttaaaattgatggtgtgcttcatgagtatagcactatagagggtgtacaagaagatgtgatcgatatcttattaaacctaaaagacctttcggtgagactgactgaagtagaagacgctgaactaactctatcaaagtccggaagtggagtcgtaactgccggccgatatagagctttcaacaggagtagaagttatcaatccagatcatcatattgctactttaaatga

SEQ ID NO: 256017 - DNA, 997 bp, Unknown
  Bacterial polypeptide expressing nucleotide sequence isolated from the Sargasso Sea
tatggcaatactaaattttcaaaaaccagataaagtaatcatgatagattcaacagaatctcatggaaagtttgaattcagacctcttgaaccaggttatggattaactataggtaatgctcttagaagagttttactttcatccttagaaggatatgcatttacatcagttaagattgagggagttgaccatgagttttctacaatagaaggtgtggtagaagatgttacagaaatgatattgaatatcaaacaaataagactaaaaagacaaattgatgattttgatgaggaaaaaataaatattgtaataggtaatcaaaaggaattgaaagcttctgattttcaaaaattcatctctggatttcaaattttgaacccagaacttcatatctgtagtcttgaaaaaaaatctaagctaaatattgaattaactattgagaaaggtagaggttatgttccagctgaggaaaataaaaaatctggtgattcttcattaggagttatagcaattgattctatatatacacctgtaaaaaatgttaaatatgaaattgaggactatagggttgagcaaaaaacagattatgaaaaattaatttttgaaattgagactgatggttcaatacaccctaaagacgcattaacagaagctgcaaaaacactaatacatcacttcatgttgttctctgatgaactaataactcttgaatctgatgaaattgctcaatcagaggcatatgatgaagaatctcttcacatgaggcaattacttaagacaaaactgattgatatggatttatcagtaagagctttaaattgtttaaaagcagctgaagttgatactcttggggatttagtttcttttaataaaaatgatttaatgaaattcaggaattttgggagaaaatctctcacagaacttgaagaactagtcattctaaaaggtttatcttttggtatggatctctcaaaatataaattagataaagagtaa

SEQ ID NO: 256018 - DNA, 1259 bp, Unknown
  Bacterial polypeptide expressing nucleotide sequence isolated from the Sargasso Sea
catgaaatgtggtttgccaaaaaaaatggctttagaattatttaaaccttttttatatgcaaggttaaataaattaggtttagcttcaacaataaaacaagcaaaaaaaattgtagaaaaggaaagaaacgaagtttgggatgctttagaagttattgttagagaacacccagttcttttgaatagagctccaactctacatagattgggaatacaagcttttgaacctaaattaatagaaggagatgctattgaattacatcctttagtttgtgcagcatttaatgcagattttgatggtgatcagatggctgttcacataccattaagtttagaagcgcaactagaggccagagttttaatgatgtctactaataatatattaagcccttctaacggcaaaccaataatagttccaagtcaagatatgatacttggaatttattatttgtctcaacaaccttaccaaacaaaaaaagtagaggggtattttgttaataattctgaaatagaacatgctctagaaattggacaaataaaagttcattcaagaattatttcaagattcgaaacagcagacgaaaatggaaatataaagtatgaaaaatatacaagtaccgcaggaaggtttctattagctaatgttttgccaaaaaataaggatattaaatttgcattaattgatcgattgctaccaaaaaaaatagtttcagaaataattgatattgtttttagattcacgggacaaaaaagcactgttattttttgtgatagattgaaagatttaggatttaaacatgcatttaaggcaggtatttcatttggtaaagatgaccttattataccaaaaaacaaagaacaattgatcaacgaaacaaaaaaattaattactgactatgaaaaccagtattcagaaggtttaataacaaggggtgaaaaatataacaaagttgtagatgcttggtcaaaatgtactgatcgtgttgctgcagaaatgatgaagggaatttctgctaccgaagttagtgatgatggtctaaaaatcaattcagtttttatgatggctgatagcggagcaagaggatcggctgctcaaatgaaacagttggctggaatgagaggattaattgctaagccttcaggtgaaattattgaatctccgataacctctaattttaaggagggtttaacagctcttgaatattttaattctacacacggagcacgtaaaggactagctgatacagccctaaaaactg

SEQ ID NO: 256019 - DNA, 799 bp, Unknown
  Bacterial polypeptide expressing nucleotide sequence isolated from the Sargasso Sea
atatttggtttttaaatctttacctagtagaatttcactagctatcgatatgaagcttaaggaagtggaaagagttttatattttgaaaattttattgtaatagagcctggacttacaggtttaaaaaaaaatcaacttttaaatgaagaagaattaacaaaatatcaagatgaatatggtgaagaatcttttacagctggcattggtgctgaggctatacttgaaatacttaaatctatagatttagaacaagaaagaaacttattaataaaatctattaaagaaaccaaatcaaaggttgctgaagaaagagctataaaaagattgaaacttgtagagtcttttatagaaactggtaataagccagaatggatgatacttacagttgttccggttattccaccagaactaagacccttggtacctttggatggtggaagatttgctacttcagatttaaatgatttatatagaagagtcataaatagaaataacagattaaaaagattaatagatctaaaggcacctgatataattgttagaaacgaaaaaagaatgttgcaggagtcagttgatgccctatttgacaatggtagaagaggaagggttattactggtacgggaaaaagacctttaaaatctcttgctgaaatgcttaaaggtaaacaagggcgttttagacaaaatttactgggaaaaagagtcgactattctggaagatctgtaatagttgttggaccagatttaaaattacatgaaatgtggtttgccaaaaaaaatggctttagaattatttaa

SEQ ID NO: 256020 - DNA, 281 bp, Unknown
  Bacterial polypeptide expressing nucleotide sequence isolated from the Sargasso Sea
aatggatgtagaaaatgtaaatgtgaaaaattggaaatcattaatcaaacctgcgaaacttgatgttaaaataagtgatgatttaactcacgctacaatcatcgctgaaccattagaaaaaggttatggtttaacacttggtaattcacttagaagaattttattatcctcaatcagaggagcagcagtaacctcaattcaaattgatggtgtacttcatgagtttacatctattaaaggtgtaagagaagatgttactgatattgtattaaatgttaaat

SEQ ID NO: 256021 - DNA, 1498 bp, Unknown
  Bacterial polypeptide expressing nucleotide sequence isolated from the Sargasso Sea
acctgtactaccaccagatctaaggcctctagtaccacttgaaggtggaaggtttgctacatcagacctgaatgatttatacagaagggtcatcaataggaataataggcttaaaaggttactagaattaaaagcgcctgaaattattgtgagaaatgagaagaggatgttacaagagtctgtcgatgctcttttagataatgggagaagagggcgtgctattacaggaaccaataagagaccacttaaatcattggcagatatgattaaaggtaaaggcgggagatttagacagaatttacttggaaagagagttgattattctggcaggtctgtgattgttgtaggaccaacacttagacttcatcaatgcggtatccctaaaaaaatggccttagaattattcaaaccacatatttttggtaaactacatctccgaggaatcaccacaacaattaaagctgcgaaaaaagttgtcgaaaaagaaggagaggaagtttgggatatattagatgagattatcaaagaatatccagttatgttaaatagagcaccaacacttcatagacttggtatacaagcattcgagcctatactgatagagggtaaggcaattcaattacacccattagtatgtgcagcattcaatgctgattttgatggtgaccaaatggctgttcatgtacctttatctttggaagctcaagttgaaacaagagtactaatgttatctagtaacaatattttatctccatctaatggaagcccaattattgttccgtcacaggatatagtcttaggtatttattacatgtctagagagaaacctaatgctctgggagagggtatggtttttagtgatgtggaagaagttcatagagcataccaacagaagattattgatttacaagctaaaataaaagttcgtataaaagtaaaggaaaatgaagaagacgatttaccagcaaaaccactaatagtttctacaacagtgggacgagctgtattggctgagattctacctaaatctatacctttttcctatattaataaagatttaaataagaaagcaatatcagaattatttgatgcatcatatagatatgctgggttaaaagctacagttctactggcagatcaaataatgtataccggctttaaatactcaacaattgcgggtgtttcaattggtgttaatgatatggtaatacctcaacaaaaaggcaaaatggttactagcgcagagaaagaggttaaagatattgaaaaacaatataactctggattattaacggcaggcgaaagatataacaaagttgttgatatttggtcgcatacaaatgatcaagtttcccaagctatgatgaaagaacttggaacagaaaaatcaaaaattagttctggaaaatctattgaacataaatctttcaactctatctacaagatggcagattctggagctagaggatcagcagcccaaataagacagttatcaggt

SEQ ID NO: 256022 - DNA, 937 bp, Unknown
  Bacterial polypeptide expressing nucleotide sequence isolated from the Sargasso Sea
gttgcaataccagattgacagaatcgaccatcaaatagcagatgatcgctcccaaacaggaacttttttaattggccctctagaaaggggacaagctacaactttgggtaattctcttagaagagtccttatgggaggacttgaagggagtgcagttactgcagtaagaatagcaggaattaatcatgaatatgctactattccaggagttagagaagacgttttagatattcttcttaattgcaagcaactatcaataaatagttcaaatccagagcttgaaatcggcaggttagtagcgagtggtccaatggaggtgaaggcaaatgacatccaattctcttctcaagttgaaattgttgatggtgaaaaaccgattgcgactatccaggagggtcataacttagagttggaaatccatgttgaaagaggtgttggatatagacccgtagaccgcaagagtgaagaaacaactgcaattgatttacttcaaatagatgctgtatttatgccagtgaagagagttaattttacgattgatgaaactgctgtagcagaaggcggaacgggaagagaaagattaaaaatggaagtcgtaacagacggttcaaaaagtccggacgatgctattgctgaagctgcaaatcagttaatagaactttttcaaccccttgctactgtcacaatggttgaggaaattcctgaagaacctgaaccatctcctgaagctcaaattcctctagaggaactaaacttgtccgttagagcatataattgtttgaaaagggcgcaagttaactcagtttcagatttaatgggcttcagctatgaagatcttcttgaaattaagaactttggctctaaatctgcagatgaggttattgaggctcttgagcgcatcggcatttctattccacaaagcagaacatctgtttaa

SEQ ID NO: 256023 - DNA, 1030 bp, Unknown
  Bacterial polypeptide expressing nucleotide sequence isolated from the Sargasso Sea
atggaaactacagaggtaaatactaaaaattggaaaactttaataaaacctggaaaacttgatgtacaattaagtgatgacaagtctcatgcaaaaattattgctgaaccacttgaaaaaggttatgggctaactttaggtaattccctaagaagaattttactttcgtctataagaggaacagctgttaaatctattcaaatcgatggtgtcttgcacgaatttacttcaataaagggtgttagagaagatgttactgatattgttttaaatgtaaaagaattggcattaaaaagtagttctgaaggagaaaaaaaactaattttagatgctaaaggtcctggagaaattaaagcttctaacattttacctgttgcagatatagaaatattgaatccagatttagtaatttgtaacctagatgaaaatactaatttccatatggaaatgaatgtaggctcaggaaaaggttatatatctgctgatatgaataaacctgaagaacctccattaggattaataccaatagattcattatttagtcctgtaaaaaaagtatcttattcagtcagtacagctagagaaggaaaagctttagattatgataaattaactatggaagttcaaacaaatggatcaatttctgcagaagacgccgtggcatattccgcacgaatatttcaagatcaattgggaatgtttgttaattttgatgaaccacaagaagttataattagagataaaccaacagaacccgaattcaataaaaatttattgagaaaggttgatgaattagagctttcagtaagatcaatgaactgtttaaaaaatgataatattatttatataggagatttggttcaaaaatcagaaggagaaatgcttagaacaccaaattttggaagaaaatctttaaatgaaataaaggaagtgttaacaggaatgtcattgtatttaggaatggagataccaaactggccaccagaaaatattgctgaattgtcaaaaaaacttgaagaagctatataat

SEQ ID NO: 256024 - DNA, 3538 bp, Unknown
  Bacterial polypeptide expressing nucleotide sequence isolated from the Sargasso Sea
ttagaggcgaaattaaagaaattttctaaaagattaaaacttctcaaatctttcaaggaatctggaaacagaccggaatggatgattcttgaagttttaccaattcttccacctgacctaaggccactggtccctttagagggtggcagatttgcaacttctgatttaaatgatctctatagaagagtaataaataggaacaatagacttaagagacttttagaccttaatgctccagatattattactagaaatgaaaaaaggatgctgcaagagtcagtcgatgctttgttggataatggtagaagaggaagggcagtaacaggctcaaacaaaagacctctcaaatctctggctgacatgataaaaggcaaacaaggcagatttaggcaaaacctccttggaaaaagagttgattactcaggacgttctgtaatcgtagtaggtccaactttaaaacttcatcaatgtggtttaccaaagaagatggctcttgaacttttcaagccatttgtctttggaagattacaaaaacttgaacttgctaatactatcaaacttgcaaaaagaatggttgatagagaagaacctgaagtttgggatattttggatgaggtcataagagaacatccagttatgctcaatagggctccgactctgcacagattagggattcaagcttttgaacctgttttggtagaaggtaaagctatacaactccatcctctagtttgtaaagcttacaacgcagactttgatggtgatcagatggctgttcatgtcccacttacattagaagcgcaacttgaatgcagagctttaatgatggcaacaaataatattctttcgccttctaatggaaagccgataattgacccttcacaagacgttgttttgggcctttattatatgacaagagaaaaaactaatgacctaggagaaggaagaatcatgtcatctccagatgaagttaatagagcatattattctggagacgtcggattacaagcgaagattaaagtcagattaaaaccaaataaactggatgatgaagcttcgcagatagttgatacaacaacaggtagagcattgctttatgatctgctaccagaggggatgcctttctctttaatcaatactactttagatagtaaacaaatatcttctttaattgatgtttgttatagaaaggcaggactgaaacgcacagtaatatttgctgacaggttaatgtatatggggtatgaattttctacaaaatcaggatcctcaattggcattgatgattttgttataccagaggacaaagaaagaattgtttcagaagctgagaaagaagttaaagaaatcgaatcgcaatttgcttctggtttagtcactaaaggagagaagtataacaaagctattgatatatggaccagagcaaatgaaatgattgcaaaatctatgatggataacatttctaaagaagaggttaaagaggctgatggaactctagctctttcagactcattcaattctgtttttatgtatgctgactcgggttcaagagggtctccagcacagatcagacaattggctggaatgagaggacttctagcaaagcctgatggttcaataattgaaacaccagttacatctaattttagagaaggccttactgcccaggagtatttcatttcaacgcatggagctagaaaaggattagcagatacagctcttaagacagcaaactcgggctatttaaccagaagattagtagatgttgctcaagatatggtcgtaagtgaggaagactgcggtacctctgcaggaatagtaatgaaatctattattgatggtggtcaagttttggtaccactcggtgatagagtattaggtagaaccgtggcagaagatgttaaatctgttgatggcaaagaagttcttcttaaagcgggaaccctgattgatgaagatattgttgatactttagatgaaaagaacatatacgaaattaaagttagatcagccattcattgcgaaactattcatggtatttgttctaaatgttatggaagagatttagggcgaggacataaggttgatataggtgaagcagttggaattgttgctgctcaatcaataggcgaaccaggaacgcaattaactatgagaactttccatattggaggggctgcctcaggaacatcggctgaagataatattgaaaccaacttctctggtaaggttctttacaatacaagaacagttaaaaagaaggatggaacttttatttctctatctcaaacatcagatatttcagttacagatgaaaacggaagaatcgtagagagttataaagtaccatatggaacagtcttaaattttgctactggcagtaaagtaaatccaggtgatattctcgcccaatgggatcccttaacaagaccagttattgcagaagttgcagggaaagctaaattcgttgatcttgaagatggtataacagccagagttaaacaagacgatttaacaggtcttagtaatatagaaataatagatgtaacggaaagacctaaaggagaagcacaagaaaagagaccagctatccacatagtagatggtagaggaaaggataagaatttacctgattctgaagctcctgctatatattctttaccaggaaatgcttttgttcagcttaatgatggacaagatgtcgaagttggaggggtaattgcaagaatttctcaagagtcagcaaaaacaaaagatatcactggtggtttgccaagagttgcagatttatttgaagctagaaaacctaaagaaccggctattcttgctcaagcatcagggatcgtttcatggggaaaacctactaaaggtaaggaaaggttgataattactgatgaagagggtaatgatcatgcgaccttaattttaagaacaaggcatattaatgtttttgaaggagagagggttgaaaagggtgacatagtttccgatggagctatgagtccccatgacatattagctttaagaggccttgaagaattaaccgattatattgttaatggcattcaagaagtctatagactccaaggagttagtatcaatgataagcatatagaggtgattctcaaccaaatgcttagaaaggtagtagtaacggaacctggtgattcagagttcataattggtgaacaaactgaattttcaagagtaagagaagttaatttagcgttacgtgaagcaaaaaaggctgaaataaaatatgacagaattttacttggcataactaaggcatcacttgcaactgaatcatttatctcagctgcatctttccaagagacaactagagtgcttactgaggcagcaacaactggaagagtagaccatctaagagggttaaaggaaaatgtcgttgttggtagattaatacctgcaggctctggcttagctaaaatacaaactgaaatggacaatgtagaagaagattttgagattgatctagaaaaagctttaagtgaggcattaaatgaagaagagtaat

SEQ ID NO: 256025 - DNA, 2891 bp, Unknown
  Bacterial polypeptide expressing nucleotide sequence isolated from the Sargasso Sea
tttgaaagaattacttaatttattgcaatcaaaccaagacgaattctcatctatttctgctggcttggcatctccacaaatggttagatcatggtcatttggcgaagtaaaaaaacctgaaactattaactatagaacttttaaaccagaaagagatggccttttttgtgcaaagatttttggacctattaaggactatgaatgtatatgtggaaaatataaaagaatgaagcacaggggagtagtatgtgagaaatgtggcgtagaagttactcttgctaaagtaagaagagaaagaatgggtcacattgagttagcagctcctgtcgctcatatatggttcctaaaatcgcttccttcacgaattggccttcttctagatgtaacgttaagagaaattgagagagtcttatattttgagagttttatcgtaactgatccaggaatgactgatctagaaactggagacattcttactgaagaagaatacattgaagcttatgaccaatacggagatgagttcaaagctgggatgggtgcagaagcagtaaaattacttcttgaagagcttgatatagaagaggagataagaattcttcgagaagaaatacctcaaacaaactctgaaacaaaacttaaaaagatttctaaaagattaaaacttcttgaggcttttaaggcctctggtaataagccagagtggatgataatggatgttcttccagtattgccaccagatctcagaccgcttgtgccccttgaaggcggaagatttgctacttctgatttaaatgatctttatagaagagtaataaatagaaacaacagattgaaaagattattggagcttaatgcgcctgacatcattgtaagaaatgaaaaaagaatgcttcaggaatcagttgatgcacttcttgataatggaagaagaggaagagtaataacaggtaccaataaaagacctcttaagtctcttgctgacatgattaaaggtaaaggtggaagatttaggcaaaatcttcttggtaagcgtgttgattattcaggaagatcagtaattgtatctgggccaaatctaaaacttcaccaatgcggactaccaaaaaagatggcattagagctattcaagccatttgtctatggaagactggagcataaagaacttgcaacaacaattaaggctgcaaaaaggcttgttgaaagagagactccagaggtttgggaagctctagaagaagttatcagagagcacccagttcttttaaacagagctccaacattgcatcgtcttggtattcaggcatttgagcctctattaattgagggtaaggctatacaacttcatccattggtatgtgttgcttataatgcagactttgatggcgaccagatggctgtccatgttccattaacagttgaagcacaacttgaagctagagcgttaatgatgtcgactaataacattctttctcctgcggatggagctccaattattaatccaactcaggatgtagttcttggtctttattacatgacaagagagaaggtaaattcatatggagagggaagagtattctcaaaccctgacgaagttcaaagagcttttgagtctgagcaaatagatcttcatgcaaaaataaaagtaagaatagagaatgctgataagggtgttttcattgaagatactaccgttggaagaactcttatatggagaatcacaccaattgaagttggattcgacaatgtaaacaaaacattagataaaaaagcagtttcttcgcttatagatctttcctacagaaaggcaggtttgaagaagactgtaatctttgctgatcaattaatgtacctcggttttgatttctcaactagatcaggctcatcgattggtgtcgatgattttgttattcctgaagagaaatatgaaattgtagacaaggcagaggatgaggttaaagaaatagaaaatcaattctcatctggactagttacaagaggtgaaagatataacaaagtagttgatatatggtctagagcaaatgaaagagttgctaaggcaatgatggaaaaaatcagtaaagacagcgttgaggattctgagggtaatgaagttgaacaagcttcttttaactcagtatatatatatgctgattcaggagccagagggtcgcctgctcaaattagacagctatcaggtatgagaggattgatgtcaaaaccagatggctcaattatagaaactcctattactgcaaactttagagaaggtctttctgttcttcagtactttatctcaactcatggagctagaaagggtctggcagatactgcattaaaaactgcaaactcaggttatttaacaagaagactatgtgatgtttcaatggactcagttattacagaagatgattgcggcacagaagactcaattgaaatgagtgcaatcattgatggtggtgaaattattcaagacctcactgacagaattcttggaagagttattgctgaacctatttttgacaatgaagggaatgagctttttccaagagatactttaattgatgaagatgcattacttaagatcgagccgttaaatctttctacgctgagagtaagatctccaatgacctgtgagtcaagttttggtgtatgtgctaaatgttatggaagagacttggcgagaggacatcttgttcatagaggtgaagctgttggtgttgttgccgcgcaatcaattggagagccaggtactcagctaactatgagaactttccatatcggaggagctgcttcaagctcatctgaagatgattcaataattagcagaaacgatggctctgtaattttttcagatgatatcaaaagcgttaagaataaagataaactagaag

SEQ ID NO: 256026 - DNA, 1147 bp, Unknown
  Bacterial polypeptide expressing nucleotide sequence isolated from the Sargasso Sea
atgactactagatcatcatcagactttaattcaataagaatttcacttgcgtcgcctgatcaaattaaagcttggtcatatggagaggtaactaagcctgaaacaattaactatagaactcttaggccagaaaaagatggtctgttttgtgaaaaaatatttggaccaacaaaagattgggaatgttactgtggaaaatataaaaaaatacgatacaaaggcgtaatttgtgatagatgtggagtagaggtaactagagctaaagtaagaagagaaagaatggggcatataaaattagctgctcctgtagctcatatctggttctcaaagagtactccttcaagacttgggcttcttttagatgtttcacctaaaaatttagaaagagttttatattttgcccaatacatagtaactgagattaataataacgaaaaattagatgctattaattttttcaaacaagatgctgaacaaaaaatagaagaaatcaaaactaggttagaagcagtacttgaatctaaagaatatcttgaagaactagaaagacttgagataaaagttaagaaaactgatgccaaaaaacctgaaaagttagaagagattgtaaaaactatttatgcagagttcatagatgaagaacaaacaaatacagaggaaacaattcaagaccttgaatctttagaagtaatggatctacttactgaagcaaaatatcgagaatttagagataaatttggtccagttttcgtagccgaaatgggcgctgaagcaatccttaaaatattacaggaatttgatcttgaaaaagcaactgatgaactaatagatgaaattagacaaacatcagggcagagaagaaaaaaagctataaaaagacttagagtaattgaaagctttaaacaaagcgggaataaacctgaatggatggtactaacaatattacccgttcttcctcctgaattacaccctatggttcaattagatggaggtagatttgcaacttcagatcttaatgatttatacagaagggtaattaatagaaataacagattgaaacacctgctagaccttcaagctcctgaaataattatcaggaatgaaaaaagaatgcttcaagaagctgtagatgctcttgtggataatg

SEQ ID NO: 256027 - DNA, 2525 bp, Unknown
  Bacterial polypeptide expressing nucleotide sequence isolated from the Sargasso Sea
cctgttatgctcaatagggcacccaacattacacagactggcatttcaggcctttgaaccagtacttatcgaaggcaaagccattcagctacacccgttggtttgttcagcttttaatgctgattttgatggtgatcaaatggcagtccacgtaccactaagccttgaggcacaattggaagcccgcgtattgatgatgtctacaaataacgtgctttcaccggctaatggcgcaccaattatagttccgtcgcaagatatgatcttaggactttattacactacaatcatgcgagagggcatgaagggcgagggtatgatctttggatctatcgaagaagtgcaatatgctttggataataatgatgtacatttgcacgcaaaaattactgcccgtattccccaaatcgatgagcatggtgaagagattgaaaagcgttttgaaactactccaggtagagtccgtattggcgctctactcccaaaaaatgctaaagctccatttgaattggttaatagtttactgaggaagaaagacgtccaaaatgtaattgatacggtctatcgctactgtggacaaaaagagtcagttattttctgtgatcaaattatgtccatgggttttcgtgaggctttcaaggcaggtatatcgtttggtaaagatgatatggttatccctgaaaccaaatggtcaattgtgaatgaaacaaggggccaagttacagattttgaacagcaatacatggatggcctgatcactcagggcgaaaaatataataaagttgtagacgcttggtctaaatgtaacgataaagttactgacgctatgatggacacaatttccgcgtctcagaaggacgatgttggtgctgaagcagaaccaaactcggtttacatgatggcacactcgggtgctcgagggtcagtcacacagatgaagcaacttggcggtatgcgcggcctgatggctaagccaaacggcgatataattgaaaccccaattatttctaactttaaagaaggtttgagtgtcctcgagtattttaactctacgcacggtgcaagaaagggtctttctgacactgcacttaaaactgctaattcaggttatcttacccgtcgtttggtagacgtagctcaagattgtattgtccgtatgcatgattgtggaactgataattcaattacagctgaaccagcggttaatgatggtgaggttattacttcacttgcagaacgagttttggggcgagtagctgctgaagacataaaagtaccaggttcggaagaaataattgttagagagggtcagctgattgatgagttaatggccgatgcaattgatgaagttgggttagtttctgctagaattaaaagtccattaacatgcgaggctgaagaaggcgtttgtgctatgtgctatggacgagatttggccaggggcacaatggtaaatacgggcgaagcggtgggtatcattgcggcacaatctattggtgaaccaggaactcagcttacgatgcgtacttttcatattggtggcgttgcccaaggtggtcagcagtcctttttggaatccagtcaagacggtaagatagagtttgaaaatgcaacaacactaaaaaatgcatctggcgacactcttgtgatgggtcgtaatatgaaacttcgtatcatggatgagcatggagttgagagggctaatcacaaactagattacggaaccaaactatttgtcaaaaaagggtccaaagtaagccgtggagataaattgtttgagtgggatccatacacactgccaatcattgctgaaaaagggggtactgcaaaatatgtagaccttgtaaatggcgtggctgttcgagaggatactgatgacgcaacaggaatgacccaaaaaatagtcgttgactggcgtacagcaccaaaaggtaatgatctgaagcctgagatcatcttattggacaaaaatggagagccggtcagaaatgatgctggaaatccaataacataccctatgtctgtggacgccattttgtctattgaagacggttcagaagtgaaggctggtgatgtagttgcgagaataccgcgagagggtgctaagacaaaggatattactggtggtcttccccgtgttgcagaactttttgaggctagacgccccaaggaccacgctattattgccgagattgatggctatgttaggtttggacgcgattataaaaacaaacgtcgaatttctattgagccggctgatgaaagtttggaaactgttgaatatatggtacctaaaggtaaacatattcctgttgttgaaggtgattttgttcaaaagggcgactacatcatggatggtaatccggcaccacatgatattttatctatcatgggggttgaggcattagccaactacatgattgatgaagtccaagatgtttaccgacttcagggtgttaaaattaacgataaacacgtagaagtgattgtgagacagatgctccaaaaatgggagataagcgata

SEQ ID NO: 256028 - DNA, 1736 bp, Unknown
  Bacterial polypeptide expressing nucleotide sequence isolated from the Sargasso Sea
aatgacaaacagcaacctaagaactgaaaatcactttgattacgtcaaaatttcaatagcttctccacaaagaataatggattgggggcagaggacattgcccaatggacaagtagttggtgaagtcaccaaaccagagactataaattacaggacacttaaaccggaaatggatgggttgttttgtgaaaagatttttgggccatcaaaagattgggaatgccattgtggaaagtacaaaagggtgagacatcgcggcattgtttgtgaaagatgtggggttgaagtgactgaaagtcgagtcagaagacataggatgggctatataaaacttgctgcgccagtttctcatgtttggtatttgaaaggaatacctagttatgttgcgatactcttggatattcctcttagggatgtagagcaaatagtttattttaattgttatgttgttttagatcctggtgatcataaagaacttaaatataagcaattactcactgaggatgaatggctggaaattgaagatgaaatttatgctgaagattcaactatcgaaaatgaaccttttgttggaattggtgcagaggcactcaagcaattacttgaggaccttgatttaaatcaggttgctgaggagcttagagaagaaattactaacagcaaagggcaaaagagggcaaaactcataaaaagaataagagttattgataatttcattgcaaccaatgccaaaccggaatggatggttttagatgcaatcccagttatacctcctgatcttagacctatggttcagcttgatgggggacgattcgcaacttcagatttaaacgacttatatagaagagttataaatagaaataatagactggcaaggcttcaagaaattttagctcctgaaattatcgtaagaaacgaaaaaagaatgcttcaggaggcagttgatgctcttatcgataatggaaggagaggaagaactgttgtcggagcaaataatagagctcttaagtccctaagcgacataattgaaggtaaacaaggaagatttagacagaatcttcttggaaagcgtgttgactattcaggaagatctgtaatagttgtgggtccaaaattaaaaatgcatcagtgtggtctcccaaaagaaatggcgatagagctctttcaacctttcgtaattcatagattaatacgacaaaatattgtaaataatattaaagctgcaaaaaaattaatacaaaaagctgatgacgaagttatgcaggtacttcaggaagttattgaagggcatccaattctcttgaatagagcccctacgctgcatcgtttaggaattcaagcttttgaaccgaaattagttggaggtagagcaatacaacttcatcctttagtttgtcctgcattcaatgctgacttcgatggagatcaaatggcagttcatgttcctttagctttagaggcacaaactgaagcacgcatgcttatgttggcaagtaataatattctttctcctgctaccggcgaaccaattgtgactccatcacaagatatggttttgggatcttattatctaacggctctgcaaccgaattatcgaaaaccagaattcggagataataagactacttttgcttcattagaagatgttatttttgcttttgaagataaaagactcagcctacatgaatggatttgggttagatttaatggagaagttgaagatgaagacgaaatga

SEQ ID NO: 256029 - DNA, 979 bp, Unknown
  Bacterial polypeptide expressing nucleotide sequence isolated from the Sargasso Sea
catgcaaaccagtttgctgaaacccaagatcatcgccgtggaatcgctgggcgagaaccacgcgagggtggtcatggaaccgttcgaacgcggttacggccacaccttgggcaatgcgcttcgccgcgtgctgctgtcgtcgatggttggctacgcgccgaccgaagtgacgatcgcgggcgtggtgcacgagtactcgacgctggatggcgtgcaggaagacgtcgtcaacctgctgctgaacctgaagggcgtggtgttcaagctgcataaccgtgacgaagtgacggttacgctgcgcaaggaaggtgaaggcgttgtcacggccggcgatatcgagctggctcacgactgcgaagtcatcaacccgaatcacgtgattgcgcacctgtcgaagggtggcaagctcgacgttcagatcaagatcgaaaagggtcgcggctatgtgcccggcaacgttcgtcgctacggcgaagacacggccaagatcatcggccgcatcgtcctcgacgcatcgttctcgccggttcgccgtgtgagctacgctgtcgaaagcgcacgtgtcgagcagcgtaccgacctcgacaagctcgtgatgaacatcgagacgagcggtgtgatcacgccggaagaagcgatccgtcaatcggcccgcatcctggtcgaccagctgtccgtgttcgcggcgctggaaggcacggaaacggcagccgaagcgccgtcgcgtgcaccgcagatcgatccgatcctgctgcgtccggtggacgatctcgagctgacggttcgttcggcgaactgcctgaaggccgagaacatctactacatcggcgacctgatccagcgcacggaaaacgagctgctgaagacgccgaacctcggtcgcaagtcgctcaacgagatcaaggaagtgctcgcttcgcgcggtctcacgctgggcatgaagctcgaaaactggccgccggctggtctcgacaagtaa

SEQ ID NO: 256030 - DNA, 1237 bp, Unknown
  Bacterial polypeptide expressing nucleotide sequence isolated from the Sargasso Sea
tagccctgaaaagataaaatcatggtcatatggagaaattaaaaaaccagagactataaattaccgaactttcagacctgaaaaagatggtttattttgttcaagaatatttggtccagtaaaagattatgaatgtttgtgcggaaagtacaaaagaatgaaatttagaggaataatatgtgagaaatgtggagtagaagtcactaagtctaatgtaagacgagaaagaatggggcatatagaccttgcatgcccagttgcacatatttggtttttaaaatctttaccaagcagaatttctttagccatcgacatgaagttaaaggaagtagaaaaggttttatattttgagagtttcattgttgtagagccagggttaaccacattaaaaaaaggccaacttatttctgaagaggctttattaaaagcacaagaagaattcggtgaagatgcttttaccgcaggtataggggctgaggctgtaagagaaattttagtaaatttagaccttaaaaaagagcaacaaaaattaagagaatctttaaaagatataaaatcaaaagtcacagaggaaagaactataaaaagattaaaattaattgagtcatttattaattcgggaaataagcctgagtggatgattcttacatctgttccagttattcccccagaattaagaccgctagtacctcttgacggtggaaggtttgccacatctgatttaaatgatttgtatagaagagtaataaatagaaataatagattaaaaagacttttagatcttaaagctccagacataatagttaggaatgaaaagagaatgctacaggagtcagtcgatgcattatttgataatggcagaagaggcagagttatcactggtacaggtaaacgaccacttaaatctttagcagaaatgctaaaaggcaaacaagggagatttagacaaaacttattaggaaaaagagtagattattctggtagatcagtaattgttgtaggacctgaacttaaattacatcaatgtggtttaccaaaaaaaatggctcttgaactatttaaaccttttttatacgcaagattggataaactaggtttagcaacgactattaagcaagcaaaaagactagttgagaaggaaaaaagtgaggtgtgggactctcttgaacacataattagggagcacccaattcttttaaaccgcgcacccacattacatagattaggagttcaagca

SEQ ID NO: 256031 - DNA, 436 bp, Unknown
  Bacterial polypeptide expressing nucleotide sequence isolated from the Sargasso Sea
tgtagaagcagctcgtgttgaacagcgtactgacttggataaactcgttatcgatatgaccactaacggtactatcgatcctgaggaagctatccgtcgttctgcaaccatcttagctgaacagctggatgcgtttgttgagctgcgcgacgtgactgagccagaaatgaaagaagagaagccggagttcgatccgattctgttgcgtcctgtcgacgatttagagctaactgtacgttcggctaactgtttgaaagccgaagcgattcattacatcggagatctggtacagcgtactgaagttgagttgctgaaaacccctaacttaggtaagaagtctcttactgaaattaaggacgttttagcttctcgcggactgtcgttaggtatgcgtctggaaaactggcctccagctagtttagcagacgacctataa

SEQ ID NO: 256032 - DNA, 2536 bp, Unknown
  Bacterial polypeptide expressing nucleotide sequence isolated from the Sargasso Sea
tctatataggagagtgattaatagaaataatagattgaagcgccttttagagctaagcgctccagatattatagttagaaatgaaaagagaatgcttcaagaaagtgttgatgctcttctagataatggcagaagaggaagagtaataactggaactaacaaacgaccacttaaatctctcgcagatatgatcaagggtaagggcggaagatttagacaaaatttgttaggaaagcgtgttgattattccggtagatctgtaattgttgcgggtccaaatttgaaattacatcagtgtggacttcctaaaaaaatggctcttgaattattcaagccatatgtatatggaaaacttgaacaaaatgaactcgctacaacaattaaagctgctaaaaagcttgtagaaagagaaactcctgaagtttgggaaattttagaagaggtaattagagagcacccaattctgttgaacagagctcctacattacacaggttaggtattcaggcatttgaacctctgcttgttgaaggaaaggctatacaattacatcctttagtttgtgttgcattcaatgcagactttgacggtgaccagatggctgttcacgttccactctcgattgaggcccaacttgaagctcgtgctcttatgatgtcaacaaataatattttatctccagctaacggagaaccaattattaaccccactcaggatatagttttgggactttattatatgactagagataaagtaaatgtccagggtgatggaagagtctttagtaatcctaatgaggtattaagggcatacgaatctgaaaccattgatatccatgcaaatattaaagtaaggattaccaatgctgataaaggaacttttttagaagatacaactgttggtagagtattggtttggagaattacacctattgaagttggttttgataatgtaaataaaacattggataagaaatccgtttctaacttaattgatatttcctacagaaaagctggtctcaaagatactgtaatctttgcagatcaacttatgtatcttgggttcgagcattcaactcgatctggatcctctattggtgttgatgattttgtaattcctgaagaaaaaccatctatcatcgatgcagcagaaaaagaagtaaaatccattgaatctcaatatgaatctggtctggtgacacaaggcgaacgatacaataaagtgattgatatttggtctcgtgcaaatgaaaaagttgctaaggctatgatggcaaaaattagcattgatcaagtctcagataccgaaggcaaggaagttgatcaagcatcatttaactctgtgtatatatatgctgattctggcgctagaggctctcctgctcagattaggcagctttcaggaatgagaggtcttatgtctaagccagatggatcaattattgaaactcctattactgcaaattttagagaaggattgtctgttctacagtactttatttctactcatggtgcacgtaagggccttgctgacacagctcttaaaacagctaactcagggtatctaactcgaagactttgtgatgttgctatggactcagttgttgttatggacgattgcggcacggatcaatcaatattagtttcttcaattgttgaggggggagatattattcaaccccttactgaaagaattcttggtagggttattgccgaaccaatttctaatctagatggagaagaagtttacccagttggccatcttattgatgaggattcagtaaagaaaattgatgagcttaacatttcatcattaatggttagatcaccaatgacttgtgaagcaagttatggcgtttgttccaaatgttatggaagagatctagctagaggtcatttagttcatagaggtgaggcagttggagttgtggccgcgcaatcaattggtgaaccaggaactcaattaacaatgcgcactttccatattggtggcgctgcgtcgagttcatctgaggataatgcgattgttgttaataatcctggagtgattaatttttcttcagacatgaaaacagtaacaaataaagataaacaggaagttgtagtgtctaggaacagccaagttacgttgacagatgaaaaaggcaaactaattgagcaacataaattaatttatggtgcaactttatttgttaaagaccaaactaatgttgaaccaggtcttaaaatcgcaggctgggatccatatactcgtccaataatcagtgaggttgaggggatcgttcaatttacagatatagacgatggtgttactgttcgatccaaaacagatgaactgaccggactaagtagtattgaagtaattgatgttgcagaaagaccttctgcaggaaaagacaaggttccatctattgctttggttgatgcaaaaggcaaaccagttcctttaggtgagcacaaaacacctgctaattactctctacctgcaaaagctttggtgaacttaaaagatggcaagaagcttcatgctggagaagtt

SEQ ID NO: 256033 - DNA, 1123 bp, Unknown
  Bacterial polypeptide expressing nucleotide sequence isolated from the Sargasso Sea
agtgatttaaatgatttgtatagaagagtaattaatcgaaataaccgacttaaaagattaattgatctacgtgcacctgatattattattagaaatgaaaaaagaatgcttcaagaatctgttgatgcactttttgacaatggtcgtagaggaagagtaataacttctacaaataagagacctcttaaatctttatctgatatgttaaagggcaaacagggtagatttagacaaaatttattaggtaaaagggtagattattcaggaaggtctgtaatagttgttggtcctaatttaaagttacatcaatgtggtttgccaaaaaaaatggcattagagttatttaagccatttatttttcacaaactagatatctatggatgggccaatactattaaggctgcaaaaaaattagttgaaaaggaagatccaagagtctgggatatattagaagaagtgattagagagcatccagttttattaaatagagcgcctaccttacataggcttggtattcaggcatttgagcctatacttattgaaggaaagtctattcagttgcatcctttagtttgtacagcgtttaatgcagattttgatggagatcagatggctgttcatgtgcctttaagtttggaatctcaattagaagcaagagtgcttatgatgagcacaaataatattttatctccttcgagtggcaagcctataattgttccttctcaggatatagtattgggaatttattatctttcaattcttagaaaaaatcaaataggagaaggtagaagctttttagatttaaatgaaattattaaagcacttgaaaacaaagatataaatttgcattctaaaataattgctagggtaaaagattttaatggaaattttaacactactgagactactgcaggacgtatgatactaggagatatcttacctaaaaatgaaaatataaattttgatatgttaaataaagttttaacaaaaaaagaagtgagcaatataattgatacagtttatcgtttttgtggacaaaaggagactgttttatttgcagataaaataatgggtattggatttagatatgcggctatggctggaatatcttttgaaaagatga

SEQ ID NO: 256034 - DNA, 2107 bp, Unknown
  Bacterial polypeptide expressing nucleotide sequence isolated from the Sargasso Sea
agagtttggtgacgaattctctgctggaatgggtgctgaagcagtgcaaatacttcttgaagagcttgatatagatgatgagataagaattattagagaagaaatcccacaaacaaattcagaaacaaaactaaagaaattttcaaagagattaaaactattagaagcttttaacaattctggaaataagcctgaatggatgataatgaatgttcttccagttttaccaccagatttaagacctttagtacccttagaaggtggaagatttgcaacttctgatctcaatgatctttatagaagagttattaacagaaataatagattaaaaagattactggaactgaatgctccagaaattattgttagaaatgaaaaaagaatgcttcaagagtcagtcgacgcgctcttggataatggacgaagaggaagagttataacaggtacaaataaaagacctttaaaatctcttgctgatatgatcaaaggcaaaggtggaagattcagacaaaacttacttggaaaaagagttgattactctggaagatctgtaattgttgctggccctaatttgaaattacatcaatgcgggttacctaagaagatggcattagaattattcaaaccttttgtctatggaaagttagagaatagggagcttgcaactacaattaaagctgcaaaaaaacttgttgaaagagaaactccagaagtttgggaagtgctcgaagaagtaattagagaacacccagttttgttaaacagagcaccaactcttcatagacttggtctacaagcttttgaaccaaaattaattgaaggtaaagcaattcagttacatcctcttgtttgcgtagcatttaacgcagactttgatggtgaccagatggctgtccatgtcccattaacattggaggcgcagcttgaagccagagctttaatgatgtcaactaataatattctctctccagcagatggatcacctatcattaatcctactcaagatgtggttcttggactctactacatgacaagagataacgctaacgcttctggtggcggaagaacatttagtaatgctgatgaggttttaagagcatatgaaacagagaatttagaaattcattcacctgtaaaagttagaattactcatgaaagtggtgagacatcaattgaagaaaccacagttggacgtattttaatatggagaataactcctgctgaagttggttttaaaaacattaataccgttttaaacaagaaaacagtatcaaaattagttgatacttcatatagaaaagcaggacttaagaaaacagtaatatttgcagaccaactaatgtatcttggttttgatttttcaactaggtctggttcttctattggcgtcaatgattttgttatacctgaagaaaaagcaagcatcattgattcatcagaaaaagaagtaaaagcaattgaaaaacaattcgactctggtctagtaacaagaggagaaagatacaataaggtaatcgatatttggtctagagctaatgaacaggttgcaaaagcaatgatggaaaaaattagttcagaaactgttaaaaatcctgatggagaaaatgtagatcagtcatcttttaattctgtctatatttatgcagactcaggtgcaaggggttcacctgctcaaattagacagctctctggtatgagaggattaatgtctaagccggatggatcgattattgaaactcctattactgcaaactttagagaaggcttgtctgttcttcaatactttatatcaactcatggagccagaaagggcttagcagatactgctttaaagactgctaactctgggtatctcacaagaagattgtgtgacgtatcaatggattcagtcataaacattgaagattgtggaacaactgagtcaataactgttacttcaatcattgatggtggagaaattattcaacctcttactgatagaattttgggaagagtaattgcagagccaattgttgatgctaatggaaaagaaattttcccaattaacacaatgctagatgaagaatgcgctaatcatcatagaagaattgaacttatccagcttaaa

SEQ ID NO: 256035 - DNA, 1057 bp, Unknown
  Bacterial polypeptide expressing nucleotide sequence isolated from the Sargasso Sea
gagattgaggctgagcctgaggtgggcattggcgctgaggcgctcaagcgtctacttgaggacctcgagctcgctgaaattgctgagcagctgcgtgaggacatcgcaggcagcaaaggccaaaaacgggccaagttgatcaagcgtctgcgtgtgatcgacaacttcatcgccaccgatgcccgtcctgagtggatggtgctcgatgcgattccagtgattccccctgacctgcgcccgatggtgcagctcgatggtggtcgctttgccaccagtgatctcaatgacctttatcgccgggtcatcaaccgcaacaaccgtttggccaggcttcaggaaattctggctcctgaaatcatcgtccgtaatgagaagcggatgctccaggaagctgttgacgcgttgattgataacggccgtcgcggtcgcacggtcgttggtgcaaacaaccgcccgctcaagtctttgagcgacatcatcgaaggcaagcagggtcgcttccgtcagaacttgcttggtaagcgcgttgactactccggccgttcagtgatcgtggtcgggcccaagctgaagatgcatcagtgcggtctgcccaaagagatggcgatcgagctgttccagccgtttgtgatccatcgcctaatccgccagaacatcgtcaacaacatcaaggctgccaagaagctgattcaacgcgctgacgatgaagtgatgcaggtgcttcaggaagtgatcgatggtcacccgatcctgctgaaccgtgctccaaccctgcaccgtctcggcattcaggctttcgagcccaagcttgttgatggccgcgccattcagcttcaccccctggtctgcccagccttcaacgctgactttgacggcgaccagatggctgttcacgtccccctggctttggaggctcaaaccgaagcccgcatgttgatgttggcaagcaacaacatcctttcgccggctaccggtcagccgatcatcaccccatcccaagacatggttcttggcgcttactacctcacggcaacacgccaagagcgcagcaagcctg

SEQ ID NO: 256036 - DNA, 1367 bp, Unknown
  Bacterial polypeptide expressing nucleotide sequence isolated from the Sargasso Sea
ttacattgtcactgaccctggcttaacagatttagaaaaatgtcaaattttaactgaagaagaatttgtggaggcatttgacgagtatggtgatgaatttacagcttctatgggtgctgaagcggttcagatgttgctacaggaacttgatttagaagaggaaattagaatcatacgcgaggaagttcctcaaactaattcagagactaagctgaaaaaattatctaaaagattgaaacttctcgaagcattcaacgaatctggaaataagccagagtggatgatcatgaatgtactgccagtattacctcctgatttaagacctttggttcctttggagggaggcagatttgctacctcagatttaaacgatctatacagaagagtaattaatagaaataacagactaaaacgtctgctggagttaagtgctccagatattatcgtcagaaatgaaaagagaatgcttcaagaaagtgttgatgcccttttagataatggacgaagaggaagagtgattactggaactaataagcgaccattgaaatctcttgcagatatgattaaaggtaagggtggaagattcagacaaaacttgctaggaaaacgtgttgattattcaggtagatcagtaatagttgcgggccctgatttgaaattacatcagtgcggacttccgaaaaaaatggctcttgaattattcaaaccttatgtatatggaaaacttgagcaaaatgaacttgctacaactataaaagcagctaaaaaacttgtagaaagagaaactcctgaggtttgggagattttagaagaggtaatcagagagcacccaattcttttaaatagagctcctacacttcatagactgggaattcaagcatttgaacctttgctagttgaaggtaaagcaattcaattacatccattagtttgtgtagcttttaatgctgactttgatggtgaccagatggctgttcacgttcctctttctattgaggctcaacttgaagcccgtgctcttatgatgtcaacaaataatattttatcgccagccaatggagagccaataatcaatcctactcaagatattgtattgggtctttactatatgactcgagataaagttaatgtaaagggagatggaagggtttttagcaatcctgatgaggtgctaagagcgtatgaatcggaaactatagatatacatgcaaatatcagagttaggataactaatgctgataaaggtacttttttagaagatactactgttggcagagtattggtttggagaattacacctattgaggttggttttgacaaagtaaacaaaacattagataagaaatctgtttctaatttaattgata

SEQ ID NO: 256037 - DNA, 940 bp, Unknown
  Bacterial polypeptide expressing nucleotide sequence isolated from the Sargasso Sea
agagtttggagacgaattcacagcaggtatgggcgctgaagctgttcaagttttactagaagagcttgatattgatgacgaaataagagtaataagagaagaaattcctgaaactaattcagaaactaaacttaaaaaattatcaaaaagattaaagctactcgaagcatttaaagactcgggcaataaaccagaatggatggtgatgaatgttttacccgtattacctccagacctgagacctctggtgcctctagagggtggcagattcgctacttctgatctcaatgatttatacagaagagtgataaatagaaataatagattaaaaagactattagagcttaatgcaccagaaataatagttagaaatgaaaaaaggatgcttcaagaatctgtggatgctcttttagataatggtagacgtggaagggtcattactggaacaaacaaaaggccactaaaatcattagctgacatgatcaagggaaaaggaggcagatttagacaaaaccttttaggtaagcgtgttgattattctggaagatctgtaattgttgctggaccaaaccttaaattacatcaatgtggacttcctaaaaaaatggctttagagctatttaaaccttttgtatatggaaaacttgagaacagggagcttgcaacaactattaaatctgcaaaaaaattagttgaaagagaaactcctgaagtttgggaagttttagaggaagttatcagagaacatccagttttgcttaatagagctccaactcttcacaggcttggacttcaagcatttgaaccaaaattgattgaaggaaaggcaatacaacttcatcctttggtttgtgttgcatttaatgctgattttgatggagatcaaatggcagtgcatgttccgttaacattagaagcacaatggaagcaagagctttaa

SEQ ID NO: 256038 - DNA, 2025 bp, Unknown
  Bacterial polypeptide expressing nucleotide sequence isolated from the Sargasso Sea
atcattaccatcaaggattggattgatgcttgatatgacccttcgtgagatagaaagagttctatatttcgaagccttcgtagttattgaaccaggaatgacaccccttgaaaaaggtcaattgatgacagacgaaatgtatctcgatgcagttgagcaatacggtgacgaatttgatgctgccatgggggcagaagctgttgcagccttattatcctcttttgatcttcagactgagatgttgcaggtacgcgaagatatggctgctactaagtctgaaattaagataaaaagactgacgaaacgcttgaagctcttagagtcatttttaaattctggaaataaacctgaatggatgatactcaatgttcttcctgtattgcctccagatcttcgcccacttgttcctcttgatggaggtcgctttgctacatcagatctcaatgacttatatagaagagtgatcaaccgaaataatagactgagacgtttattggaattaaatgcacccgatataatttgtagaaatgaaaagcgtatgcttcaggagtcagttgatgctttactagacaatggtagaagaggtcgagcaattacagggacaaataagaggccgcttaagtctctcgctgatatgattaaaggaaaacagggtagatttagacaaaatctattaggaaaaagggtagactattcaggaagatccgttattgttgtgggcccaactctaaaactccatcaatgtgggttgccaaaaaaaatggctcttgagttattcaagccttttatttattcaaagctccaacttcgcggcgaggcatcaaccattaaagcagcgaaaagaattgttgaaagagaaggcactgaagtctgggatatacttgccgaagttattagagagcatccagttatgctcaatagggcgccaacactacatagacttggaatccaggcttttgagcctgtattgattgaaggaaaagcaatacagcttcatccccttgtttgtacagcttttaatgcggactttgatggtgatcagatggctgtgcatgttcctttatcaattgaagctcaattagagacaagagcactcatgatggcttcaaataatattctttctcctgcgaatggagagccaattattgttccctctcaggatgtggtattgggcctgtattatatgactaggtcaaaagtaaatggaaagggtgaaggaatggtcttttctgatattgatgaagcaagaagagcctatgaaaatcatgtagttgaactccaaacaaaagcaaaagttagggtgttaattaatcagaagaatgaagaaggagagcttgaattaaaaaataaacttgtagagactacaattggaagagctctcctatcaactcttcttcctaaaggattaagttttgatttagttaatcgagatatgacgaaaaaagcaatatcagatctcgttaattcgtcatacagaatacttggattaaaagaaacagttatctttgcagataaactgatgtacacagggtttcgttttgccacttcagcgggaatctctattggggttgatgatatggttattccaagctcaaagaatgaaatacttagttctgctgataatgatgtcagagaaattcaggagcaattcagtgatggtcttgtgactgatggagagcgatataataaagttgtagatatctggacaagaaccaacgagcaaatagctaaagccatgatggataagttaggttcagaagttgttgaagattcagatggaaatgaggttaaacaagattcttttaactcaatatttatgatggctgattctggtgctcgaggatctgcagctcagattcgtcagttggcggggatgagaggtcttatggcaaagcctgatggatcaattattgaaacaccaattactgcaaatttcagagaggggctagatgtattgcagtactttatttcaactcatggtgcgagaaaaggattggctgatacagccttaaaaacagcaaactc

SEQ ID NO: 256039 - DNA, 2590 bp, Unknown
  Bacterial polypeptide expressing nucleotide sequence isolated from the Sargasso Sea
tgctcggaagagcacggcgacgagttcgaagccaaaatgggtgcagaagcaattctggacattttacgtggcattgaactggcaacagaaatcaaacaaatgcgtgaagagttgccaactatcaactctgaaactaaacgtaagaagatcagcaagcgtcttaaactgatggaagcattccacacttctggcaacaagccagagtggatgatcatgacagtactgcctgtactgccaccagatctgcgtcctttagttccgttggacggtggccgttttgcgacttctgatctgaacgatttataccgccgtgtgatcaaccgtaacaaccgtctgaagcgtcttctggacctgtcagctcctgatatcatcgtacgtaacgaaaagcgtatgttgcaggaagctgtggatgcgttgttagacaacggtcgtcgcggtcgcgctatcacgggttcgaacaagcgtcctctgaaatctttggccgacatgatcaaaggtaaacaaggtcgtttccgtcagaacttgttaggtaagcgtgttgactactcaggccgttctgtaatcacagtaggtcctactttacgtctgcatcagtgcggtttaccaaagaaaatggctttagagttattcaagcctttcatctacggtaagttagaagcccgcggtttagccactactatcaaagcggctaaaaagatggttgaacgtgaagaaggcgctgtatgggacgttctggacgaagtaatccgtgaacatccggtgctgttaaaccgtgcacctacacttcaccgtttaggtattcaggcattcgaacctgtactgatcgaaggtaaggctattcagttacacccattggtgtgtgctgcatacaacgccgacttcgacggtgaccagatggccgttcacgtgcctctgaccattgaagctcagttagaagcccgtgcgctgatgatgtcgacgaacaacgttctgtcgccagccaacggtgaaccaatcatagttccttcacaggacgttgtattgggtctgtattatatgacgcgtgaagcgatcaacgccaaaggcgaaggcatgatctttaaacatgccaaggaagctgaaaaagctttccgtgccggtgttgccagcttacacgcccgtgtcaaagtacgtatcactgaagtgactattgccgaagacggctcccgttcttcagtaacagcagtacgcgacactacagtaggccgtgcgattctgtactccatcatgccggaaggcttagcctttgattcaatcaaccaggctatgggtaagaaacagatttcacgtttactgaacggctcttaccgtcgtattggtctgaaaaataccgttattttagcggatcagatcatgtacacaggtttccattacgccatgttgtctggtgtgtctgttggtattgacgatatggtcatcccggcagccaaggttgacatcatttctgctgcagaagcggaagtggctgagatccaggaccagttccaacaaggtttagtaacggccggtgaaaagtacaacaaagttatcgacatttggtcaacagccaacgaagccttatctaaggcgatgatggacaacttatcgaaagagtcagtggtcgatcgcgaaggcaatactgtcactcaaccgtcatttaactctgtttatatgatggccgactctggcgcacggggctctccagctcagatccgtcagttagccggtatgcgtggtctgatggctaaaccagatggttcaatcatcgaaacgccaattacagcgaacttccgtgaaggtctgagcgtacttcagtacttcatctctactcacggtgctcgtaaaggtttggcggatacagcgttaaaaacagcaaactccggttacctgactcgtcgtctggttgacgttgcacaagatttagtcgtgactgaatctgactgtggctcaacagaaggcatcatgatgaagccactgattgaaggtggtgacgttgttgaaggtctgcgtgagcgcgtattaggtcgtgttgtgatcggcgacgtggtagttcctgcaactggcgaagtgctggttgaagacggcaccatgttagacgagaagctgtgtgatgcgattgaaaaacactcgattgacgaagtctatgttcgttctgtaattacctgtcagaccaactttggtgtttgtgccaagtgttacggtcgtgatttggcccgtggccacatcatcaacgctggtgaagctgtaggcgttatcgctgctcagtccatcggtgagccaggtacacagttaacgatgcgtacattccacatcggtggtgctgcatcgcggtcatcagctgagaacagcgtacaggtgaagaactcaggtatcctgaagttacacaatgccaagttcgtacgtaacagtgacaacaaaattgttatcacttcacgttcagcagaagtcacagtgttcgacgacatgggtcgtgagaaagagcgttacaagctgccatacggttctattttagccacagacgacaatgcaaaaatcgtttctggccagatcgttgcaagctgggatccgcactctcacccaattatcgtagaac

SEQ ID NO: 256040 - DNA, 568 bp, Unknown
  Bacterial polypeptide expressing nucleotide sequence isolated from the Sargasso Sea
gggaaaggttatgttccagcaaattctggttcacaagttgaaatgccaataggtttaatacctgtagatgctttattcagccctataaaacaagttgcttatagagttgaaaatacaagagttggtcaacaaacagattatgataaacttctttttgacattgagacagatggaacagttactccggaagatgctattgcatttggagcaagaatattaactgaacaattaaaaccgtttattaattttgatgaaccagagccagaaattgaagaagatttagagagtgtattgccttttagcagaaatttattaaaaaaggtggatgaattagagttaagtgttaggtcagctaattgcttgaaaaatgataatatagtttatataggtgatctagttcaaaaaactgaacctgaaatgcttagaactccaaattttggaaggaaatcattaaatgaaattaaagaggttcttaaaatgatgtctttagaactaggaatggatgttgagggatggccaccagaaaatattgaagaattagcaaaaaaacatgaagatccatattaaa

SEQ ID NO: 256041 - DNA, 979 bp, Unknown
  Bacterial polypeptide expressing nucleotide sequence isolated from the Sargasso Sea
agcaaaactagatatagcattaagtgaagataaaacttatgcaaaaattactgcagaaccattagaaaaaggttatggtttgacgttaggtaattcattaagaagaattttattatcatcaataagaggtaccgctgtaacagctgttcaaatcgatggtgttcttcacgaattttcttcaattaaaggagttagagaagacgttactgatatagtcttgaacataaaatctttagctttaaaaagttcttccgaaggttctaaaaaactagtgcttgatgcaaaaggaccaggtgaaataaaagcatcgaatattacatcaattcctgatgttgaaattttaaatcctgatttaattatatgcaatttagacgaaaacacaaactttcatatggaaatgaatgttggaagtggaaaaggatatgtgtcagctgaaattaataaaccagatgaacctcctttaggattaattccaattgactcgctatttagtcctgtaaaaaaagtatcttattcaataagtactgcaagagaaggtaaagctttagactacgataagttaataatggaagtagagacaaacggatcaatatttgctgacgatgcagtagcgtacgctgctagaatatttcaagatcaattatcaatgttcgttaactttgacgagccacaggaagttatagttagagaaaaaccaacagaacctgaatttaataaaaatctgttaagaaaagtagatgaattagaattatctgtaagatcaatgaactgcttaaagaacgataatataatttacattggtgatttagtacaaaaatcagaaggcgaaatgcttagaacacccaattttggtagaaaatctttaaatgaaattaaagaagtattacaaggaatgtcattatacctaggaatggaaattccaaattggccaccagataatattgctgaattatctaaaaaacttgaggaacaaatttaa

SEQ ID NO: 256042 - DNA, 1391 bp, Unknown
  Bacterial polypeptide expressing nucleotide sequence isolated from the Sargasso Sea
gaaacaaggaagatttagacaaaatctacttggtaaaagagtagattactctgggcgttctgtgatcatttcaggcccccagctaaagctctatgaatgtggcctgcctaaaaaaatggcattggagctgtttaagccatttgttatgaattctttagtggtcaaaggttacgctcacaacattaagtctgctaaaagattagcagaaagatctcaacctgaaatttgggatattctagaagaagtaatcaaagatcacccagttttactaaacagggcaccaactcttcatagacttggaatacaagcatttcaacctgtacttgttgagggctccgcgattcagcttcatcctcttgtatgtacagctttcaatgctgactttgatggagatcaaatggcggttcatgttcctttgtcaaaagaatctgtgttagaagcaaaaaaaataatgctatcaacaaacaatatgttggctcctagatcaggggaaccaattgtggctccaaacttagatatggttctaggtatttactatctaaccggtatggatgaaaaagaggaaaaagataagatttcaacatttgattcaagagaatctgctatttttgctcacgaagttgaaagtttagctttgagagaaccaataaagctaaaaataaatgatgagtatgttgaaacaaccgttggtagattactatggcatgaaattattccagaagagctaggttttagaaaccagcagtttacaaaatctttaatcgaggatcttgttgcagactgttatggtcttttaggaaaagatgttaccacagtagtacttgatgatatcaaggacataggttttaaatatgccacagtttctggaacaactattgcgatcaaggacattgttactcctcctcaaaaacaatctttgctttcttcagctgaccaaaaaatcagaaaattagacgagcaatatatggaaggtatgatcacacaagcagaaagataccaaagttctataaatgtatgggaagatgtttcaaaaaagatggaatctgctgtttcagattctcttccaaattacgctggaatatactcaatggctgactcaggagctaaaggaaacctagctcagattaagcaaatggctggtatgagaggcttaatgtcagaccctaaaggtagaattattgaattgcctattagatcttcatttgcagaagggctaagtgttatggaatactttatttctactcacggagcaaggaaaggtctagctgatacagctctaagaacagctgactcaggttatttgactagacgtttagccgacgttgcacaagacttgataataaatactgttgatgatgaaaatgctgtaggcattagaattaaagccgatt

SEQ ID NO: 256043 - DNA, 1285 bp, Unknown
  Bacterial polypeptide expressing nucleotide sequence isolated from the Sargasso Sea
aataagcctgaatggatgatcgtttctattttacctgtgataccacctgagttaagacctttagttccattagagggtggaagatttgctgcaagtgatcttaatgacttgtacagaagaattattattagaaataatagactaaagcaattaatggatattcaggcacctgaagtaattttaagaaatgaaaaaagaatgctacaagaatctgttgatgcactttttgataacacaaaacgtaaaaccgcaattaggagcggttcaaaaaggccattaaaatcaatttctgacatgcttagaggtaagcagggtagatttagacaaaatcttcttggaaaaagagtagattattctggtaggtcagttattgttgttggtccggaattaagaatgactgaatgtggtattccaaagaatatggcattagaattatttaaacctcatttaattagagaattaattagaagagatttagctgcaactccaagaagtgcaaaacttatgatcgaaaataaagaatcatatgtttatgaaattcttgaaagtgttgtaaaagatcatccagttttgttgaatcgtgctcctactcttcatagactgggtattattgctttccagcctattcttattgatggtaaagcaattcgagtccatccacttgtctgctcagcttttaatgctgactttgatggtgaccaaatggctgttcatgttcctttatcaataccttctcaattggaagcaagagtcttgatgatggcaagtcaaaacgttttgcatccagctagtggtaaacctattacattaccttcacaagacatgattttaggttgttattacttaactagagataaaaaaggtgagattggtgaaggaatgtcatttggatcaattgacgaagtaaaaattgcacatgataatggtaaagttgctatgcatgcaattattaatgtaagacataatggagtttggcataaaaatactactgcaggtagagcaatatttaattcaataattccagatgaattgggttattatgatgaaattgtttctaagaaaaaacttagtttcatcattggtgaatcatttgtcaaagctggaaatcaacgaacagtccaattacttgatgatttgaaagatattggttttaagactgctactatgagcggagtatcaatttccataagtgatgttattattccagatgcaaagcatgatataattgatagagcagaacaagaagttgataaaatacaacagcgtttgacaggcatgtcttaac

SEQ ID NO: 256044 - DNA, 1508 bp, Unknown
  Bacterial polypeptide expressing nucleotide sequence isolated from the Sargasso Sea
tatcccacttagggatgtagaacaaattgtttattttaattgttatgtcgttttagatccaggtgatcataaagaactcaaatataagcaattactcactgaggatgagtggctggaaattgaagatgaaatttatgctgaagattcaactattgaaaatgaaccttttgttggaattggtgctgaggcacttaagcaattacttgaggacctcgatttaaatcatgttgctgaggagcttagagaagaaattacaaatagcaaagggcaaaagagggcaaaacttataaaaaggataagagttattgataattttattgcaactaatgcaaaaccagaatggatggttttagatgcaattccagtaatacctcctgatcttagacctatggttcagcttgatgggggaagatttgccacttcagatttaaacgacttatatagaagagttataaatagaaataatagactagctaggcttcaagaaattttagctcctgaaattatcgtaagaaacgaaaaaagaatgcttcaggaggctgttgatgcccttatagataatggaaggagaggaaggactgttgttggagctaataatagagctcttaagtccctaagtgacataattgagggaaaacaaggaagatttagacagaatcttcttggaaagcgtgttgactattcaggaagatctgtaatagttgtcggtccaaaattaaaaatgcatcagtgtggtctcccaaaagagatggcgatagagctttttcaaccttttgtaattcatagattaatacgacaaaatatagtgaataatattaaagctgcaaaaaaattaatacaaaaagccgatgacgaagttatgcaggtacttcaggaagttattgaaggccatccaatcctcttaaatagagctcctacattacatcgtttaggaatacaagcttttgaaccgaaattagttggaggcagagcaattcaacttcatcctttagtttgccctgcattcaatgctgactttgatggagatcaaatggcagttcatgttcctttagctttagaggcacaaactgaagcacgcatgcttatgttggccagtaataatatcctttctcctgctactggggaaccaatagtgactccatcacaagatatggttttgggttcttattatctaacggctttgcaaccgaattatcaaaaacccgcattcggagataataagattacgtttgcttcattagaagacgtcatttttgcttttgaagataaaagactcagcctacatgaatgggtttgggttagatttaatggtgaagtggaagatgaagatgaaatgcgtagcccacaaaaaactcaagagctagaagatggctcaaggttagaaatctggaatttaagaagggacagatttgactctgatgataatttaataagtagatttgtgctgacaactgttgggagagtagttatgaactataccatcatagattctgtatctaaaacgtaat

SEQ ID NO: 256045 - DNA, 2345 bp, Unknown
  Bacterial polypeptide expressing nucleotide sequence isolated from the Sargasso Sea
agaaattattgttagaaacgaaaaaagaatgctacaagaatctgttgatgcacttcttgataacggtagaagaggaagagttattactggtacaaacaaaagaccacttaagtcattagccgacatgataaaaggaaaaggtggaagatttaggcagaaccttcttggaaaaagagttgattattctggaagatctgtaattgttgcaggccctaatttgaaacttcatcaatgtggtttgcctaaaaagatggcattagaattatttaaaccatttgtttatggcaaactcgaaaatagagagcttgcgacaactataaaagctgcaaaaaaattagtcgaaagagaaacaccagaagtttgggaagttctagaagaggtgattagagaacatcctgttttacttaatagagcgccgacgcttcatagactaggtttacaagcttttgagcctaaattaattgaaggtaaggcaatccaacttcatcctcttgtatgtgttgcatttaatgcagattttgatggagaccaaatggcagttcatgttccattaacgctcgaggctcaacttgaagcgagagcattaatgatgtcaaccaataatatactatctccagctgatggatctccaattattaatcccacccaagatgttgtgcttggtctttattatatgacgagggataatgctaatgcctcaggtgctggaagaacttttagtaatcctgatgaagtcttgagagcttatgaaacagagaatttagaaattcattcaccaataaaagtaagagttactcatgaaaatggagaaacttcaatagagaatacaactgttggaagaatattaatttggagaataactcctactgaggttggttttaaaaacattaataatgtattaaataaaaaatcagtttcaaaactagtagatacttcatatagaaaagccggcctaaagaaaactgtgattttcgcagaccaattaatgtatctaggttttgatttctctacaagatcaggatcatccattggagttaatgattttgttattcctgaagaaaaagcaaaaattattgattcatctgagaaagaagtaaaagcaatagaaaagcaatttgattctggcctagtaactagaggagaaagatataacaaggttattgatatttggtccagagcaaacgaacaggttgcaaaggctatgatggaaaaaattagtactgagactgcaaaaacacctgatggagaagatattgaccaatcatcttttaactcggtttatatatatgcagactctggtgcaagggggtcgcctgcccaaataagacagttatcaggaatgagaggattaatgtcaaaaccagatgggtccattattgaaacacctattactgcaaactttagggaaggtttatctgtacttcaatatttcatatctactcatggtgccagaaaaggtcttgcagatactgctcttaaaacagcaaactctggatatttaactaggagactatgcgatgtatcaatggactcagttattaatattgaagattgtggaacatcagaatctataacggtaacttcaataattgatggcggtgagataattcaacctttaactgatagaattttaggaagagttattgctgaaccaatttttgattctgacggaaaagaattatttcctgtaaacacgatgctggatgaagaagctctagatatcattgatgaattaaatttatcaagtcttaaaattagatctccaatgacttgcgatgctccaattggagtttgtgccaaatgttatggaagagatcttgcaagaggccatcttgttcatagaggtgaagctgttggagttgtagcagcacaatcaataggtgagcctggtactcaattaaccatgagaacattccacatcggtggtgcggcatcaagtgcatctgaagataatgctatatttaataaaaatgctggcattgtttcattttcaaacgatatgaaaacagtaacaaataaaaataaacttgaagtagttgtttcaagaaatgcgatgtgttctatctctgatacaaatggaaagattatagagcaatataaagttccttatggagctgttttagaagtagcagattcaaatgatcttgaggatggtgtgaaaatagcatcatgggatccatacacaagaccaatagtttctgaaacatcaggaaaggttaaatttaccgatattcaagatggaattactgttagagaacaacttgatgagcttacgggactttcaagtgttgaaattattgaagtagctgatagaacatctgctggtagagacatgactccaacaa

SEQ ID NO: 256046 - DNA, 585 bp, Unknown
  Bacterial polypeptide expressing nucleotide sequence isolated from the Sargasso Sea
tatggaaccttcaaaaaaaatacttgcaataattcttgctgcaggcaattctgagagatttaatgataataagcttttttttgaaatagatggtaaacctgttttacaaagaacgattgaaaatatactttctgtagagcatattgattcaatattaatagttaattctaagaaagatgaattgaaaattgaaaaattgttaattcaaataaattcagataaaaaaatatattctgtttatggaggtaaaaatagggctgattcgttattatgcgcactagattttataactgatcaaaaactaaatattgattatctagtagtgcatgatggagcaagaccatttactaaaaaagatatgttctatgaaggtattaagaatattgaaatctatgactctgtaatatttggactaaccccaactgacacagtaaaaataattacggatgataattttgtaaaaaaaacattaataagagataaattaattaatgtccaaacccctcaattttttaagaaagaaattttgatagaaaatataaacaataataaaaatcttaatgaaattactgatgattcttcctt

SEQ ID NO: 256047 - DNA, 286 bp, Unknown
  Bacterial polypeptide expressing nucleotide sequence isolated from the Sargasso Sea
aaaagtttggagaactcattggggaaaagatgatttaaattgtgaactactcaatcgaaacgaactttttgcagtccagacaccccagggttttcgttttgaagatctctgggaagcatcgttaaaatctcgcgaagagaattgggatgtaacggatgacgcttctatgctggaaaaaatgggaaaatccgtccaccctgttccgggagaaatgggtaatctgaaaatcaccacggctgatgatctggattacgccagacatcaatttcaatcttcaaaactttga

SEQ ID NO: 256048 - DNA, 268 bp, Unknown
  Bacterial polypeptide expressing nucleotide sequence isolated from the Sargasso Sea
attggaaaaagatgatttaaattgtgaactactcgatcgaaatgaactttttgcagtccagacaccccagggttttcgttttgaggatctctgggaagcatcgttaaaatcccgcgaagaaaatttggatgtcacggatgacgcttctatgctggaaaaaatggggaaatccgtccaccctgtaccgggagaaatgggtaatctgaaaatcaccacggctgaggatttagaatacgcccgacatcaatttcaatctttaaaactttga

SEQ ID NO: 256049 - DNA, 655 bp, Unknown
  Bacterial polypeptide expressing nucleotide sequence isolated from the Sargasso Sea
aatgagtttatttcttgtattattggctgctggcgatggaaaaagactaaaaactaaggttccaaaaccttactataaagtaaagcatgcatctttactggaacatgctttaaatgctttcaaaagttttcctcaaattaaaaaaactttgattgtttttaataaaaaacattctagatatttaaaccagataaatttaaaaaatacactaaaaataactggtggaaaaactagacaagaatcaactttcagggcattgaaaaaaattggaaaattaaattgtaataaaatattaattcatgacgcagcaagaccgaacccttcgagaaatcttataaaagaaataattaataaacttaaaaaaaatgatgctgtaataccgacaattaaagtgaatgacgcaacaaagcgtgttgcaaaaaatataatatttaaaaatattcaacgagaaagtttgagattttcacaaactccacaaggttttacttttaaaaaaatatatgaaaaacataaaaaaaatatagatacaaattttgatgatgatagtgctttatttacagaagatgatgaaaaagtaataaatataaatggaagtcaatcaaatttaaaaattactgacaaagaagatctaaaaatttttaaatctttaaaaaaa

SEQ ID NO: 256050 - DNA, 589 bp, Unknown
  Bacterial polypeptide expressing nucleotide sequence isolated from the Sargasso Sea
tatgagtaattgttttataatattagcagctggaaaaagtaatagatttatttccaaaataccaaaaccatatattaaatataagggtgatatactaattaatcattctataaataaggcaattttatcaaaaaaattctctaaaatcgttgttgcaatcaataaaggtcacaaaaaatacataaaaaaattgagtaaaaacaaagttcattttatagagggaggaaaatctagagctgattcttctaggttatctttaaaatatctgtccaaatttaagcccaaaaatgtgttgatacatgatgctgcaagaccaaacttttcaataaaattagtaaataaactctttaaaaatcttaaaaaatttgatggagttgtcccagttttgaagaccacaagttctattaaattaattaaaaataaaaaaattttaaacttagatcgcaacaaaatttttttatcacaaacaccacaagcttttaattttaaaaaaatatttgaccttcaaaaaaaaggaaattcaaaaataactgatgacgcttcattatttataaataatctaaacaaaataaaaatggtcaaaggcgaa

SEQ ID NO: 256051 - DNA, 393 bp, Unknown
  Bacterial polypeptide expressing nucleotide sequence isolated from the Sargasso Sea
gacaaatggagagaccagattatgtactaattcatgacgctgctagacctgtaactccaccagaccttatcaatactgtaattgaaaatttgaaaaccacggatgctgtggctcccgctttaccagtttctgacacgctttgggaagttattgacgaaaaggtttttaaaaccaaaagtagaaataatatctggcgagctcaaacgccgcaggggtttagcttcaataagatacttgaagctcacaatgctagctcacctgatgcgaccgatgatgtggaagttgctattgcagcaggaatacaagtaaaagtagtaagtggtagcgaggaaaacattaaaattacaacggccgaagatttcgagcgtgttatgacagtattagggcgttaat

SEQ ID NO: 256052 - DNA, 453 bp, Unknown
  Bacterial polypeptide expressing nucleotide sequence isolated from the Sargasso Sea
aatgacttttgaggatgtcgttgcagttatagttgctgcagggaaaggctctcgtatgagagagaatcgcaataaattgcttcttcccttaggagcaagtacaatacttgagaatagcttggaaccattcttaaagcattcaagaattagcaagatttatttggcagcatctgtacaggatcataattttataaaaaaattgatacctgaagaagtaatattgattaaaggtggtaagcgcagacaggactccgtacataatgcacttgtggagattatgaaggatggaaatatccctgatgctgtgttgattcatgacggtgcgcgtcctttttgtagctcaaacttaatagatcgcgtgttggaagctacacaaaggtatgatgccgcaatacctgtactcccgattaacgaaaccgtccgccgtataactgtggaaaaaaccaaatgttg

SEQ ID NO: 256053 - DNA, 277 bp, Unknown
  Bacterial polypeptide expressing nucleotide sequence isolated from the Sargasso Sea
agaaactcattggaaaaagatgatttaaattgtgaactactcgatcgaaatgaactttttgcagtccagacaccccagggctttcgttttgaggatctctgggaagcatcgttaaaatcccgtaaagagaattgggatgtaacggatgacgcttctatgctggaaaaaatgggtaaatccgtccaacctgttccgggagaaatgggtaatttgaaaatcaccacggctgaggatctggattacgcccgacatcaatttcaatcttcaaaactttgac

SEQ ID NO: 256054 - DNA, 492 bp, Unknown
  Bacterial polypeptide expressing nucleotide sequence isolated from the Sargasso Sea
aaaatgaattaaccaatattaaaacaacgaaaaaaataattgttactgctggtggtaaaaaaaggcaagaatctgttaagaaaggtattttatgtacaagcaatataacggaattggtttgtattcatgatggtgctagaccatttgtatcggaagatttaataaaaaactctattgatccatgctttaataatgatggtgcaattattgctttgccaaattatgatactttaaaagtttgtgcagaaggatacataaaaaaaacgatagatagaaaaaatacttggagagctcaaactccacaaactttttggaaaatgaaattattagatgcttttgcatatgtagaaaaaaacgaattatgtattacagacgaagcttcgataatggaagcatttgggtttcaaatatctgtggttcatggccattacaataattttaaaataacctctccaatcgattggcaaagagcagaagaaattacattatgat

SEQ ID NO: 256055 - DNA, 534 bp, Unknown
  Bacterial polypeptide expressing nucleotide sequence isolated from the Sargasso Sea
agattatattagttgtcccccaagatagagttaataaaacaaaaaatgaattaaccaatattaaaacaacgaaaaaaataattgttactgctggtggtaaaaaaaggcaagaatccgttaaaaaaggtattttatgtacaagcaatataacggaattggtttgtattcatgatggtgcgagaccatttgtatcggaagatttaataaaaaactctattgatccatgttttaacaatgacggtgcaattattgctttgccaaattatgatactttaaaagttagtgtagaaggatacataaaaaaaacgatagatcgtaaaaatacttggagagctcaaactccacaaactttttggaaaataaaattattagatgcctttgcatatgtagaaaaaaatgaattatgtactacagacgaagcttcgataatggaagcatttggatttcaaatatctgtggttcatggccattacaataattttaaaataacctctccaatcgattggcaaagagcagaaaaaattacattatgat

SEQ ID NO: 256056 - DNA, 878 bp, Unknown
  Bacterial polypeptide expressing nucleotide sequence isolated from the Sargasso Sea
tttgaatgctcttaaaaaacttaatacatttaaaccagataatgttttgatacatgatgcagctagaccatttagctcaaataaattagtaacaaaaatcatacgcgctcttaataaaaatcaatcagcaataccctatatttcaagtcctgataaaaaaattatatcaaaaaaagaatttaacaaacctataaaattgatccaaacaccacaagggtttaaatttaatttaatttataaggctcatgtaaacactaaaattgttaatgcaaaagatgactcagttttaattcctatcgaaaatttgaactttatcaaaggtgaaaaattaaatattaaaatcacatatccagaagattttaattactttaaactatttgtaagaccagtatacaaatctggtattggatatgatattcaccaaattgatactaaaacaaaaaaaggattaaaactttgtggagttaaaattaattttaataaattagttggacactctgatgctgatgtcggattgcatgctatttgtgacagtatttttggagcattatcgatgaaagatataggatattatttctcaaataaagatcctaaatggaaaaataaaaactcagagttttttttaaaatttgctagagataaacttaaggaaaataatttttatatttctaacctcgatataaattttattgctgaaaagcctaatatcagcaaatatagaaaagaaatgatattaaaattatcattactacttaagattcctaaaaatataatttcaataaaagcgactacaaatgaaaaaataggttttattggtgatggtctaggtattgctgctgagtcaatagtacaaataacagatgaaaaactttactaat

SEQ ID NO: 256057 - DNA, 857 bp, Unknown
  Bacterial polypeptide expressing nucleotide sequence isolated from the Sargasso Sea
aagttttaaattaaagcttttcaagcatataattttagtcacaaataatatttcttatgttcaaagtaaatatttttcaaaaattaaaattatcaaaggcggtaaagagcgaagcgattcttccttaaaagcattaaagtatattaagagatttaaagtaaaaaatgttcttattcatgacgcagcaagaccagatttctcaacaaaattagtaaaaaaaattttgcttaaattaaagaaatataaagccgtagttccatttacattatctacagatgctataaaatataaacataaaaaattaacttttaatctggataaaaataatacttttttaactcaaaccccccaaggattcaaatataaagatctttataaaatttcaattaccaataaaactaaagtagctgatgaggccagcctattcatcaaaaataatagtcagataaaatttattaaaggtgaattaaataataagaaaattacctttgaaaaagatattaaaaacgcaaaaattttttttgggataggatttgatgttcatagattagtgcagggtagaaaactttatttagggggattaaaaataaaatcatctcttggcacattaggtcattctgacggtgatccagttttacatgcgataactgatgctttgcttggtgcttgtagaaaaggggatataggacaaaaattttctgataaaaataaaaaatttaagaatataagatcaacaattcttttgaaaaaggtgataaaagaaataaaggaaaataattattttataaataaccttgatataaacataattactcaaacaccaaaaatatctaatttaaaagtgaaattaattaaat

SEQ ID NO: 256058 - DNA, 652 bp, Unknown
  Bacterial polypeptide expressing nucleotide sequence isolated from the Sargasso Sea
atgaaaattagtgccgtaatacttgctgctggtagaggaacgcgagctggaggtgcaaatcctaaacaatggcagaatttaggtaataaacgaattatcgaccattcaatagatttatttaaaaatattgccaggattaataatattatggtcgttctccatccagacgatcttcatcttttagatagaagcgatgttttagttacaaaaggtgggcatacaagatcagcgtccgttaaatttggccttgaggcattgaaacaaaatgatatgccagattacgtactaattcatgatgcagcacgaccctcaactccactaactgttatcaatgatgtaattgataacttagaaacagccgatgctgtatcgcctggcttacctgttaccgacacactttgggaggtcattgacgaaaacgtggtgcgaacccaaagccggagaaatatctggcgagctcaaacgccacagggttttaacttcaaaaaaatactcgaagctcatacggttagttcatcaactgcgactgatgatgttgaagttgccacttcagcaggacttaaagtaaaagtaatatacggtagtgaaaaaaatattaaaataacaacagccgaagattttgatcgcgttacggctgtgttaggatattaat

SEQ ID NO: 256059 - DNA, 736 bp, Unknown
  Bacterial polypeptide expressing nucleotide sequence isolated from the Sargasso Sea
tgcacttgtaattctagcaggaggaaaaggaaggagatttggtaagaaaactccaaaacagttttataaaattggcaactcaacaataataaatacattttttgataatctagaaattaagcactttgatattttcgttgtttcaattgaaaagaaatatagagatattattacaaattattataaaaaaattaatcataaaaagaaatttattttttctgagcctggaaaatctaggcaagaatcatcttttaactctttaaaaaaaataaataaatttaagttaaaaaatgttttaattcatgatgctgctaggccattttgttcaaataaattagtcaaaaaaattttatatcaattaaaaaaaaataacaatgcgataccttatatagagtataatgatagacaaattactaaattgaaaaaagaggataaaaaagttttaaatatacaaactccacagggctttcattatgatatgatttataatgctcataaaaaatttattaataaacaatacaatgatgatgcaactttaatacaagaattaaattttaaaattaatttaattaaaggtgaaaaaacaaatattaaaataacttatccagaagacttagtttattttaacttatttaagaaacctattttcaaaagtggtattggttatgatattcatcaaatagataaaaaaacaaaaaaaggcttaaaactatgtggtgttagtttgcctttttca

SEQ ID NO: 256060 - DNA, 250 bp, Unknown
  Bacterial polypeptide expressing nucleotide sequence isolated from the Sargasso Sea
atggcagcggttgaggatgcggtattagtggccggcggcatcggttcgagaatgctgcctgcaagtgctgcaattgcaaaagaagcactacctttggtggacattcctgcaatctcacatttagcacgcgaagcggttgaggcaggggctaaacgattgcacataatcacgtctccaactaaagatttcacaagcttgctgaaggataattcttgggctttggataagcgacctgatattagcaaagaac

SEQ ID NO: 256061 - DNA, 373 bp, Unknown
  Bacterial polypeptide expressing nucleotide sequence isolated from the Sargasso Sea
atgaaaaattgccaagtcttaatattatcagctggcattggttcaagaatggggaaacaaagcagacttcccaagtgtttgaatgatatcaaacaaaaaaaagtgatagagatgttatttgaaaaactttactttttgggttttaaagatatttatttaaccgttggttataaatcaaaaaaaattataagttttttaaaaaaaaaaaagtatacatttaaaacaatctatattaaaaattttaaaaattgtggttctgtctacagctggtattctttttataagatatggaaaaaaaaaaaaaagaaccttattataatacacagtgatttattgtttgatatctcaatatttaaattttctgaaaaaaaga

SEQ ID NO: 256062 - DNA, 826 bp, Unknown
  Bacterial polypeptide expressing nucleotide sequence isolated from the Sargasso Sea
atgaaaaatgcacttgtaattctggcaggaggtaaaggtaagagatttaataagaaaattcctaagcaattttataaaataggagagcataatttaataaattatttgctcaatagtatagacttatacgtttttgataaaattgttatatctttagataaaaaatataaaaaaaatttaattagcacagatataccaaagattttaagaaatagctttctatattccgaaccaggtaaaactagacaacagtcttcttataaagctctaaaaaaaattgaaagatttaaagttaataatgtattaattcatgatgctgctagacctttttgttcaaaaaaactatttaaaaaaattttatttaatcttactaagaaaaataacgtaataccatttattaaatatagtgatagacaaatatcgaaaacaactaaaaaagatattaaaggaattaatattcaaactcctcaaggatttaattataaattaatattagaagcacataaaaaatttaaaaatgaaactttttcagatgactcatctttaatacaaaaattaaatatgaaaataaatttagtgaaaggtgaaaaaactaatataaaaataacatatcctgaagatttagtttatcttaaattaataaaaaaaccaataattagaagtggaattggatttgacattcatcaaattaatacaaaaacaaaagatggacttaaattgtgtggggttaaaatacctttttccaaattgattggtcattccgatgcagatgttggactacatgctatttgtgatagtatatttggagcattatctatgagggata

SEQ ID NO: 256063 - DNA, 814 bp, Unknown
  Bacterial polypeptide expressing nucleotide sequence isolated from the Sargasso Sea
acaccaaaaccatacattagatataagggtgatatactaattaatcattctataaataaggcaattttatcaaaaaaattctcaaaaatcgttgttgcaatcaacaaaggtcataaaaaatacataaaaaaattgaataaaaacaaagttcattttatagagggaggaaaatcaagagctgattcttctaggttatctttgaagtatctgtccaaatttaagcccaaaaatgtgttgatacatgatgctgcaagaccaaacttttcaataaaattgataaatgaactcttaaaaaatcttaaaaaatttgatggcgttgtcccagttttaaagaccacaagctctataaaattaattgaaaataaaaaaattttaaacttagatcgcaacaagatttttttatcacaaacaccacaagcttttaattttaaaaaaatattcaaccttcaaaaaaagagaaattcaaaaataactgatgatgcttcattatttataaataattcaagaaaaattaaaatggtaaaaggcgaagagaaaaatattaaaattacaactaaaaatgacatcaaagaaaacttaaaatattattttggtataggttttgatgtacatagattggtaaaaaataaaagaatgtacctaggtggtctaaaaattgattcgaaattaggaacattaggacactctgatggtgatcctgttcttcacgcaattaccgactcaattcttggtgcttgcagaaagggtgatataggacaaaaattttcagataaagataaaagatttaaaaatataagatcaacaatcttataag

SEQ ID NO: 256064 - DNA, 540 bp, Unknown
  Bacterial polypeptide expressing nucleotide sequence isolated from the Sargasso Sea
tatgattggaaaaaaattggttcttatagttgcaggaggtagtggaaaccggatgaatactagcacacctaagcaatatctaagaattggagaaaagccagtattattaatgaccattgaagcttttttaaaatgtaaggaagtaaatttcctaagagtagtaatatcaaaatctcatatagaaatgtacagagagattgtctcaagagttaaagatagaaggcttttaccatttgcgttaggaggaaataaccgaagtgaatcagtatcaaatggcttaaaaagtttcaaaaatatgctatttaataagactgacaaaatattaatacatgatgctgccaggccatttattactcaagatttgatagaaagattattttctgaactggaaacagcagaggctgttttccccaaaatacctatttcagatgcattatggtataaaagcaataattcgtttcacaagggtcctacgagggattttctttttagggctcaaactccccagggtttttacttcgaacaaattaaaaagctata

SEQ ID NO: 256065 - DNA, 601 bp, Unknown
  Bacterial polypeptide expressing nucleotide sequence isolated from the Sargasso Sea
aatgagtttttccttaattttactggcagcaggagatagtaagagatttgattcaaagatttcaaaaccatttactaagattggtggaaaaaccttaattgagttatcattaataaaatttcataaaattaaacaaattaaaaggataatagttgttatcaaaaaaggtgaccttaaacacattaagcacataagttccaaaaaagttaaaatagtttatggcgggaaaactagacaagaatcaacatggaaagcattaaaatatattaaaaatcaaaagatttttagtaagaacattatgatacatgatgctgctcgaccaaacttttcgataaacctaattaataaaattatatttttttcaaaaaaaaatacggtaattccaaaattaaatataaatgatgctatcaaagaaatttttgataataatctttttatcaatgtcccaagggataatttggttataactcaaactccacaatcatttaaatttaacgatatatataaacttcattcagagagtaaagtattatatcaagatgacgatttatctctaatgagatcgctcaagaatgttaaactaattaatggtgaaaaaagt

SEQ ID NO: 256066 - DNA, 608 bp, Unknown
  Bacterial polypeptide expressing nucleotide sequence isolated from the Sargasso Sea
tatgagtaattgttttataatattagccgccggaaatagtaatagatttaattccaaaataccaaaaccatacattaaatataaaggtgatatactaattaatcattctataaataaggcaattttatcaaaaaaattctctaaaatcgttgtagcaatcaataaaggtcataaaaaatacataaaaaaattgaaaaaaaataatgttcactttattgagggaggaaaatcaagagctgattcttcgaggttatctttgaaatatctgtccaaattcaagcccaaaaatgtgatgatacatgatgctgcaagaccgaacttttcaataactttaataaataaacttttgaaaaatctcaaaaaatttgatggcgttgtcccggttttaaaaaccacaagttctattaaaacaattaaaaataaaaaaattataaatttagatcgtgataaagtttttttatcacaaacaccacaggcatttaattttaaaaaaatattcaaccttcaaaaaaagataaattcaaaaataactgatgacgcttcattatttataaataatccaaacaaaattaaaatggtaaaaggtgaagaggaaaatattaaaatta

SEQ ID NO: 256067 - DNA, 802 bp, Unknown
  Bacterial polypeptide expressing nucleotide sequence isolated from the Sargasso Sea
aataggcaattatcttcgtataatgctctaaaagaattaaataaatacaaacctagaaatgttttaatacatgatgctgcaagacctttttgctcaaataaattgattgcaaaaataattaatagtctcaaaaaaaaatattcatcaataccatatactacaagtttggataaaaaagttatcttaaaaaatgaatttgatcagagtattaaattaatccaaacacctcagggttttgattttgagacaattttcaatgcgcataaaaattcaaaaataaataatgcaaaagatgattctgtattaattccccatgaaaaattaaattttataagaggagaaaaatttaatataaaaataacacatcatgaagatcttaattattttaaaatttttttaaatccagttttcaaatctggaataggatatgacattcataggtttgataaacaaactaagagagggctcaaattatgtggcataaagattaattacagtaaactaattggacactcagatgcagatgtgggtattcatgctgtttgtgatagcatttttggtgcattgtcaatgaaagatatagggtattatttttctaataataatgaaaaatggaaaaataaaaattctactttttttttaaaatttgctaaagataagctaattgaaaataaatattacatagtaaatttagacataaattttatatgcgagaaaccaaatataaataaatatagaaaaaaaatgataagcaaattatcctcaatattgaatatacccgaaaaaataatttctattaaag

SEQ ID NO: 256068 - DNA, 718 bp, Unknown
  Bacterial polypeptide expressing nucleotide sequence isolated from the Sargasso Sea
aatgaataggaaaaaatcatcttataacgcccttattaaattaaagaaatttaaaattaagaatgttttaattcatgatgctgcaagaccattttgttcaaacaatcttataaaaagaatcataaataaattaaaaaaaaataataatgtaataccttttgttgaatataatgataggcaaataagtaaagttaataaaaaagatataaaagtattaaatatccaaacacctcaagggtttcattataatgttattttggatgctcacagaaagctacgtaatgaaattttttcagatgactcaggattattacaaaaattaaatattaaaattaattttattaaaggtgaaaaaacaaatttaaaaattacttatccagaagatttaaaatttattcctctaattaaaaaaacaatttttaaaagtggaattggttacgatattcaccaatttgataaaaaaaataaaaaaggtttaaaattatgcggggttaaaattccttttactaaattaaaaggtcattcagatgctgatgttggattgcatgcaatttgcgatagtatatttggagctctatcaatgagagatattggttatcactttcctaataatgataaaaaatttaaaaatatcgactcatctaagtttatttattattgtagacaaaaattaaatgaaaaaggattttatattataaatatagatataaatattatg

SEQ ID NO: 256069 - DNA, 232 bp, Unknown
  Bacterial polypeptide expressing nucleotide sequence isolated from the Sargasso Sea
aatggctaaattaaaaacattaaaatctgcaattgaaactgctttggcagacaatgttttaattactgatgaagcaagcgctcttgaatatgtaaatgaacccgtacaagttgtacaaggtcgttctgataatattaaaattacttatagtgatgatttagagcttgctcgtttaattcttcagtcacaaaatccatacttaaagcgtaaatacaggtcatatcaaccatag

SEQ ID NO: 256070 - DNA, 1036 bp, Unknown
  Bacterial polypeptide expressing nucleotide sequence isolated from the Sargasso Sea
atgagtaattgttttataatattagcagctggaaaaagtaatagatttatttccaaaataccaaaaccatatattaaatataagggtgatatactaattaatcattctataaataaggcaattttatcaaaaaaattctctaaaatcgttgttgcaatcaataaaggtcacaaaaaatacataaaaaaattgaataaaaaaaaagttcattttattgagggaggaaaatctagagctgattcttctaggttatctttaaaatatctgtccaaatttaagcccaaaaatgtgttgatacatgacgctgcaagaccaaacttttcaataaaattagtaaataaactctttaaaaatcttaaaaaatttgatggggttgtcccagttttgaagaccacaagttctattaaattaattaaaaataaaaaaattttaaacttagatcgaaataaaatttttttatcacaaacgccacaagcttttaattttaaaaaaatattcgaccttcaaaaaaaaggaaattcaaaaataactgatgacgcttcattatttataaataatcttaacaaaataaaaatggtcaaaggcgaagaggaaaatattaaaattacaactaaaaatgacatcaaagaaaaattaaaatattattttggtattggttttgatgtacataggttggtaaaaaataaaagaatgtacctaggtggactcaaaattaattcaaaattaggaacattaggacactctgatggtgatcctgttctccacgcaattactgactcaattcttggtgcttgcagaaaaggtgatataggacaaaaattttcagataaagatgcgaaatttaaaaatataagatcaacaattttgttgaggaaagttattaaagaaatagagaaaagtggattttttattaataatctagatataaatataataactcaaactccaaaaattagtaaatataaaaaaaggatgacttcgatgatatctaaattatgtaaaattaaaaaggatcaaatcaatatcaaaggtaaaa

SEQ ID NO: 256071 - DNA, 1088 bp, Unknown
  Bacterial polypeptide expressing nucleotide sequence isolated from the Sargasso Sea
actagctgcgggacaaagcaaaaggtttaaatcgcataaacctaaacaatatatattgtataaaaataaacctgtttatgagcattcattagacaaagctttagaatcggggctttttaaacatattattttggtagttaaaaacaaattttcagtaaataaaaaatactctaaaaatgtcaaaataattattggtggtaaagaaagaagtgattcttcattgtcaggtttaaaatatgtaaaaaaatttaaaattaaaaaagttttaatacatgatgcagctagaccaaacttttctctaaatttattaaaaaaaatattaaacagtttaaaaaaaaatgatgcagtaataccttatgttaatgcaactgactcaattaaatataattttaaaaataatacgtataatctaataagaaaaaatgcgcttttgacacaaacaccacaaggatttaaatataatacattgtttaacatcgctcaaaaaaataaaaagaaagttcaagacgaagcttcattgtttattgatagaaatcttaaagtaaaatttataaagggagaaagtataaattctaaaattacatataaaaaagatattgaacaaggcaaaatattttatggcattggttttgacgttcatagactagttcctggaagaaaattgtttttaggtggtttaaaaattaaatctaatttaggaactttaggacactctgatggagatcctgtattacacgcaattacagactctattcttggggcatgtcgtatgggagatattggtcaaaaattttctaataaaaataaaaaatataaaaacataagatctacgatacttttaagaaaaattatcaatgaaataaagctaaaaaattatcatataaataatcttgatataaatataattactcaaaggccaaaaatttctaaatttaaaaataaaatgaaaaatttaatttcaaatatttgtaaattaagaaataatcaaattaatattaaagggaaaactactgaaaaattaggtttaataggaaaggaaaaagctattgcttgtgaggttgtaacatccgttacgaaatatgattaaa

SEQ ID NO: 256072 - DNA, 1129 bp, Unknown
  Bacterial polypeptide expressing nucleotide sequence isolated from the Sargasso Sea
atgaaaaatgcacttgtaattctagctggtggaaaaggaaagagatttggtcaaaaaattccaaaacaattcttaaaaattgggaatacaaattttttaaattattttatttcaaatttagatttatcaaacttcgatattattaatatttcaatagataaaaaatatcaaaacacttactttaatcataaggctgtttctgagaaaataaaaattacctattcaaaacctgggcttacaagacaaatttcatcttttaatgctttaaaaaatttaaaaaaatttaaaattaaaaatgtattaatacatgatgctgcgcgtcctttatgtagtaataaattaattaaaaaaattatatccaaattaggcaaaaatactaatgcaattccatatgttgaatataatgacagacaattaataaagaaaagtaaattggaaataaaagcaattaacgtacaaacaccccagggttttaattataatttaatattaaaagaacatatcaaatataaaaattttgaatttaatgatgattcagggctattacaaaagtcaaaaataaaaataaattttatcaaaggtgaaaaaaataatattaaaattacttaccctgaagatgttcagttatttaatttatacagaaagcccataacaaaatacggtattggttatgatattcatcaaattgataaaaaaaccaaaagtggattaaaattagggggtgttaaaattcctttctctaaattaattggccattctgatgcggacgttgtactgcatgcaatttgtgatagtatttttggagcgctctctatgagagacataggttatcactttccaaatacagataaaaaatggaaaaatgcagattcatctaagttcattatttattgtagaagtaaacttaaagaaaaaggttattccctaataaatttagatataaatataatagctgaaaaacctaaaattaataagtatgtttcaaaaatgattaaaaatatttcaacattacttcaaattaaaattaactctgtgtctattaaagcaactacaaatgagaagattggatttattggaaatggtgaaggaattgctgctgaatctatagttcatgttacaaatgaataaa

SEQ ID NO: 256073 - DNA, 994 bp, Unknown
  Bacterial polypeptide expressing nucleotide sequence isolated from the Sargasso Sea
ctttcgataaacaaaaattacagaaatattataaaaaacaataaaaaatacaactcattcaagaataaagtgattttttcaacacctggcagaacaaggcagaagtcatccttcaatgctcttaaaaaattagagaagattaatatccaaaatgtattgattcatgatggagctagaccattatgtagtaataaattgattaataatattttattaaatctcaataagaaaaataattgtattccatatgttaattctaatgacagacaaataataaattctaaaaacaaagatgtgaaagtttcaaatttgcaaacaccacaaggtttcaaatttaaattaatatttaatgctcacaaaaaattcaaaagtaaaaaatttagtgatgactcaagtttaattcaagaattaaattctaaattaaacctcattaaaggtgaaataacaaatgtaaaaatcacatatcctgaagatttaatatatttaaaattactcttaaaacctacttttaaaactgggataggttatgatatccatagaatagataagaaaacaaaaacaggtctgcgattatgtggaataaaaattccattttctagacttgttggacattctgatgctgatgttggattacatgccatttgtgatagtatatttggagcactatcaatgagagatataggatatcattttcctaataataataaaaaatggaaaaatgctaattcttcaaaatttatttatttttgtaaagaattattaaaaaaagagaattttattataactaacttagatatcaatataattgctgaaaaaccaaatatttctagatatgtaaacaaaatgaaaaaaaatgtaagcaaacttctttcaataaattctaatatcatttctataaaagctactacgaatgaaaagatagggtttattggtaatggtgaaggtattgcagcagaagcaattgtacaaatttcaaatgaaaacttttactaat

SEQ ID NO: 256074 - DNA, 913 bp, Unknown
  Bacterial polypeptide expressing nucleotide sequence isolated from the Sargasso Sea
ggtttgggaggactactcccaccagaaggtacagagatggacatttggggttattctaaatccgctaattagggcgctattatatggtacgtgtttcgtcgtaacaggtactttgctttttgctttccactttaaaaaatatcaaacaccgcaaagttttacctattgcttgtctctcgcaaaaaatggatcggtttttggcctggtaatttcagcgacattttttttatcaataagcggaaatatgggtggtgattttagcagcattttttcacctctatttttgaacctagccttgcaaactaaggctgccattgccgcggcgctgttattgctcggattttctagtttttatttcagcgggaaaatgcgttggccacaaattgagaaagcaattgcgattggtggtgctgtacttttgcttacatcattcgtttcaacaggccacgctctcaaaacaggaacgttcacccaaatattactgttttttcacttagttggtatttcattttggatcggatccttgcttccattgctacatttaagcctctccagtaacaatgcgaatcttcacttaattgctcaccgctttgggattttagccgtttattatgtcttggggctattggttgcaggtgcgggattcacttacgctttacttggtagtgacctttctttgcttctgagcacgagctacggaaatgtcttattagccaaaatggctaccgtcagtactcttctactcttcggagcactcaacaaattttggtgtgtaccaaaaatcattaaagatggtccaagaggagccaggcttcttaggatctctcttaaatttgagcttttgttagcagtgataattttatgtttgacctctttgctttctacatctctcaccttgccaatgggagggtag

SEQ ID NO: 256075 - DNA, 1108 bp, Unknown
  Bacterial polypeptide expressing nucleotide sequence isolated from the Sargasso Sea
atgaacaactattttgtaattttagctgcaggaaaaggcagcagattcagtaataaaaaacccaaacaatatcatttgtacaaaaacaaagaattatacgaacattcgataaataaatctatttcttctaaactttttaaaaagataattttagtcgttgataatccaaaaaaaattaaaaaaaaattttctgaaaaaattataatcattaagggtggtaaagaaagatctgaatcatcattaatatctcttaaatttttaaaaaaattcaaaccaaataatatattaatccatgatgctgctagacctaatttttcaataagtttgataaaaaaaattattaaagaattagaagaacatagttctgtaataccagtagttaatccaaatgactctataaaatataaattaaaaaaccacctttataatcttaatagaaataaaacttttttgactcagacacctcaaggttttaaatttaaaaaactttacaatttagcacttaaagaaaaaaacaaaataaatgatgaagccacattatttataaataaagataaaaaagttaaacttattaaaggtgaatttaataataataaaataacatatattgaggatataaaaattcctaaaacttattttggcattggttttgatattcataaattaataaaaaaaaagaaactatatttaggaggaataaaagtaccatttcattcaggtctcaaaggtcattcagatggagatgtaatcttacatgcgatcatcgatgcattattgggagctatgaaaaaaaaagatattggtactttttttccaagtaataaaaaaaaatttaaaaatataagatcaccaaaaatgttaaaacctattttaactaatttaaataaagaaaatttttcaataaataatctggatataaatctaatttgtgaaagacctaaagtttctaaatatcgaaataaaataattgattcaatatcaaaacttatggacttgaggaaagataaaattaatctaaaaggtaaaactgtagaaaaaattggtctaataggaaaagaaaatgctattgcatgtgaaacaatagtttcaattagtaaatatgaataaa

SEQ ID NO: 256076 - DNA, 268 bp, Unknown
  Bacterial polypeptide expressing nucleotide sequence isolated from the Sargasso Sea
ttggaaaaagatgatttaaattgtgaactactagatcgaaacgaactttttgcagtccagacaccccagggttttcgttttaaggatctctgggaagcatcgttaaaatcccgcgaagaaaattgggatgtcacggatgatgcttctatgctggaaaaaatggggaaatccgtacaccctgtaccgggagaaatgggtaatctgaaaatcaccacggctgaggatctggattacgcccgacatcaatttcaatcttcaaaactttgac

SEQ ID NO: 256077 - DNA, 646 bp, Unknown
  Bacterial polypeptide expressing nucleotide sequence isolated from the Sargasso Sea
tatgcaaaatgcactggtaattctagcaggtggaaaagggaggagatttggtcaaaaaactccaaaacaattttttcaaataaataatatttctattttagatattttaatttcacgattagatttgagtgatttcactcacattgtattatgtatggataaaaaatatagaaaaaattttaaaaaaaaattaagttctaaattagagaataaaaaaattatattttcagacccaggtaattcaaggcaaaaatcatcctataattcattattaaaattaaataattttaaaattcaaaatgtcttgatacatgatgcggctagacctttttgcagtaataaattaatcaaaagaatcttaaattcactaaaaaaaacaaattgctgcataccgtttataaattatagtgatagaaaaaaaattaaaactaaaaaaaataactttgataaagatactttaatttataatatacaaactcctcaaggatttaattacaaatcaattcttaaagcacatcaaacgtttaaaaatttcgatcttgctgatgatgcgagcttattagaaaaatctggattaaaaataaaaatgattaaaggagaaaaaagcaatataaaaataacgtacaaagaggatttaatatttatg

SEQ ID NO: 256078 - DNA, 688 bp, Unknown
  Bacterial polypeptide expressing nucleotide sequence isolated from the Sargasso Sea
tatgaagacacacgcaatccttctagcgggaggatctagtaatcgattctctaatgaagaaaataaagtttactttccaatagggagaagaccagcgctatgttggccactagaaactttagagaaatctagcatcattgattcgatagtccttgtcattagagaggaagattgggacaaaaccaacaatgtaattgaattagttgatccaaaaaaattaatcggagtaacagttggaggtaattcgagacatgaaagtgagtatgaaggattaaattatttaaaagaatcaaacaaagttgaagatcaagatctaatcttgattcacgatggtgcaagaccttttctgccggaacctcttataaatgaattaataaatgtagctattaagtatggtggttcagctcctggctttagttcaataaatttaagtcaaaaagagaatagtgatgaagctgaagaagatgagacaattatcgaagtccagacgccacaagtatttccagcaaaagaactatgggaatcttacgaactagccaaattagataattggcaagcagtagatactacagaatgtgtttctaagtacttaggaatggaagcaatgattatcccgggtgaccctagaaatatgaaagttacatatatagaggacatatttgagctagaaaagcttatagaagagtaa

SEQ ID NO: 256079 - DNA, 607 bp, Unknown
  Bacterial polypeptide expressing nucleotide sequence isolated from the Sargasso Sea
tgtgacagccttaaatgaaaattataagcatcctgcattaccgaaacacgtagataaaaaagatattttaaaagggatgtacttatataaagaatttcataataaaggaaaagcgactgttcagttgttaggttcaggcgcaattttaaatgaaattatcaaagcagctgacatattaagtaaggaattttctattgattgtgatgtttggagtgtaactagctttagcgaattacagcgagatggaattgaagttgagagaaataatatgcttaatcctgataaagataggaaattaacttatctagaaaaatgtctaaaaggtaggtcgggaccaattattgcagcaaccgactatgttagagttcatgcagatcaaattagaccatatataaaatctaatttttactcacttggaactgacggttatggtagaagcgatacaagaaaaaaattgcgtgaattttttgaggtaaataaagagtctattgtagtaaataccttaagtgctctttctagcgagcagaagatttcatctaaagttgtcaagcaagcaatgagtaagtataaaataaaagttgataagccgattcctactaaagtttaa

SEQ ID NO: 256080 - DNA, 544 bp, Unknown
  Bacterial polypeptide expressing nucleotide sequence isolated from the Sargasso Sea
aatgagtttttgcctaattttattagcagcaggggatagcaaaagattcaattctaaaaccccaaaaccttacgtcaaaataggtggaaaaacactcctggaatattcattgatcaaattcagcaaaattagacaaataaagaatatgatagtggttattaacaaaaaacatggtcgttattttaaaaaaataaaaaatagaaatttgataaaaataacaggaggaaaaacaaggcaagtgtctacttataatgcattaaaatatattaaaaaaaataatattaaatgttcaaatgtgttgattcatgatgctgcgaggcctaatttttcaattcgattaataaaaaaaattattaataattcaaaaaataatagtgttataccaaaaataaatattcatgatgcattaaaacaaaatattggaaacaaaattatagttaacattcctagagaaaatttttttttaacacaaacaccacagtcatttaaatttgtaactatatttaatttacatgcaaaaaataaatttttttataaagaatga

SEQ ID NO: 256081 - DNA, 693 bp, Unknown
  Bacterial polypeptide expressing nucleotide sequence isolated from the Sargasso Sea
catggtgtacacaactgatgtggtcgttgctgctgctggacggggaaagcgagttggagcggcacagaacaaactgttgttgaacctgaatcaaaatagcgacagaaatgaaaaggctggtgaagataaactttttggaaaaaacgtcacaaccctcttggaatacggacttaaaaccttcaaagaacatcctggaatcaggaatattttcctcgtggtttccaaggaggactttcagattcttcagccttgggcagaaggggaaggctttattctggttgaaggtggtgaaaggagacaggattcggttcataaagctttggaacatatccaccaacatgacgaacttccggatatggttctgatccatgatggagctaggattttctgtactacggatctaattgacaggatccttcatgtctgccgagaatatggttctgcaattccagtaattccaatccatgatactgttcggagaatcagaactaaacaagaaccaagcaggaactggattgaaaagttggagaattcattggaaaaagatgatttaaattgtgaactactcgatcgaaacgaactttttgcagtccaaacaccccagggttttcgttttgaggatctctgggaagcatcgttaaaatcccgtgaagaaaattgggatgtcactgatgacgcttctatgctggaaaa

SEQ ID NO: 256082 - DNA, 163 bp, Unknown
  Bacterial polypeptide expressing nucleotide sequence isolated from the Sargasso Sea
gatgactgatctccgccccgggctgaccgccatcgtcccggccgcgggcatcggcagccgaatgggggccgagtgccccaaacagtatctgcagctggcgggtcgaaacattctggaacatacccctgaccggctgctctccatccagccatcgctcaggtga

SEQ ID NO: 256083 - DNA, 510 bp, Unknown
  Bacterial polypeptide expressing nucleotide sequence isolated from the Sargasso Sea
aatgaataacagtaaagttttcgttgtggttcctgctgcaggtataggcagcagaatgggaacttcctcgccaaaacaatatcttgaattgactgaaagtggacaaacagttttggctaaaagcttggaggttatttttcagagcgtgcgtgttgaaaaagcgataattgcgatagctcctggtgacgaacgatatcacagctctatagcgtccattgagaatttttgccaaatcgtggaaggcggagaccagcggatggagtctgtctctaattgcctggacactttggtaggcgaagctaacaagaaagattgggttatgatacatgatgctgctcgtccttgtgtccgtaaagaagatatagaaaaactcttggactctaggaatagctccagtgctggaggtattttggcactgccggtcacagatacacttaaattgtgtgatagtggggttattcgaggaacagtcgatagacagaaaatatggagggcactaacccctcaaat

SEQ ID NO: 256084 - DNA, 632 bp, Unknown
  Bacterial polypeptide expressing nucleotide sequence isolated from the Sargasso Sea
ggcacaggcattcctggccagccccgaaatcgactctgtgctggtggtgacgacacccggcgcacagccgctcgtgcaacgctttcccgacgcgggttttaacgcagcgaggctggtggaggtcgattgcggtggcgattcgcgccatgcatccgtcacgcaagggttggcggcgttgcgccggctgggcgcacgcgatgacgactgggtgctcgtgcacgatgcggcccgccccgggttgacgcccgccctgatcgcgcggctggtcgcggccgttgaggccgaaggcacgcaagctgcggggggcatcctggcgctgcccgtggccgacacgctcaaacgcgccgatgcggcacagcacattgttgcgaccctgccgcgcgatggcctgtggcaagcgcagacgccgcagatgtttccgcttggcctgctggagcgcgccttgcgggaggcgctgttgcagcatcgcatcgtcaccgacgaggccagcgcaattgaagccgccggttacccgccgttgcttgtgcccggcgcattgcgcaacttcaaagtgacgtatcccgatgatttcgcgctcgccgaggccatcctcgcgcagagcgcaccacccgacgaggcatcgcaagcatgaa

SEQ ID NO: 256085 - DNA, 631 bp, Unknown
  Bacterial polypeptide expressing nucleotide sequence isolated from the Sargasso Sea
atggattgtgatcccgttggcttgcatctgctgatcgttgccgccggtagtggccggcgcatgggctctgagcgcaacaagctgcttttgccgcttgaggggcgaccactgctggcctggacgttggaagcggccctggccagtcgcagcattgcgtggatcgctttggtgggtcaggagcgtgaccgccaggacatcgaagcgatcgtgtcgtcttttaaggcctctaaacccgtgcagtgggtccaggggggcgacagccgccaggcttccgtggccaatggactcacggccctgcctgagcaagctgagcatgtgctgatccatgacggtgcacgctgtctggctgaacctgcgctgtttgatcgctgcagccggtccttgctcagcacgggtgaagcactgattgcggccaccccggtggtggacaccatcaaacaagtggacgaccagcaacgcatcgtgcacactccgccgcgcgctgcgctctgggcggcccagacacctcaaggattccccgttgagcagttgcgccaggcgcaccagcgtgcccaagacgaaggttgggaagtgaccgatgacgccgccctttttgaacggctcggttggccggtgcgggtgctcgaggcct

SEQ ID NO: 256086 - DNA, 775 bp, Unknown
  Bacterial polypeptide expressing nucleotide sequence isolated from the Sargasso Sea
tttgcactctattgataaagcattaatatctaaaaaatttaaaaagattgttgtagctataaataagtctcacaaaagatatttcactaaaataaaacgtaaaaatattaaatttctccaaggaggaaaaagtcgggctgagtcatcattaaaatgtttaaaatacattaaaaaatttaagccatcaaaggttttaatccatgacgcagcgagacctgatttttcagtaaaattaatttataatattttaaaaaatttaaaaagttcaaaaggagttattccagttataaaatcgactagttcagttaaaaaaagagataaaaataaaatcaaaaatgtagatagagataaaatttttttaacacagacacctcaaggatttgattttaatactttatatcggtcacaaagattaataaataataaaacaacagatgatgcgagtctattaattaaagataatcaaaatgttaaattaatcaaaggtgaagaaaacaatactaaaattacaagtaagaatgatttaagaaaaaaatttcaaacattttatggtataggatttgatgtacatagattggttccaaaaagaaaattatatttgggcggtttattgataaaatctaaagtaggaactttgggtcattctgatggagatccagttttgcactctataacagatgcaatacttggtgcatgtaaaatgggtgatattggagagatgttttcagataagagtaaaagatttaaaaatattagatctacaatactactaaaa

SEQ ID NO: 256087 - DNA, 481 bp, Unknown
  Bacterial polypeptide expressing nucleotide sequence isolated from the Sargasso Sea
ggtgctgacctgcaccggcggcgatacccgcgccgcctcggtgctggccgggttgcaggcgctgccggaaagcgtgcgtgccgacgacttcgtgctggtgcacgacgccgcgcgcccgaacctgccggccgccgacctgggccggctgctggaggtggggcgcgccgatccggtcggcgcgatcctcgctgccccggtgcgcgacaccctcaagcgcgccggcgacgatggcggcatcgaccgcaccgaaccgcgcgagcggttgtggcgcgcgctcacgccgcagctgttccgccgccaccagttgacccgcgcgctgctggaagcgaccggcgccggtgtcgaggtgaccgacgaggccatggccatggagcgccagggtgcgcggccgctgctggtcgaaggcgacgagtgcaacttcaaggtcaccaccccggccgacctggcccgcttcgagttcgagctgtcgcggcgtgtctga

SEQ ID NO: 256088 - DNA, 780 bp, Unknown
  Bacterial polypeptide expressing nucleotide sequence isolated from the Sargasso Sea
ctccaaggtgtacacaactgatgtggtcgttgctgctgctggacggggaaagcgagttggagcggcacagaacaaactgttgttgaacctgaatcaaaatagcgacagaaatgaaatggctggtgaagataaactttttggaaaaaacgtcacaacccttttagaatacggcctcaaaacctttcaaaagcatccaggaatcaggaaaatttttctggtggtttccaagaaggacttacaaattcttcagccctgggcagaaggggaaggttttattctggttgaaggtggtgaaaggagacaggattcggttcataaagctttggaacatatccaccagcatgacgaacttccggatttggttctgatccatgatggagctaggattttctgtacaagggatctaattgacagaatccttcatgtcagcagggaatatggttctgcgattccggtaattcccatccatgatacagttcggaggatccggactaaacaagaaccgagcagggactggattgaaaagttggagaactcattggaaaaagatgatttaaattgtgaactactcaatcgaaatgaactttttgcagtccagacaccccagggttttcgttttgaggatctctggaaagcatctttaaaatcccgcgaagaaaattgggatgtcactgatgacgcttctatgctggaaaaaatggggaaatccgtccaccctgttccgggagaaatgggtaatctgaaaatcaccacggctgaggatctggattacgccagaca

SEQ ID NO: 256089 - DNA, 700 bp, Unknown
  Bacterial polypeptide expressing nucleotide sequence isolated from the Sargasso Sea
atgaccacgaaattctggctggtgatcccggccgctggcgtcggcgcgcggatggccgccgaccgccccaagcagtacctgcagatcgccggccgctgcattctcgaacataccctgcattgttttctcgatcatcccggcctgttgggcgcggtggtatgcgttgccgtggatgacccgttctggccgcagctgccactggcgcgtgatctgcgcatccgccgtgcgcctggcgggcgtgagcgcgccgactcggtgctggccgggctggactcgttactggccggtggtgccgatagcgatgattgggtgctggtgcacgacgccgcgcgtcccaatctcacccctgcggacctggatcgcctactggacagtctgaccgatgatccggtcggcggcctgctggcggtgccggtgcgcgatacgctcaagcgtgtcggcagcgatggtcgagtgttggagaccgtggatcgtagcgtgatctggcaggcctacacaccgcagatgttccgcctgggggcgttacgcgaggcactggcgcaagcgctggaagaaggtgtggcagtgaccgatgaagcctcggccatggagtgggcagggcagtcgccccggctcatcgaaggccgggcggacaacctcaaggtcacccgcccggaagatctgcattatctacagtccatatggccgcaaggccgttgaa

SEQ ID NO: 256090 - DNA, 652 bp, Unknown
  Bacterial polypeptide expressing nucleotide sequence isolated from the Sargasso Sea
ttgagagtctccaaggtgtacacaactgatgtggtcattgctgctgctggacggggaaagcgagttggagcggcacagaacaaactgttgttgaacctgaatcaaaatagcgacagagatgaaaaggctagtgaagataaactttttggaaaaaatgtcactacccttttggaatacggccttaaaaccttccaagaacatcctggaatcaggaaaatttttctggtggtttccaaggaggactttcaaattcttcagccttgggctgaaggggaaggtttaattctggttgaaggtggtgaaaggaggcaggattcggttcataaagctttggaacatattcaccaacatgacgaacttccggatatggttttaatccatgatggagctaggattttctgctcaagggatctaattgacagaatccttcatttctgccgagaaaatggttctgcgattccggtaattccaatccatgatactgttaggagaatccaaactaaacaagaatcaagcaggaacttgattgaaaagttggagaattcattggaaaaagatgatttaaattgtgaactactcgatcgaaacgaactttttgcagtccaaacaccccagggtttttgttttgaggatctctgggaagcatcgttaa

SEQ ID NO: 256091 - DNA, 753 bp, Unknown
  Bacterial polypeptide expressing nucleotide sequence isolated from the Sargasso Sea
tttgaaagtctcgaaggtatacacaactgatgtggtcatagctgctgctggacggggaaagcgagttggagcgacacagaacaaactgttgttgaacctgaatcaaaatagcgacagaaatgaaaaggcttgtgaagataaactttttggaaaaaacgtcacaacccttttggaatacggcctcaaaaccttccaagagcatcctggaatcaggaaaattttcctggtggtttccaaggaggactttcaaattcttcagccttgggcagaaaaggaaggtttaattctggttgaaggtggtgaaaggagacaggattcggttcataaagctttggaacatatcctccagcatgacgaacttccggatatggttttgatccatgatggagctaggattttctgctcaagggatctaattgacaggatccttgatgtctgccgggaaaatggttctgcgattccggtaattcccattcatgatacagttcggaggatccggactaaacaagaaccaagcaggaactggattgaaaagttggagaaatcattggaaaaaggtgatttaaattgtgaactcctcgatcgcaatgaactttttgcagtccagacaccccagggttttcgttttgaggaactctgggaagcatcgttaaaatcccgcgaagagaattgggatgtcacggatgacgcttctatgctggaaaaaatggggaaatccgtccaccctgtaccgggagaaatgggtaatctgaa

SEQ ID NO: 256092 - DNA, 373 bp, Unknown
  Bacterial polypeptide expressing nucleotide sequence isolated from the Sargasso Sea
tcctttttgcagcttaaatttgatagatagcgtattagatgcaacagaaaaacacgatgctgcaattcctgtagttcccattaatgacactgtacgcagaataaccgggggagaaaccaaaattgtagacagaagtggattattttttgtccaaacccctcagggatttcgtcctgaactaatttatgccgcatcaatagaggcaaaggcaaaagatatagaagttacagacgacgcatccctgctagaaaaaatcccccaaagagttgcttctgtagaaggggaagtgcataatataaaaattactactccagctgatttggagcaagccagattgattataaattcaaagaatcatgttagaaacaaataa

SEQ ID NO: 256093 - DNA, 379 bp, Unknown
  Bacterial polypeptide expressing nucleotide sequence isolated from the Sargasso Sea
ggcgcccgctgcctggcggaaccggcactgttcgatcgctgcgcgatggcgctggcatcgggccaggctctgatcgccgcaacccccgtcaccgacacgatcaaacgggtggatgctgatggcgtgattacagacacgccggaccgttcggagctctgggcggctcagaccccccagggtttccaggtggaccagttgcgccagggccatgccgaggctgaggccaaggggtggactgtcaccgatgacgcgtcgctttacgaacgcttgggatggccagtgcaggtgctggatggcggaccgtcgaacatcaaagtgaccactccgtttgacctcaccgtcgctgaagcagtgctcgccctcaggcaacaagactgag

SEQ ID NO: 256094 - DNA, 864 bp, Unknown
  Bacterial polypeptide expressing nucleotide sequence isolated from the Sargasso Sea
catgaataattgttttataatactagcagcaggcgaaagtaaaagatttaattctaaaacccctaaaccttaccatttatataatggaaaacctttaattcaacactctattgataaggccaaattgtgcaaaaaaattaagaaaatcataattgtagtaaataaaaaacacaaaaaatttattaagaatttagaaataaagaacatcaaaattatacttggtggtaaaacaagggcaaaatctgcatttaattctcttcaagctataaagaaacttaatatatcaaaagttttagtgcatgatgcagcaagacctaacttttcaataaaattaatagataaaatatttaaagagttaagatttaacaattgtgtagtgccagcaattaaagttgttgactcaattaaacttaaaagtaaaaaaaaaataattaatttaaatagaaataatgtttatttaactcaaacaccacaaggttttgattttaaagctttgtacaaacttcaaaatcataaaagttctaaaatcacagatgatgcaaacttattcattgcagctggaaaaaaaatcaagttaattaatggtgaaattaataataagaaaatcacaataaattcagatattaaagttaataaatctattaattatggaattggttttgatgttcatagattagttcctaaaagaaaattgtttttaggtggcattaaaattccatcaaatttaggaacattaggacattccgatggggatccggttcttcacgccgtttctgattcaattcttggcgcgtgcaaaatgggagatattggtgaaaaattttcagataaaaataaaaaatataaaaatattagatcaacaat

SEQ ID NO: 256095 - DNA, 691 bp, Unknown
  Bacterial polypeptide expressing nucleotide sequence isolated from the Sargasso Sea
atgaccgctattcctgctattgcgactgtgatcccggccgctggtgttggcaaacgaatgcaagcggataagcccaagcagtatctgcaactttgtggcctgactgtgttggagcaaacgctgcatcgcttaaaacaagttcctgctttacaacaattttatctggcgctgagtccggatgactcttattttcctgcattgcctctggcgaatgacccgaagattcaacgcctgaatggtggcgctgaacgcgccaattcagtgcttaacgctttgctacagattgacgcgcagcagtacccatgggtgctggtgcatgacgccgcccgccctgcagtgcgggtcagtgatatcgagcttttgattcagagctgtattcaacaagggcaaggcggcattttagccacgcctgtgcgggataccatgaaacgtggttctgacactgtacagcatacggttgatcgggctggtttatggcatgcctatacgccgcagttgtttccgacagcgcagctcaaggatgcattgcaacaagctttagctcagggcgtggctattactgatgaagccagcgctatggaatgggcaggattgcctgtacttttggtgcagggccatgttgacaatatcaaaattactcaggctgaagatttagctttggccgctttttatctggagcattctgtatgat

SEQ ID NO: 256096 - DNA, 847 bp, Unknown
  Bacterial polypeptide expressing nucleotide sequence isolated from the Sargasso Sea
atgattaaaaaaggaattgtattagctggtggtattggatcaagaatgagtcctattacaaaggcggtcaataaacagctactaccgatttatgacaagcctttaattttttaccctatatcaatattaatgttagcaggaatcagagatatactaatagttgttaatagaggtcaaataggtcaatttaaaaaaattttacctaatggaaataatttagggattaaaattagttatgttgaacaaaataaacctagaggtttgccagatgccttcatcgttggtgaaaagtttataggcaaagataatgttgctcttattttaggtgataactttttttacggtcaaagtcttacaaaaaaacttaaagagtgtgttaagttaaataaaggagcaaaagtttttttacatcctgttaaaaagcctcaaatgtatggagtagctacagtaaataaaaaaaaagttataaagctagtagaaaaaccaaaaaaaacaaattcaaatcttgcaataacagggctgtatttttttgataacaaggtaataaattatagtaaatcactcagaccgtctaaaagaaaagaagtagaaattgtagatcttttgaacaaatacaaaaaaaataataatttaaaagcggaattcattggtagaggtggtgcatggctagatgcgggaagtataaataatttttacgaagctacatcatttgtatcagcattagaaaatagacaaggtttaaaaattgcttgtttggaagaaattgcaaaaaacaataattggattaacaacaagataattaaaaaagcaataaaattctatggaaagtgtgagtactctaaatatc
